(19) United States
(12) Patent Application Publication
(10) Pub. No.: US 2007/0224595 A1
(43) Pub. Date: Sep. 27, 2007

(54) Nucleic acid molecules and other molecules associated with plants

(76) Inventors: Scott E. Andersen, St. Louis, MO (US); Joseph R. Byrum, Des Moines, IA (US); Robert C. De La Pena, Ballwin, MO (US)

Correspondence Address: Lawrence M. Lavin, Jr.;Monsanto Company, 800 N. Lindbergh Blvd., Mailzone E2NA, St. Louis, MO, 63167, US

(21) Appl. No.: 10/626,717

(22) Filed: Jul. 25, 2003

Related U.S. Application Data
(63) Continuation of application No. 10/304,123, filed on Nov. 26, 2002, now abandoned.
Application No. 10/304,123 is a continuation of application No. 09/594,596, filed on Jun. 15, 2000, now abandoned.

(51) Int. Cl. C12Q 1/68; C07H 21/04

(52) U.S. Cl. 435/6; 536/23.6

(57) ABSTRACT

Expressed Sequence Tags (ESTs) isolated from wheat are disclosed. The ESTs provide a unique molecular tool for the targeting and isolation of novel genes for plant protection and improvement. The disclosed ESTs have utility in the development of new strategies for understanding critical plant developmental and metabolic pathways. The disclosed ESTs have particular utility in isolating genes and promoters, identifying and mapping the genes involved in developmental and metabolic pathways, and determining gene function. Sequence homology analyses using the ESTs provided in the present invention, will result in more efficient gene screening for desirable agronomic traits. An expanding database of these select pieces of the plant genomics puzzle will quickly expand the knowledge necessary for subsequent functional validation, a key limitation in current plant biotechnology efforts.

### CROSS-REFERENCE TO RELATED APPLICATIONS

[0001] This application claims priority under 35 U.S.C. §120 as a continuation of U.S. patent application Ser. No. 10/304,123, filed Nov. 26, 2002 (abandoned), which is a continuation of Ser. No. 09/594,596 filed Jun. 15, 2000 (abandoned), the disclosures of which are herein incorporated by reference in their entireties for all purposes.

### INCORPORATION OF SEQUENCE LISTING

[0002] This application contains a sequence listing, which is contained on three identical CD-ROMs: Copy 1, Copy 2 and a Computer Readable Form (CRF), all of which are herein incorporated by reference. All three CD-ROMs each contain one file named pa_{—}00293.txt which is 6,736,203 bytes in size (measured in MS-DOS), and which was created on Jul. 25 25, 2003, herein incorporated by reference.

### FIELD OF THE INVENTION

[0003] The present invention is in the field of plant biochemistry. More specifically the invention relates to nucleic acid molecules that encode proteins and fragments of proteins produced in plant cells, in particular, wheat plants. The invention also relates to proteins and fragments of proteins so encoded and antibodies capable of binding the proteins. The invention also relates to methods of using the nucleic acid molecules, proteins and fragments of proteins.

### BACKGROUND OF THE INVENTION

I. Expressed Sequence Tag Nucleic Acid Molecules

[0004] Expressed sequence tags, or ESTs, are short sequences of randomly selected clones from a cDNA (or complementary DNA) library which are representative of the cDNA inserts of these randomly selected clones. McCombie, et al., Nature Genetics, 1:124-130 (1992); Kurata, et al., Nature Genetics, 8: 365-372 (1994); Okubo, et al., Nature Genetics, 2: 173-179 (1992), all of which references are incorporated herein in their entirety.

[0005] Using conventional methodologies, cDNA libraries can be constructed from the mRNA (messenger RNA) of a given tissue or organism using poly dT primers and reverse transcriptase (Efstratiadis, et al., Cell 7:279-288 (1976), the entirety of which is herein incorporated by reference; Higuchi, et al., Proc. Natl. Acad. Sci. (U.S.A.) 73:3146-3150 (1976), the entirety of which is herein incorporated by reference; Maniatis, et al., Cell 8:163 (1976) the entirety of which is herein incorporated by reference; Land, et al., Nucleic Acids Res. 9:2251-2266 (1981), the entirety of which is herein incorporated by reference; Okayama, et al., Mol. Cell. Biol. 2:161-170 (1982), the entirety of which is herein incorporated by reference; Gubler, et al., Gene 25:263 (1983), the entirety of which is herein incorporated by reference).

[0006] Several methods may be employed to obtain full-length cDNA constructs. For example, terminal transferase can be used to add homopolymeric tails of dC residues to the free 3′ hydroxyl groups (Land, et al., Nucleic Acids Res. 9:2251-2266 (1981), the entirety of which is herein incorporated by reference). This tail can then be hybridized by a poly dG oligo which can act as a primer for the synthesis of full length second strand cDNA. Okayama and Berg, report a method for obtaining full length cDNA constructs. This method has been simplified by using synthetic primer-adapters that have both homopolymeric tails for priming the synthesis of the first and second strands and restriction sites for cloning into plasmids (Coleclough, et al., Gene 34:305-314 (1985), the entirety of which is herein incorporated by reference) and bacteriophage vectors (Krawinkel, et al., Nucleic Acids Res. 14:1913 (1986), the entirety of which is herein incorporated by reference; and Han, et al., Nucleic Acids Res. 15:6304 (1987), the entirety of which is herein incorporated by reference).

[0007] These strategies have been coupled with additional strategies for isolating rare mRNA populations. For example, a typical mammalian cell contains between 10,000 and 30,000 different mRNA sequences. Davidson, Gene Activity in Early Development, 2nd ed., Academic Press, New York (1976). The number of clones required to achieve a given probability that a low-abundance mRNA will be present in a cDNA library is N=(ln(1−P))/(ln(1−l/n)) where N is the number of clones required, P is the probability desired, and l/n is the fractional proportion of the total mRNA that is represented by a single rare mRNA. (Sambrook, et al., Molecular Cloning: A Laboratory Manual, 2nd ed., Cold Spring Harbor Laboratory Press (1989), the entirety of which is herein incorporated by reference.).

[0008] A method to enrich preparations of mRNA for sequences of interest is to fractionate by size. One such method is to fractionate by electrophoresis through an agarose gel (Pennica, et al., Nature 301:214-221 (1983), the entirety of which is herein incorporated by reference). Another such method employs sucrose gradient centrifugation in the presence of an agent, such as methylmercuric hydroxide, that denatures secondary structure in RNA (Schweinfest, et al., Proc. Natl. Acad. Sci. (U.S.A.) 79:4997-5000 (1982), the entirety of which is herein incorporated by reference).

[0009] A frequently adopted method is to construct equalized or normalized cDNA libraries (Ko, Nucleic Acids Res. 18:5705-5711 (1990), the entirety of which is herein incorporated by reference; Patanjali, S. R. et al., Proc. Natl. Acad. Sci. (U.S.A) 88:1943-1947 (1991), the entirety of which is herein incorporated by reference). Typically, the cDNA population is normalized by subtractive hybridization. Schmid, et al., J. Neurochem. 48:307-312 (1987) the entirety of which is herein incorporated by reference; Fargnoli, et al., Anal. Biochem. 187:364-373 (1990) the entirety of which is herein incorporated by reference; Travis, et al., Proc. Natl. Acad. Sci (U.S.A.) 85:1696-1700 (1988) the entirety of which is herein incorporated by reference; Kato, Eur. J. Neurosci. 2:704 (1990); and Schweinfest, et al., Genet. Anal. Tech. Appl. 7:64 (1990), the entirety of which is herein incorporated by reference). Subtraction represents another method for reducing the population of certain sequences in the cDNA library. Swaroop, et al., Nucleic Acids Res. 19:1954 (1991), the entirety of which is herein incorporated by reference).

[0010] ESTs can be sequenced by a number of methods. Two basic methods may be used for DNA sequencing, the chain termination method of Sanger et al., Proc. Natl. Acad. Sci. (U.S.A.) 74: 5463-5467 (1977), the entirety of which is herein incorporated by reference and the chemical degradation method of Maxam and Gilbert, Proc. Nat. Acad. Sci. (U.S.A.) 74: 560-564 (1977), the entirety of which is herein incorporated by reference. Automation and advances in technology such as the replacement of radioisotopes with fluorescence-based sequencing have reduced the effort required to sequence DNA (Craxton, Methods, 2: 20-26 (1991), the entirety of which is herein incorporated by reference; Ju et al., Proc. Natl. Acad. Sci. (U.S.A.) 92: 4347-4351 (1995), the entirety of which is herein incorporated by reference; Tabor and Richardson, Proc. Natl. Acad. Sci. (U.S.A.) 92: 6339-6343 (1995), the entirety of which is herein incorporated by reference). Automated sequencers are available from, for example, Pharmacia Biotech, Inc., Piscataway, N.J. (Pharmacia ALF), LT-COR, Inc., Lincoln, Nebr. (LI-COR 4,000) and Millipore, Bedford, Mass. (Millipore BaseStation).

[0011] In addition, advances in capillary gel electrophoresis have also reduced the effort required to sequence DNA and such advances provide a rapid high resolution approach for sequencing DNA samples (Swerdlow and Gesteland, Nucleic Acids Pes. 18:1415-1419 (1990); Smith, Nature 349:812-813 (1991); Luckey et al., Methods Enzymol. 218:154-172 (1993); Lu et al., J. Chromatog. A. 680:497-501 (1994); Carson et al., Anal. Chem. 65:3219-3226 (1993); Huang et al., Anal. Chem. 64:2149-2154 (1992); Kheterpal et al., Electrophoresis 17: 1852-1859 (1996); Quesada and Zhang, Electrophoresis 17:1841 -1851 (1996); Baba, Yakugaku Zasshi 117:265-281 (1997), all of which are herein incorporated by reference in their entirety).

[0012] ESTs longer than 150 bases have been found to be useful for similarity searches and mapping. (Adams, et al., Science 252:1651-1656 (1991), herein incorporated by reference.) EST sequences normally range from 150-450 bases. This is the length of sequence information that is routinely and reliably generated using single run sequence data. Typically, only single run sequence data is obtained from the cDNA library, Adams, et al., Science 252:1651-1656 (1991). Automated single run sequencing typically results in an approximately 2-3% error or base ambiguity rate. (Boguski, et al, Nature Genetics, 4:332-333 (1993), the entirety of which is herein incorporated by reference).

[0013] EST databases have been constructed or partially constructed from, for example, C. elegans (McCombrie, et al., Nature Genetics 1: 124-131 (1992), human liver cell line HepG2 (Okubo, et al., Nature Genetics 2:173-179 (1992)), human brain RNA (Adams, et al., Science 252:1651-1656 (1991); Adams, et al., Nature 355:632-635 (1992)), Arabidopsis, (Newman, et al., Plant Physiol. 106:1241-1255 (1994)); and rice (Kurata, et al., Nature Genetics 8:365-372 (1994).

II. Sequence Comparisons

[0014] A characteristic feature of a protein or DNA sequence is that it can be compared with other known protein or DNA sequences. Sequence comparisons can be undertaken by determining the similarity of the test or query sequence with sequences in publicly available or propriety databases (“similarity analysis”) or by searching for certain motifs (“intrinsic sequence analysis”) (e.g. cis elements) (Coulson, Trends in Biotechnology, 12: 76-80 (1994), the entirety of which is herein incorporated by reference; Birren, et al., Genome Analysis, 1: 543-559 (1997), the entirety of which is herein incorporated by reference).

[0015] Similarity analysis includes database search and alignment. Examples of public databases include the DNA Database of Japan (DDBJ) (www-ddbj.nig.ac.jp/); Genebank (www-ncbi.nlm.nih.gov/web/Genbank/Index.html); and the European Molecular Biology Laboratory Nucleic Acid Sequence Database (EMBL) (www-ebi.ac.uk/ebi_docs/embl_db.html). A number of different search algorithms have been developed, one example of which are the suite of programs referred to as BLAST programs. There are five implementations of BLAST, three designed for nucleotide sequences queries (BLASTN, BLASTX, and TBLASTX) and two designed for protein sequence queries (BLASTP and TBLASTN) (Coulson, Trends in Biotechnology, 12: 76-80 (1994); Birren, et al., Genome Analysis, 1: 543-559 (1997)).

[0016] BLASTN takes a nucleotide sequence (the query sequence) and its reverse complement and searches them against a nucleotide sequence database. BLASTN was designed for speed, not maximum sensitivity, and may not find distantly related coding sequences. BLASTX takes a nucleotide sequence, translates it in three forward reading frames and three reverse complement reading frames, and then compares the six translations against a protein sequence database. BLASTX is useful for sensitive analysis of preliminary (single-pass) sequence data and is tolerant of sequencing errors (Gish and States, Nature Genetics, 3: 266-272 (1993), the entirety of which is herein incorporated by reference). BLASTN and BLASTX may be used in concert for analyzing EST data (Coulson, Trends in Biotechnology, 12: 76-80 (1994); Birren, et al., Genome Analysis, 1: 543-559 (1997).

[0017] Given a coding nucleotide sequence and the protein it encodes, it is often preferable to use the protein as the query sequence to search a database because of the greatly increased sensitivity to detect more subtle relationships. This is due to the larger alphabet of proteins (20 amino acids) compared with the alphabet of nucleic acid sequences (4 bases), where it is far easier to obtain a match by chance. In addition, with nucleotide alignments, only a match (positive score) or a mismatch (negative score) is obtained, but with proteins, the presence of conservative amino acid substitutions can be taken into account. Here, a mismatch may yield a positive score if the non-identical residue has physical/chemical properties similar to the one it replaced. Various scoring matrices are used to supply the substitution scores of all possible amino acid pairs. A general purpose scoring system is the BLOSUM62 matrix (Henikoff and Henikoff, Proteins, 17: 49-61 (1993), the entirety of which is herein incorporated by reference), which is currently the default choice for BLAST programs. BLOSUM62 is tailored for alignments of moderately diverged sequences and thus may not yield the best results under all conditions. Altschul, J. Mol. Biol. 36: 290-300 (1993), the entirety of which is herein incorporated by reference, uses a combination of three matrices to cover all contingencies. This may improve sensitivity, but at the expense of slower searches. In practice, a single BLOSUM62 matrix is often used but others (PAM40 and PAM250) may be attempted when additional analysis is necessary. Low PAM matrices are directed at detecting very strong but localized sequence similarities, whereas high PAM matrices are directed at detecting long but weak alignments between very distantly related sequences.

[0018] Homologues in other organisms are available that can be used for comparative sequence analysis. Multiple alignments are performed to study similarities and differences in a group of related sequences. CLUSTAL W is a multiple sequence alignment package available that performs progressive multiple sequence alignments based on the method of Feng and Doolittle, J. Mol. Evol. 25: 351-360 (1987), the entirety of which is herein incorporated by reference. Each pair of sequences is aligned and the distance between each pair is calculated; from this distance matrix, a guide tree is calculated, and all of the sequences are progressively aligned based on this tree. A feature of the program is its sensitivity to the effect of gaps on the alignment; gap penalties are varied to encourage the insertion of gaps in probable loop regions instead of in the middle of structured regions. Users can specify gap penalties, choose between a number of scoring matrices, or supply their own scoring matrix for both the pairwise alignments and the multiple alignments. CLUSTAL W for UNIX and VMS systems is available at: ftp.ebi.ac.uk. Another program is MACAW (Schuler et al., Proteins, Struct. Func. Genet, 9:180-190 (1991), the entirety of which is herein incorporated by reference, for which both Macintosh and Microsoft Windows versions are available. MACAW uses a graphical interface, provides a choice of several alignment algorithms, and is available by anonymous ftp at: ncbi.nlm.nih.gov (directory/pub/macaw).

[0019] Sequence motifs are derived from multiple alignments and can be used to examine individual sequences or an entire database for subtle patterns. With motifs, it is sometimes possible to detect distant relationships that may not be demonstrable based on comparisons of primary sequences alone. Currently, the largest collection of sequence motifs in the world is PROSITE (Bairoch and Bucher, Nucleic Acid Research, 22: 3583-3589 (1994), the entirety of which is herein incorporated by reference.) PROSITE may be accessed via either the ExPASy server on the World Wide Web or anonymous ftp site. Many commercial sequence analysis packages also provide search programs that use PROSITE data.

[0020] A resource for searching protein motifs is the BLOCKS E-mail server developed by S. Henikoff, Trends Biochem Sci., 18:267-268 (1993), the entirety of which is herein incorporated by reference; Henikoff and Henikoff, Nucleic Acid Research, 19:6565-6572 (1991), the entirety of which is herein incorporated by reference; Henikoff and Henikoff, Proteins, 17: 49-61 (1993). BLOCKS searches a protein or nucleotide sequence against a database of protein motifs or “blocks.” Blocks are defined as short, ungapped multiple alignments that represent highly conserved protein patterns. The blocks themselves are derived from entries in PROSITE as well as other sources. Either a protein or nucleotide query can be submitted to the BLOCKS server; if a nucleotide sequence is submitted, the sequence is translated in all six reading frames and motifs are sought in these conceptual translations. Once the search is completed, the server will return a ranked list of significant matches, along with an alignment of the query sequence to the matched BLOCKS entries.

[0021] Conserved protein domains can be represented by two-dimensional matrices, which measure either the frequency or probability of the occurrences of each amino acid residue and deletions or insertions in each position of the domain. This type of model, when used to search against protein databases, is sensitive and usually yields more accurate results than simple motif searches. Two popular implementations of this approach are profile searches (such as GCG program ProfileSearch) and Hidden Markov Models (HMMs) (Krough et al., J. Mol. Biol. 235:1501-1531 (1994); Eddy, Current Opinion in Structural Biology 6.361-365 (1996), both of which are herein incorporated by reference in their entirety). In both cases, a large number of common protein domains have been converted into profiles, as present in the PROSITE library, or HHM models, as in the Pfam protein domain library (Sonnhammer et al., Proteins 28:405-420 (1997), the entirety of which is herein incorporated by reference). Pfam contains more than 500 HMM models for enzymes, transcription factors, signal transduction molecules, and structural proteins. Protein databases can be queried with these profiles or HMM models, which will identify proteins containing the domain of interest. For example, HMMSW or HMMFS, two programs in a public domain package called HMMER (Sonnhammer et al., Proteins 28:405-420 (1997)) can be used.

[0022] PROSITE and BLOCKS represent collected families of protein motifs. Thus, searching these databases entails submitting a single sequence to determine whether or not that sequence is similar to the members of an established family. Programs working in the opposite direction compare a collection of sequences with individual entries in the protein databases. An example of such a program is the Motif Search Tool, or MOST (Tatusov et al. Proc. Natl. Acad. Sci. 91: 12091-12095 (1994), the entirety of which is herein incorporated by reference.) On the basis of an aligned set of input sequences, a weight matrix is calculated by using one of four methods (selected by the user); a weight matrix is simply a representation, position by position in an alignment, of how likely a particular amino acid will appear. The calculated weight matrix is then used to search the databases. To increase sensitivity, newly found sequences are added to the original data set, the weight matrix is recalculated, and the search is performed again. This procedure continues until no new sequences are found.

### SUMMARY OF THE INVENTION

[0023] The present invention provides a substantially purified nucleic acid molecule that encodes a wheat protein or fragment thereof comprising a nucleic acid sequence selected from the group consisting of SEQ ID NO: 1 through SEQ ID NO: 10952.

[0024] The present invention also provides one or more substantially purified nucleic acid molecules comprising a nucleic acid sequence selected from the group consisting of SEQ ID NO: 1 through SEQ ID NO: 10952 or complements thereof.

[0025] The present invention also provides a substantially purified wheat protein or fragment thereof, wherein said wheat protein is encoded by a nucleic acid molecule that comprises a nucleic acid sequence selected from the group consisting of SEQ ID NO: 1 through SEQ ID NO: 10952.

[0026] The present invention further provides a substantially purified protein, peptide; or fragment thereof encoded by a nucleic acid sequence which specifically hybridizes to a nucleic acid molecule comprising a nucleic acid sequence selected from the group consisting of a complement of SEQ ID NO: 1 through SEQ ID NO:10952.

[0027] The present invention further provides a substantially purified antibody capable of specifically binding to a protein or fragment thereof encoded by a nucleic acid sequence which specifically hybridizes to a nucleic acid molecule having a nucleic acid sequence selected from the group consisting of a complement of SEQ ID NO: 1 through SEQ ID NO: 10952.

[0028] The present invention also provides a transformed plant transformed to contain a nucleic acid molecule which comprises: (A) an exogeneous promoter region which functions in plant cells to cause the production of an mRNA molecule; which is linked to (B) a structural nucleic acid molecule, wherein said structural nucleic acid molecule comprises a nucleic acid molecule that encodes a protein, peptide, or fragment thereof which hybridizes to a nucleic acid sequence selected from the group consisting of a complement of SEQ ID NO: 1 through SEQ ID NO: 10952 expressed in an effective amount to produce a desirable agronomic effect; which is linked to (C) a 3′ non-translated sequence that functions in plant cells to cause the termination of transcription and the addition of polyadenylated ribonucleotides to the 3′ end of the mRNA sequence.

[0029] The present invention also provides a transformed plant cell containing a nucleic acid molecule whose non-transcribed strand encodes a protein or fragment thereof, wherein the transcribed strand of said nucleic acid is complementary to a nucleic acid molecule that encodes a protein or fragment thereof. The present invention also provides bacterial, viral, microbial, and plant cells comprising a nucleic acid molecule of the present invention

[0030] The present invention also provides a method of producing a plant containing one or more proteins encoded by sequences comprising SEQ ID NO: 1 or complement thereof through SEQ ID NO:10952 or complements thereof, expressed in a sufficient amount and/or fashion to produce a desirable agronomic effect.

[0031] In accomplishing the foregoing, there is provided, in accordance with one aspect of the present invention, methods of producing genetically transformed plants, comprising the steps of:
[0032] (a) inserting into the genome of a plant cell a recombinant, double-stranded DNA molecule comprising
   [0033] (i) a promoter which functions in plant cells to cause the production of an RNA sequence,
   [0034] (ii) a structural DNA sequence that causes the production of an RNA sequence which encodes a desired protein.
   [0035] (iii) a 3′ non-translated DNA sequence which functions in plant cells to cause the addition of polyadenylated nucleotides to the 3′ end of RNA sequence; where the promoter is homologous or heterologous with respect to the coding sequence and adapted to cause sufficient expression of a protein in desired plant tissues to enhance the agronomic utility of a plant transformed with said gene.
[0036] (b) obtaining a transformed plant cell with said nucleic acid molecule that encodes one or more proteins, wherein said nucleic acid molecule is transcribed and results in expression of said protein(s); and
[0037] (c) regenerating from the transformed plant cell a genetically transformed plant

[0038] The present invention also encompasses differentiated plants, seeds, and progeny comprising said transformed plant cells and which exhibit novel properties of agronomic significance.

[0039] The present invention also provides a method of producing a plant containing reduced levels of a protein comprising: (A) transforming a plant cell with a nucleic acid molecule that encodes a protein, wherein said nucleic acid molecule is transcribed and results in co-suppression of endogenous protein synthesis activity, and (B) regenerating plants and producing subsequent progeny from the transformed plant.

[0040] The present invention also provides a method of determining an association between a polymorphism and a plant trait comprising: (A) hybridizing a nucleic acid molecule specific for a polymorphism to genetic material of a plant, wherein said nucleic acid molecule comprising a nucleic acid sequence selected from the group consisting of SEQ ID NO: 1 through SEQ ID NO:10952 or complements thereof; and (B) calculating the degree of association between the polymorphism and the plant trait.

[0041] The present invention also provides a method of isolating a genetic region, or nucleic acid that encodes a protein or fragment thereof comprising: (A) incubating under conditions permitting nucleic acid hybridization: a marker nucleic acid molecule, preferably an EST, with a complementary nucleic acid molecule obtained from a plant cell or plant tissue; (B) permitting hybridization between said marker nucleic acid molecule, preferably an EST, and said complementary nucleic acid molecule obtained from said plant cell or plant tissue; and (C) isolating said complementary nucleic acid molecule.

[0042] The present invention also provides a method for determining a level or pattern in a plant cell of a protein in a plant comprising: (A) incubating, under conditions permitting nucleic acid hybridization, a marker nucleic acid molecule, the marker nucleic acid molecule selected from the group of marker nucleic acid molecules which specifically hybridize to a nucleic acid molecule having the nucleic acid sequence selected from the group consisting of SEQ ID NO: 1 through SEQ ID NO: 10952 or complements thereof or fragments of either, with a complementary nucleic acid molecule obtained from the plant cell or plant tissue, wherein nucleic acid hybridization between the marker nucleic acid molecule and the complementary nucleic acid molecule obtained from the plant cell or plant tissue permits the detection of an mRNA for the enzyme; (B) permitting hybridization between the marker nucleic acid molecule and the complementary nucleic acid molecule obtained from the plant cell or plant tissue; and (C) detecting the level or pattern of the complementary nucleic acid, wherein the detection of the complementary nucleic acid is predictive of the level or pattern of the protein.

[0043] The present invention also provides a method for determining the level or pattern of a protein in a plant cell or plant tissue comprising: (A) incubating under conditions permitting nucleic acid hybridization: a marker nucleic acid molecule, the marker nucleic acid molecule comprising a nucleotide sequence selected from the group consisting of SEQ ID NO: 1 through SEQ ID NO: 10952 or complements thereof, with a complementary nucleic acid molecule obtained from a plant cell or plant tissue, wherein nucleic acid hybridization between the marker nucleic acid molecule, and the complementary nucleic acid molecule obtained from the plant cell or plant tissue permits the detection of said protein; (B) permitting hybridization between the marker nucleic acid molecule and the complementary nucleic acid molecule obtained from the plant cell or plant tissue; and (C) detecting the level or pattern of the complementary nucleic acid, wherein the detection of said complementary nucleic acid is predictive of the level or pattern of the protein synthesis.

[0044] The present invention also provides a method for determining a level or pattern of a protein in a plant cell or plant tissue which comprises assaying the concentration of a molecule, whose concentration is dependent upon the expression of a gene, the gene having a nucleic acid sequence which specifically hybridizes to a protein marker nucleic acid molecule, the molecule being present in a plant cell or plant tissue, in comparison to the concentration of that molecule present in a plant cell or plant tissue with a known level or pattern of said protein, wherein an assayed concentration of the molecule is compared to the assayed concentration of the molecule in a plant cell or plant tissue with a known level or pattern of said protein.

[0045] The present invention also provides a method of determining a mutation in a plant whose presence is predictive of a mutation affecting a level or pattern of a protein comprising the steps: (A) incubating, under conditions permitting nucleic acid hybridization, a marker nucleic acid, the marker nucleic acid selected from the group of marker nucleic acid molecules which specifically hybridize to a nucleic acid molecule consisting of the nucleic acid sequence selected from the group consisting of SEQ ID NO: 1 through SEQ ID NO: 10952 or complements thereof or fragments of either and a complementary nucleic acid molecule obtained from the plant, wherein nucleic acid hybridization between the marker nucleic acid molecule and the complementary nucleic acid molecule obtained from the plant permits the detection of a polymorphism whose presence is predictive of a mutation affecting the level or pattern of the protein in the plant; (B) permitting hybridization between the marker nucleic acid molecule and the complementary nucleic acid molecule obtained from the plant; and (C) detecting the presence of the polymorphism, wherein the detection of the polymorphism is predictive of the mutation.

[0046] The present invention also provides a method for determining a mutation in a plant whose presence is predictive of a mutation affecting the level or pattern of protein synthesis comprising the steps: (A) incubating under conditions permitting nucleic acid hybridization: a marker nucleic acid molecule, the marker nucleic acid molecule comprising a nucleic acid molecule that is linked to gene, the gene having a nucleic acid sequence which specifically hybridizes to a sequence selected from the group consisting of SEQ ID NO: 1 through SEQ ID NO: 10952 and complements thereof, and a complementary nucleic acid molecule obtained from a plant tissue or plant cell of the plant, wherein nucleic acid hybridization between the marker nucleic acid molecule and the complementary nucleic acid molecule obtained from the plant permits the detection of a polymorphism whose presence is predictive of a mutation affecting said level or pattern of a protein synthesis in the plant; (B) permitting hybridization between said marker nucleic acid molecule and said complementary nucleic acid molecule obtained from said plant; and; (C) detecting the presence of the polymorphism, wherein the detection Of the polymorphism is predictive of the mutation.

[0047] The present invention also provides a method for reducing expression of a protein in a plant cell, the method comprising: growing a transformed plant cell containing a nucleic acid molecule whose non-transcribed strand encodes a protein or fragment thereof, wherein the transcribed strand of said nucleic acid is complementary to a nucleic acid molecule that encodes the protein in said plant cell, and whereby the strand that is complementary to the nucleic acid molecule that encodes the protein reduces or depresses expression of the protein.

[0048] The present invention provides wheat nucleic acid molecules for use as molecular tags to isolate genetic regions (i.e. promoters and flanking sequences), isolate genes, map genes, and determine gene function. The present invention further provides wheat nucleic acid molecules for use in determining if genes are members of a particular gene family.

[0049] The present invention also provides a method of obtaining full length genes using wheat ESTs or complements thereof or fragments of either.

[0050] The present invention also provides a method of isolating promoters and flanking sequences using wheat ESTs or complements thereof or fragments of either.

[0051] The present invention also provides wheat ESTs or complements thereof or fragments of either for use in marker-assisted breeding programs.

[0052] The present invention also provides a method of identifying tissues comprising hybridizing nucleic acids from the tissue with wheat ESTs or complements thereof or fragments of either.

[0053] The present invention also provides a method for production of antibodies targeted against the proteins, peptides, or fragments produced by the disclosed or complements thereof or fragments of either.

[0054] The present invention also provides a method for the transformation and regeneration of plants comprising sequences hybridizable to the disclosed ESTs or complements thereof or fragments of either.

[0055] The present invention also provides a method of modifying plant protein expression by inserting in a chimeric gene sense or antisense constructs of the wheat ESTs.

### DETAILED DESCRIPTION OF THE INVENTION

Agents

[0056] (a) Nucleic Acid Molecules

[0057] Agents of the present invention include nucleic acid molecules and more specifically EST nucleic acid molecules or nucleic acid fragment molecules thereof. Fragment EST nucleic acid molecules may encode significant portion(s) of, or indeed most of, the EST nucleic acid molecule. Alternatively, the fragments may comprise smaller oligonucleotides (having from about 15 to about 250 nucleotide residues, and more preferably, about 15 to about 30 nucleotide residues).

[0058] A subset of the nucleic acid molecules of the present invention includes nucleic acid molecules that are marker molecules. Another subset of the nucleic acid molecules of the present invention include nucleic acid molecules that encode a protein or fragment thereof. Another subset of the nucleic acid molecules of the present invention are EST molecules.

[0059] The term “substantially purified”, as used herein, refers to a molecule separated from substantially all other molecules normally associated with it in its native state. More preferably a substantially purified molecule is the predominant species present in a preparation. A substantially purified molecule may be greater than 60% free, preferably 75% free, more preferably 90% free, and most preferably 95% free from the other molecules (exclusive of solvent) present in the natural mixture. The term “substantially purified” is not intended to encompass molecules present in their native state.

[0060] The agents of the present invention will preferably be “biologically active” with respect to either a structural attribute, such as the capacity of a nucleic acid to hybridize to another nucleic acid molecule, or the ability of a protein to be bound by antibody (or to compete with another molecule for such binding). Alternatively, such an attribute may be catalytic, and thus involve the capacity of the agent to mediate a chemical reaction or response.

[0061] The agents of the present invention may also be recombinant. As used herein, the term recombinant means any agent (e.g. DNA, peptide etc.), that is, or results, however indirect, from human manipulation of a nucleic acid molecule.

[0062] It is understood that the agents of the present invention may be labeled with reagents that facilitate detection of the agent (e.g. fluorescent labels (Prober, et al., Science 238:336-340 (1987); Albarella et al., EP 144914, chemical labels (Sheldon et al., U.S. Pat. No. 4,582,789; Albarella et al., U.S. Pat. No. 4,563,417, modified bases (Miyoshi et al., EP 119448, all of which are hereby incorporated by reference in their entirety).

[0063] It is further understood, that the present invention provides bacterial, viral, microbial, and plant cells comprising the agents of the present invention.

[0064] Nucleic acid molecules or fragment thereof of the present invention are capable of specifically hybridizing to other nucleic acid molecules under certain circumstances. As used herein, two nucleic acid molecules are said to be capable of specifically hybridizing to one another if the two molecules are capable of forming an anti-parallel, double-stranded nucleic acid structure. A nucleic acid molecule is said to be the “complement” of another nucleic acid molecule if they exhibit complete complementarity. As used herein, molecules are said to exhibit “complete complementarity” when every nucleotide of one of the molecules is complementary to a nucleotide of the other. Two molecules are said to be “minimally complementary” if they can hybridize to one another with sufficient stability to permit them to remain annealed to one another under at least conventional “low-stringency” conditions. Similarly, the molecules are said to be “complementary” if they can hybridize to one another with sufficient stability to permit them to remain annealed to one another under conventional “high-stringency” conditions. Conventional stringency conditions are described by Sambrook, et al., In: Molecular Cloning, A Laboratory Manual, 2nd Edition, Cold Spring Harbor Press, Cold Spring Harbor, N.Y. (1989), and by Haymes, et al. In: Nucleic Acid Hybridization, A Practical Approach, IRL Press, Washington, D.C. (1985), the entirety of which is herein incorporated by reference. Departures from complete complementarity are therefore permissible, as long as such departures do not completely preclude the capacity of the molecules to form a double-stranded structure. Thus, in order for an nucleic acid molecule or fragment of the present invention to serve as a primer or probe it need only be sufficiently complementary in sequence to be able to form a stable double-stranded structure under the particular solvent and salt concentrations employed.

[0065] Appropriate stringency conditions which promote DNA hybridization are, for example, 6.0×sodium chloride/sodium citrate (SSC) at about 45° C., followed by a wash of 2.0×SSC at 50° C., are known to those skilled in the art or can be found in Current Protocols in Molecular Biology, John Wiley & Sons, N.Y. (1989), 6.3;1-6.3.6. For example, the salt concentration in the wash step can be selected from a low stringency of about 2.0×SSC at 50° C. to a high stringency of about 0.2×SSC at 50° C. In addition, the temperature in the wash step can be increased from low stringency conditions at room temperature, about 22° C., to high stringency conditions at about 65° C. Both temperature and salt may be varied, or either the temperature or the salt concentration may be held constant while the other variable is changed.

[0066] In a preferred embodiment, a nucleic acid of the present invention will specifically hybridize to one or more of the nucleic acid molecules set forth in SEQ ID NO: 1 through SEQ ID NO: 10952 or complements thereof under moderately stringent conditions, for example, at about 2.0×SSC and about 65° C.

[0067] In a particularly preferred embodiment, a nucleic acid of the present invention will include those nucleic acid molecules that specifically hybridize to one or more of the nucleic acid molecules set forth in SEQ ID NO:1 through SEQ ID NO: 10952 or complements thereof under high stringency conditions.

[0068] In one aspect of the present invention, the nucleic acid molecules of the present invention have one or more of the nucleic acid sequences set forth in SEQ ID NO: 1 through SEQ ID NO:10952 or complements thereof. In another aspect of the present invention, one or more of the nucleic acid molecules of the present invention share between 100% and 90% sequence identity with one or more of the nucleic acid sequences set forth in SEQ ID NO: 1 through SEQ ID NO: 10952 or complements thereof. In a further aspect of the present invention, one or more of the nucleic acid molecules of the present invention share between 100% and 95% sequence identity with one or more of the nucleic acid sequences set forth in SEQ ID NO: 1 through SEQ ID NO:10952 or complements thereof. In a more preferred aspect of the present invention, one or more of the nucleic acid molecules of the present invention share between 100% and 98% sequence identity with one or more of the nucleic acid sequences set forth in SEQ ID NO: 1 through SEQ ID NO:10952 or complements thereof. In an even more preferred aspect of the present invention, one or more of the nucleic acid molecules of the present invention share between 100% and 99% sequence identity with one or more of the sequences set forth in SEQ ID NO: 1 through SEQ ID NO: 10952 or complements thereof. In a further, even more preferred aspect of the present invention, one or more of the nucleic acid molecules of the present invention exhibit 100% sequence identity with one or more nucleic acid molecules present within the cDNA libraries designated LIB3222, LIB3223, LIB3224, LIB3225, LIB3226, and LIB3241 (Monsanto Company, St. Louis, Mo., United States of America).

[0069] In a preferred embodiment of the present invention, a wheat protein or fragment thereof of the present invention is a homologue of another plant protein. In another preferred embodiment of the present invention, a wheat protein or fragment thereof of the present invention is a homologue of a fungal protein. In another preferred embodiment of the present invention, a wheat protein or fragment thereof of the present invention is a homologue of mammalian protein. In another preferred embodiment of the present invention, a wheat protein or fragment thereof of the present invention is a homologue of a bacterial protein. In another preferred embodiment of the present invention, a wheat protein or fragment thereof of the present invention is a homologue of an algal protein. In another preferred embodiment of the present invention, a wheat protein or fragment thereof of the present invention is a homologue of a soybean protein. In another preferred embodiment of the present invention, a wheat protein or fragment thereof of the present invention is a homologue of a maize protein.

[0070] In a preferred embodiment of the present invention, the nucleic molecule of the present invention encodes a wheat protein or fragment thereof where a wheat protein or fragment thereof exhibits a BLAST probability score of greater than 1E-12, preferably a BLAST probability score of between about 1E-30 and about 1E-12, even more preferably a BLAST probability score of greater than 1E-30 with its homologue.

[0071] In another preferred embodiment of the present invention, the nucleic acid molecule encoding a wheat protein or fragment thereof exhibits a % identity with its homologue of between about 25% and about 40%, more preferably of between about 40 and about 70%, even more preferably of between about 70% and about 90% and even more preferably between about 90% and 99%. In another preferred embodiment, of the present invention, a wheat protein or fragment thereof exhibits a % identity with its homologue of 100%.

[0072] In a preferred embodiment of the present invention, the nucleic molecule of the present invention encodes a wheat protein or fragment thereof where the wheat protein exhibits a BLAST score of greater than 120, preferably a BLAST score of between about 1450 and about 120, even more preferably a BLAST score of greater than 1450 with its homologue.

[0073] Nucleic acid molecules of the present invention also include non-wheat homologues. Preferred non-wheat homologues are selected from the group consisting of alfalfa, Arabidopsis, barley, Brassica, broccoli, cabbage, citrus, cotton, garlic, oat, oilseed rape, onion, canola, flax, an ornamental plant, maize, pea, peanut, pepper, potato, rice, rye, sorghum, soybean, strawberry, sugarcane, sugarbeet, tomato, poplar, pine, fir, eucalyptus, apple, lettuce, lentils, grape, banana, tea, turf grasses, sunflower, oil palm and Phaseolus.

[0074] The degeneracy of the genetic code, which allows different nucleic acid sequences to code for the same protein or peptide, is known in the literature. (U.S. Pat. No. 4,757,006, the entirety of which is herein incorporated by reference).

[0075] In an aspect of the present invention, one or more of the nucleic acid molecules of the present invention differ in nucleic acid sequence from those encoding a wheat protein or fragment thereof in SEQ ID NO: 1 through SEQ ID NO: 10952 due to the degeneracy in the genetic code in that they encode the same protein but differ in nucleic acid sequence.

[0076] In another further aspect of the present invention, nucleic acid molecules of the present invention can comprise sequences, which differ from those encoding a protein or fragment thereof in SEQ ID NO: 1 through SEQ ID NO: 10952 due to fact that the different nucleic acid sequence encodes a protein having one or more conservative amino acid changes. It is understood that codons capable of coding for such conservative amino acid substitutions are known in the art.

[0077] It is well known in the art that one or more amino acids in a native sequence can be substituted with another amino acid(s), the charge and polarity of which are similar to that of the native amino acid, i.e., a conservative amino acid substitution, resulting in a silent change. Conserved substitutes for an amino acid within the native polypeptide sequence can be selected from other members of the class to which the naturally occurring amino acid belongs. Amino acids can be divided into the following four groups: (1) acidic amino acids, (2) basic amino acids, (3) neutral polar amino acids, and (4) neutral nonpolar amino acids. Representative amino acids within these various groups include, but are not limited to, (1) acidic (negatively charged) amino acids such as aspartic acid and glutamic acid; (2) basic (positively charged) amino acids such as arginine, histidine, and lysine; (3) neutral polar amino acids such as glycine, serine, threonine, cysteine, cystine, tyrosine, asparagine, and glutamine; and (4) neutral nonpolar (hydrophobic) amino acids such as alanine, leucine, isoleucine, valine, proline, phenylalanine, tryptophan, and methionine.

[0078] Conservative amino acid changes within the native polypeptides sequence can be made by substituting one amino acid within one of these groups with another amino acid within the same group. Biologically functional equivalents of the proteins or fragments thereof of the present invention can have 10 or fewer conservative amino acid changes, more preferably seven or fewer conservative amino acid changes, and most preferably five or fewer conservative amino acid changes. The encoding nucleotide sequence will thus have corresponding base substitutions, permitting it to encode biologically functional equivalent forms of the proteins or fragments of the present invention.

[0079] It is understood that certain amino acids may be substituted for other amino acids in a protein structure without appreciable loss of interactive binding capacity with structures such as, for example, antigent-binding regions of antibodies or binding sites on substrate molecules. Because it is the interactive capacity and nature of a protein that defines that protein's biological functional activity, certain amino acid sequence substitutions can be made in a protein sequence and, of course, its underlying DNA coding sequence and, nevertheless, obtain a protein with like properties. It is thus contemplated by the inventors that various changes may be made in the peptide sequences of the proteins or fragments of the present invention, or corresponding DNA sequences that encode said peptides, without appreciable loss of their biological utility or activity. It is understood that codons capable of coding for such amino acid changes are known in the art.

[0080] In making such changes, the hydropathic index of amino acids may be considered. The importance of the hydropathic amino acid index in conferring interactive biological function on a protein is generally understood in the art (Kyte and Doolittle, J. Mol. Biol. 157, 105-132 (1982), herein incorporated by reference in its entirety). It is accepted that the relative hydropathic character of the amino acid contributes to the secondary structure of the resultant protein, which in turn defines the interaction of the protein with other molecules, for example, enzymes, substrates, receptors, DNA, antibodies, antigens, and the like.

[0081] Each amino acid has been assigned a hydropathic index on the basis of its hydrophobicity and charge characteristics (Kyte and Doolittle, 1982); these are isoleucine (+4.5), valine (+4.2), leucine (+3.8), phenylalanine (+2.8), cysteine/cystine (+2.5), metionine (+1.9), alanine (+1.8), glycine (−0.4), threonine (−0.7), serine (−0.8), tryptophan (−0.9), tyrosine (−1.3), proline (−1.6), histidine (−3.2), glutamate (−3.5), glutamine (−3.5), aspartate (−3.5), asparagine (−3.5), lysine (−3.9), and arginine (−4.5).

[0082] In making such changes, the substitution of amino acids whose hydropathic indices are within ±2 is preferred, those which are within ±1 are particularly preferred, and those within ±0.5 are even more particularly preferred.

[0083] It is also understood in the art that the substitution of like amino acids can be made effectively on the basis of hydrophilicity. U.S. Pat. No. 4,554,101, incorporated herein by reference in its entirety, states that the greatest local average hydrophilicity of a protein, as govern by the hydrophilicity of its adjacent amino acids, correlates with a biological property of the protein.

[0084] As detailed in U.S. Pat. No. 4,554,101, the following hydrophilicity values have been assigned to amino acid residues: arginine (+3.0), lysine (+3.0), aspartate (+3.0±1), glutamate (+3.0±1), serine (+0.3), asparagine (+0.2), glutamine (+0.2), glycine (0), threonine (−0.4), proline (−0.5±1), alanine (−0.5), histidine (−0.5), cysteine (−1.0), methionine (−1.3), valine (−1.5), leucine (−1.8), isoleucine (−1.8), tyrosine (−2.3), phenylalanine (−2.5), and tryptophan (−3.4).

[0085] In making such changes, the substitution of amino acids whose hydrophilicity values are within ±2 is preferred, those which are within ±1 are particularly preferred, and those within ±0.5 are even more particularly preferred.

[0086] In a further aspect of the present invention, one or more of the nucleic acid molecules of the present invention differ in nucleic acid sequence from those encoding a wheat protein or fragment thereof set forth in SEQ ID NO: 1 through SEQ ID NO: 10952 or fragment thereof due to the fact that one or more codons encoding an amino acid has been substituted for a codon that encodes a nonessential substitution of the amino acid originally encoded.

[0087] One aspect of the present invention concerns markers that include nucleic acid molecules SEQ ID NO: 1 through SEQ ID NO: 10952 or complements thereof or fragments of either that can act as markers or other nucleic acid molecules of the present invention that can act as markers. Genetic markers of the present invention include “dominant” or “codominant” markers “Codominant markers” reveal the presence of two or more alleles (two per diploid individual) at a locus. “Dominant markers” reveal the presence of only a single allele per locus. The presence of the dominant marker phenotype (e.g., a band of DNA) is an indication that one allele is present in either the homozygous or heterozygous condition. The absence of the dominant marker phenotype (e.g. absence of a DNA band) is merely evidence that “some other” undefined allele is present. In the case of populations where individuals are predominantly homozygous and loci are predominately dimorphic, dominant and codominant markers can be equally valuable. As populations become more heterozygous and multi-allelic, codominant markers often become more informative of the genotype than dominant markers. Marker molecules can be, for example, capable of detecting polymorphisms such as single nucleotide polymorphisms (SNPs).

[0088] SNPs are single base changes in genomic DNA sequence. They occur at greater frequency and are spaced with a greater uniformity throughout a genome than other reported forms of polymorphism. The greater frequency and uniformity of SNPs means that there is greater probability that such a polymorphism will be found near or in a genetic locus of interest than would be the case for other polymorphisms. SNPs are located in protein-coding regions and noncoding regions of a genome. Some of these SNPs may result in defective or variant protein expression (e.g., as a result of mutations or defective splicing). Analysis (genotyping) of characterized SNPs can require only a plus/minus assay rather than a lengthy measurement, permitting easier automation.

[0089] SNPs can be characterized using any of a variety of methods. Such methods include the direct or indirect sequencing of the site, the use of restriction enzymes (Botstein et al., Am. J. Hum. Genet. 32:314-331 (1980), the entirety of which is herein incorporated reference; Konieczny and Ausubel, Plant J. 4:403-410 (1993), the entirety of which is herein incorporated by reference), enzymatic and chemical mismatch assays (Myers et al., Nature 313:495-498 (1985), the entirety of which is herein incorporated by reference), allele-specific PCR (Newton et al., Nucl. Acids Res. 17:2503-2516 (1989), the entirety of which is herein incorporated by reference; Wu et al., Proc. Natl; Acad. Sci. (U.S.A.) 86:2757-2760 (1989), the entirety of which is herein incorporated by reference), ligase chain reaction (Barany, Proc. Natl. Acad. Sci. (U.S.A.) 88:189-193 (1991), the entirety of which is herein incorporated by reference), single-strand conformation polymorphism analysis (Labrune et al., Am. J. Hum. Genet. 48: 1115-1120 (1991), the entirety of which is herein incorporated by reference), primer-directed nucleotide incorporation assays (Kuppuswami et al., Proc. Natl. Acad. Sci. USA 88:1143-1147 (1991), the entirety of which is herein incorporated by reference), dideoxy fingerprinting (Sarkar et al., Genomics 13:441-443 (1992), the entirety of which is herein incorporated by reference), solid-phase ELISA-based oligonucleotide ligation assays (Nikiforov et al., Nucl. Acids Res. 22:4167-4175 (1994), the entirety of which is herein incorporated by reference), oligonucleotide fluorescence-quenching assays (Livak et al., PCR Methods Appl. 4:357-362 (1995), the entirety of which is herein incorporated by reference), 5′-nuclease allele-specific hybridization TaqMan assay (Livak et al., Nature Genet. 9:341-342 (1995), the entirety of which is herein incorporated by reference), template-directed dye-terminator incorporation (TDI) assay (Chen and Kwok, Nucl. Acids Res. 25:347-353 (1997), the entirety of which is herein incorporated by reference), allele-specific molecular beacon assay (Tyagi et al., Nature Biotech. 16: 49-53 (1998), the entirety of which is herein incorporated by reference), PinPoint assay (Haff and Smirnov, Genome Res. 7: 378-388 (1997), the entirety of which is herein incorporated by reference) and dCAPS analysis (Neff et al., Plant J. 14:387-392 (1998), the entirety of which is herein incorporated by reference).

[0090] Additional markers, such as AFLP markers, RFLP markers and RAPD markers, can be utilized (Walton, Seed World 22-29 (July 1993), the entirety of which is herein incorporated by reference; Burow and Blake, Molecular Dissection of Complex Traits, 13-29, Paterson (ed.), CRC Press, New York (1988), the entirety of which is herein incorporated by reference). DNA markers can be developed from nucleic acid molecules using restriction endonucleases, the PCR and/or DNA sequence information. RFLP markers result from single base changes or insertions/deletions. These codominant markers are highly abundant in plant genomes, have a medium level of polymorphism and are developed by a combination of restriction endonuclease digestion and Southern blotting hybridization. CAPS are similarly developed from restriction nuclease digestion but only of specific PCR products. These markers are also codominant, have a medium level of polymorphism and are highly abundant in the genome. The CAPS result from single base changes and insertions/deletions.

[0091] Another marker type, RAPDs, are developed from DNA amplification with random primers and result from single base changes and insertions/deletions in plant genomes. They are dominant markers with a medium level of polymorphisms and are highly abundant. AFLP markers require using the PCR on a subset of restriction fragments from extended adapter primers. These markers are both dominant and codominant are highly abundant in genomes and exhibit a medium level of polymorphism.

[0092] SSRs require DNA sequence information. These codominant markers result from repeat length changes, are highly polymorphic and do not exhibit as high a degree of abundance in the genome as CAPS, AFLPs and RAPDs, SNPs also require DNA sequence information. These codominant markers result from single base substitutions. They are highly abundant and exhibit a medium of polymorphism (Rafalski et al., In: Nonmammalian Genomic Analysis, Birren and Lai (ed.), Academic Press, San Diego, Calif., pp. 75-134 (1996), the entirety of which is herein incorporated by reference). It is understood that a nucleic acid molecule of the present invention may be used as a marker.

[0093] A PCR probe is a nucleic acid molecule capable of initiating a polymerase activity while in a double-stranded structure with another nucleic acid. Various methods for determining the structure of PCR probes and PCR techniques exist in the art. Computer generated searches using programs such as Primer3 (www-genome.wi.mit.edu/cgi-bin/primer/primer3.cgi), STSPipeline (www-genome.wi.mit.edu/cgi-bin/www-STS_Pipeline), or GeneUp (Pesole et al., BioTechniques 25:112-123 (1998) the entirety of which is herein incorporated by reference), for example, can be used to identify potential PCR primers.

[0094] It is understood that a fragment of one or more of the nucleic acid molecules of the present invention may be a probe and specifically a PCR probe.

[0095] (b) Protein and Peptide Molecules

[0096] A class of agents comprises one or more of the protein or peptide molecules encoded by SEQ ID NO: 1 through SEQ ID NO: 10952 or one or more of the protein or fragment thereof or peptide molecules encoded by other nucleic acid agents of the present invention. As used herein, the term “protein molecule” or “peptide molecule” includes any molecule that comprises five or more amino acids. It is well know in the art that proteins may undergo modification, including post-translational modifications, such as, but not limited to, disulfide bond formation, glycosylation, phosphorylation, or oligomerization. Thus, as used herein, the term “protein molecule” or “peptide molecule” includes any protein molecule that is modified by any biological or non-biological process. The terms “amino acid” and “amino acids” refer to all naturally occurring L-amino acids. This definition is meant to include norleucine, omithine, homocysteine, and homoserine.

[0097] One or more of the protein or fragment of peptide molecules may be produced via chemical synthesis, or more preferably, by expression in a suitable bacterial or eukaryotic host. Suitable methods for expression are described by Sambrook, et al., (In: Molecular Cloning, A Laboratory Manual, 2nd Edition, Cold Spring Harbor Press, Cold Spring Harbor, N.Y. (1989)), or similar texts.

[0098] A “protein fragment” is a peptide or polypeptide molecule whose amino acid sequence comprises a subset of the amino acid sequence of that protein. A protein or fragment thereof that comprises one or more additional peptide regions not derived from that protein is a “fusion” protein. Such molecules may be derivatized to contain carbohydrate or other moieties (such as keyhole limpet hemocyanin, etc.). Fusion protein or peptide molecule of the present invention are preferably produced via recombinant means.

[0099] Another class of agents comprise protein or peptide molecules encoded by SEQ ID NO: 1 through SEQ ID NO: 10952 or complements thereof or, fragments or fusions thereof in which non-essential, or not relevant, amino acid residues have been added, replaced, or deleted. An example of such a homologue is the homologue protein of all non- wheat plant species, including but not limited to alfalfa, Arabidopsis, barley, Brassica, broccoli, cabbage, citrus, cotton, garlic, oat, oilseed rape, onion, canola, flax, maize, an ornamental plant, pea, peanut, pepper, potato, rice, rye, sorghum, soybean, strawberry, sugarcane, sugarbeet, tomato, poplar, pine, fir, eukalyptus, apple, lettuce, peas, lentils, grape, banana, tea, turf grasses, etc. Particularly preferred non-wheat plants to utilize for the isolation of homologues would include alfalfa, Arabidopsis, barley, cotton, corn, oat, oilseed rape, rice, canola, ornamentals, soybean, sugarcane, sugarbeet, tomato, potato, and turf grasses. Such a homologue can be obtained by any of a variety of methods. Most preferably, as indicated above, one or more of the disclosed sequences (SEQ ID NO: 1 through SEQ ID NO:10952 or complements thereof) will be used to define a pair of primers that may be used to isolate the homologue-encoding nucleic acid molecules from any desired species. Such molecules can be expressed to yield homologues by recombinant means.

[0100] (c) Antibodies

[0101] One aspect of the present invention concerns antibodies, single-chain antigen binding molecules, or other proteins that specifically bind to one or more of the protein or peptide molecules of the present invention and their homologues, fusions or fragments. Such antibodies may be used to quantitatively or qualitatively detect the protein or peptide molecules of the present invention. As used herein, an antibody or peptide is said to “specifically bind” to a protein or peptide molecule of the present invention if such binding is not competitively inhibited by the presence of non-related molecules.

[0102] Nucleic acid molecules that encode all or part of the protein of the present invention can be expressed, via recombinant means, to yield protein or peptides that can in turn be used to elicit antibodies that are capable of binding the expressed protein or peptide. Such antibodies may be used in immunoassays for that protein. Such protein-encoding molecules, or their fragments may be a “fusion” molecule (i.e., a part of a larger nucleic acid molecule) such that, upon expression, a fusion protein is produced. It is understood that any of the nucleic acid molecules of the present invention may be expressed, via recombinant means, to yield proteins or peptides encoded by these nucleic acid molecules.

[0103] The antibodies that specifically bind proteins and protein fragments of the present invention may be polyclonal or monoclonal, and may comprise intact immunoglobulins, or antigen binding portions of immnunoglobulins (such as (F(ab′), F(ab′)₂) fragments, or single-chain immunoglobulins producible, for example, via recombinant means). It is understood that practitioners are familiar with the standard resource materials which describe specific conditions and procedures for the construction, manipulation and isolation of antibodies (see, for example, Harlow and Lane, In Antibodies: A Laboratory Manual, Cold Spring Harbor Press, Cold Spring Harbor, N.Y. (1988), the entirety of which is herein incorporated by reference).

[0104] Murine monoclonal antibodies are particularly preferred. BALB/c mice are preferred for this purpose, however, equivalent strains may also be used. The animals are preferably immunized with approximately 25 μg of purified protein (or fragment thereof) that has been emulsified a suitable adjuvant (such as TiterMax adjuvant (Vaxcel, Norcross, Ga.)). Immunization is preferably conducted at two intramuscular sites, one intraperitoneal site, and one subcutaneous site at the base of the tail. An additional i.v. injection of approximately 25 μg of antigen is preferably given in normal saline three weeks later. After approximately 11 days following the second injection, the mice may be bled and the blood screened for the presence of anti-protein or peptide antibodies. Preferably, a direct binding Enzyme-Linked Immunoassay (ELISA) is employed for this purpose.

[0105] More preferably, the mouse having the highest antibody titer is given a third i.v. injection of approximately 25 μg of the same protein or fragment. The splenic leukocytes from this animal may be recovered 3 days later, and are then permitted to fuse, most preferably, using polyethylene glycol, with cells of a suitable myeloma cell line (such as, for example, the P3X63Ag8.653 myelo a cell line). Hybridoma cells are selected by culturing the cells under “HAT” (hypoxanthine-aminopterin-thymine) selection for about one week. The resulting clones may then be screened for their capacity to produce monoclonal antibodies (“mAbs), preferably by direct ELISA.

[0106] In one embodiment, anti-protein or peptide monoclonal antibodies are isolated using a fusion of a protein, protein fragment, or peptide of the present invention, or conjugate of a protein, protein fragment, or peptide of the present invention, as immunogens. Thus, for example, a group of mice can be immunized using a fusion protein emulsified in Freund's complete adjuvant (e.g. approximately 50 μg of antigen per immunization). At three week intervals, an identical amount of antigen is emulsified in Freund's incomplete adjuvant and used to immunize the animals. Ten days following the third immunization, serum samples are taken and evaluated for the presence of antibody. If antibody titers are too low, a fourth booster can be employed. Polysera capable of binding the protein or peptide can also be obtained using this method.

[0107] In a preferred procedure for obtaining monoclonal antibodies, the spleens of the above-described immunized mice are removed, disrupted, and immune splenocytes are isolated over a ficoll gradient. The isolated splenocytes are fused, using polyethylene glycol with BALB/c-derived HGPRT (hypoxanthine guanine phosphoribosyl transferase) deficient P3x63xAg8.653 plasmacytoma cells. The fused cells are plated into 96-well microtiter plates and screened for hybridoma fusion cells by their capacity to grow in culture medium supplemented with hypothanthine, aminopterin and thymidine for approximately 2-3 weeks.

[0108] Hybridoma cells that arise from such incubation are preferably screened for their capacity to produce an immunoglobulin that binds to a protein of interest. An indirect ELISA may be used for this purpose. In brief, the supernatants of hybridomas are incubated in microtiter wells that contain immobilized protein. After washing, the titer of bound immunoglobulin can be determined using, for example, a goat anti-mouse antibody conjugated to horseradish peroxidase. After additional washing, the amount of immobilized enzyme is determined (for example through the use of a chromogenic substrate). Such screening is performed as quickly as possible after the identification of the hybridoma in order to ensure that a desired clone is not overgrown by non-secreting neighbors. Desirably, the fusion plates are screened several times since the rates of hybridoma growth vary. In a preferred sub-embodiment, a different antigenic form of immunogen may be used to screen the hybridoma. Thus, for example, the splenocytes may be immunized with one immunogen, but the resulting hybridomas can be screened using a different immunogen. It is understood that any of the protein or peptide molecules of the present invention may be used to raise antibodies.

[0109] As discussed below, such antibody molecules or their fragments may be used for diagnostic purposes. Where the antibodies are intended for diagnostic purposes, it may be desirable to derivatize them, for example with a ligand group (such as biotin) or a detectable marker group (such as a fluorescent group, a radioisotope or an enzyme).

[0110] The ability to produce antibodies that bind the protein or peptide molecules of the present invention permits the identification of mimetic compounds of those molecules. A “mimetic compound” is a compound that is not that compound, or a fragment of that compound, but which nonetheless exhibits an ability to specifically bind to antibodies directed against that compound.

[0111] It is understood that any of the agents of the present invention can be substantially purified and/or be biologically active and/or recombinant.

Uses of the Agents of the Invention

[0112] The nucleic acid molecules and fragments thereof of the present invention from the cDNA libraries LIB3222, LIB3223 and LIB3225 are isolated from flowers, which are harvested from the wheat plants at pre-anthesis (boot, Feekes stage 10), anthesis (flowering, Feekes stage 10.5), and post-anthesis (ripening, Feekes stage 11). The ESTs of the present invention can enable the acquisition of, including but not limited to, genes involved in floral development, reproduction, female production and development (ovary/ovule development, stigma development and style development), pollen production and development, seed production, glume development, lemma development, palea development, and pathogen resistance or susceptibility, therefore, the ESTs of the present invention will find great use in the isolation of a variety of agronomically significant genes, including but not limited to, non-regulatory genes and genes that regulate microsporogenesis, meiosis, cell cycle, signal transduction, cell-cell communication, carotenoids, floral biogenesis, embryogenesis, protein, amino acids, sterols, oils, minerals, isoflavones, saponins, vitamins, tocopherols, antinutrient components, carbohydrates, starch metabolism, and seed composition and function. Such genes are associated with plant growth, quality and yield, and could also serve as links in important developmental, metabolic, and catabolic pathways. Libraries from this tissue can enable the acquisition of a variety of agronomically significant genes involved in the synthesis and catabolism of commercially important traits. The ESTs of the present invention also can enable the acquisition of promoters and cis-regulatory elements which will be useful to express agronomically significant genes in these tissues and/or other tissues. The ESTs of the present invention also can enable the acquisition of molecular markers, which can be used in, including but not limited to, breeding schemes, genetic and molecular mapping, and cloning of agronomically significant genes.

[0113] The nucleic acid molecules and fragments thereof of the present invention from the cDNA libraries LIB3224, LIB3226 and LIB3241 are isolated from roots, which are harvested from the wheat plants at pre-anthesis (boot, Feekes stage 10), anthesis (flowering, Feekes stage 10.5), and post-anthesis (ripening, Feekes stage 11). Roots play a critical role in major vegetative organs which supply water, minerals, and substances essential for plant growth and development, therefore, the ESTs of the present invention will find great use in the isolation of a variety of agronomically significant genes, including but not limited to genes that are necessary for absorption, anchorage, storage, transport, and propagation. Such genes are associated with plant growth, quality and yield, and could also serve as links in important developmental, metabolic, and catabolic pathways. Libraries from this tissue can enable the acquisition of a variety of agronomically significant genes involved in the synthesis and catabolism of commercially important traits. The ESTs of the present invention also can enable the acquisition of promoters and cis-regulatory elements which will be useful to express agronomically significant genes in these tissues and/or other tissues. The ESTs of the present invention also can enable the acquisition of molecular markers, which can be used in, including but not limited to, breeding schemes, genetic and molecular mapping, and cloning of agronomically significant genes.

[0114] Nucleic acid molecules and fragments thereof of the present invention may be employed to obtain other nucleic acid molecules. Such molecules include the nucleic acid molecules of other plants or other organisms (e.g., alfalfa, rice, potato, cotton, oat, rye, barley, maize, wheat, Arabidopsis, Brassica, etc.) including the nucleic acid molecules that encode, in whole or in part, protein homologues of other plant species or other organisms, and sequences of genetic elements such as promoters and transcriptional regulatory elements. Such molecules can be readily obtained by using the above-described nucleic acid molecules or fragments thereof to screen cDNA or genomic libraries obtained from such plant species. Methods for forming such libraries are well known in the art. Such homologue molecules may differ in their nucleotide sequences from those found in one or more of SEQ ID NO:1 through SEQ ID NO:10952 or complements thereof because complete complementarity is not needed for stable hybridization. The nucleic acid molecules of the present invention therefore also include molecules that, although capable of specifically hybridizing with the nucleic acid molecules may lack “complete complementarity.”

[0115] Any of a variety of methods may be used to obtain one or more of the above-described nucleic acid molecules (Zamechik et al., Proc. Natl. Acad. Sci. (U.S.A.) 83:4143-4146 (1986), the entirety of which is herein incorporated by reference; Goodchild et al., Proc. Natl. Acad. Sci. (U.S.A.) 85:5507-5511 (1988), the entirety of which is herein incorporated by reference; Wickstrom et al., Proc. Natl. Acad. Sci. (U.S.A.) 85:1028-1032 (1988), the entirety of which is herein incorporated by reference; Holt, et al., Molec. Cell. Biol. 8:963-973 (1988), the entirety of which is herein incorporated by reference; Gerwirtz, et al., Science 242:1303-1306 (1988), the entirety of which is herein incorporated by reference; Anfossi, et al., Proc. Natl. Acad. Sci. (U.S.A.) 86:3379-3383 (1989), the entirety of which is herein incorporated by reference; Becker, et al., EMBO J. 8:3685-3691 (1989); the entirety of which is herein incorporated by reference). Automated nucleic acid synthesizers may be employed for this purpose. In lieu of such synthesis, the disclosed nucleic acid molecules may be used to define a pair of primers that can be used with the polymerase chain reaction (Mullis, et al., Cold Spring Harbor Symp. Quant. Biol. 51:263-273 (1986); Erlich et al., EP 50,424; EP 84,796, EP 258,017, EP 237,362; Mullis, EP 201,184; Mullis et al., U.S. Pat. No. 4,683,202; Erlich, U.S. Pat. No. 4,582,788; and Saiki, R. et al., U.S. Pat. No. 4,683,194, all of which are hereby incorporated by reference in their entirety) to amplify and obtain any desired nucleic acid molecule or fragment.

[0116] Promoter sequence(s) and other genetic elements including but not limited to transcriptional regulatory elements associated with one or more of the disclosed nucleic acid sequences can also be obtained using the disclosed nucleic acid sequences provided herein.

[0117] In one embodiment, such sequences are obtained by incubating EST nucleic acid molecules or preferably fragments thereof with members of genomic libraries (e.g. maize, soybean and wheat) and recovering clones that hybridize to the EST nucleic acid molecule or fragment thereof. In a second embodiment, methods of “chromosome walking,” or inverse PCR may be used to obtain such sequences (Frohman, et al., Proc. Natl. Acad. Sci. (U.S.A) 85:8998-9002 (1988); Ohara, et al., Proc. Natl. Acad. Sci. (U.S.A.) 86: 5673-5677 (1989); Pang et al., Biotechniques, 22(6); 1046-1048 (1977); Huang et al., Methods Mol. Biol. 69: 89-96 (1977); Hartl et al., Methods Mol. Biol. 58: 293-301 (1996), all of which are hereby incorporated by reference in their entirety). In one embodiment, the disclosed nucleic acid molecules are used to identify cDNAs whose analogous genes contain promoters with desirable expression-patterns. The nucleic acid molecules isolated from the library of the present invention are used to isolate promoters of tissue-enhanced, tissue-specific, developmentally- or environmentally-regulated expression profiles. Isolation and functional analysis of the 5′ flanking promoter sequences of these genes from genomic libraries, for example, using genomic screening methods and PCR techniques would result in the isolation of useful promoters and transcriptional regulatory elements. These methods are known to those of skill in the art and have been described (see, for example, Birren et al., Genome Analysis:Analyzing DNA, 1, (1997), Cold Spring Harbor Laboratory Press, Cold Spring Harbor, N.Y., the entirety of which is herein incorporated by reference).

[0118] Promoters obtained utilizing the nucleic acid molecules of the present invention could also be modified to affect their control characteristics. Examples of such modifications would include but are not limited to enhancer sequences as reported by Kay et al., Science 236:1299 (1987), herein incorporated by reference in its entirety. Such genetic elements could be used to enhance gene expression of new and existing traits for crop improvements.

[0119] The nucleic acid molecules of the present invention may be used to isolate promoters of tissue enhanced tissue specific, cell-specific, cell-type, developmentally or environmentally regulated expression profiles. Isolation and functional analysis of the 5′ flanking promoter sequences of these genes from genomic libraries, for example, using genomic screening methods and PCR techniques would result in the isolation of useful promoters and transcriptional regulatory elements. These methods are known to those of skill in the art and have been described (see, for example, Birren et. al., Genome Analysis: Analyzing DNA, 1, Cold Spring Harbor Laboratory Press, Cold Spring Harbor, N.Y. (1997), the entirety of which is herein incorporated by reference). Promoters obtained utilizing the nucleic acid molecules of the present invention could also be modified to affect their control characteristics. Examples of such modifications would include but are not limited to enhancer sequences as reported by Kay, et al Science 236:1299 (1987), herein incorporated reference in its entirety. Such genetic elements could be used to enhance gene expression of new and existing traits for crop improvements.

[0120] In an aspect of the present invention, one or more of the nucleic molecules of the present invention are used to determine whether a plant (preferably wheat) has a mutation affecting the level (i.e., the concentration of mRNA in a sample, etc.) or pattern (i.e., the kinetics of expression, rate of decomposition, stability profile, etc.) of the expression encoded in part or whole by one or more of the nucleic acid molecules of the present invention (collectively, the “Expression Response” of a cell or tissue). As used herein, the Expression Response manifested by a cell or tissue is said to be “altered” if it differs from the Expression Response of cells or tissues of plants not exhibiting the phenotype. To determine whether a Expression Response is altered, the Expression Response manifested by the cell or tissue of the plant exhibiting the phenotype is compared with that of a similar cell or tissue sample of a plant not exhibiting the phenotype. As will be appreciated, it is not necessary to re-determine the Expression Response of the cell or tissue sample of plants not exhibiting the phenotype each time such a comparison is made; rather, the Expression Response of a particular plant may be compared with previously obtained values of normal plants. As used herein, the phenotype of the organism is any of one or more characteristics of an organism (e.g. disease resistance, pest tolerance, environmental tolerance, male sterility, yield, quality improvements, etc.). A change in genotype or phenotype may be transient or permanent. Also as used herein, a tissue sample is any sample that comprises more than one cell. In a preferred aspect, a tissue sample comprises cells that share a common characteristic (e.g. derived from leaf, root, or pollen etc).

[0121] In one sub-aspect, such an analysis is conducted by determining the presence and/or identity of polymorphism(s) by one or more of the nucleic acid molecules of the present invention and more specifically, one or more of the EST nucleic acid molecules or fragments thereof which are associated with phenotype, or a predisposition to phenotype.

[0122] Any of a variety of molecules can be used to identify such polymorphism(s). In one embodiment, one or more of the EST nucleic acid molecules (or a sub-fragment thereof) may be employed as a marker nucleic acid molecule to identify such polymorphism(s). Alternatively, such polymorphisms can be detected through the use of a marker nucleic acid molecule or a marker protein that is genetically linked to (i.e., a polynucleotide that co-segregates with) such polymorphism(s).

[0123] In an alternative embodiment, such polymorphisms can be detected through the use of a marker nucleic acid molecule that is physically linked to such polymorphism(s). For this purpose, marker nucleic acid molecules comprising a nucleotide sequence of a polynucleotide located within 1 mb of the polymorphism(s), and more preferably within 100 kb of the polymorphism(s), and most preferably within 10 kb of the polymorphism(s) can be employed.

[0124] The genomes of animals and plants naturally undergo spontaneous mutation in the course of their continuing evolution (Gusella, Ann. Rev. Biochem. 55:831-854 (1986)). A “polymorphism” is a variation or difference in the sequence of the gene or its flanking regions that arises in some of the members of a species. The variant sequence and the “original” sequence co-exist in the species' population. In some instances, such co-existence is in stable or quasi-stable equilibrium.

[0125] A polymorphism is thus said to be “allelic,” in that, due to the existence of the polymorphism, some members of a species may have the original sequence (i. e., the original “allele”) whereas other members may have the variant sequence (i.e., the variant “allele”). In the simplest case, only one variant sequence may exist, and the polymorphism is thus said to be di-allelic. In other cases, the species' population may contain multiple alleles, and the polymorphism is termed tri-allelic, etc. A single gene may have multiple different unrelated polymorphisms. For example, it may have a di-allelic polymorphism at one site, and a multi-allelic polymorphism at another site.

[0126] The variation that defines the polymorphism may range from a single nucleotide variation to the insertion or deletion of extended regions within a gene. In some cases, the DNA sequence variations are in regions of the genome that are characterized by short tandem repeats (STRs) that include tandem di- or tri-nucleotide repeated motifs of nucleotides. Polymorphisms characterized by such tandem repeats are referred to as “variable number tandem repeat” (“VNTR”) polymorphisms. VNTRs have been used in identity analysis (Weber, U.S. Pat. No. 5,075,217; Armour, et al., FEBS Lett. 307:113-115 (1992); Jones, et al., Eur. J. Haematol. 39:144-147 (1987); Horn, et al., PCT Application WO91/14003; Jeffreys, European Patent Application 370,719; Jeffreys, U.S. Pat. No. 5,699,082; Jeffreys. et al., Amer. J. Hum. Genet. 39:11-24 (1986); Jeffreys. et al., Nature 316:76-79 (1985); Gray, et al., Proc. R. Acad. Soc. Lond. 243:241-253 (1991); Moore, et al., Genomics 10:654-660 (1991); Jeffreys, et al., Anim. Genet. 18:1-15 (1987); Hillel, et al., Anim. Genet. 20:145-155 (1989); Hillel, et al., Genet. 124:783-789 (1990), all of which are herein incorporated by reference in their entirety).

[0127] The detection of polymorphic sites in a sample of DNA may be facilitated through the use of nucleic acid amplification methods. Such methods specifically increase the concentration of polynucleotides that span the polymorphic site, or include that site and sequences located either distal or proximal to it. Such amplified molecules can be readily detected by gel electrophoresis or other means.

[0128] The most preferred method of achieving such amplification employs the polymerase chain reaction (“PCR”) (Mullis, et al., Cold Spring Harbor Symp. Quant. Biol. 51:263-273 (1986); Erlich, et al., European Patent Appln. 50,424; European Patent Appln. 84,796, European Patent Application 258,017, European Patent Appln. 237,362; Mullis, European Patent Appln. 201,184; Mullis, et al., U.S. Pat. No. 4,683,202; Erlich., U.S. Pat. No. 4,582,788; and Saiki, et al., U.S. Pat. No. 4,683,194, all of which are herein incorporated by reference), using primer pairs that are capable of hybridizing to the proximal sequences that define a polymorphism in its double-stranded form.

[0129] In lieu of PCR, alternative methods, such as the “Ligase Chain Reaction” (“LCR”) may be used (Barany, Proc. Natl. Acad. Sci. (U.S.A) 88:189-193 (1991), the entirety of which is herein incorporated by reference). LCR uses two pairs of oligonucleotide probes to exponentially amplify a specific target. The sequences of each pair of oligonucleotides is selected to permit the pair to hybridize to abutting sequences of the same strand of the tar get. Such hybridization forms a substrate for a template-dependent ligase. As with PCR, the resulting products thus serve as a template in subsequent cycles and an exponential amplification of the desired sequence is obtained.

[0130] LCR can be performed with oligonucleotides having the proximal and distal sequences of the same strand of a polymorphic site. In one embodiment, either oligonucleotide will be designed to include the actual polymorphic site of the polymorphism. In such an embodiment, the reaction conditions are selected such that the oligonucleotides can be ligated together only if the target molecule either contains or lacks the specific nucleotide that is complementary to the polymorphic site present on the oligonucleotide. Alternatively, the oligonucleotides may be selected such that they do not include the polymorphic site (see, Segev, PCT Application WO 90/01069, the entirety of which is herein incorporated by reference).

[0131] The “Oligonucleotide Ligation Assay” (“OLA”) may alternatively be employed (Landegren, et al., Science 241:1077-1080 (1988), the entirety of which is herein incorporated by reference). The OLA protocol uses two oligonucleotides which are designed to be capable of hybridizing to abutting sequences of a single strand of a target. OLA, like LCR, is particularly suited for the detection of point mutations. Unlike LCR, however, OLA results in “linear” rather than exponential amplification of the target sequence.

[0132] Nickerson, et al. have described a nucleic acid detection assay that combines attributes of PCR and OLA (Nickerson, et al., Proc. Natl. Acad. Sci. (U.S.A.) 87:8923-8927 (1990), the entirety of which is herein incorporated by reference). In this method, PCR is used to achieve the exponential amplification of target DNA, which is then detected using OLA. In addition to requiring multiple, and separate, processing steps, one problem associated with such combinations is that they inherit all of the problems associated with PCR and OLA.

[0133] Schemes based on ligation of two (or more) oligonucleotides in the presence of nucleic acid having the sequence of the resulting “di-oligonucleotide”, thereby amplifying the di-oligonucleotide, are also known (Wu, et al., Genomics 4:560 (1989), the entirety of which is herein incorporated by reference), and may be readily adapted to the purposes of the present invention.

[0134] Other known nucleic acid amplification procedures, such as allele-specific oligomers, branched DNA technology, transcription-based amplification systems, or isothermal amplification methods may also be used to amplify and analyze such polymorphisms (Malek, et al., U.S. Pat. No. 5,130,238; Davey, et al., European Patent Application 329,822; Schuster et al., U.S. Pat. No. 5,169,766; Miller, et al., PCT Application WO 89/06700; Kwoh, et al., Proc. Natl. Acad. Sci. (U.S.A.) 86:1173-1177 (1989); Gingeras, et al., PCT Application WO 88/10315; Walker, et al., Proc. Nail. Acad. Sci. (U.S.A.) 89:392-396 (1992), all of which are herein incorporated by reference in their entirety).

[0135] The identification of a polymorphism can be determined in a variety of ways. By correlating the presence or absence of it in a plant with the presence or absence of a phenotype, it is possible to predict the phenotype of that plant. If a polymorphism creates or destroys a restriction endonuclease cleavage site, or if it results in the loss or insertion of DNA (e.g., a VNTR polymorphism), it will alter the size or profile of the DNA fragments that are generated by digestion with that restriction endonuclease. As such, individuals that possess a variant sequence can be distinguished from those having the original sequence by restriction fragment analysis. Polymorphisms that can be identified in this manner are termed “restriction fragment length polymorphisms” (“RFLPs”). RFLPs have been widely used in human and plant genetic analyses (Glassberg, UK Patent Application 2135774; Skolnick, et al., Cytogen. Cell Genet. 32:58-67 (1982); Botstein, et al., Ann. J Hum. Genet. 32:314-331 (1980); Fischer, et al. (PCT Application WO90/13668); Uhlen, PCT Application WO90/11369).

[0136] Polymorphisms can also be identified by Single Strand Conformation Polymorphism (SSCP) analysis. The SSCP technique is a method capable of identifying most sequence variations in a single strand of DNA, typically between 150 and 250 nucleotides in length (Elles, Methods in Molecular Medicine: Molecular Diagnosis of Genetic Diseases, Humana Press (1996), the entirety of which is herein incorporated by reference); Orita et al., Genomics 5: 874-879 (1989), the entirety of which is herein incorporated by reference). Under denaturing conditions a single strand of DNA will adopt a conformation that is uniquely dependent on its sequence conformation. This conformation usually will be different, even if only a single base is changed. Most conformations have been reported to alter the physical configuration or size sufficiently to be detectable by electrophoresis. A number of protocols have been described for SSCP including, but not limited to Lee et al., Anal. Biochem. 205: 289-293 (1992), the entirety of which is herein incorporated by reference; Suzuki et al., Anal. Biochem. 192: 82-84 (1991), the entirety of which is herein incorporated by reference; Lo et al., Nucleic Acids Research 20: 1005-1009 (1992), the entirety of which is herein incorporated by reference; Sarkar et al., Genomics 13: 441-443 (1992), the entirety of which is herein incorporated by reference). It is understood that one or more of the nucleic acids of the present invention, may be utilized as markers or probes to detect polymorphisms by SSCP analysis.

[0137] Polymorphisms may also be found using a DNA fingerprinting technique called amplified fragment length polymorphism (AFLP), which is based on the selective PCR amplification of restriction fragments from a total digest of genomic DNA to profile that DNA. Vos, et al., Nucleic Acids Res. 23:4407-4414 (1995), the entirety of which is herein incorporated by reference. This method allows for the specific co-amplification of high numbers of restriction fragments, which can be visualized by PCR without knowledge of the nucleic acid sequence.

[0138] AFLP employs basically three steps. Initially, a sample of genomic DNA is cut with restriction enzymes and oligonucleotide adapters are ligated to the restriction fragments of the DNA. The restriction fragments are then amplified using PCR by using the adapter and restriction sequence as target sites for primer annealing. The selective amplification is achieved by the use of primers that extend into the restriction fragments, amplifying only those fragments in which the primer extensions match the nucleotide flanking the restriction sites. These amplified fragments are then visualized on a denaturing polyacrylamide gel.

[0139] AFLP analysis has been performed on Salix (Beismann, et al., Mol. Ecol. 6:989-993 (1997), the entirety of which is herein incorporated by reference); Acinetobacter (Janssen, et al., Int. J. Syst. Bacteriol 47:1179-1187 (1997), the entirety of which is herein incorporated by reference), Aeromonas popoffi (Huys, et al., Int. J. Syst. Bacteriol. 47:1165-1171 (1997), the entirety of which is herein incorporated by reference), rice (McCouch, et al., Plant Mol. Biol. 35:89-99 (1997), the entirety of which is herein incorporated by reference); Nandi, et al., Mol. Gen. Genet. 255:1-8 (1997); Cho, et al., Genome 39:373-378 (1996), herein incorporated by reference), barley (Hordeum vulgare)(Simons, et al., Genomics 44:61-70 (1997), the entirety of which is herein incorporated by reference; Waugh, et al., Mol. Gen. Genet. 255:311-321 (1997), the entirety of which is herein incorporated by reference; Qi, et al., Mol. Gen Genet. 254:330-336 (1997), the entirety of which is herein incorporated by reference; Becker, et al., Mol. Gen. Genet. 249:65-73 (1995), the entirety of which is herein incorporated by reference), potato (Van der Voort, et al., Mol. Gen. Genet. 255:438-447 (1997), the entirety of which is herein incorporated by reference; Meksem, et al., Mol. Gen. Genet. 249:74-81 (1995), the entirety of which is herein incorporated by reference), Phytophthora infestans (Van der Lee, et al., Fungal Genet. Biol. 21:278-291 (1997), the entirety of which is herein incorporated by reference), Bacillus anthracis (Keim, et al., J. Bacteriol. 179:818-824 (1997)), Astragalus cremnophylax (Travis, et al., Mol. Ecol. 5:735-745 (1996), the entirety of which is herein incorporated by reference), Arabidopsis (Cnops, et al., Mol. Gen. Genet. 253:32-41 (1996), the entirety of which is herein incorporated by reference), Escherichia coli (Lin, et al., Nucleic Acids Res. 24:3649-3650 (1996), the entirety of which is herein incorporated by reference), Aeromonas (Huys, et al., Int. J. Syst. Bacteriol. 46:572-580 (1996), the entirety of which is herein incorporated by reference), nematode (Folkertsma, et al., Mol. Plant Microbe Interact. 9:47-54 (1996), the entirety of which is herein incorporated by reference), tomato (Thomas, et al., Plant J. 8:785-794 (1995), the entirety of which is herein incorporated by reference), and human (Latorra, et al., PCR Methods Appl. 3:351-358 (1994)). AFLP analysis has also been used for fingerprinting mRNA (Money, et al., Nucleic Acids Res. 24:2616-2617 (1996), the entirety of which is herein incorporated by reference; Bachem, et al., Plant J. 9:745-753 (1996), the entirety of which is herein incorporated by reference). It is understood that one or more of the nucleic acids of the present invention, may be utilized as markers or probes to detect polymorphisms by AFLP analysis for fingerprinting mRNA.

[0140] Polymorphisms may also be found using random amplified polymorphic DNA (RAPD) (Williams et al., Nucl. Acids Res. 18: 6531-6535 (1990), the entirety of which is herein incorporated by reference) and cleaveable amplified polymorphic sequences (CAPS) (Lyamichev et al., Science 260: 778-783 (1993), the entirety of which is herein incorporated by reference). It is understood that one or more of the nucleic acids of the present invention, may be utilized as markers or probes to detect polymorphisms by RAPD or CAPS analysis.

[0141] Polymorphisms are useful, through linkage analysis, to define the genetic distances or physical distances between polymorphic traits. A physical map or ordered array of genomic DNA fragments in the desired region containing the gene may be used to characterize and isolate genes corresponding to desirable traits. For this purpose, yeast artificial chromosomes (YACs), bacterial artificial chromosomes (BACs), and cosmids are appropriate vectors for cloning large segments of DNA molecules. Although fewer clones are needed to make a contig for a specific genomic region by using YACs (Agyare et al., Genome Res. 7: 1-9 (1997), the entirety of which is herein incorporated by reference; James et al., Genomics 32: 425-430 (1996), the entirety of which is herein incorporated by reference), chimerism in the inserted DNA fragment can arise. Cosmids are convenient for handling smaller-size DNA molecules and may be used for transformation in developing transgenic plants. BACs also carry DNA fragments and are less prone to chimerism.

[0142] Through genetic mapping, a fine scale linkage map can be developed using DNA markers and, then, a genomic DNA library of large-sized fragments can be screened with molecular markers linked to the desired trait. Molecular markers are advantageous for agronomic traits that are otherwise difficult to tag, such as resistance to pathogens, insects and nematodes, tolerance to abiotic stress, quality parameters and quantitative traits such as high yield potential.

[0143] The essential requirements for marker-assisted selection in a plant breeding program are: (1) the marker(s) should co-segregate or be closely linked with the desired trait; (2) an efficient means of screening large populations for the molecular marker(s) should be available; and (3) the screening technique should have high reproducibility across laboratories and preferably be economical to use and be user-friendly.

[0144] The genetic linkage of marker molecules can be established by a gene mapping model such as, without limitation, the flanking marker model reported by Lander and Botstein, Genetics 121:185-199 (1989) and the interval mapping, based on maximum likelihood methods described by Lander and Botstein, Genetics 121:185-199 (1989) and implemented in the software package MAPMAKER/QTL (Lincoln and Lander, Mapping Genes Controlling Quantitative Traits Using MAPMAKER/QTL, Whitehead Institute for Biomedical Research, Massachusetts, (1990). Additional software includes Qgene, Version 2.23 (1996), Department of Plant Breeding and Biometry, 266 Emerson Hall, Cornell University, Ithaca, N.Y., the manual of which is herein incorporated by reference in its entirety). Use of Qgene software is a particularly preferred approach.

[0145] A maximum likelihood estimate (MLE) for the presence of a marker is calculated, together with an MLE assuming no QTL effect, to avoid false positives. A log₁₀ of an odds ratio (LOD) is then calculated as: LOD=log₁₀ (MLE for the presence of a QTL/MLE given no linked QTL).

[0146] The LOD score essentially indicates how much more likely the data are to have arisen assuming the presence of a QTL than in its absence. The LOD threshold value for avoiding a false positive with a given confidence, say 95%, depends on the number of markers and the length of the genome. Graphs indicating LOD thresholds are set forth in Lander and Botstein, Genetics 121:185-199 (1989) the entirety of which is herein incorporated by reference and further described by Arús and Moreno-González, Plant Breeding, Hayward et al., (eds.) Chapman & Hall, London, pp. 314-331 (1993), the entirety of which is herein incorporated by reference.

[0147] Additional models can be used. Many modifications and alternative approaches to interval mapping have been reported, including the use of non-parametric methods (Kruglyak and Lander, Genetics 139:1421-1428 (1995), the entirety of which is herein incorporated by reference). Multiple regression methods or models can be also be used, in which the trait is regressed on a large number of markers (Jansen, Biometrics in Plant Breeding, van Oijen and Jansen (eds.), Proceedings of the Ninth Meeting of the Eucarpia Section Biometrics in Plant Breeding, The Netherlands, pp. 116-124 (1994); Weber and Wricke, Advances in Plant Breeding, Blackwell, Berlin, 16 (1994), both of which is herein incorporated by reference in their entirety). Procedures combining interval mapping with regression analysis, whereby the phenotype is regressed onto a single putative QTL at a given marker interval and at the same time onto a number of markers that serve as ‘cofactors’, have been reported by Jansen and Stam, Genetics 136:1447-1455 (1994), the entirety of which is herein incorporated by reference and Zeng, Genetics 136:1457-1468 (1994) the entirety of which is herein incorporated by reference. Generally, the use of cofactors reduces the bias and sampling error of the estimated QTL positions (Utz and Melchinger, Biometrics in Plant Breeding, van Oijen and Jansen (eds.) Proceedings of the Ninth Meeting of the Eucarpia Section Biometrics in Plant Breeding, The Netherlands, pp. 195-204 (1994), the entirety of which is herein incorporated by reference, thereby improving the precision and efficiency of QTL mapping (Zeng, Genetics 136:1457-1468 (1994)). These models can be extended to multi-environment experiments to analyze genotype-environment interactions (Jansen et al., Theo. Appl. Genet. 91:33-37 (1995), the entirety of which is herein incorporated by reference).

[0148] Selection of an appropriate mapping population is important to map construction. The choice of an appropriate mapping population depends on the type of marker systems employed (Tanksley et al., Molecular mapping plant chromosomes. Chromosome structure and function: Impact of new concepts, Gustafson and Appels (eds.), Plenum Press, New York, pp 157-173 (1988), the entirety of which is herein incorporated by reference). Consideration must be given to the source of parents (adapted vs. exotic) used in the mapping population. Chromosome pairing and recombination rates can be severely disturbed (suppressed) in wide crosses (adapted×exotic) and generally yield greatly reduced linkage distances. Wide crosses will usually provide segregating populations with a relatively large array of polymorphisms when compared to progeny in a narrow cross (adapted×adapted).

[0149] An F₂ population is the first generation of selfing after the hybrid seed is produced. Usually a single F₁ plant is selfed to generate a population segregating for all the genes in Mendelian (1:2:1) fashion. Maximum genetic information is obtained from a completely classified F₂ population using a codominant marker system (Mather, Measurement of Linkage in Heredity, Methuen and Co., (1938), the entirety of which is herein incorporated by reference). In the case of dominant markers, progeny tests (e.g. F₃, BCF₂) are required to identify the heterozygotes, thus making it equivalent to a completely classified F₂ population. However, this procedure is often prohibitive because of the cost and time involved in progeny testing. Progeny testing of F₂ individuals is often used in map construction where phenotypes do not consistently reflect genotype (e.g. disease resistance) or where trait expression is controlled by a QTL. Segregation data from progeny test populations (e.g. F₃ or BCF₂) can be used in map construction. Marker-assisted selection can then be applied to cross progeny based on marker-trait map associations (F₂, F₃), where linkage groups have not been completely disassociated by recombination events (i.e., maximum disequillibrium).

[0150] Recombinant inbred lines (RIL) (genetically related lines; usually >F₅, developed from continuously selfing F₂ lines towards homozygosity) can be used as a mapping population. Information obtained from dominant markers can be maximized by using RIL because all loci are homozygous or nearly so. Under conditions of tight linkage (i.e., about <10% recombination), dominant and co-dominant markers evaluated in RIL populations provide more information per individual than either marker type in backcross populations (Reiter et al., Proc. Natl. Acad. Sci. (U.S.A.) 89:1477-1481 (1992), the entirety of which is herein incorporated by reference). However, as the distance between markers becomes larger (i.e., loci become more independent), the information in RIL populations decreases dramatically when compared to codominant markers.

[0151] Backcross populations (e.g., generated from a cross between a successful variety (recurrent parent) and another variety (donor parent) carrying a trait not present in the former) can be utilized as a mapping population. A series of backcrosses to the recurrent parent can be made to recover most of its desirable traits. Thus a population is created consisting of individuals nearly like the recurrent parent but each individual carries varying amounts or mosaic of genomic regions from the donor parent. Backcross populations can be useful for mapping dominant markers if all loci in the recurrent parent are homozygous and the donor and recurrent parent have contrasting polymorphic marker alleles (Reiter et al., Proc. Natl. Acad. Sci. (U.S.A.) 89:1477-1481 (1992)). Information obtained from backcross populations using either codominant or dominant markers is less than that obtained from F₂ populations because one, rather than two, recombinant gametes are sampled per plant. Backcross populations, however, are more informative (at low marker saturation) when compared to RILs as the distance between linked loci increases in RIL populations (i.e. about 15% recombination). Increased recombination can be beneficial for resolution of tight linkages, but may be undesirable in the construction of maps with low marker saturation.

[0152] Near-isogenic lines (NW) created by many backcrosses to produce an array of individuals that are nearly identical in genetic composition except for the trait or genomic region under interrogation can be used as a mapping population. In mapping with NILs, only a portion of the polymorphic loci are expected to map to a selected region.

[0153] Bulk segregant analysis (BSA) is a method developed for the rapid identification of linkage between markers and traits of interest (Michelmore et al., Proc. Natl. Acad. Sci. (U.S.A.) 88:9828-9832 (1991), the entirety of which is herein incorporated by reference). In BSA, two bulked DNA samples are drawn from a segregating population originating from a single cross. These bulks contain individuals that are identical for a particular trait (resistant or susceptible to particular disease) or genomic region but arbitrary at unlinked regions (i.e. heterozygous). Regions unlinked to the target region will not differ between the bulked samples of many individuals in BSA.

[0154] It is understood that one or more of the nucleic acid molecules of the present invention may be used as molecular markers. It is also understood that one or more of the protein molecules of the present invention may be used as molecular markers.

[0155] In accordance with this aspect of the present invention, a sample nucleic acid is obtained from plants cells or tissues. Any source of nucleic acid may be used. Preferably, the nucleic acid is genomic DNA. The nucleic acid is subjected to restriction endonuclease digestion. For example, one or more EST nucleic acid molecule or fragment thereof can be used as a probe in accordance with the above-described polymorphic methods. The polymorphism obtained in this approach can then be cloned to identify the mutation at the coding region which alters the protein's structure or regulatory region of the gene which affects its expression level.

[0156] In one aspect of the present invention, an evaluation can be conducted to determine whether a particular mRNA molecule is present. One or more of the nucleic acid molecules of the present invention, preferably one or more of the EST nucleic acid molecules of the present invention are utilized to detect the presence or quantity of the mRNA species. Such molecules are then incubated with cell or tissue extracts of a plant under conditions sufficient to permit nucleic acid hybridization. The detection of double-stranded probe-mRNA hybrid molecules is indicative of the presence of the mRNA; the amount of such hybrid formed is proportional to the amount of mRNA. Thus, such probes may be used to ascertain the level and extent of the mRNA production in a plant's cells or tissues. Such nucleic acid hybridization may be conducted under quantitative conditions (thereby providing a numerical value of the amount of the mRNA present). Alternatively, the assay may be conducted as a qualitative assay that indicates either that the mRNA is present, or that its level exceeds a user set, predefined value.

[0157] A principle of in situ hybridization is that a labeled, single-stranded nucleic acid probe will hybridize to a complementary strand of cellular DNA or RNA and, under the appropriate conditions, these molecules will form a stable hybrid. When nucleic acid hybridization is combined with histological techniques, specific DNA or RNA sequences can be identified within a single cell. An advantage of in situ hybridization over more conventional techniques for the detection of nucleic acids is that it allows an investigator to determine the precise spatial population (Angerer et al., Dev. Biol. 101: 477-484 (1984), the entirety of which is herein incorporated by reference; Angerer et al., Dev. Biol. 112: 157-166 (1985), the entirety of which is herein incorporated by reference; Dixon et al., EMBO J. 10: 1317-1324 (1991), the entirety of which is herein incorporated by reference). In situ hybridization may be used to measure the steady-state level of RNA accumulation. It is a sensitive technique and RNA sequences present in as few as 5-10 copies per cell can be detected (Hardin et al., J. Mol. Biol. 202: 417-431.(1989), the entirety of which is herein incorporated by reference). A number of protocols have been devised for in situ hybridization, each with tissue preparation, hybridization, and washing conditions (Meyerowitz, Plant Mol. Biol. Rep. 5: 242-250 (1987), the entirety of which is herein incorporated by reference; Cox and Goldberg, In: Plant Molecular Biology: A Practical Approach (ed. C. H. Shaw), pp. 1-35. IRL Press, Oxford (1988), the entirety of which is herein incorporated by reference; Raikhel et al., In situ RNA hybridization in plant tissues. In Plant Molecular Biology Manual, vol. B9: 1-32. Kluwer Academic Publisher, Dordrecht, Belgium (1989), the entirety of which is herein incorporated by reference).

[0158] In situ hybridization also allows for the localization of proteins within a tissue or cell (Wilkinson, In Situ Hybridization, Oxford University Press, Oxford (1992), the entirety of which is herein incorporated by reference; Langdale, In Situ Hybridization 165-179 In: The Maize Handbook, eds. Freeling and Walbot, Springer-Verlag, New York (1994), the entirety of which is herein incorporated by reference). It is understood that one or more of the molecules of the present invention, preferably one or more of the EST nucleic acid molecules of the present invention or one or more of the antibodies of the present invention may be utilized to detect the level or pattern of a protein or fragment thereof by in situ hybridization.

[0159] Fluorescent in situ hybridization also enables the localization of a particular DNA sequence along a chromosome which is useful, among other uses, for gene mapping, following chromosomes in hybrid lines or detecting chromosomes with translocations, transversions or deletions. In situ hybridization has been used to identify chromosomes in several plant species (Griffor et al., Plant Mol. Biol. 17: 101-109 (1991), the entirety of which is herein incorporated by reference; Gustafson et al., Proc. Nat'l. Acad. Sci. (U.S.A). 87: 1899-1902 (1990), herein incorporated by reference; Mukai and Gill, Genome 34: 448-452. (1991); Schwarzacher and Heslop-Harrison, Genome 34: 317-323 (199,1); Wang et al., Jpn. J Genet. 66: 313-316 (1991), the entirety of which is herein incorporated by reference; Parra and Windle, Nature Genetics, 5: 17-21 (1993), the entirety of which is herein incorporated by reference). It is understood that the nucleic acid molecules of the present invention may be used as probes or markers to localize sequences along a chromosome.

[0160] It is also understood that one or more of the molecules of the present invention, preferably one or more of the EST nucleic acid molecules of the present invention or one or more of the antibodies of the present invention may be utilized to detect the expression level or pattern of a protein or mRNA thereof by in situ hybridization.

[0161] Another method to localize the expression of a molecule is tissue printing. Tissue printing provides a way to screen, at the same time on the same membrane many tissue sections from different plants or different developmental stages. Tissue-printing procedures utilize films designed to immobilize proteins and nucleic acids. In essence, a freshly cut section of an organ is pressed gently onto nitrocellulose paper, nylon membrane or polyvinylidene difluoride membrane. Such membranes are commercially available (e.g. Millipore, Bedford, Mass.). The contents of the cut cell transfer onto the membrane, and the molecules are immobilized to the membrane. The immobilized molecules form a latent print that can be visualized with appropriate probes. When a plant tissue print is made on nitrocellulose paper, the cell walls leave a physical print that makes the anatomy visible without further treatment (Vamer and Taylor, Plant Physiol. 91: 31-33 (1989), the entirety of which is herein incorporated by reference).

[0162] Tissue printing on substrate films is described by Daoust, Exp. Cell Res. 12: 203-211 (1957), the entirety of which is herein incorporated by reference, who detected amylase, protease, ribonuclease, and deoxyribonuclease in animal tissues using starch, gelatin, and agar films. These techniques can be applied to plant tissues (Yomo and Taylor, Planta 112:35-43 (1973); Harris and Chrispeels, Plant Physiol. 56: 292-299 (1975). Advances in membrane technology have increased the range of applications of Daoust's tissue-printing techniques allowing (Cassab and Varner, J. Cell. Biol. 105: 2581-2588 (1987), the entirety of which is herein incorporated by reference; the histochemical localization of various plant enzymes and deoxyribonuclease on nitrocellulose paper and nylon (Spruce et al., Phytochemistry, 26: 2901-2903 (1987), the entirety of which is herein incorporated by reference; Barres et al. Neuron 5: 527-544 (1990), the entirety of which is herein incorporated by reference; the entirety of which is herein incorporated by reference; Reid and Pont-Lezica, Tissue Printing: Tools for the Study of Anatomy, Histochemistry, and Gene Expression, Academic Press, New York, N.Y. (1992), the entirety of which is herein incorporated by reference; Reid et al. Plant Physiol. 93: 160-165 (1990), herein incorporate by reference; Ye et al. Plant J. 1: 175-183 (1991), the entirety of which is herein incorporated by reference).

[0163] It is understood that one or more of the molecules of the present invention, preferably one or more of the EST nucleic acid molecules of the present invention or one or more of the antibodies of the present invention may be utilized to detect the presence or quantity of a protein by tissue printing.

[0164] Further, it is also understood that any of the nucleic acid molecules of the present invention may be used as marker nucleic acids and or probes in connection with methods that require probes or marker nucleic acids. As used herein, a probe is an agent that is utilized to determine an attribute or feature (e.g. presence or absence, location, correlation, etc.) or a molecule, cell, tissue or plant. As used herein, a marker nucleic acid is a nucleic acid molecule that is utilized to determine an attribute or feature (e.g., presence or absence, location, correlation, etc.) or a molecule, cell, tissue or plant.

[0165] A microarray-based method for high-throughput monitoring of plant gene expression may be utilized to measure gene-specific hybridization targets. This ‘chip’-based approach involves using microarrays of nucleic acid molecules as gene-specific hybridization targets to quantitatively measure expression of the corresponding plant genes (Schena et al., Science 270: 467-470 (1995), the entirety of which is herein incorporated by reference; Shalon, Ph.D. Thesis. Stanford University (1996), the entirety of which is herein incorporated by reference). Every nucleotide in a large sequence can be queried at the same time. Hybridization can be used to efficiently analyze large amounts of nucleotide sequence.

[0166] Several microarray methods have been described. One method compares the sequences to be analyzed by hybridization to a set of oligonucleotides representing all possible subsequences (Bains and Smith, J. Theor. Biol. 135: 303 (1989), the entirety of which is herein incorporated by reference). A second method hybridizes the sample to an array of oligonucleotide probes. An array consisting of oligonucleotides complementary to subsequences of a target sequence can be used to determine the identity of a target sequence, measure its amount, and detect differences between the target and a reference sequence. Nucleic acid molecules microarrays may also be screened with protein molecules or fragments thereof to determine nucleic acid molecules that specifically bind protein molecules or fragments thereof.

[0167] The, microarray approach may be used with polypeptide targets (U.S. Pat. No. 5,445,934; U.S. Pat. No: 5,143,854; U.S. Pat. No. 5,079,600; U.S. Pat. No. 4,923,901, all of which are herein incorporated by reference in their entirety). Essentially, polypeptides are synthesized on a substrate (microarray) and these polypeptides can be screened with either protein molecules or fragments thereof or nucleic acid molecules in order to screen for either protein molecules or fragments thereof or nucleic acid molecules that specifically bind the target polypeptides. Implementation of these techniques rely on recently developed combinatorial technologies to generate any ordered array of a large number of oligonucleotide probes (Fodor et al., Science 251:767-773 (1991), the entirety of which is herein incorporated by reference).

[0168] It is understood that one or more of the molecules of the present invention, preferably one or more of the nucleic acid molecules or protein molecules or fragments thereof of the present invention may be utilized in a microarray based method.

[0169] In a preferred embodiment of the present invention microarrays may be prepared that comprise nucleic acid molecules where preferably at least 10%, preferably at least 25%, more preferably at least 50% and even more preferably at least 75%, 80%, 85%, 90% or 95% of the nucleic acid molecules located on that array are selected from the group of nucleic acid molecules that specifically hybridize to one or more nucleic acid molecule having a nucleic acid sequence selected from the group of SEQ ID NO: 1 through SEQ ID NO: 10952 or complement thereof or fragments of either.

[0170] A particular preferred microarray embodiment of the present invention is a microarray comprising nucleic acid molecules encoding genes or fragments thereof that are homologues of known genes or nucleic acid molecules that comprise genes or fragment thereof that elicit only limited or no matches to known genes. A further preferred microarray embodiment of the present invention is a microarray comprising nucleic acid molecules having genes or fragments thereof that are homologues of known genes and nucleic acid molecules that comprise genes or fragment thereof that elicit only limited or no matches to known genes. Site-directed mutagenesis may be utilized to modify nucleic acid sequences, particularly as it is a technique that allows one or -more of the amino acids encoded by a nucleic acid molecule to be altered (e.g. a threonine to be replaced by a methionine). Three basic methods for site-directed mutagenesis are often employed. These are cassette mutagenesis (Wells et al., Gene 34:315-23 (1985), the entirety of which is herein incorporated by reference), primer extension (Gilliam et al., Gene 12:129-137 (1980), the entirety of which is herein incorporated by reference); Zoller and Smith, Methods Enzymol. 100:468-500 (1983), the entirety of which is herein incorporated by reference; and Dalbadie-McFarland et al., Proc. Natl. Acad. Sci. (U.S.A.) 79:6409-6413 (1982), the entirety of which is herein incorporated by reference) and methods based upon PCR (Scharf et al., Science 233:1076-1078 (1986), the entirety of which is herein incorporated by reference; Higuchi et al., Nucleic Acids Res. 16:7351-7367 (1988), the entirety of which is herein incorporated by reference). Site-directed mutagenesis approaches are also described in European Patent 0 385 962, the entirety of which is herein incorporated by reference, European Patent 0 359 472, the entirety of which is herein incorporated by reference, and PCT Patent Application WO 93/07278, the entirety of which is herein incorporated by reference.

[0171] Site-directed mutagenesis strategies have been applied to plants for both in vitro as well as in vivo site-directed mutagenesis (Lanz et al., J. Biol. Chem. 266:9971-6 (1991), the entirety of which is herein incorporated by reference; Kovgan and Zhdanov, Biotekhnologiya 5:148-154; No. 207160n, Chemical Abstracts 110:225 (1989), the entirety of which is herein incorporated by reference; Ge et al., Proc. Natl. Acad. Sci. (U.S.A.) 86:4037-4041 (1989), the entirety of which is herein incorporated by reference, Zhu et al., J. Biol. Chem. 271:18494-18498 (1996), Chu et al., Biochemistry 33:6150-6157 (1994), the entirety of which is herein incorporated by reference, Small et al., EMBO J. 11: 1291-1296 (1992), the entirety of which is herein incorporated by reference, Cho et al., Mol. Biotechnol. 8:13-16 (1997), Kita et al., J. Biol. Chem. 271:26529-26535 (1996), the entirety of which is herein incorporated by reference, Jin et al., Mol. Microbiol. 7:555-562 (1993), the entirety of which is herein incorporated by reference, Hatfield and Vierstra, J. Biol. Chem. 267:14799-14803 (1992), the entirety of which is herein incorporated by reference, Zhao et al., Biochemistry 31:5093-5099 (1992), the entirety of which is herein incorporated by reference).

[0172] Any of the nucleic acid molecules of the present invention may either be modified by site-directed mutagenesis or used as, for example, nucleic acid molecules that are used to target other nucleic acid molecules for modification. It is understood that mutants with more than one altered nucleotide can be constructed using techniques that practitioners skilled in the art are familiar with such as isolating restriction fragments and ligating such fragments into an expression vector (see, for example, Sambrook et al., Molecular Cloning: A Laboratory Manual, Cold Spring Harbor Press (1989)).

[0173] Sequence-specific DNA-binding proteins play a role in the regulation of transcription. The isolation of recombinant cDNAs encoding these proteins facilitates the biochemical analysis of their structural and functional properties. Genes encoding such DNA-binding proteins have been isolated using classical genetics (Vollbrecht et al., Nature 350: 241-243 (1991), the entirety of which is herein incorporated by reference) and molecular biochemical approaches, including the screening of recombinant cDNA libraries with antibodies (Landschulz et al., Genes Dev. 2: 786-800 (1988), the entirety of which is herein incorporated by reference) or DNA probes (Bodner et al., Cell 55: 505-518 (1988), the entirety of which is herein incorporated by reference). In addition, an in situ screening procedure has been used and has facilitated the isolation of sequence-specific DNA-binding proteins from various plant species (Gilmartin et al., Plant Cell 4: 839-849 (1992), the entirety of which is herein incorporated by reference; Schindler et al., EMBO J. 11: 1261-1273 (1992) the entirety of which is herein incorporated by reference). An in situ screening protocol does not require the purification of the protein of interest (Vinson et al., Genes Dev. 2: 801-806 (1988), the entirety of which is herein incorporated by reference; Singh et al., Cell 52: 415-423 (1988), the entirety of which is herein incorporated by reference).

[0174] Steps may be employed to characterize DNA-protein interactions. The first is to identify promoter fragments that interact with DNA-binding proteins, to titrate binding activity, to determine the specificity of binding, and to determine whether a given DNA-binding activity can interact with related DNA sequences (Sambrook et al., Molecular Cloning: A Laboratory Manual, 2^{nd} edition. Cold Spring Harbor Laboratory Press, Cold Spring Harbor, N.Y. (1989). Electrophoretic mobility-shift assay is a widely used assay. The assay provides a simple, rapid, and sensitive method for detecting DNA-binding proteins based on the observation that the mobility of a DNA fragment through a nondenaturing, low-ionic strength polyacrylamide gel is retarded upon association with a DNA-binding protein (Fried and Crother, Nucleic Acids Res. 9: 6505-6525 (1981), the entirety of which is herein incorporated by reference). When one or more specific binding activities have been identified, the exact sequence of the DNA bound by the protein may be determined. Several procedures for characterizing protein/DNA-binding sites are used, including methylation and ethylation interference assays (Maxam and Gilbert, Methods Enzymol. 65: 499-560 (1980), the entirety of which is herein incorporated by reference; Wissman and Hillen, Methods Enzymol. 208: 365-379 (1991), the entirety of which is herein incorporated by reference) and footprinting techniques employing DNase I (Galas and Schmitz, Nucleic Acids Res. 5: 3157-3170 (1978), the entirety of which is herein incorporated by reference), 1,10-phenanthroline-copper ion methods (Sigman et al., Methods Enzymol. 208: 365-379 (1991), the entirety of which is herein incorporated by reference) or hydroxyl radical methods (Dixon et al., Methods Enzymol. 208: 380-413 (1991), the entirety of which is herein incorporated by reference). It is understood that one or more of the nucleic acid molecules of the present invention, preferably one or more of the EST nucleic acid molecules of the present invention may be utilized to identify a protein or fragment thereof that specifically binds to a nucleic acid molecule of the present invention. It is also understood that one or more of the protein molecules or fragments thereof of the present invention may be utilized to identify a nucleic acid molecule that specifically binds to it.

[0175] The two-hybrid system is based on the fact that many cellular functions are carried out by proteins that interact (physically) with one another. Two-hybrid systems have been used to probe the function of new proteins (Chien et al., Proc. Natl. Acad. Sci. (U.S.A.) 88: 9578-9582 (1991) the entirety of which is herein incorporated by reference; Durfee et al., Genes Dev. 7: 555-569,(1993) the entirety of which is herein incorporated by reference; Choi et al., Cell 78: 499-512 (1994), the entirety of which is herein incorporated by reference; Kranz et al., Genes Dev. 8: 313-327 (1994), the entirety of which is herein incorporated by reference).

[0176] Interaction mating techniques have facilitated a number of two-hybrid studies of protein-protein interaction. Interaction mating has been used to examine interactions between small sets of tens of proteins (Finley and Brent, Proc. Natl. Acad. Sci. (U.S.A.) 91: 12098-12984 (1994), the entirety of which is herein incorporated by reference), larger sets of hundreds of proteins, (Bendixen et al., Nucl. Acids Res. 22: 1778-1779 (1994), the entirety of which is herein incorporated by reference) and to comprehensively map proteins encoded by a small genome (Bartel et al., Nature Genetics 12: 72-77 (1996), the entirety of which is herein incorporated by reference). This technique utilizes proteins fused to the DNA-binding domain and proteins fused to the activation domain. They are expressed in two different haploid yeast strains of opposite mating type, and the strains are mated to determine if the two proteins interact. Mating occurs when haploid yeast strains come into contact and result in the fusion of the two haploids into a diploid yeast strain. An interaction can be determined by the activation of a two-hybrid reporter gene in the diploid strain. The primary advantage of this technique is that it reduces the number of yeast transformations needed to test individual interactions. It is understood that the protein-protein interactions of protein or fragments thereof of the present invention may be investigated using the two-hybrid system and that any of the nucleic acid molecules of the present invention that encode such proteins or fragments thereof may be used to transform yeast in the two-hybrid system.

[0177] Synechocystis 6803 is a photosynthetic Cyanobacterium capable of oxygenic photosynthesis as well as heterotrophic growth in the absence of light. The entire genome has been sequenced, and it is reported to have a circular genome size of 3.57 Mbp containing 3168 potential open reading frames. Open reading frames (ORFs) were identified based upon their homology to other reported ORFs and by using ORF identification computer programs. Sixteen hundred potential ORFs were assigned based on their homology to previously identified ORFs. Of these 1600 ORFs, 145 were identical to reported ORFs (Kaneko et al., DNA Research 3:109-36 (1996), herein incorporated by reference in its entirety).

[0178] Several prokaryote promoters have been used in Synechocystis to express heterologous genes including the tac, lac, and lambda phage promoters (Bryant (ed.), The Molecular Biology of Cyanobacteria, Kluwer Academic Publishers, (1994); Ferino and Chauvat, Gene 84:257-266 (1989), both of Which are herein incorporated by reference in their entirety). Several bacterial origins of replication such as RSF1010 and ACYC are reported to replicate in Synechocystis (Mermet-Bouvier and Chauvat, Current Microbiology 28:145-148 (1994); Kuhlemeier et al., Mol. Gen. Genet. 184:249-254 (1981), both of which are herein incorporated by reference in their entirety).

[0179] Synechocystis has been used to study gene regulation by gene replacement through homologous recombination or by gene disruption using antibiotic resistance markers (Pakrasi et al., EMBO 7:325-332 (1988), herein incorporated by reference in its entirety). In such gene regulation studies, double reciprocal homologous regions of the host genome flanking the gene of interest recombine to stably integrate the gene of interest into the genome. The gene of interest can be expressed once that gene has been stably integrated into the genome. Biochemical analysis can be performed to study the effect of the replaced or deleted gene.

[0180] It is understood that the agents of the present invention may be employed in a Synechocystis system.

[0181] Exogenous genetic material may be transferred into a plant cell and the plant cell regenerated into a whole, fertile or sterile plant. Exogenous genetic material is any genetic material, whether naturally occurring or otherwise, from any source that is capable of being inserted into any organism. Such genetic material may be transferred into either monocotyledons and dicotyledons including but not limited to the crops, maize and soybean (see specifically, Chistou, Particle Bombardment for Genetic Engineering of Plants, pp 63-69 (maize), pp 50-60 (soybean), Biotechnology Intelligence Unit. Academic Press, San Diego, Calif. (1996), the entirety of which is herein incorporated by reference and generally Chistou, Particle Bombardment for Genetic Engineering of Plants, Biotechnology Intelligence Unit. Academic Press, San Diego, Calif. (1996), the entirety of which is herein incorporated by reference).

[0182] Transfer of a nucleic acid that encodes for a protein can result in overexpression of that protein in a transformed cell or transgenic plant. One or more of the proteins or fragments thereof encoded by nucleic acid molecules of the present invention may be overexpressed in a transformed cell or transformed plant. Such overexpression may be the result of transient or stable transfer of the exogenous material.

[0183] Exogenous genetic material may be transferred into a plant cell by the use of a DNA vector or construct designed for such a purpose. Design of such a vector is generally within the skill of the art (see, Plant Molecular Biology: A Laboratory Manual eds. Clark, Springer, New York (1997), the entirety of which is herein incorporated by reference).

[0184] A construct or vector may include a plant promoter to express the protein or protein fragment of choice. A number of promoters which are active in plant cells have been described in the literature. These include the nopaline synthase (NOS) promoter (Ebert et al., Proc. Natl. Acad. Sci. (U.S.A) 84:5745-5749 (1987), the entirety of which is herein incorporated by reference), the octopine synthase (OCS) promoter (which are carried on tumor-inducing plasmids of Agrobacterium tumefaciens), the caulimovirus promoters such as the cauliflower mosaic virus (CaMV) 19S promoter (Lawton et al., Plant Mol. Biol. 9:315-324 (1987), the entirety of which is herein incorporated by reference) and the CAMV 35S promoter (Odell et al., Nature 313:810-812 (1985), the entirety of which is herein incorporated by reference), the figwort mosaic virus 35S-promoter, the light-inducible promoter from the small subunit of ribulose-1,5-bis-phosphate carboxylase (ssRUBISCO), the Adh promoter (Walker et al., Proc. Natl. Acad. Sci. (U.S.A.) 84:6624-6628 (1987), the entirety of which is herein incorporated by reference), the sucrose synthase promoter (Yang et al., Proc. Natl. Acad. Sci. (U.S.A.) 87:4144-4148 (1990), the entirety of which is herein incorporated by reference), the R gene complex promoter (Chandler et al., The Plant Cell 1:1175-1183 (1989), the entirety of which is herein incorporated by reference), and the chlorophyll a/b binding protein gene promoter, etc. These promoters have been used to create DNA constructs which have been expressed in plants; see, e.g., PCT publication WO 84/02913, herein incorporated by reference in its entirety.

[0185] Promoters which are known or are found to cause transcription of DNA in plant cells can be used in the present invention. Such promoters may be obtained from a variety of sources such as plants and plant viruses. It is preferred that the particular promoter selected should be capable of causing sufficient expression to result in the production of an effective amount of a protein to cause the desired phenotype. In addition to promoters which are known to cause transcription of DNA in plant cells, other promoters may be identified for use in the current invention by screening a plant cDNA library for genes which are selectively or preferably expressed in the target tissues or cells.

[0186] For the purpose of expression in source tissues of the plant, such as the leaf, seed, root or stem, it is preferred that the promoters utilized in the present invention have relatively high expression in these specific tissues. For this purpose, one may choose from a number of promoters for genes with tissue- or cell-specific or -enhanced expression. Examples of such promoters reported in the literature include the chloroplast glutamine synthetase GS2 promoter from pea (Edwards et al., Proc. Natl. Acad. Sci. (U.S.A.) 87:3459-3463 (1990), herein incorporated by reference in its entirety), the chloroplast fructose-1,6-biphosphatase (FBPase) promoter from wheat (Lloyd et al., Mol. Gen. Genet. 225:209-216 (1991), herein incorporated by reference in its entirety), the nuclear photosynthetic ST-LS1 promoter from potato (Stockhaus et al., EMBO J. 8:2445-2451 (1989), herein incorporated by reference in its entirety), the phenylalanine ammonia-lyase (PAL) promoter and the chalcone synthase (CHS) promoter from Arabidopsis thaliana. Also reported to be active in photosynthetically active tissues are the ribulose-1,5-bisphosphate carboxylase (RbcS) promoter from eastern larch (Larix laricina), the promoter for the cab gene, cab6, from pine (Yamamoto et al., Plant Cell Physiol. 35:773-778 (1994), herein incorporated by reference in its entirety), the promoter for the Cab-1 gene from wheat (Fejes et al., Plant Mol. Biol 15:921-932 (1990), herein incorporated by reference in its entirety), the promoter for the CAB-1 gene from spinach (Lubberstedt et al., Plant Physiol. 104:997-1006 (1994), herein incorporated by reference in its entirety), the promoter for the cab1R gene from rice (Luan et al., Plant Cell. 4:971-981 (1992), the entirety of which is herein incorporated by reference), the pyruvate, orthophosphate dikinase (PPDK) promoter from maize (Matsuoka et al., Proc. Natl. Acad. Sci. (U.S.A.) 90: 9586-9590 (1993), herein incorporated by reference in its entirety), the promoter for the tobacco Lhcb1*2 gene (Cerdan et al., Plant Mol. Biol. 33: 245-255. (1997), herein incorporated by reference in its entirety), the Arabidopsis thaliana SUC2 sucrose-H+ symporter promoter (Truernit et al., Planta. 196: 564-570 (1995), herein incorporated by reference in its entirety), and the promoter for the thylacoid membrane proteins from spinach (psaD, psaF, psae, PC, FNR, atpC, atpD, cab, rbcS). Other promoters for the chlorophyl a/b-binding proteins may also be utilized in the present invention, such as the promoters for LhcB gene and PsbP gene from white mustard (Sinapis alba; Kretsch et al., Plant Mol. Biol. 28: 219-229 (1995), the entirety of which is herein incorporated by reference).

[0187] For the purpose of expression in sink tissues of the plant, such as the tuber of the potato plant, the fruit of tomato, or the seed of maize, wheat, rice, and barley, it is preferred that the promoters utilized in the present invention have relatively high expression in these specific tissues. A number of promoters for genes with tuber-specific or -enhanced expression are known, including the class I patatin promoter (Bevan et al., EMBO J. 8: 1899-1906 (1986); Jefferson et al., Plant Mol. Biol. 14: 995-1006 (1990), both of which are herein incorporated by reference in its entirety), the promoter for the potato tuber ADPGPP genes, both the large and small subunits, the sucrose synthase promoter (Salanoubat and Belliard, Gene. 60: 47-56 (1987), Salanoubat and Belliard, Gene. 84: 181-185 (1989), both of which are incorporated by reference in their entirety), the promoter for the major tuber proteins including the 22 kd protein complexes and proteinase inhibitors (Hannapel, Plant Physiol. 101: 703-704 (1993), herein incorporated by reference in its entirety), the promoter for the granule bound starch synthase gene (GB SS) (Visser et al., Plant Mol. Biol. 17: 691-699 (1991), herein incorporated by reference in its entirety), and other class I and II patatins promoters (Koster-Topfer et al., Mol Gen Genet. 219: 390-396 (1989); Mignery et al., Gene. 62: 27-44 (1988), both of which are herein incorporated by reference in their entirety).

[0188] Other promoters can also be used to express a fructose 1,6 bisphosphate aldolase gene in specific tissues, such as seeds or fruits. The promoter for β-conglycinin (Chen et al., Dev. Genet. 10: 112-122 (1989), herein incorporated by reference in its entirety) or other seed-specific promoters such as the napin and phaseolin promoters, can be used. The zeins are a group of storage proteins found in maize endosperm. Genomic clones for zein genes have been isolated (Pedersen et al., Cell 29: 1015-1026 (1982), herein incorporated by reference in its entirety), and the promoters from these clones, including the 15 kD, 16 kD, 19 kD, 22 kD, 27 kD, and gamma genes, could also be used. Other promoters known to function, for example, in maize, include the promoters for the following genes: waxy, Brittle, Shrunken 2, Branching enzymes I and II, starch synthases, debranching enzymes, oleosins, glutelins, and sucrose synthases. A particularly preferred promoter for maize endosperm expression is the promoter for the glutelin gene from rice, more particularly the Osgt-1 promoter (Zheng et al., Mol. Cell Biol. 13: 5829-5842 (1993), herein incorporated by reference in its entirety). Examples of promoters suitable for expression in wheat include those promoters for the ADPglucose pyrophosphorylase (ADPGPP) subunits, the granule bound and other starch synthases, the branching and debranching enzymes, the embryogenesis-abundant proteins, the gliadins, and the glutenins. Examples of such promoters in rice include those promoters for the ADPGPP subunits, the granule bound and other starch synthases, the branching enzymes, the debranching enzymes, sucrose synthases, and the glutelins. A particularly preferred promoter is the promoter for rice glutelin, Osgt-1. Examples of such promoters for barley include those for the ADPGPP subunits, the granule bound and other starch synthases, the branching enzymes, the debranching enzymes, sucrose synthases, the hordeins, the embryo globulins, and the aleurone specific proteins.

[0189] Root specific promoters may also be used. An example of such a promoter is the promoter for the acid chitinase gene (Samac et al., Plant Mol. Biol. 25: 587-596 (1994), the entirety of which is herein incorporated by reference). Expression in root tissue could also be accomplished by utilizing the root specific subdomains of the CaMV35S promoter that have been identified (Lam et al., Proc. Natl. Acad. Sci. (U.S.A.) 86:7890-7894 (1989), herein incorporated by reference in its entirety). Other root cell specific promoters include those reported by Conkling et al. (Conkling et al., Plant Physiol. 93:1203-1211 (1990), the entirety of which is herein incorporated by reference).

[0190] Additional promoters that may be utilized are described, for example, in U.S. Pat. Nos. 5,378,619, 5,391,725, 5,428,147, 5,447,858, 5,608,144, 5,608,144, 5,614,399, 5,633,441, 5,633,435, and 4,633,436, all of which are herein incorporated in their entirety. In addition, a tissue specific enhancer may be used (Fromm et al., The Plant Cell 1:977-984 (1989), the entirety of which is herein incorporated by reference).

[0191] Constructs or vectors may also include, with the coding region of interest, a nucleic acid sequence that acts, in whole or in part, to terminate transcription of that region. For example, such sequences have been isolated including the Tr7 3′ sequence and the nos 3′ sequence (Ingelbrecht et al., The Plant Cell 1:671-680 (1989), the entirety of which is herein incorporated by reference; Bevan et al., Nucleic Acids Res. 11:369-385 (1983), the entirety of which is herein incorporated by reference), or the like.

[0192] A vector or construct may also include regulatory elements. Examples of such include the Adh intron 1 (Callis et al., Genes and Develop. 1:1183-1200 (1987), the entirety of which is herein incorporated by reference), the sucrose synthase intron (Vasil et al., Plant Physiol. 91:1575-1579 (1989), the entirety of which is herein incorporated by reference) and the TMV omega element (Gallie et al., The Plant Cell 1:301-311 (1989), the entirety of which is herein incorporated by reference). These and other regulatory elements may be included when appropriate.

[0193] A vector or construct may also include a selectable marker. Selectable markers may also be used to select for plants or plant cells that contain the exogenous genetic material. Examples of such include, but are not limited to, a neo gene (Potrykus et al., Mol. Gen. Genet. 199:183-188 (1985), the entirety of which is herein incorporated by reference) which codes for kanamycin resistance and can be selected for using kanamycin, G418, etc.; a bar gene which codes for bialaphos resistance; a mutant EPSP synthase gene (Hinchee et al., Bio/Technology 6:915-922 (1988), the entirety of which is herein incorporated by reference) which encodes glyphosate resistance; a nitrilase gene which confers resistance to bromoxynil (Stalker et al., J. Biol. Chem. 263:6310-6314 (1988), the entirety of which is herein incorporated by reference); a mutant acetolactate synthase gene (ALS) which confers imidazolinone or sulphonylurea resistance (European Patent Application 154,204 (Sep. 11, 1985), the entirety of which is herein incorporated by reference); and a methotrexate resistant DHFR gene (Thillet et al., J. Biol. Chem. 263:12500-12508 (1988), the entirety of which is herein incorporated by reference).

[0194] A vector or construct may also include a transit peptide. Incorporation of a suitable chloroplast transit peptide may also be employed (European Patent Application Publication Number 0218571, the entirety of which is herein incorporated by reference). Translational enhancers may also be incorporated as part of the vector DNA. DNA constructs could contain one or more 5′ non-translated leader sequences which may serve to enhance expression of the gene products from the resulting mRNA transcripts. Such sequences may be derived from the promoter selected to express the gene or can be specifically modified to increase translation of the mRNA. Such regions may also be obtained from viral RNAs, from suitable eukaryotic genes, or from a synthetic gene sequence. For a review of optimizing expression of transgenes, see Koziel et al., Plant Mol. Biol. 32:393-405 (1996), the entirety of which is herein incorporated by reference.

[0195] A vector or construct may also include a screenable marker. Screenable markers may be used to monitor expression. Exemplary screenable markers include a β-glucuronidase or uidA gene (GUS) which encodes an enzyme for which various chromogenic substrates are known (Jefferson, Plant Mol. Biol, Rep. 5: 387-405 (1987), the entirety of which is herein incorporated by reference; Jefferson et al., EMBO J. 6: 3901-3907 (1987), the entirety of which is herein incorporated by reference); an R-locus gene, which encodes a product that regulates the production of anthocyanin pigments (red color) in plant tissues (Dellaporta et al., Stadler Symposium 11:263-282 (1988), the entirety of which is herein incorporated by reference); a β-lactamase gene (Sutcliffe et al., Proc. Natl. Acad. Sci. (U.S.A.) 75: 3737-3741 (1978), the entirety of which is herein incorporated by reference), a gene which encodes an enzyme for which various chromogenic substrates are known (e.g., PADAC, a chromogenic cephalosporin); a luciferase gene (Ow et al., Science 234: 856-859 (1986), the entirety of which is herein incorporated by reference) a xylE gene (Zukowsky et al., Proc. Natl. Acad. Sci. (U.S.A.) 80:1101-1105 (1983), the entirety of which is herein incorporated by reference) which encodes a catechol diozygenase that can convert chromogenic catechols; an α-amylase gene (Ikatu et al., Bio/Technol. 8:241-242 (1990), the entirety of which is herein incorporated by reference); a tyrosinase gene (Katz et al., J. Gen. Microbiol. 129:2703-2714 (1983), the entirety of which is herein incorporated by reference) which encodes an enzyme capable of oxidizing tyrosine to DOPA and dopaquinone which in turn condenses to melanin; an α-galactosidase, which will turn a chromogenic α-galactose substrate.

[0196] Included within the terms “selectable or screenable marker genes” are also genes which encode a scriptable marker whose secretion can be detected as a means of identifying or selecting for transformed cells. Examples include markers which encode a secretable antigen that can be identified by antibody interaction, or even secretable enzymes which can be detected catalytically. Secretable proteins fall into a number of classes, including small, diffusible proteins detectable, e.g., by ELISA, small active enzymes detectable in extracellular solution (e.g., α-amiylase, β-lactamase, phosphinothricin transferase), or proteins which are inserted or trapped in the cell wall (such as proteins which include a leader sequence such as that found in the expression unit of extension or tobacco PR-S). Other possible selectable and/or screenable marker genes will be apparent to those of skill in the art.

[0197] Methods and compositions for transforming a bacteria and other microorganisms are known in the art (see for example Sambrook et al., Molecular Cloning: A Laboratory Manual, Second Edition, Cold Spring Harbor Laboratory Press, Cold Spring Harbor, N.Y., (1989), the entirety of which is herein incorporated by reference).

[0198] There are many methods for introducing transforming nucleic acid molecules into plant cells. Suitable methods are believed to include virtually any method by which nucleic acid molecules may be introduced into a cell, such as by Agrobacterium infection or direct delivery of nucleic acid molecules such as, for example, by PEG-mediated transformation, by electroporation or by acceleration of DNA coated particles, etc. (Pottykus, Ann. Rev. Plant Physiol. Plant Mol. Biol. 42:205-225 (1991), the entirety of which is herein incorporated by reference; Vasil, Plant Mol. Biol. 25: 925-937 (1994), the entirety of which is herein incorporated by reference. For example, electroporation has been used to transform maize protoplasts (Fromm et al., Nature 312:791-793 (1986), the entirety of which is herein incorporated by reference).

[0199] Other vector systems suitable for introducing transforming DNA into a host plant cell includes but is not limited to binary artificial chromosome (BIBAC) vectors (Hamilton et al., Gene 200:107-116, (1997), the entirety of which is herein incorporated by reference, and transfection with RNA viral vectors (Della-Cioppa et al., Ann. N.Y. Acad. Sci. (1996), 792 (Engineering Plants for Commercial Products and Applications), 57-61, the entirety of which is herein incorporated by reference.

[0200] Technology for introduction of DNA into cells is well known to those of skill in the art. Four general methods for delivering a gene into cells have been described: (1) chemical methods (Graham and van der Eb, Virology, 54:536-539 (1973), the entirety of which is herein incorporated by reference); (2) physical methods such as microinjection (Capecchi, Cell 22:479-488 (1980), electroporation (Wong and Neumann, Biochem. Biophys. Res. Commun., 107:584-587 (1982); Fromm et al., Proc. Natl. Acad. Sci. USA, 82:5824-5828 (1985); U.S. Pat. No. 5,384,253; and the gene gun (Johnston and Tang, Methods Cell Biol. 43:353-365 (1994), all of which the entirety is herein incorporated by reference; (3) viral vectors (Clapp, Clin. Perinatol., 20:155-168 (1993); Lu et al., J. Exp. Med., 178:2089-2096 (1993); Eglitis and Anderson, Biotechniques, 6:608-614 (1988), all of which the entirety is herein incorporated by reference); and (4) receptor-mediated mechanisms (Curiel et. al., Hum. Gen. Ther., 3:147-154 (1992); Wagner et al., Proc. Natl. Acad. Sci. USA, 89:6099-6103 (1992), all of which the entirety is herein incorporated by reference).

[0201] Acceleration methods that may be used include, for example, microprojectile bombardment and the like. One example of a method for delivering transforming nucleic acid molecules to plant cells is microprojectile bombardment. This method has been reviewed by Yang and Christou, eds., Particle Bombardment Technology for Gene Transfer, Oxford Press, Oxford, England (1994), the entirety of which is herein incorporated by reference). Non-biological particles (microprojectiles) that may be coated with nucleic acids and delivered into cells by a propelling force. Exemplary particles include those comprised of tungsten, gold, platinum, and the like.

[0202] A particular advantage of microprojectile bombardment, in addition to it being an effective means of reproducibly, and stably transforming monocotyledons, is that neither the isolation of protoplasts (Cristou et al., Plant Physiol. 87:671-674 (1988), the entirety of which is herein incorporated by reference) nor the susceptibility of Agrobacterium infection is required. An illustrative embodiment of a method for delivering DNA into maize cells by acceleration is a biolistics g-particle delivery system, which can be used to propel particles coated with DNA through a screen, such as a stainless steel or Nytex screen, onto a filter surface covered with corn cells cultured in suspension. Gordon-Kamm et al., describes the basic procedure for coating tungsten particles with DNA (Gordon-Kamm et al., Plant Cell 2: 603-618 (1990), the entirety of which is herein incorporated by reference). The screen disperses the tungsten nucleic acid particles so that they are not delivered to the recipient cells in large aggregates. A particle delivery system suitable for use with the present invention is the helium acceleration PDS-1000/He gun which is available from Bio-Rad Laboratories (Bio-Rad, Hercules, Calif.)(Sanford et al., Technique 3:3-16 (1991), the entirety of which is herein incorporated by reference).

[0203] For the bombardment, cells in suspension may be concentrated on filters. Filters containing the cells to be bombarded are positioned at an appropriate distance below the microprojectile stopping plate. If desired, one or more screens are also positioned between the gun and the cells to be bombarded.

[0204] Alternatively, immature embryos or other target cells may be arranged on solid culture medium. The cells to be bombarded are positioned at an appropriate distance below the macroprojectile stopping plate. If desired, one or more screens are also positioned between the acceleration device and the cells to be bombarded. Through the use of techniques set forth herein one may obtain up to 1000 or more foci of cells transiently expressing a marker gene. The number of cells in a focus which express the exogenous gene product 48 hours post-bombardment often range from one to ten and average one to three.

[0205] In bombardment transformation, one may optimize the prebombardment culturing conditions and the bombardment parameters to yield the maximum numbers of stable transformants. Both the physical and biological parameters for bombardment are important in this technology. Physical factors are those that involve manipulating the DNA/microprojectile precipitate or those that affect the flight and velocity of either the macro- or microprojectiles. Biological factors include all steps involved in manipulation of cells before and immediately after bombardment, the osmotic adjustment of target cells to help alleviate the trauma associated with bombardment, and also the nature of the transforming DNA, such as linearized DNA or intact supercoiled plasmids. It is believed that pre-bombardment manipulations are especially important for successful transformation of immature embryos. In another alternative embodiment, plastids can be stably transformed. Methods disclosed for plastid transformation in higher plants include the particle gun delivery of DNA containing a selectable marker and targeting of the DNA to the plastid genome through homologous recombination (Svab et al., Proc. Natl. Acad. Sci. (U.S.A) 87:8526-8530 (1990); Svab and Maliga, Proc. Natl. Acad. Sci. (U.S.A.) 90:913-917 (1993); Staub and Maliga, EMBO J. 12:601-606 (1993); U.S. Pat. Nos. 5,451,513 and 5,545,818, all of which are herein incorporated by reference in their entirety).

[0206] Accordingly, it is contemplated that one may wish to adjust various aspects of the bombardment parameters in small scale studies to fully optimize the conditions. One may particularly wish to adjust physical parameters such as gap distance, flight distance, tissue distance, and helium pressure. One may also minimize the trauma reduction factors by modifying conditions which influence the physiological state of the recipient cells and which may therefore influence transformation and integration efficiencies. For example, the osmotic state, tissue hydration and the subculture stage or cell cycle of the recipient cells may be adjusted for optimum transformation. The execution of other routine adjustments will be known to those of skill in the art in light of the present disclosure.

[0207] Agrobacterium-mediated transfer is a widely applicable system for introducing genes into plant cells because the DNA can be introduced into whole plant tissues, thereby bypassing the need for regeneration of an intact plant from a protoplast. The use of Agrobacterium-mediated plant integrating vectors to introduce DNA into plant cells is well known in the art. See, for example, the methods described (Fraley et al., Biotechnology 3:629-635 (1985); Rogers et al., Meth. In Enzymol, 153:253-277 (1987), both of which are herein incorporated by reference in their entirety. Further, the integration of the Ti-DNA is a relatively precise process resulting in few rearrangements. The region of DNA to be transferred is defined by the border sequences, and intervening DNA is usually inserted into the plant genome as described (Spielmann et al., Mol. Gen. Genet., 205:34 (1986), the entirety of which is herein incorporated by reference).

[0208] Modem Agrobacterium transformation vectors are capable of replication in E. coli as well as Agrobacterium, allowing for convenient manipulations as described (Klee et al, In: Plant DNA Infectious Agents, T. Hohn and J. Schell, eds., Springer-Verlag, New York, pp. 179-203 (1985), the entirety of which is herein incorporated by reference. Moreover, recent technological advances in vectors for Agrobacterium-mediated gene transfer have improved the arrangement of genes and restriction sites in the vectors to facilitate construction of vectors capable of expressing various polypeptide coding genes. The vectors described have convenient multi-linker regions flanked by a promoter and a polyadenylation site for direct expression of inserted polypeptide coding genes and are suitable for present purposes (Rogers et al., Meth. In Enzymol., 153:253-277 (1987), the entirety of which is herein incorporated by reference). In addition, Agrobacterium containing both armed and disarmed Ti genes can be used for the transformations. In those plant strains where Agrobacterium-mediated transformation is efficient, it is the method of choice because of the facile and defined nature of the gene transfer.

[0209] A transgenic plant formed using Agrobacterium transformation methods typically contains a single gene on one chromosome. Such transgenic plants can be referred to as being heterozygous for the added gene. More preferred is a transgenic plant that is homozygous for the added structural gene; i.e., a transgenic plant that contains two added genes, one gene at the same locus on each chromosome of a chromosome pair. A homozygous transgenic plant can be obtained by sexually mating (selfing) an independent segregant transgenic plant that contains a single added gene, germinating some of the seed produced and analyzing the resulting plants produced for the gene of interest.

[0210] It is also to be understood that two different transgenic plants can also be mated to produce offspring that contain two independently segregating added, exogenous genes. Selfing of appropriate progeny can produce plants that are homozygous for both added, exogenous genes that encode a polypeptide of interest. Back-crossing to a parental plant and out-crossing with a non-transgenic plant are also contemplated, as is vegetative propagation.

[0211] Transformation of plant protoplasts can be achieved using methods based on calcium phosphate precipitation, polyethylene glycol treatment, electroporation, and combinations of these treatments. See, for example, Potrykus et al., Mol. Gen. Genet., 205:193-200 (1986); Lorz et al., Mol. Gen. Genet., 199:178, (1985); Fromm et al., Nature, 319:791,(1986); Uchimiya et al., Mol. Gen. Genet.:204:204, (1986); Callis et al., Genes and Development, 1183,(1987); Marcotte et al., Nature, 335:454, (1988), all of which the entirety is herein incorporated by reference.

[0212] Application of these systems to different plant strains depends upon the ability to regenerate that particular plant strain from protoplasts. Illustrative methods for the regeneration of cereals from protoplasts are described (Fujimura et al., Plant Tissue Culture Letters, 2:74,(1985); Toriyama et al., Theor Appl. Genet. 205:34. (1986); Yamada et al., Plant Cell Rep., 4:85, (1986); Abdullah et al., Biotechnology, 4:1087, (1986), all of which the entirety is herein incorporated by reference).

[0213] To transform plant strains that cannot be successfully regenerated from protoplasts, other ways to introduce DNA into intact cells or tissues can be utilized. For example, regeneration of cereals from immature embryos or explants can be effected as described (Vasil, Biotechnology, 6:397,(1988), the entirety of which is herein incorporated by reference). In addition, “particle gun” or high-velocity microprojectile technology can be utilized (Vasil et al., Bio/Technology 10:667, (1992), the entirety of which is herein incorporated by reference).

[0214] Using the latter technology, DNA is carried through the cell wall and into the cytoplasm on the surface of small metal particles as described (Klein et al., Nature, 328:70, (1987); Klein et al., Proc. Natl. Acad. Sci. USA, 85:8502-8505, (1988); McCabe et al., Biotechnology, 6:923, (1988),.all of which the entirety is herein incorporated by reference). The metal particles penetrate through several layers of cells and thus allow the transformation of cells within tissue explants.

[0215] Other methods of cell transformation can also be used and include but are not limited to introduction of DNA into plants by direct DNA transfer into pollen (Hess et al., Intern Rev. Cytol., 107:367, (1987); Luo et al., Plant Mol Biol. Reporter, 6:165, (1988), all of which the entirety is herein incorporated by reference), by direct injection of DNA into reproductive organs of a plant (Pena et al., Nature, 325:274, (1987), the entirety of which is herein incorporated by reference), or by direct injection of DNA into the cells of immature embryos followed by the rehydration of dessicated embryos (Neuhaus et al., Theor. Appl. Genet., 75:30, (1987), the entirety of which is herein incorporated by reference).

[0216] The regeneration, development, and cultivation of plants from single plant protoplast transformants or from various transformed explants is well known in the art (Weissbach and Weissbach, In: Methods for Plant Molecular Biology, (Eds.), Academic Press, Inc. San Diego, Calif., (1988), the entirety of which is herein incorporated by reference). This regeneration and growth process typically includes the steps of selection of transformed cells, culturing those individualized cells through the usual stages of embryonic development through the rooted plantlet stage. Transgenic embryos and seeds are similarly regenerated. The resulting transgenic rooted shoots are thereafter planted in an appropriate plant growth medium such as soil.

[0217] The development or regeneration of plants containing the foreign, exogenous gene that encodes a protein of interest is well known in the art. Preferably, the regenerated plants are self-pollinated to provide homozygous transgenic plants, as discussed before. Otherwise, pollen obtained from the regenerated plants is crossed to seed-grown plants of agronomically important lines. Conversely, pollen from plants of these important lines is used to pollinate regenerated plants. A transgenic plant of the present invention containing a desired polypeptide is cultivated using methods well known to one skilled in the art.

[0218] There are a variety of methods for the regeneration of plants from plant tissue. The particular method of regeneration will depend on the starting plant tissue and the particular plant species to be regenerated.

[0219] Methods for transforming dicots, primarily by use of Agrobacterium tumefaciens, and obtaining transgenic plants have been published for cotton (U.S. Pat. No. 5,004,863, U.S. Pat. No. 5,159,135, U.S. Pat. No. 5,518,908, all of which the entirety is herein incorporated by reference); soybean (U.S. Pat. No. 5,569,834, U.S. Pat. No. 5,416,011, McCabe et al., Biotechnology 6:923, (1988), Christou et al., Plant Physiol., 87:671-674 (1988), all of which the entirety is herein incorporated by reference); Brassica ( U.S. Pat. No. 5,463,174, the entirety of which is herein incorporated by reference); peanut (Cheng et al., Plant Cell Rep. 15: 653-657 (1996), McKently et al., Plant Cell Rep. 14:699-703 (1995), all of which the entirety is herein incorporated by reference); papaya (Yang et al., (1996), the entirety of which is herein incorporated by reference); pea (Grant et al., Plant Cell Rep. 15:254-258, (1995), the entirety of which is herein incorporated by reference).

[0220] Transformation of monocotyledons using electroporation, particle bombardment, and Agrobacterium have also been reported. Transformation and plant regeneration have been achieved in asparagus (Bytebier et al., Proc. Natl. Acad. Sci. USA 84:5345, (1987), the entirety of which is herein incorporated by reference); barley (Wan and Lemaux, Plant Physiol 104:37, (1994), the entirety of which is herein incorporated by reference); maize (Rhodes et al., Science 240: 204, (1988), Gordon-Kamm et al., Plant Cell, 2:603, (1990), Fromm et al., Bio/Technology 8:833, (1990), Koziel et al., Bio/Technology 11:194, (1993), Armstrong et al., Crop Science 35:550-557, (1995), all of which the entirety is herein incorporated by reference); oat (Somers et al., Bio/Technology, 10:1589, (1992), the entirety of which is herein incorporated by reference); orchardgrass (Horn et al., Plant Cell Rep. 7:469, (1988), the entirety of which is herein incorporated by reference); rice (Toriyama et al., Theor Appl Genet. 205:34, (1986); Park et al., Plant Mol. Biol., 32: 1135-1148, (1996); Abedinia et al., Aust. J. Plant Physiol. 24:133-141, (1997); Zhang and Wu, Theor. Appl. Genet. 76:835, (1988); Zhang et al. Plant Cell Rep. 7:379, (1988); Battraw and Hall, Plant Sci. 86:191-202, (1992); Christou et al., Bio/Technology 9:957, (1991), all of which the entirety is herein incorporated by reference); sugarcane (Bower and Birch, Plant J. 2:409, (1992), the entirety of which is herein incorporated by reference); tall fescue (Wang et al., Bio/Technology 10:691, (1992), the entirety of which is herein incorporated by reference), and wheat (Vasil et al., Bio/Technology 10:667, (1992), the entirety of which is herein incorporated by reference; U.S. Pat. No. 5,631,152, the entirety of which is herein incorporated by reference.

[0221] Assays for gene expression based on the transient expression of cloned nucleic acid constructs have been developed by introducing the nucleic acid molecules into plant cells by polyethylene glycol treatment, electroporation, or particle bombardment (Marcotte, et al., Nature, 335: 454-457 (1988), the entirety of which is herein incorporated by reference; Marcotte, et al., Plant Cell, 1. 523-532 (1989), the entirety of which is herein incorporated by reference; McCarty, et al., Cell 66: 895-905 (1991), the entirety of which is herein incorporated by reference; Hattori, et al., Genes Dev. 6: 609-618 (1992), the entirety of which is herein incorporated by reference; Goff, et al., EMBO J. 9: 2517-2522 (1990), the entirety of which is herein incorporated by reference). Transient expression systems may be used to functionally dissect gene constructs (see generally, Mailga et al., Methods in Plant Molecular Biology, Cold Spring Harbor Press (1995)).

[0222] Any of the nucleic acid molecules of the present invention may be introduced into a plant cell in a permanent or transient manner in combination with other genetic elements such as vectors, promoters enhancers etc. Further any of the nucleic acid molecules of the present invention may be introduced into a plant cell in a manner that allows for over expression of the protein or fragment thereof encoded by the nucleic acid molecule.

[0223] Cosuppression is the reduction in expression levels, usually at the level of RNA, of a particular endogenous gene or gene family by the expression of a homologous sense construct that is capable of transcribing mRNA of the same strandedness as the transcript of the endogenous gene (Napoli et al., Plant Cell 2: 279-289 (1990), the entirety of which is herein incorporated by reference; van der Krol et al., Plant Cell 2: 291-299 (1990), the entirety of which is herein incorporated by reference). Cosuppression may result from stable transformation with a single copy nucleic acid molecule that is homologous to a nucleic acid sequence found with the cell (Prolls and Meyer, Plant J. 2:465-475 (1992), the entirety of which is herein incorporated by reference) or with multiple copies of a nucleic acid molecule that is homologous to a nucleic acid sequence found with the cell (Mittlesten et al., Mol. Gen. Genet. 244: 325-330 (1994), the entirety of which is herein incorporated by reference). Genes, even though different, linked to homologous promoters may result in the cosuppression of the linked genes (Vaucheret, C. R. Acad. Sci. III 316: 1471-1483 (1993), the entirety of which is herein incorporated by reference).

[0224] This technique has, for example been applied to generate white flowers from red petunia and tomatoes that do not ripen on the vine. Up to 50% of petunia transformants that contained a sense copy of the chalcone synthase (CHS) gene produced white flowers or floral sectors; this was as a result of the post-transcriptional loss of mRNA encoding CHS (Flavell, Proc. Natl. Acad. Sci. (U.S.A.) 91:3490-3496 (1994)), the entirety of which is herein incorporated by reference). Cosuppression may require the coordinate transcription of the transgene and the endogenous gene, and can be reset by a developmental control mechanism (Jorgensen, Trends Biotechnol, 8:340344 (1990), the entirety of which is herein incorporated by reference; Meins and Kunz, In: Gene Inactivation and Homologous Recombination in Plants (Paszkowski, J., ed.), pp. 335-348. Kluwer Academic, Netherlands (1994), the entirety of which is herein incorporated by reference).

[0225] It is understood that one or more of the nucleic acids of the present invention including those comprising SEQ ID NO:1 through SEQ ID NO:10952 or complement thereof or fragments of either or other nucleic acid molecules of the present invention may be introduced into a plant cell and transcribed using an appropriate promoter with such transcription resulting in the co-suppression of an endogenous protein.

[0226] Antisense approaches are a way of preventing or reducing gene function by targeting the genetic material (Mol et al., FEBS Lett. 268: 427-430 (1990), the entirety of which is herein incorporated by reference). The objective of the antisense approach is to use a sequence complementary to the target gene to block its expression and create a mutant cell line or organism in which the level of a single chosen protein is selectively reduced or abolished. Antisense techniques have several advantages over other ‘reverse genetic’ approaches. The site of inactivation and its developmental effect can be manipulated by the choice of promoter for antisense genes or by the timing of external application or microinjection. Antisense can manipulate its specificity by selecting either unique regions of the target gene or regions where it shares homology to other related genes (Hiatt et al., In Genetic Engineering, Setlow (ed.), Vol. 11, New York: Plenum 49-63 (1989), the entirety of which is herein incorporated by reference).

[0227] The principle of regulation by antisense RNA is that RNA that is complementary to the target mRNA is introduced into cells, resulting in specific RNA:RNA duplexes being formed by base pairing between the antisense substrate and the target mRNA (Green et al., Annu. Rev. Biochem. 55: 569-597 (1986), the entirety of which is herein incorporated by reference). Under one embodiment, the process involves the introduction and expression of an antisense gene sequence. Such a sequence is one in which part or all of the normal gene sequences are placed under a promoter in inverted orientation so that the ‘wrong’ or complementary strand is transcribed into a noncoding antisense RNA that hybridizes with the target mRNA and interferes with its expression (Takayama and Inouye, Crit. Rev. Biochem. Mol. Biol. 25: 155-184 (1990), the entirety of which is herein incorporated by reference). An antisense vector is constructed by standard procedures and introduced into cells by transformation, transfection, electroporation, microinjection, or by infection, etc. The type of transformation and choice of vector will determine whether expression is transient or stable. The promoter used for the antisense gene may influence the level, timing, tissue, specificity, or inducibility of the antisense inhibition.

[0228] It is understood that protein synthesis activity in a plant cell may be reduced or depressed by growing a transformed plant cell containing a nucleic acid molecule whose non-transcribed strand encodes a protein or fragment thereof.

[0229] Antibodies have been expressed in plants (Hiatt et al., Nature 342:76-78 (1989), the entirety of which is herein incorporated by reference; Conrad and Fielder, Plant Mol. Biol. 26: 1023-1030 (1994), the entirety of which is herein incorporated by reference), Cytoplamic expression of a scFv (single-chain Fv antibodies) has been reported to delay infection by artichoke mottled crinkle virus. Transgenic plants that express antibodies directed against endogenous proteins may exhibit a physiological effect (Philips et al., EMBO J. 16: 4489-4496 (1997), the entirety of which is herein incorporated by reference; Marion-Poll, Trends in Plant Science 2: 447-448 (1997), the entirety of which is herein incorporated by reference). For example, expressed anti-abscisic antibodies reportedly result in a general perturbation of seed development (Philips et al., EMBO J. 16: 4489-4496 (1997)).

[0230] Antibodies that are catalytic may also be expressed in plants (abzymes). The principle behind abzymes is that since antibodies may be raised against many molecules, this recognition ability can be directed toward generating antibodies that bind transition states to force a chemical reaction forward (Persidas, Nature Biotechnology 15:1313-1315 (1997), the entirety of which is herein incorporated by reference; Baca et al., Ann. Rev. Biophys. Biomol. Struct. 26:461-493 (1997), the entirety of which is herein incorporated by reference). The catalytic abilities of abzymes may be enhanced by site directed mutagensis. Examples of abzymes are, for example, set forth in U.S. Pat. No: 5,658,753; U.S. Pat. No. 5,632,990; U.S. Pat. No. 5,631,137; U.S. Pat. No. 5,602,015; U.S. Pat. No. 5,559,538; U.S. Pat. No. 5,576,174; U.S. Pat. No. 5,500,358; U.S. Pat. 5,318,897; U.S. Pat. No. 5,298,409; U.S. Pat. No. 5,258,289 and U.S. Pat. No. 5,194,585, all of which are herein incorporated in their entirety.

[0231] It is understood that any of the antibodies of the present invention may be expressed in plants and that such expression can result in a physiological effect. It is also understood that any of the expressed antibodies may be catalytic.

[0232] In addition to the above discussed procedures, practitioners are familiar with the standard resource materials which describe specific conditions and procedures for the construction, manipulation and isolation of macromolecules (e.g., DNA molecules, plasmids, etc.), generation of recombinant organisms and the screening and isolating of clones, (see, for example, Sambrook et al., Molecular Cloning: A Laboratory Manual, Cold Spring Harbor Press (1989); Mailga et al., Methods in Plant Molecular Biology, Cold Spring Harbor Press (1995), the entirety of which is herein incorporated by reference; Birren et al., Genome Analysis: Analyzing DNA, 1, Cold Spring Harbor, N.Y., the entirety of which is herein incorporated by reference).

[0233] The nucleotide sequence provided in SEQ ID NO:1; through SEQ ID NO:10952 or fragment thereof, or complement thereof, or a nucleotide sequence at least 90% identical, preferably 95%, identical even more preferably 99% or 100% identical to the sequence provided in SEQ ID NO:1 through SEQ ID NO:10952 or fragment thereof, or complement thereof, can be “provided” in a variety of mediums to facilitate use fragment thereof. Such a medium can also provide a subset thereof in a form that allows a skilled artisan to examine the sequences.

[0234] In one application of this embodiment, a nucleotide sequence of the present invention can be recorded on computer readable media. As used herein, “computer readable media” refers to any medium that can be read and accessed directly by a computer. Such media include, but are not limited to: magnetic storage media, such as floppy discs, hard disc, storage medium, and magnetic tape: optical storage media such as CD-ROM; electrical storage media such as RAM and ROM; and hybrids of these categories such as magnetic/optical storage media. A skilled artisan can readily appreciate how any of the presently known computer readable mediums can be used to create a manufacture comprising computer readable medium having recorded thereon a nucleotide sequence of the present invention.

[0235] As used herein, “recorded” refers to a process for storing information on computer readable medium. A skilled artisan can readily adopt any of the presently known methods for recording information on computer readable medium to generate media comprising the nucleotide sequence information of the present invention. A variety of data storage structures are available to a skilled artisan for creating a computer readable medium having recorded thereon a nucleotide sequence of the present invention. The choice of the data storage structure will generally be based on the means chosen to access the stored information. In addition, a variety of data processor programs and formats can be used to store the nucleotide sequence information of the present invention on computer readable medium. The sequence information can be represented in a word processing text file, formatted in commercially-available software such as WordPerfect and Microsoft Word, or represented in the form of an ASCII file, stored in a database application, such as DB2, Sybase, Oracle, or the like. A skilled artisan can readily adapt any number of data processor structuring formats (e.g. text file or database) in order to obtain computer readable medium having recorded thereon the nucleotide sequence information of the present invention.

[0236] By providing one or more of nucleotide sequences of the present invention, a skilled artisan can routinely access the sequence information for a variety of purposes. Computer software is publicly available which allows a skilled artisan to access sequence information provided in a computer readable medium. The examples which follow demonstrate how software which implements the BLAST (Altschul et al., J. Mol. Biol. 215:403-410 (1990)) and BLAZE (Brutlag et al., Comp. Chem. 17:203-207 (1993), the entirety of which is herein incorporated by reference) search algorithms on a Sybase system can be used to identify open reading frames (ORFs) within the genome that contain homology to ORFs or proteins from other organisms. Such ORFs are protein-encoding fragments within the sequences of the present invention and are useful in producing commercially important proteins such as enzymes used in amino acid biosynthesis, metabolism, transcription, translation, RNA processing, nucleic acid and a protein degradation, protein modification, and DNA replication, restriction, modification, recombination, and repair.

[0237] The present invention further provides systems, particularly computer-based systems, which contain the sequence information described herein. Such systems are designed to identify commercially important fragments of the nucleic acid molecule of the present invention. As used herein, “a computer-based system” refers to the hardware means, software means, and data storage means used to analyze the nucleotide sequence information of the present invention. The minimum hardware means of the computer-based systems of the present invention comprises a central processing unit (CPU), input means, output means, and data storage means. A skilled artisan can readily appreciate that any one of the currently available computer-based system are suitable for use in the present invention.

[0238] As indicated above, the computer-based systems of the present invention comprise a data storage means having stored therein a nucleotide sequence of the present invention and the necessary hardware means and software means for supporting and implementing a search means. As used herein, “data storage means” refers to memory that can store nucleotide sequence information of the present invention, or a memory access means which can access manufactures having recorded thereon the nucleotide sequence information of the present invention. As used herein, “search means” refers to one or more programs which are implemented on the computer-based system to compare a target sequence or target structural motif with the sequence information stored within the data storage means. Search means are used to identify fragments or regions of the sequence of the present invention that match a particular target sequence or target motif. A variety of known algorithms are disclosed publicly and a variety of commercially available software for conducting search means are available and can be used in the computer-based systems of the present invention. Examples of such software include, but are not limited to, MacPattern (EMBL), BLASTIN and BLASTIX (NCBIA). One of the available algorithms or implementing software packages for conducting homology searches can be adapted for use in the present computer-based systems.

[0239] The most preferred sequence length of a target sequence is from about 10 to 100 amino acids or from about 30 to 300 nucleotide residues. However, it is well recognized that during searches for commercially important fragments of the nucleic acid molecules of the present invention, such as sequence fragments involved in gene expression and protein processing, may be of shorter length.

[0240] As used herein, “a target structural motif,” or “target motif,” refers to any rationally selected sequence or combination of sequences in which the sequences or sequence(s) are chosen based on a three-dimensional configuration which is formed upon the folding of the target motif. There are a variety of target motifs known in the art. Protein target motifs include, but are not limited to, enzymatic active sites and signal sequences. Nucleic acid target motifs include, but are not limited to, promoter sequences, cis elements, hairpin structures and inducible expression elements (protein binding sequences).

[0241] Thus, the present invention further provides an input means for receiving a target sequence, a data storage means for storing the target sequences of the present invention sequence identified using a search means as described above, and an output means for outputting the identified homologous sequences. A variety of structural formats for the input and output means can be used to input and output information in the computer-based systems of the present invention. A preferred format for an output means ranks fragments of the sequence of the present invention by varying degrees of homology to the target sequence or target motif. Such presentation provides a skilled artisan with a ranking of sequences which contain various amounts of the target sequence or target motif and identifies the degree of homology contained in the identified fragment.

[0242] A variety of comparing means can be used to compare a target sequence or target motif with the data storage means to identify sequence fragments sequence of the present invention. For example, implementing software which implement the BLAST and BLAZE algorithms (Altschul et al., J. Mol. Biol. 215:403-410 (1990)) can be used to identify open frames within the nucleic acid molecules of the present invention. A skilled artisan can readily recognize that any one of the publicly available homology search programs can be used as the search means for the computer-based systems of the present invention. Having now generally described the invention, the same will be more readily understood through reference to the following examples which are provided by way of illustration, and are not intended to be limiting of the present invention, unless specified.

### EXAMPLE 1

[0243] The cDNA library of the present invention designated LIB3222, is prepared from Triticum aestivum flowers. The wheat genotype W189-085, hard red winter wheat from HybriTech US (Wichita, Kans.), is used for the collection. All plants are grown in Metro-mix 350 with Osmocote in a growth chamber with a 16/8 hour day/night cycle. The daytime and nighttime temperatures are 20° C. and 16° C. respectively. Growth chambers are equipped with metal halide high intensity discharge lamps which deliver about 500 uE/m²/second. Humidity is maintained at 70%. Plants are sub-irrigated once a day for about one hour in the morning. No fertilizer is added into irrigation water. Wheat heads are harvested from plants at pre-anthesis (boot, Feekes stage 10), anthesis (flowering, Feekes stage 10.5), and post-anthesis (ripening, Feekes stage 11). Flowers are collected from the harvested heads and frozen in liquid nitrogen. The collected tissue is stored at −80° C. until total RNA preparation. The RNA is purified from the stored tissue and the cDNA library is constructed as described in Example 2.

[0244] The cDNA library of the present invention designated LIB3223, is prepared from Triticum aestivum flowers. The wheat genotype RL5710 (HybriTech US, Wichita, Kans.), a genotype developed by Ag Canada, is used for the collection. All plants are grown in Metro-mix 350 with Osmocote in a growth chamber with a 16/8 hour day/night cycle. The daytime and nighttime temperatures are 20° C. and 16° C. respectively. Growth chambers are equipped with metal halide high intensity discharge lamps which deliver about 500 uE/m²/second. Humidity is maintained at 70%. Plants.are sub-irrigated once a day for about one hour in the morning. No fertilizer is added into irrigation water. Wheat heads are harvested from plants at pre-anthesis (boot, Feekes stage 10), anthesis (flowering, Feekes stage 10.5), and post-anthesis (ripening, Feekes stage 11). Flowers are collected from the harvested heads and frozen in liquid nitrogen. The collected tissue is stored at −80° C. until total RNA preparation. The RNA is purified from the stored tissue and the cDNA library is constructed as described in Example 2.

[0245] The cDNA library of the present invention designated LIB3224, is prepared from Triticum aestivum roots. The wheat genotype RL57 1I (HybriTech US, Wichita, Kans.), a genotype developed by Ag Canada, is used for the collection. All plants are grown in Metro-mix 350 with Osmocote in a growth chamber with a 16/8 hour day/night cycle. The daytime and nighttime temperatures are 20° C. and 16° C. respectively. Growth chambers are equipped with metal halide high intensity discharge lamps which deliver about 500 uE/m²/second. Humidity is maintained at 70%. Plants are sub-irrigated once a day for about one hour in the morning. No fertilizer is added into irrigation water. Roots are harvested from plants at pre-anthesis (boot, Feekes stage 10), anthesis (flowering, Feekes stage 10.5), and post-anthesis (ripening, Feekes stage 11), washed free of soil, and frozen in liquid nitrogen. The collected tissue is stored at −80° C. until total RNA preparation. The RNA is purified from the stored tissue and the cDNA library is constructed as described in Example 2.

[0246] The cDNA library of the present invention designated LIB3225, is prepared from Triticum aestivum flowers. The wheat genotype Euro9316 (Phobos), European winter wheat from HybriTech (France), is used for the collection. All plants are grown in Metro-mix 350 with Osmocote in a growth chamber with a 16/8 hour day/night cycle. The daytime and nighttime temperatures are 20° C. and 16° C. respectively. Growth chambers are equipped with metal halide high intensity discharge lamps which deliver about 500 uE/m²/second. Humidity is maintained at 70%. Plants are sub-irrigated once a day for about one hour in the morning. No fertilizer is added into irrigation water. Wheat heads are harvested from plants at pre-anthesis (boot, Feekes stage 10), anthesis (flowering, Feekes stage 10.5), and post-anthesis (ripening, Feekes stage 11). Flowers are collected from the harvested heads and frozen in liquid nitrogen. The collected tissue is stored at −80° C. until total RNA preparation. The RNA is purified from the stored tissue and the cDNA library is constructed as described in Example 2.

[0247] The cDNA library of the present invention designated LIB3226, is prepared from Triticum aestivum roots. The wheat genotype Euro9316 (Phobos), European winter wheat from HybriTech (France), is used for the collection. All plants are grown in Metro-mix 350 with Osmocote in a growth chamber with a 16/8 hour day/night cycle. The daytime and nighttime temperatures are 20° C. and 16° C. respectively. Growth chambers are equipped with metal halide high intensity discharge lamps which deliver about 500 uE/m²/second. Humidity is maintained at 70%. Plants are sub-irrigated once a day for about one hour in the morning. No fertilizer is added into irrigation water. Roots are harvested from plants at pre-anthesis (boot, Feekes stage 10), anthesis (flowering, Feekes stage 10.5), and post-anthesis (ripening, Feekes stage 11), washed free of soil, and frozen in liquid nitrogen. The collected tissue is stored at −80° C. until total RNA preparation. The RNA is purified from the stored tissue and the cDNA library is constructed as described in Example 2.

[0248] The cDNA library of the present invention designated LIB3241, is prepared from Triticum aestivum roots. The wheat genotype W189-085, hard red winter wheat from HybriTech US (Wichita, Kans.), is used for the collection. All plants are grown in Metro-mix 350 with Osmocote in a growth chamber with a 16/8 hour day/night cycle. The daytime and nighttime temperatures are 20° C. and 16° C. respectively. Growth chambers are equipped with metal halide high intensity discharge lamps which deliver about 500 uE/m²/second. Humidity is maintained at 70%. Plants are sub-irrigated once a day for about one hour in the morning. No fertilizer is added into irrigation water. Roots are harvested from plants at pre-anthesis (boot, Feekes stage 10), anthesis (flowering, Feekes stage 10.5), and post-anthesis (ripening, Feekes stage 11), washed free of soil, and frozen in liquid nitrogen. The collected tissue is stored at −80° C. until total RNA preparation. The RNA is purified from the stored tissue and the cDNA library is constructed as described in Example 2.

### EXAMPLE 2

[0249] The total RNA is purified using Trizol reagent from Life Technologies (Gibco BRL, Life Technologies, Gaithersburg, Md. U.S.A.), essentially as recommended by the manufacturer. Poly A+ RNA (mRNA) is purified using magnetic oligo dT beads essentially as recommended by the manufacturer (Dynabeads, Dynal Corporation, Lake Success, N.Y. U.S.A.).

[0250] Construction of plant cDNA libraries is well-known in the art and a number of cloning strategies exist. A number of cDNA library construction kits are commercially available. cDNA libraries are prepared using the Superscript™ Plasmid System for cDNA synthesis and Plasmid Cloning (Gibco BRL, Life Technologies, Gaithersburg, Md. U.S.A.), as described in the Superscript II cDNA library synthesis protocol. The cDNA libraries are quality controlled for a good insert:vector ratio.

### EXAMPLE 3

[0251] The cDNA libraries are plated on LB agar containing the appropriate antibiotics for selection and incubated at 37° for a sufficient time to allow the growth of individual colonies. Single colonies are individually placed in each well of a 96-well microtiter plates containing LB liquid including the selective antibiotics. The plates are incubated overnight at approximately 37° C. with gentle shaking to promote growth of the cultures. The plasmid DNA is isolated from each clone using Qiaprep plasmid isolation kits, using the conditions recommended by the manufacturer (Qiagen Inc., Santa Clara, Calif. U.S.A.).

[0252] The template plasmid DNA clones are used for subsequent sequencing. For sequencing the cDNA libraries LIB3222, LI33223, LIB3224, LIB3225, LIB3226 and LIB3241, a commercially available sequencing kit, such as the ABI PRISM dRhodamine Terminator Cycle Sequencing Ready Reaction Kit with AmpliTaq® DNA Polymerase, FS, is used under the conditions recommended by the manufacturer (PE Applied Biosystems, Foster City, Calif.). The ESTs of the present invention are generated by sequencing initiated from the 5′ end of each cDNA clone.

[0253] A number of sequencing techniques are known in the art, including fluorescence-based sequencing methodologies. These methods have the detection, automation and instrumentation capability necessary for the analysis of large volumes of sequence data. Currently, the 377 DNA Sequencer (Perkin-Elmer Corp., Applied Biosystems Div., Foster City, Calif.) allows the most rapid electrophoresis and data collection. With these types of automated systems, fluorescent dye-labeled sequence reaction products are detected and data entered directly into the computer, producing a chromatogram that is subsequently viewed, stored, and analyzed using the corresponding software programs. These methods are known to those of skill in the art and have been described and reviewed (Birren et al., Genome Analysis: Analyzing DNA,1, Cold Spring Harbor, N.Y., the entirety of which is herein incorporated by reference).

The application's sequence listing, which the Patent Office published only in electronic form, follows.

SEQUENCE LISTING (10952 sequences)

SEQ ID NO: 1 - DNA, 109 bp, Triticum aestivum
  Clone ID: uC-tsfl189002a03b1
aaaataaaaatttaaaaaaaaaaaaaaaaaaaaaaaaaaaaaaaaaaaaaaaaaaaaaaaaaaaaaaaaaaaaaaaaaaaaaaaaaaaaaaaaaaaaaaaaaaaaaagg

SEQ ID NO: 2 - DNA, 362 bp, Triticum aestivum
  Clone ID: uC-tsfl189002a04b1
cccacgcgtcctcggacgcgtgggctcgcgcttctcgctgctgccaaccgctggccgccggccttgccaacttccgctgccatccgtagcgagggccctccaggacgccacgacgggtgtggggtgtctgctgatgtttgctgcttcttctccttccctcactaccttctccgctcgtgttgcctgctgccgccgactgataaactaatcggtgaactgttgttgaagggccgaaggagcaagactgctgcaagaggaaggtaacactggcgaaacagcaaaccatggtccaggaaagcatatatgtagttattgaaggaaatatgccctagaggcaataataaagttattatttatttcct

SEQ ID NO: 3 - DNA, 62 bp, Triticum aestivum
  Clone ID: uC-tsfl189002a05b1
gtctagatcgcgaacggacgcataatattatacaatatgtcgactatatacgttttaatggt

SEQ ID NO: 4 - DNA, 221 bp, Triticum aestivum
  Clone ID: uC-tsfl189002a06b1
cggacgcgtggggtcgtgtcttggtcgatcctgtccggttttcttgtagtacaacgtacgcatgcacggtgatgttcagacttcagagcagttcgtctggattgttgaagcacgccaatattcgatatgtgaatgaatgtagtataaactaaaggtttcaactttttgttcatgtttgttctcacgaacgagaaatggaatgaaacgggtcaacaccaccc

SEQ ID NO: 5 - DNA, 340 bp, Triticum aestivum
  Clone ID: uC-tsfl189002a07b1
gccttcgtccactggtacgtcggtgagggcatggaggagggagagttctctgaggcccgtgaggatctcgctgccctggagaaggactatgaagaagttggtgctgagttcgacgagggtgaggacggtgatgagggcgatgagtattaagcctgcctcctggtgctttcccaaggcttgctactgctatcctatgatctgcccgagtggctttatctgttatctgtctgtttgaacgtttgctttgtggtgtttgttttacaacctgttgtgttgtaagaaccttgtatctttgaacctgctttgcaccttggttaatatgcatgctatctggttatct

SEQ ID NO: 6 - DNA, 500 bp, Triticum aestivum
  Clone ID: uC-tsfl189002a08b1
aagaaagacaaggacaagaagccatccatcgcagtcattcagggtcccaagcccggcaagcccaccgacctctcccggatgcgccaggtcctagtgaagctcaagcatgctccgccgccgcacatgatgcaacctccaccagcccctgctgccaaggaaggcgccaaggaaggcgccaaggaaggtgcagaagacggcgcaccagcaccagcaaacggagccaagcagcccgcagagagcaaagaagcacccgccaacggccctgccgcagagacggagaaggagcagcctgcagcatcagagtagcttcttttctttttacagaaacaccagaaccatgactatgcttagactgaaacttcttatgttttcaatacccagagtgtcgcctgtcctgtagcgatctttttgtagagatccgcaccaaggatggctatgtatcgatcagccctgaacattcagcttagtatcacagcaaacaactgcactcttcactgttt

SEQ ID NO: 7 - DNA, 346 bp, Triticum aestivum
  Clone ID: uC-tsfl189002a11b1
agagggaggaggttcggcagtggcccaaggcccaagtcaactgggaggccggagaaggggatggagaattggggagctcctctccctggcaaagcgaggcggcgacaggaagatggaggggatcgagggagagaagagcgagggagatggggcgctgggtctggcctttggcggcgcgaggggagaggatgagggagagaacgaggggatgggggtctcctggcactaggttacaggaggaggaggcccggcctggtgggctgagaggaaaagaatgggccggcctcgttcggcttcctcttctcccactggattttttttcagcaaaaaaaaagaattagagaga

SEQ ID NO: 8 - DNA, 350 bp, Triticum aestivum
  Clone ID: uC-tsfl189002a12b1
cccacgcgtccgatgggcgcagccgcggccggagccttcgccctctacgagaagcacgaggcgaagaaggacccggagcacgcgcacaagcacaagatcgaggaggaggtggctgccgccgcagccgtcggcgccggcggcttcgtcttccacgagcaccacgagaagaagcaggaccacaaggaggccaaggaggccagcggcgagaagaagcaccaccacttcggctaggtcgccgtcgacgtgcggtggccggcctcgccgccggccgtgcgtgtgcctacgttacgtgcgttccataagtgagagaggctgggacgtgggcctggtctcgtgctcgcctgtgcgtg

SEQ ID NO: 9 - DNA, 247 bp, Triticum aestivum
  Clone ID: uC-tsfl189002b01b1
cccactcgtcctgtggggacgacttgagatccatttgtgaatcgattaatttgggcgctgttgatgagccaggcagctagcgctactactagctttgtatggaatccgctttgtatgtacatgtaccaccattgatcattaattgcttgagtttgacatgtcaaaaaaaaaaaaaaaaaaaaaaaaaaaaaaaaaaaaaaaaaaaaaaaaaaaaaaaaaaaaaaaaaaaaaaaaaaaaggctcatct

SEQ ID NO: 10 - DNA, 451 bp, Triticum aestivum
  Clone ID: uC-tsfl189002b02b1
gattactagtcctccaggcgtgaactattcttattcagtcgaggctggagttggtgccggtattgacatgatcatggttccttatgcctacacggaattcattgatgatctgacataccaagttaagaacaacattatccccatgagcagaatcgacgatgctgtctacaggattcttcgggtcaagttcaccatgggtctttttgagagcccctatgctgacccaagcctcgtcggtgaactcgggaagcaggaacaccgcgatctcgctcgtgaggccgtcaggaagtcattggtgctgctgaaaaatggaaaatctgcctccagcccattgttgcctctcccaaagaaggccggtaagatcctcgtcgccggaagccacgccgatgacttgggcctccagtgcggaggatggaccatcacatggcaaggacagaccggcaacgacaaa

SEQ ID NO: 11 - DNA, 392 bp, Triticum aestivum
  Clone ID: uC-tsfl189002b03b1
ggcctacaccaaggtggccgccaaggtcttcgagctcgacccggacggaatggtgcaggcgctggccgcggtgctgcgggacaagatcaccatgcccggccagctcatgaccgacggccgcgacgccgacttgttcgagcacttctcggcggtcgcgcagcgcaccggggtgtacacggcaagagactacggcgacatggtggagcacttcgtgcgtaggtggaaggtggcggacctcggcggggggcagctgtccggggaggggcggcgcgcgcaggagtacgtgtgcgggctgccgcgcaagatccggcgggtggaggagctggcccacgaccgcgtgatcaaagccgcaaaagagcccgagttcgcaaggttcagctgggtcttcgaca

SEQ ID NO: 12 - DNA, 389 bp, Triticum aestivum
  Clone ID: uC-tsfl189002b04b1
gccttctccccctcctgctgctcctcgcgctcctcgacgcgtcgcgcgccaccaacttcgaggtcggcggcgacgccgagtgggtcgtcccgcaggccggcgactcccaaacgtacaaccattgggcgtccaagaaccacttccacgtcggcgacatcgtccatttcaagtacaatgtggactcggtgatggaggtgacggaggaggagtacaacaagtgcgagtcgtcggacccgatcttcttctccaacaacggcaacaccgaggtgcgcctcgaccgccccggccccttctacttcatcagcggcgccacgggccactgccagggcgggcagcggatggtcatcaaggtcaccgacaaggcccggccaccgtcggggccccccagc

SEQ ID NO: 13 - DNA, 407 bp, Triticum aestivum
  Clone ID: uC-tsfl189002b05b1
cgaacgccacgcggcttattacggtgcagtccccgctcggcggcgacaatttcgggcagttcggcgtggtagacaacgagctgcgagacggtccagatcctctccgctcgtcgctctgtggccggttccaagcccagtttgcgctggcgggtctggtgagcccaccgggcatgcagtcggccgtcaacttcttgttcacggaggggaagttccgcgggagcacggtgtctgtgctgggccccattctggacttcgagaccacctgcgagcgcagcatcgtgggcggcaccggtgtttttcggatggcgcgcgggtacagcttcatgaggcttgtgcctgagatgagcgtacccgataagtacagtgtctacaggcttgacctcttcatccaagtcagctcggaccgt

SEQ ID NO: 14 - DNA, 365 bp, Triticum aestivum
  Clone ID: uC-tsfl189002b06b1
gtttttggtgctatgacggatgaggaattcttttcagcttgcactgagaatgatactgagagtgaggggttcgatgatgtactgactgacgaggagaagaggcagctggaatctgcgcttaagatggattcttcagatgctgttggtgacagccagtccgacacctttgtaggtcctaagcatagttgctttgagccaagggagagggaaataccaattgaggatttgagcatctctggaaatggggagagtaagcatgataagaaaggctgctttagtaattggggaaagaggggtcaaactggcattagtaaactagagatgacacagaagatggcacctccaagaagttcgctctgtgtaga

SEQ ID NO: 15 - DNA, 440 bp, Triticum aestivum
  Clone ID: uC-tsfl189002b08b1
cttccacgtgattcgagtcgcctcgcctctcccccgtgagcccaaacatggactctagcaggcgcccgagtggaatccagcaattgcttgctgcagagcaagaggctcagcaaattgtaaatgctgctagggctgctaaaacggcaaggcttaggcaagccaaagaagaggctgagagagaaatagctgagtaccgtgcacaaatggaggctgatttccagaggaagctcactgagaccagcggtgactctggcgcaaacgtcaaacgccttgagcaagagacaaacgtaaagattgagcagctcaagcagcaggcagcaaacatctctccagaggtgattcagatgcttctgaggcacgtcacaactgtgaagaactaaaggttgatgagtcagccctgcatatgatggcaactttgtactatctgttcatttctttgg

SEQ ID NO: 16 - DNA, 125 bp, Triticum aestivum
  Clone ID: uC-tsfl189002b09b1
cacacgcgggcagtcacacagagcaaaactagcacgtcaggggcgggcgcaaatgatcagacacggacatgagttcaataccattgccattgataatgattcatacttgggcatggaccaccctt

SEQ ID NO: 17 - DNA, 410 bp, Triticum aestivum
  Clone ID: uC-tsfl189002b11b1
tgcaggtcgcactctatccatcccgtacctgtccgacgagggaggagaaaaaaaaaatgctgcgccacgccgcccgccgcctcgcgttccgcgccgccgctgccggcagcggctccatgagccgcagggccctcgcgacggcgcaggcgcccgcggaggcgggcgaggaccccgccttcctggaggcgtggaagaaggtgaccacaatcatcgagcccccccagacgcccatgtcgtccatgaagccccgcccgcccacgccggcctccattccctccaagctcaccgtcaacttcgtcctcccctacaagtccgagatcaccaacaaggaggttgacatggtaatggtaccggctacaactggcctgatgggtattttgccaggccatgtttccacaattgcagagctc

SEQ ID NO: 18 - DNA, 155 bp, Triticum aestivum
  Clone ID: uC-tsfl189002b12b1
ggcggatctcattctccagattcaagcccacttcgaggcaaacataaccaatttggctcagctatgaggtgttgccatgcaagttgacaaaactcggggatctaaatttggttaagagctcagcgggctgaatatgcactgtgactagtagtatg

SEQ ID NO: 19 - DNA, 456 bp, Triticum aestivum
  Clone ID: uC-tsfl189002c01b1
cgcctgttcttcttcctgttgttgtctcaccgcagcaaggagcagtcagcatcgagagagcaacaatggcgatggcgtcgtcgagcgggctgaggagctgcagcgccgtgggcgtaccgagcctgcttgcgccttcatcccggtccggccgctccgggctgccgttctgcgcctacgccaccacctccggccgcgtcaccatgtccgccgagtggttccccggccagccccgccccgcccacctcgacggctcctcgccaggggacttcgggttcgaccccctgggcctcgccaccgtgccggagaacttcgagcggttcaaggagtccgagatctaccactgccgctgggccatgctctgcgtgcctggggtactggtgccggaggcgctggggctgggcaactgggtgaaagcgcatgagtgggcggcgctccccgacgggcaggcgacgtacc

SEQ ID NO: 20 - DNA, 387 bp, Triticum aestivum
  Clone ID: uC-tsfl189002c06b1
tgttttgctgctgaggaagctgcggctgcggcagcgcctgcaagtgcggcaacggctgcggcggctgcaacatgtacccggaggtcgaggccgccggcgccaccctcctcgtctccgccactgccacccacaaggcgagctccggcgggatggagatggcggcggagaacggcggctgcggctgcacccagtgcaagtgcggcaccagctgcggctgctcctgctgcagctgctagatcattgatcatgcatgcgccgcgtgcatcatatctatgatctatctaccatctactaccatgtaacgctgcctgatcgagggtctttgcatgtatgaacgcacctgcctgcatgagcagagcgggtgccatgccatgcatgtaaacccct

SEQ ID NO: 21 - DNA, 370 bp, Triticum aestivum
  Clone ID: uC-tsfl189002c08b1
accgatccgaggatgtcttgctgcggaggaaactgcggcggcggcaccgcctgcaagtgcggcaacggctgcggcggctgcaacatgtacccggaggccgaggccgccggtgccaccctccttgtctccgccaccgccacccacaaggcgagctccggcgggatggagatggcggccgagaacggcggctgcggctgcaaccagtgcaagtgcggcaccagctgcggctgctcctgctgcagctgctagatcatcgatcatcgaccatgcatgcaccgtgccgtgcgtgcatcatcgatcatatcgatctactactaccataccatgtaaccgctacctgatcgagggcctttctgtacgcacctgacct

SEQ ID NO: 22 - DNA, 142 bp, Triticum aestivum
  Clone ID: uC-tsfl189002c09b1
cggattcgtgggtggacgcgtgggctgaaataatagagtgattgtgtgaggaaaaagcccgggtacgtttgggtaagtgaccgcagaacaagatataaagatgaatgtattcttactttgggcctttggctcgctaacacat

SEQ ID NO: 23 - DNA, 114 bp, Triticum aestivum
  Clone ID: uC-tsfl189002c10b1
gcagttagaaactcaccaaatctttatcccctgccctcagcagtgccgacctgagcgccggagatctgcggcgagcgagatgaaagtggaggagcagacggtggtgggaggagg

SEQ ID NO: 24 - DNA, 330 bp, Triticum aestivum
  Clone ID: uC-tsfl189002c11b1
gtcctaccgtcctaccgaccgatgtgaatccaatgccatggagtgcgtactcgttattttccagtactggatgccgggatggcccgatgtgaattcgccataagcaatagaaccttttttcttttaccattttctgacgaggaattgtactaccatgtgatgcataatttgatcgtcctgtgatcaaaagacatcatatataagtttaataatattttcatgaacagtttacccttttattaaaaaaaaaaaaaaaaaaaaaaaaaaaaaaaaaaaaaaaaaaaaaaaaaaaaaaaaaaaaaaaaaaaaaaaaaaaaaaaaggggcggcc

SEQ ID NO: 25 - DNA, 338 bp, Triticum aestivum
  Clone ID: uC-tsfl189002d01b1
ggcgttctcaaagatcggggagcacatgtctggtggtggtgcggctggaggcggcgcggctggcggtggttcccaggaaggaggctcgcagggcggaggcgaccaggccccagaggccgagtacgaggaggtgaagaagtgaagctgccccagcagcccaacccagttattagctagtcttgaggaacactagggatcttgttggctgtaataaaattttgctccactgaggcatgtgaaacatgctaaatgctcttagcgcgcacggtactgccttattgtatgacttggttgaactagcgtgttcttcgctttgagttacgttgatgttgtggttc

SEQ ID NO: 26 - DNA, 344 bp, Triticum aestivum
  Clone ID: uC-tsfl189002d02b1
cccactcgtccttggacgcgtgggctacgacaacgtcatccccgacaactacaccatcggcaccacctatacacctcaagggtagcgcgtccttccattgacgtagatccgcaaaagtatgttcaatcggtcttccctgggttttggtagttttttagagagatatcatgtatgaataatagaaaaagttgtcgacgccactcttgactggttgtttatgtatgtaactgtgtcggtgctagggttatggagtgtgtgttgatatgggctagtgtgtccctgtgtgggtaagcatatgcgtttgtaccgtgtttctaaaaaaactatatttgcttaagattgag

SEQ ID NO: 27 - DNA, 135 bp, Triticum aestivum
  Clone ID: uC-tsfl189002d04b1
cacctaatcattttactgagctcgcaggcagccccagccaccattgaaatggccttgtcggcgctgcaccagacgaccagcttcctcggcaccgccccgcgccgtgatgacctcgtccgcagcgtcggcgacttc

SEQ ID NO: 28 - DNA, 359 bp, Triticum aestivum
  Clone ID: uC-tsfl189002d06b1
cggatgcgtggttgggaatccgccccccgaaaggagttctcttatatggaccacctgggacgggagaagacgttgatggctcgtgcatgtgctgcacaaaccaatgcaacctttctgaaacttgctggtccgcagctagtccagatgttcatcggtgacggggcaaagcttgtccgagatgcctttgagctggcaaaggagaaggccccctgcatcatttttattgatgagattgatgcaattggtacaaagcgttttgacagtgaagtgagtggtgacagagaagtgcaacgaactatgttggagttgctgaatcagctagatggatttagcagtgatgagaggataaaggtgatagc

SEQ ID NO: 29 - DNA, 192 bp, Triticum aestivum
  Clone ID: uC-tsfl189002d07b1
cttgttactgcccactgcgatcaatctgtacacatgcgtagtagtacaagtataacatacaaatgaattctcaaacgaaaaaaaaaaaaaaaaaaaaaaaaaaaaaaaaaaaaaaaaaaaaaaaaaaaaaaaaaaaaaaaaaaaaaaaaaaaaaaaaaaaaaaaaaaaaaaaaaaaaaaaaaaagggggggg

SEQ ID NO: 30 - DNA, 377 bp, Triticum aestivum
  Clone ID: uC-tsfl189002d09b1
aagctggctgagcacggcctcctcttgggtttcctgatgctgctgcaggggggcgtgaagcatgcggcggctaagccacgggagtggtacgtcggcgaccagaagggctggaccttcggcgtcgagggctggcctaacttgcctaccttcaagcccttcagggaaggcgacgtgctggttttcaagtacgaccgtgcggcgcagaacgtgatgcaggtggacgacttcgggttcggcacctgcaccaggcaccccgccaacgccacggtgtacgactccggcaacgaccgcatcaggctctctcgcggactcatcaacttcatcagcggtgtctcggataactgctacaagggcggcgtcaagatctcactcaccgt

SEQ ID NO: 31 - DNA, 151 bp, Triticum aestivum
  Clone ID: uC-tsfl189002d11b1
ccctctcgtccggggtcatcctcctcgatctggcggtcgaccgcaccaggccccgcagcctgcgcgtctccttcggcggcgccggcgtcgccgccatcgtcatcgcctacgccatggccatgctcttcctccgcatcaagatacccacacc

SEQ ID NO: 32 - DNA, 336 bp, Triticum aestivum
  Clone ID: uC-tsfl189002e01b1
cccattcgtccgcccgtgacaatgcctgaaaaagagattgacgatgataacagtactctgcccaaggaggtggactggaggaagaaaggggcggtggtgccggtgaagaaccaaggcggctgcggctcgtgctgggcgttcgcggcggtggcggccatggaggggctgaaccacatcaagaatgggaagctggtgtcgctgtcggagcaggagctggtggactgcgacgcggaggcggtggggtgcgccggcgggttcatgagctgggcctacgagttcgtcatggacaaccacgggctcaccaccgaggccagctacccgtacctgggcgtcaac

SEQ ID NO: 33 - DNA, 203 bp, Triticum aestivum
  Clone ID: uC-tsfl189002e02b1
tcgcccactcgtccggtaagtattttccctacttcacagcttgcttgatgtgctgcatgcatcatcaacggaataaataaaggatttgtcggaaaaaaaaaaaaaaaaaaaaaaaaaaaaaaaaaaaaaaaaaaaaaaaaaaaaaaaaaaaaaaaaaaaaaaaaaaaaaaaaaaaaaaaaaaaaaaagggggggccgttttaa

SEQ ID NO: 34 - DNA, 202 bp, Triticum aestivum
  Clone ID: uC-tsfl189002e04b1
gtcgttagcttgttatttttttattctatatttgtgttacctgatgcgaactatttctgattgtaaacctgatgtgaaccatgtttgatcgcaatgtgccaggtttggctctttttgattgtattcatgatttgaaccatgttttcatgatatttagttatgctttgtttgaagcattgtataaatattggttatttattta

SEQ ID NO: 35 - DNA, 429 bp, Triticum aestivum
  Clone ID: uC-tsfl189002e06b1
tcgagaacggcactaccgtccacggcaccatcactggtgttgacataagcatgaatactcatctgaagaccgtaaagctcacaatgaaagggaagaatcctgtaacccttgatcacatcagcgtgagaggaaacaacattcggtactacatcctccctgatagcttaaacctggaaacgttgctggttgaggatacccccagggtcaagtctaagaagccaactacagggaagcctatgggtcggggtcgtggacgcggccgtgggcgtggtcgcggccgggggcgctgagctttattgttccctgctttggaagctcgtgcagtgcaagtccctacagcgtaacctgcttcctctgcgagctatgtcgaagattgtctctgttctgttagaagatgtcaatctaagtacgtgttgatgcggaatcatc

SEQ ID NO: 36 - DNA, 414 bp, Triticum aestivum
  Clone ID: uC-tsfl189002e08b1
tccatatccatagcttgcatgttcaccatgctgctccttgctccggccatcatggccacggaccctgaccctctccaggacttctgtgtggccgacctcgatgacaacgcggtccgggtgaacggatacccgtgcgtgccccagttggaagccggcgacgacttcctcttctcctccaagctagccaggggcggcaacacgtccaccccgaacggctcggccgtgacgaggctggacgtgacggagttccccggcgagaacacgcagggtatctccatgaaccgcgtggacttcgcgcccgggggcaccaacccgtcgcacatccacccgcgcgccaccgagatcggcctcgtggtgaaaggcgagctcctcgtgggcatcatcggcagcaacgagtccgggaacaggctctac

SEQ ID NO: 37 - DNA, 398 bp, Triticum aestivum
  Clone ID: uC-tsfl189002e09b1
ctcacagtcgcagcatcctctcagtcctcaccttcctgccctcgccaccacccaccaaggaaaggaggatgtcttgctgcggcggcaactgcggatgcggcgccggctgcaagtgcggcaacggctgcggcgggtgcaagatgttccccgacgttgaggccaccgccggcgccgccgccatggtcatgcccaccgcctcccacaaggggagctccggcgggttcgagacggccggcggggagaccggcggctgcgactgcaccacctgcaagtgcggcacggcctgcggctgctcctgctgcagctgcaactgagccggcgcccaggaggccggccggcgaggcgagcacgaggatgaggaggacaactggacaagcaaccaccaccaccaccaccac

SEQ ID NO: 38 - DNA, 294 bp, Triticum aestivum
  Clone ID: uC-tsfl189002e10b1
ccctctcgtccggtcatcatcgtaaattgcagcagtttttctttcatcacatcttgccaattttgggcagcatatgttattgaacgagctcaatagactgccaggtcttccccatggcaagtgttctggactggctactgtgtttatgtgcttgctatgctctggcacagaattgggccattgcttgtcttacattccctctgttgtaaaacttcaaactgaatatacctcttgtatggtgtatgcagatatcttcggctagagataatatgttcagtataaatactttctctc

SEQ ID NO: 39 - DNA, 286 bp, Triticum aestivum
  Clone ID: uC-tsfl189002e12b1
ggttctgccatcactggaccgatcgggaaggagtgcgccgacctgtggcccaggattgccagcgccgcgaatgccatcgtctgatctgatcgccggagcagctagatgatcaaagcttttgatagcatgtccctcttttcttctagtttacttgtggcccttgaggatgagtttcctggattatgtaatgctgctggattattgtctgttaggtttaagattttgcactgtggtttggctgctaagatttgttcagtttgaacctgaaagagcttttgatcggatt

SEQ ID NO: 40 - DNA, 147 bp, Triticum aestivum
  Clone ID: uC-tsfl189002f02b1
ctgttatgcaaatcctgtaaagattgactgactacataaccaatttgtcatagaacaatgaggcaagatgcattctttggatgtactatctgaaattttacaaagtaactacagaacagatgacgcaatgaagtacatctactaatc

SEQ ID NO: 41 - DNA, 388 bp, Triticum aestivum
  Clone ID: uC-tsfl189002f03b1
tcgtgattatggtttatggtagcattttcaacaaaaagacatgtgtttgcatgcctttgttgtggacgagcggatctatggccaggaatgcgggatgacccttggttgacgtctgacaagcgttgtgcgtcccttgatgggtgtggtgctggctgtagagtagcatagtgttctctgagacatgcttgtaaaattaaacttttttggatccttttttttgctcctgtagagatgtattttcagttctgtatgtcatgcttgtaaaattaatcttttttggatcctttttttgctcctgtacagatgtattttctggtgtatatgtaattttctgtttttaatgacacaagcatatattttctgttaaattattattggcttaaaattt

SEQ ID NO: 42 - DNA, 376 bp, Triticum aestivum
  Clone ID: uC-tsfl189002f04b1
tcggctggaaacaatcgtgcaggtattgataggaggcaggatggcccaacatttccgccgggaagacggcagcgtttgagatacacgcaaagaagccagcatgatccatgatcggccgaagcaacactacctgtgcagtatttagttattacaaacagccaagccatccttgtaaaatagctagtggtggttaagaataaatatcttggcctatttactattcgtgtattatatctgttagaaacgttctagtgcagatgcagaacttcccttctaaatgtctctattcaatgccttgttcttggtagtctttgtcttttttttctgtgtgaggtggttctgtgattaagttgaaatgagatataactgcattttc

SEQ ID NO: 43 - DNA, 432 bp, Triticum aestivum
  Clone ID: uC-tsfl189002f05b1
gtgcccctacacggtgtggccaggagcctacccggtcggcggcgggagcaggctcgacacgggtcaggcggcgaccattcaagtccccccgggcacggcggctggaaggatttggggccgcaccggctgcaacttcgatgctagtggccgcgggtcatgcaccacgggcgactgtggcggcgtgctagcctgcgctgccggcgggaggccacccgcgacgctcgccgagtacacgctgggtaagggcggcagccccgacttctatgacatctccctcgttgacggattcaacgtgccgatgagctttgggcctgccggcggcggctttcacgcgataagctgtgccgcggacatcaacgcaaattgcccgtcggagctgaaggtggacggaggatgcgtgagtgcctgcgtcaagttcggcgccccccagta

SEQ ID NO: 44 - DNA, 347 bp, Triticum aestivum
  Clone ID: uC-tsfl189002f06b1
tcgcccactcgtccggtgcggcgtcgactccatggtctccacggtgtccgccacgcacgcctcgaaggaggagtaggctctgttctgatgtgatcggcagccctcctggagtcgatcttggtttcggtgtatcgctagaaagaaactttaatacctagtagtcggctaggctccatcgtcgttgtggtatcagcagcgaagatgcgaagccgcaacagaatgcttgctgtataacttgtgcatttgctaaatttgctacgccatgcatgtctgccacacgctatttggatgtggctaaaaaactcctgaataattctgtacataatatgtattgcttccattagaaa

SEQ ID NO: 45 - DNA, 406 bp, Triticum aestivum
  Clone ID: uC-tsfl189002f07b1
gcagttcggtcgagccctccgccgccgccccgccttcagctctctccttccttctccgatccaagatgaagttcattgctgcctatctgcttgcttacctctctggcaacgccagcccctctgcagaggacctgacatccattcttgagtctgttggttgtgaaatcgacaatgagaagatggaactcatgctgtcccaagtgaagggcaaggacatcaccgagctcttggctgctggtagggagaagtttgctgcggttccatctggtggtggtggtgtggctgtttcagctgctgcccctgctgctggaggtgctgctgcccctgcagctgagtcaaagaaagaagagaaggtcgtggagaaggaagagagtgatgatgacatgggcttcagtctgttcgacta

SEQ ID NO: 46 - DNA, 290 bp, Triticum aestivum
  Clone ID: uC-tsfl189002f08b1
tcgatttacgcagctacctgtatcattcggatcataagatgtactagggtcggctgcactatgtgaatcataagatgtggtaggatggtgctatgcgaagcgtgtcgagctgaagtacctagtggactacagtcatgaggacggtcatgtggacatcgtcgcttcttagttcattagcagatttcaaactatttcctgtattgcagcacattattagtattgctgtattagcaattttcatggcttgttgatgattgatcaaagaaaaaaaaaagcctaaacttaacact

SEQ ID NO: 47 - DNA, 409 bp, Triticum aestivum
  Clone ID: uC-tsfl189002f09b1
ctccttacagcatcctcctctcggttcttagtttcttttccaccacccacaggccaaggaggatgtcttgctgcggcggcaagtgcgggtgcggcgccggctgccagtgcggcaacggctgcggcgggtgcaagatgttccccgacgtggaggccaccgccggcgccgccgccatggtcatgcccaccgcctcccacaaggggagctccggcgggttcgagacggccggggagaccggcggctgcgactgcaccacctgcaagtgcggcaccgcgtgcggctgctcctgctgcagctgcaactgagccggcgcccatgatgccggcagaggcgagcacgaggatgaggaggaggacaagcaagcaagcaccatcgtcaccagttcacagcatgcgcccgcgcgcgcgct

SEQ ID NO: 48 - DNA, 370 bp, Triticum aestivum
  Clone ID: uC-tsfl189002f10b1
ccctctcgtccgcccacgcgtccggcgcccgcctgcccgccccgatggcccgcacgaagcagacggcgaggaagtccaccggcggcaaggcgccgcggaagcagctggcgaccaaggcggcgcgcaagtccgccccggccaccggcggcgtgaagaagccgcaccgcttccgccccggcaccgtcgcgctccgcgagatccgcaagtaccagaagagcacggagctgctcatccgcaagctgcccttccagcgcctggtgcgggagatcgcgcaggacttcaagaccgacctccgcttccagagctccgccgtgtccgcgctccaggaggccgccgaggcctacctcgtggggctgttcgaggacaccaa

SEQ ID NO: 49 - DNA, 388 bp, Triticum aestivum
  Clone ID: uC-tsfl189002f12b1
ggatgtcttgctgcggaggaaactgcggcggcggcaccgcctgcaagtgcggcaacggctgcggcggctgcaacatgtacccggaggccgaggccgccggtgccaccctccttgtctccgccaccgccacccacaaggcgagctccggcgggatggagatggcggccgagaacggcggctgcggctgcaaccagtgcaagtgcggcaccagctgcggctgctcctgctgcagctgctagatcatcgatcatcgaccatgcatgcaccgtgccgtgcgtgcatcatcgatcatatcgatctactactaccataccatgtaaccgctacctgatcgagggcctttctgtacgcacctgacctgcatcagcagtcaggtgccatgccatgc

SEQ ID NO: 50 - DNA, 55 bp, Triticum aestivum
  Clone ID: uC-tsfl189002g02b1
aaatttaaaaaaaaaaaaaaaaaaaaaaaaaaagggcggacaatataaaaagaaa

SEQ ID NO: 51 - DNA, 436 bp, Triticum aestivum
  Clone ID: uC-tsfl189002g03b1
ttgtccaccaccaccaccaccgcggcacgtacgtttgcgatcaaaagaaagtcgagccatatggcgaaggccgcagcgatgctcgtgctggtggcgctggtggtggcggcgatggcaacgggcggagcggcgcagtgcaacgcggggagcctggcggtgtgcacctccccgatcatcagcgggaccccgccgtccaagacgtgctgcaacaacctaaagagtcagcgggggtgcttctgcaagttcgcgcgcaaccccgcgtactccagctacatcaacagccgcaacgccggcaagaccctcaccagctgcggcatcgccgtaccgaagtgctaggagccgggcctccgccgccggcgccggcgtgctaggcaccgccccgccgcctattgctactactactactacgtaacgtactacttacgagctcctacca

SEQ ID NO: 52 - DNA, 84 bp, Triticum aestivum
  Clone ID: uC-tsfl189002g04b1
ttgctgttctcagaaaagattatgttaagcactttgtatgagaacatttatgaaactaataaagccttctcctcaaattgtgta

SEQ ID NO: 53 - DNA, 446 bp, Triticum aestivum
  Clone ID: uC-tsfl189002g05b1
gccatcaccaatcaaggcctccatccaatcccaagcaacctcgaagatgtcttgctgcggaggaagctgcggctgcggcagcgcctgcaagtgcggcaacggctgcagcggctgcaacatgtaccccgaggtcgaggccgccggcgccaccctcctcgtcgccgccaccgccacccacaaggcgagctccggcgggatggagatggcggcggagaatggcggctgcggctgcacccagtgcaagtgcggcaccagctgcggctgctcctgctgcagctgctagatcattgatcatcgatcatgcatgcaccgcgcgcatgcatcatatctatgatcgatccatccatccatctagtaccatgtaacgctacctgatcgagggtctttgtatgtatgtaagcacctgccagcatgagcagagcaggtgcactcccatgcatgtaaac

SEQ ID NO: 54 - DNA, 158 bp, Triticum aestivum
  Clone ID: uC-tsfl189002g07b1
tcgcttttggctgtcggttctaaaattaaacttatgtgtgtcggttttgcttggttagtgaccaccgagcagaagtgaactcttgaggctgcttcgttttttgtgaaccaaacgtatcttgtttatcgatttgacaagcctggttctgagttatttta

SEQ ID NO: 55 - DNA, 339 bp, Triticum aestivum
  Clone ID: uC-tsfl189002g09b1
tttccgattctccaaccgaaccgaggatgtcttgctgcggaggaaactgcggcggcggcaccgcctgcaagtgcggcaacggctgcggcggctgcaacatgtacccggaggccgaggccgccggtgccaccctccttgtctccgccaccgccacccacaaggcgagctccggcgggatggagatggcggccgagaacggcggctgcggctgcaaccagtgcaagtgcggcaccagctgcggctgctcctgctgcagctgctagatcatcgatcatcgaccatgcatgcaccgtgccgtgcgtgcatcatcgatcatatcgatctactactaccatacca

SEQ ID NO: 56 - DNA, 266 bp, Triticum aestivum
  Clone ID: uC-tsfl189002g11b1
tcggggtcttgcggcatcgtttactgacttgcgcctcattgaacgggatggaaggagcagccctatcttgaaggactttcctactgttatatccaacaataaatgttattctatcactcctattgttaattccgggtgcttctatggcgggccaggaggttgtgtgtaatactaagctgtactttgaacgtggtggtgtaataatggttcccttgagtttgtcttcccaaactcatactggcctaataagacactatgtgtttccg

SEQ ID NO: 57 - DNA, 230 bp, Triticum aestivum
  Clone ID: uC-tsfl189002h01b1
ataaatgtggatggtgtcgccagacgacgcctggttcatgttagttggacatgagttaccttctgttttccgcatcaacctctagtatctgtaatggagttgctaatcaagtactcttttttggttgtggtttgtgaagaatatataaatcgttcagtccagtactcaactccctttctgtctggcttttcgcctcgtccgtggcttggatttctgcttttgccttgttt

SEQ ID NO: 58 - DNA, 331 bp, Triticum aestivum
  Clone ID: uC-tsfl189002h02b1
tcgcccactcgtccgcggcgagcgaaatgggagcagcctaaaccgtgaaaacggggttgggggagaagctcgaccgcatcgtccagcagaagctccatggttccgggctcgtgttttgagcaagagtcatttgtcatgtgttctgtgctcctttgcactctgctgcttctggttggtgagaggagagccctatgttgattgtgtttattattattattattatcattattgtttggattgcttaccacatgtgtcaccgtggtatgttgattgtggtttaattttgagaataataataaaacaacatctggcctcatagggtgggatacgc

SEQ ID NO: 59 - DNA, 309 bp, Triticum aestivum
  Clone ID: uC-tsfl189002h03b1
tcggtctttagccatctttttttttggacaaacaaagtgtttagccaaaaaaaaaaaaaaggaaaaaaaaaaaaaaaaaaaaaaaaaaaaaaaaaaaaaaaaaaaaaaaaaaaaaaaaaaaaaaaaaaaaaaaaaaaaaaaaaaaaaaaaaaaaaaaaaaaaaaaaaaaaaaaaaaaaaaaaaaaaaagggggggggggtttaaagggaaaaaatttttgtaccgggggttgggaagaaaaaattttttttttgggggcacaaaaataaaataaggggggggggttttaaaaaggggggggggggaaaa

SEQ ID NO: 60 - DNA, 392 bp, Triticum aestivum
  Clone ID: uC-tsfl189002h04b1
tctccctctcgtccgcccacgcgtccgcacacgcaaggagcacgaggaggaggcaagggaagccgccgccgccgccgccccgtccctcctcgccggccggccgccacaggtagtttcaagatgtcaacctgcacgtttgcagcttcctgtgccctcttgggcaatgctcgaacaaccgatgccccccagaaagcggtcaagagccgcctgagcttcctcggccgaggcgcgccgcagctgcggagcctgaggtcctccttcccctccaagaagctggtgacatctgcatacaaggggacgagcacgtacaaggtgaagctggtgaccccggaaggggacgagcacgagtttgaggcgccggacgacgcctacatcctggactcggcggagac

SEQ ID NO: 61 - DNA, 274 bp, Triticum aestivum
  Clone ID: uC-tsfl189002h05b1
ttcggggctagctcaaatcttcaattgagaagggtgtcgcgttcgcaaatgcaagttagttaggtcattttgcagattatagcaaacccaggtctcgttgaggggtctgttggtttggtccagtgctttttctgcccatcatgtgggcatggaagatttgagctttgcaataaaatttccggcggcgcaatgccacacataacataacttgtacgagaggaagctagttttgtgtcgagctgtgaactgataatgaacaattgctgatgcgtgg

SEQ ID NO: 62 - DNA, 170 bp, Triticum aestivum
  Clone ID: uC-tsfl189002h07b1
tcggatgtttgtttacttctgaagctacttcgccctttccaaattacttacagcgtgctcggcagtatgagggaaagggaatggaaggttacaagagggagtatgtctagatattagacttgagaattactagaattttagtctcaatctccattttgatgtgtggtcgg

SEQ ID NO: 63 - DNA, 193 bp, Triticum aestivum
  Clone ID: uC-tsfl189002h08b1
gggagttagcaactaatccgaggagtgtgctaccacggggaagaagatcgctggtggaacttgatttttttctttcctgggaagtagaccgtggatgatggtatgtaattgtggagcaatgcatgcttgttggatgtgtacttgtaccctggtgttgtagccgatgtaaaaaatgaatacccttttgaacatt

SEQ ID NO: 64 - DNA, 394 bp, Triticum aestivum
  Clone ID: uC-tsfl189002h09b1
gaaaaatcaccgacattctgccattataccatggaggcctggaggaagacaaccatgtgttgtgtgattcttttctgccttatggctacatgtagtgaggtttcatctaccgaaaacatgtgctatcacaaccattggaataaatgccatactgatcaaaatggaatgtgtcgagatagttgtgtgaaagacggatgggatgatggacaatgccggaacaagtttaaaagactaatgggtgccaagtgcgaatgttaccctaagacttgtgatcattagggaggcaacatgcgactttcttctaccaagttactactatttataaatttacatcggttttaatgattgacgtcaaacatgttgtaacaccaatcatggtgaatactatatcacc

SEQ ID NO: 65 - DNA, 384 bp, Triticum aestivum
  Clone ID: uC-tsfl189002h10b1
ggaaaacaatgtagccacggtgtgatcaccaagggagcctcttggcaaagcttgtgtgttcttccttggtgcatgtgtgcgtgtgtgtgtgtggagtttctccttgagtgaggcaagaggtagaagaagggcgttgcggcgaggaggcggcgccaacatttggtattcagagccacaaggttcgaggggcggccgtggtgcgcggtggcgtccgcggcggacggggcgtgcgcggccgacatggaggcatcggctgcggcgcatggcgagcgcgtggtgacggcgacgcgtggcgggtccgcggcggtgcggtgtgatgtcgtgcgcgcgaagagcacggtggtcgcggagacgaggaggtcgcggaggacctgcgtggtggcg

SEQ ID NO: 66 - DNA, 430 bp, Triticum aestivum
  Clone ID: uC-tsfl189002h11b1
tgctgcccccctccacacccgtgccgccgccgccgtcgccgcccgcgtccccccatggcgctgccgaaccagaacaccgtcgattaccccagcttcaagctcgtcatcgtcggcgatggcgggactggcaaaaccacttttgtgaagaggcatctcactggagagtttgagaagaaatacgagcccaccattggtgttgaagttcacccattggatttcaccactaactgcggaaagatccgtttctactgctgggacactgctgggcaagagaagtttggtggccttagagatggatactatatccatggtcagtgtgcgattatcatgtttgatgtcacttcaaggctgacctacaagaatgttcctacgtggcacagggacctgtgcagggtttgtgagaacatccccattgtcctgtgcggcaaca

SEQ ID NO: 67 - DNA, 238 bp, Triticum aestivum
  Clone ID: uC-tsfl189002h12b1
cccacgcgtccggctgcatgtggtttgtcttcagcttcgtactactgtctactagtgcttgtaactttattttcttggctcggtatgctcgctgcatgctagcgagtgatgggtgtatgtgtgtgctctgtgtaagctccatgcgtgtgtaaattctctcgtgtgtgtggtgtggtcttctcaatgtttaaccacctatggtaaagacaataacagcctcagagcaagttttccttaa

SEQ ID NO: 68 - DNA, 362 bp, Triticum aestivum
  Clone ID: uC-tsfl189003a01b1
cccacgcgtccgtcaaaccatggcgtccatgaccggcctgtcgcagggcgtgcgtctcccaggcccggccggcaggcgcgccagcaggttcaccgtgagggcgtcgtcggcggaggccgaggccgccggccgccgcgcggtccttggcctcatggccagcggagtcgtcgggagcgcgttcgctcaggtggtgcacgccggcaccgtcgcggccatcaaggttggccccccgccgccgctctccggtggactccccggaacggacaactcggacgaggcaagggacttcgacctgcccctgaagaaccggttctacctgcagccgctgccaccggcggaggcggcggtgcgggccaaggagt

SEQ ID NO: 69 - DNA, 462 bp, Triticum aestivum
  Clone ID: uC-tsfl189003a03b1
gtcgggcaccgtgctatgtggacgagcactaccttcccaccgtgctctccatcgaggctccggagcgcatcgccaaccggagcatcaccttggtcgactggtcccgcggcggcgcccacccggccaccttcggcgccgccgacgtgactgaggacttcctggggacgctggtggggaagaaggggaatgctgagcggtgcatgtacaacgggcagccggtcgaggtgtgcttcctctttgcgaggaagttcgcccctgccgctttgccgcagttgctcagcctttcctccaagatccttgggtactagctatgccttttactaaatcgattttggtctttttatgtatagctcatactcactggagtggaatagaggaatacaattctttttttcatgtgtcacaaagaacaaaaggatgaatgatcgagtgggtggtttttcttgaccattcatatttctg

SEQ ID NO: 70 - DNA, 462 bp, Triticum aestivum
  Clone ID: uC-tsfl189003a04b1
cccgctcgcgcccgcagaaggttcaagaggggtctcaagaggaagcccatggcgctcgtcaagaagctgcgcaaggcgaaaaaggatgctcctgctggtgagaagcctgagccagtgaggacacatctccgcaacatgatcattgtccctgagatgattggcagccttatcggtgtctacaatggcaagaccttcaaccaggttgagattaagcctgagatgattggccattaccttgcagagttctctatctcctacaagccagtgaagcacggtaggcccggtatcggtgccacacactcttcccggttcatccctcttaaatgagttgtgccgctttctactttgaaagaaatcagtacggaccatctgatggcatgtccatcgagctgtctcccttgttttgaaccagttatatatctagtatttggttctggttagctatataatttcgttatgcac

SEQ ID NO: 71 - DNA, 115 bp, Triticum aestivum
  Clone ID: uC-tsfl189003a05b1
aaatttaaaaattttataaaaaaaaaaaaaaaaaaaaaaaaaaaaaaaaaaaaaaaaaaaaaaaaaagaaaaataaaaaaaaaaaaaaaaaaaataaaaaatggggggcggcctt

SEQ ID NO: 72 - DNA, 455 bp, Triticum aestivum
  Clone ID: uC-tsfl189003a06b1
gccctcggccggtgccgtcgccgtcgccgtcgccgctgagccaaccaccgaagcgcctcgaactcctcgtcctcctccccgtgcctgccgtcctccaccggatcggcccggatcggaggctcccgcgaagcgattcctcccgtcaggcagtcgagatgtcggagtacaagaacgtcgttggggggaagctcaaactgaaggggaaaccgctggatgtcaaggagggcggagtcaagaagaagaataagaagaagcaccgccgcgaggagtcgtctcaaggcgagcacagcgagctccgcgaaggtggaagctctgaattaccaggcgaccctgacaatgaattcagtgaagctgacaagctgggagaggaagggagtgcgcaagccgattatgaccacctcactccagccgagaggcgttacattgaacagaagcagaaatcgatcagcatcgac

SEQ ID NO: 73 - DNA, 193 bp, Triticum aestivum
  Clone ID: uC-tsfl189003a07b1
agaacctgaatttaacagcaaaactagctttctgacgccgtcagttttgttttattattatagaaagacgatgccggtttgtcgaaaaaaaaaaaaaaaaaaaaaaaaaaaaaaaaaaaaaaaataaaaaaaaaaaaaaaaaaaaaaaaaaaaaaaaaaaaaaaaaaaaaaaaaaaaaaaaaaaagggggggc

SEQ ID NO: 74 - DNA, 62 bp, Triticum aestivum
  Clone ID: uC-tsfl189003a08b1
aaaattaaaaattttaaaaaaaaaaaaaaaaaaaaaaaaaaaaaaaaaaaaaaaaaaaaggg

SEQ ID NO: 75 - DNA, 278 bp, Triticum aestivum
  Clone ID: uC-tsfl189003a09b1
ctcatcttcttctccttgaaatctttttgggtccacagatttggaggatgtcttgcaactgcggatcaggctgcagctgcggctcagactgcaagtgcgggaagatgtaccctgatctgacggagcagggcagcgccgccgccgaggtcgccgccgtggtcgtcctcggcgtggcgcctgagaacaaggcgggacagttcgaggtggccgccgggcagtccggcgagggctgcagctgcggcgacaactgcaagtgcaacccctgcaactgttaagct

SEQ ID NO: 76 - DNA, 431 bp, Triticum aestivum
  Clone ID: uC-tsfl189003a10b1
gcaaccgggtttaaaccacccattgttgaaagaccataaaatccagatgaaaccaagttctatccctgtttggatggataccgaaacatttccttcggattctttttcacaagcggaaccatctatcatcgagtgcccaacaggaacagttccaatactgcgtagtaacggaagtagcaccatagcaacacacaatattgatgggctcaaaaacgatatgcaatgggagagggcaggactcagatacatgggtgatttatatggggcgtgtgcttcattaaatgtttgggagccaaaggttaaaggtagccaggattctagtgcaatttggataagtattgaaaatagaagaggacaacagcctgatcgggtgagcgccggtcttcgggtagctccagcattgagtggtgatgcttttgttagacttcatg

SEQ ID NO: 77 - DNA, 170 bp, Triticum aestivum
  Clone ID: uC-tsfl189003a11b1
atcttgctcgcgatggtaatgaaattatccgagcagcttgcaaatggagtcctgaactagccgcagcttgtgaagtatggaaggcgatcaaattcgagttcgagccggtagatactattgataagtctataaatctaaagataaagaagagaaggtataaatgaaggtat

SEQ ID NO: 78 - DNA, 465 bp, Triticum aestivum
  Clone ID: uC-tsfl189003a12b1
caagaagaagggcgtggagacgtacaagatctacatcttcaaggtgctgaagcaggtgcaccccgacatcggcatctcctccaaggccatgtccatcatgaactccttcatcaacgacatcttcgagaagctcgccggggagtcggccaagctcgcccgctacaacaagaagcccaccatcacctccagggagatccagacctccgtccgcctcgtcctccccggggagctcgccaagcacgccgtctccgagggcaccaaggccgtcaccaagttcacatcctcctagactgacggcgtgcagttggtttctgcatctgcatctgtactcttgactctgcttatctatctatctgcaagtagtggtggtggtagtagtacctgtgctgggtgattgccaacgctttgttggcccgttggttgtaagagctgaagttgctgctttggcaaactgaaatctatcta

SEQ ID NO: 79 - DNA, 382 bp, Triticum aestivum
  Clone ID: uC-tsfl189003b01b1
ctctctctctctccatcgacctaacctacacacccagagaaagagagagaagcagcagtagctcatgtaacctagctagcctgcagatctccacgggaacgcttcttattgttggctgccgaccgttgaacctacccggggtctgaacggataagggggcagcgaggcggcctctccaggggataatcagaaggaagaatgtgctcgtccggccagatcacaccggcagaagaagtctgctacgtgcactgcaacttctgccacaccagactcgcggcgagcgtccctgggaacaacctgctcaacatcgtgacagaccggtgcgggcactgcacaaacctactttcggtgagcctgagagggcagatgcactcaccggtcc

SEQ ID NO: 80 - DNA, 509 bp, Triticum aestivum
  Clone ID: uC-tsfl189003b02b1
cccacgcgtccggtacgtcgacgtcaaggtgaacggcgccgtgcacaagggtatgccgcacaagttctaccacggccgcaccggacgcgtgtggaacgtcaccaagcgcgccatcggcgtcgagatcaacaagcaggttggaaaccgcattatcaggaaaaggatccatgtccgtgttgagcatgtgcagccatccaggtgtgctgaggagttccgcctgaggaaagtgaagaacgaccagctcaaggcggaagccaaggcgcgcggtgaggtcatcagcaccaagaggcagccactcggccctaaacctgggttcatggtcgagggtaccacaattgagaccgtcactcccattccctacgatgtggtcaatgatctcaagggtggttactagggtgtttgggttatctgcctgcacaaccagttcaaatctatggtgctcttatgagtaggatttgctctctgagcaagagtctgggttgggtctttattcatgtcaagaagatatt

SEQ ID NO: 81 - DNA, 405 bp, Triticum aestivum
  Clone ID: uC-tsfl189003b03b1
cacagtagcactagcttgagctagccaccttctgccactccgggcattttcttgcatccacgaaggcaatggccactgctgatgtccagaacccggcggtcgcgctgacggaggaggcgcccgcggtggagacacccctggtcgccgaggaggtcgcgaagacggaggaggcccccacgccggcggtggccgaagtcgaagcgcctgctgcccccgtcgaggttgaggagactaaggaggaggcgccggccgccgctgagacggaggagaccaaggagcccgagcccgcagctgcggccgagccggaggccgaggcgccagccgtggtcgagacagagaccaaggaggccgtggctgaggcagagccggcggtggtcgaggaggtgaaggaggaggcggcgcctg

SEQ ID NO: 82 - DNA, 406 bp, Triticum aestivum
  Clone ID: uC-tsfl189003b04b1
gtacacgctgcgttacaccggaggcatggtccctgatgtcaaccagatcatcgtgaaggagaagggcatctccacgaacgtgacgttcccgacggtcaaggcgaagctgcggctgctgttcgaggtggcgccgctggggttcttgatagagaaggccggggggcacagcagcgacggcaagcagtcggtgctggacaaggtgatctccgtcctggacgagcggacccaggtggcctacggctccaagaacgagataatccgcttcgaggagaccctctacgggtcctccagactcgccgtcagcgccaccgtaggcgccaccgtctgataatcgatccatcttctttttttacgcttttttcaacctgaaaaacaagatgtccgttatagagttcgcctgaagcat

SEQ ID NO: 83 - DNA, 448 bp, Triticum aestivum
  Clone ID: uC-tsfl189003b05b1
cctaaccacataatatctccgtcgatccaccacaccctgcaatggcgtccgcgctcaccaacgtgagcctgtctaccttcgcgcccacggccaggggcgacgtcctcgccaggcctcaggtggccgccgcccgcgtcaccttcccgacggcgtaccgtggcagcggtgccctctcctgcagggcgggtgggccggccacgccgccgggcatctccgacaagatgtcggacagcatcaaggaggcccaggagacgtgctcggaggacgccgccagcggggagtgcgcggcggcgtgggacgaggtggaggagctcagcgccgccgccagccacgcccgggacaagctcaaggactccgacccgctcgagaactactgcaaggagaaccccgagaccgacgagtgccgcacctacgacagctgagcgtacgtgctaatttgttctggacg

SEQ ID NO: 84 - DNA, 435 bp, Triticum aestivum
  Clone ID: uC-tsfl189003b06b1
cttgctgcatccagtccacaccttgtaaagggggtcacgttgcttaatgcaacgccattttggggtttccttcctaatcctgcaagatctcctcgtttgtcaaagatttttccatgggctgggacatttcctcttccatcagttgtgaggaaacttactgaaacagtgtggcagaagataagcgacccaagaagtatacagaagatactcaggcaagtatatgctgatcactcaacaaatgttgacaaggtgttctcacgtattatagagacaacagaacacccagcagctgctgcatcatttgcctccattatgtttgctccaatgggccagatatcctttcaggaggcactatctaggtgccaaaagcaggacattcccatttcccttatgtatgggaaagaagatccttgggttacaccttattggggtatc

SEQ ID NO: 85 - DNA, 62 bp, Triticum aestivum
  Clone ID: uC-tsfl189003b07b1
aaatataaaaaattttaaaaaaaaaaaaaaaaaaaaaaaaaaaaaaaaaaaaaaaaaaaaaa

SEQ ID NO: 86 - DNA, 443 bp, Triticum aestivum
  Clone ID: uC-tsfl189003b09b1
cccaaaccccatactcagcgacagagagcagccagcagcctcctccgccgccgcccatgtcaggaggagggatcgcgcggggccgcctcgcggaggagcgcaaggcctggcgcaagaaccacccccatggattcgtcgcgaagccggagacggtggccgacgggtcggtgaatctcatgatctggaactgcaccatccccggaaagcaggggactgattgggaaagtggatactacccacttactctccatttcagtgaggactaccctagcaaacctcccaagtgcaagttcccgcagggttttttccacccaaatgtctatccttcagggacggtctgcctctcgattcttaatgaggatagtggttggagacctgccatcactgttaagcagattctagttggaatacaggatttgcttgatcaacctaatccagctgat

SEQ ID NO: 87 - DNA, 106 bp, Triticum aestivum
  Clone ID: uC-tsfl189003b12b1
cacagaccaaacgcagtcttttagcttgtatagggcacacgacggtcggatcacagtagggaccaagaaccataggtggacgacaaggcgccgaagcccaaaacaa

SEQ ID NO: 88 - DNA, 269 bp, Triticum aestivum
  Clone ID: uC-tsfl189003c01b1
gtggattggaatggaatgccagacagactcgcaaggttgtattttgtgctatgttttttaagtactgttgcctgttgggtagctggtcgggttatcttgtagcggtgtagtcgtggggagcagcatcggatttacctggtttctagtcttatcatggaatttaggggctttgtgcaaatctcggttttgccctgcggtttgcttgtatgcttgggttgtgttcagctccaaaatgctggccggaagtacattttgtggattccatttgg

SEQ ID NO: 89 - DNA, 181 bp, Triticum aestivum
  Clone ID: uC-tsfl189003c02b1
cccacgcgtccgcgagcatcatcatcacaccaggctagctagcccactcggtgtctactgttgctgctctctgcgtgtattcgttgttgttttctgcatgtgttccacctccatctgttgtccttgttacagatcgagcagattactgatcgaatcatcaataaaataatgtgttgagcgg

SEQ ID NO: 90 - DNA, 497 bp, Triticum aestivum
  Clone ID: uC-tsfl189003c03b1
cccacgcgtccgcccctgcctcccccagagctcgttagggttttctcttttttcgggggagaaatctcaagaggcggcaccatgctcgtgtaccaggacaagctttccggcgacgagcttctgtcggattcgttcccttacagggagctggagaacggcgtgctctgggaagtcgatggccattgggtcgttcaaggagcagttgatgtggacattggagccaatccctctgctgagggtggtggtgatgatgagggtgttgatgaccaggccgtgaaggtggttgacattgttgacaccttccgtcttcaggagcaacctgcttttgacaagaagcagtttatctctcacatgaagcgctacatcaagaacctctctgccaagcttgaaggggatgacctagatgctttcaagaagaatgttgagtccgccacaaagtatcttcttagcaagctcaaggaccttcagttctttgttggcgagagcatgcatgatga

SEQ ID NO: 91 - DNA, 131 bp, Triticum aestivum
  Clone ID: uC-tsfl189003c04b1
cggttctcgtgggctcatttcttaaaatatcccatatatgtagggggaaaccgaggaagaggacagatctatcctgatggtagcaagagtaacaatacagtctataatgctacgtcaacaggtatagtaag

SEQ ID NO: 92 - DNA, 270 bp, Triticum aestivum
  Clone ID: uC-tsfl189003c05b1
cccaagcacaaatattggaattatttgagtccatgtcaagctagaccatcagttgcacaaatattcgagtacacgtaaaactagacccttcctgagcacacatatttgtcaatctggcgcatccacaagagacatacatccatatgaagggatccataagttgacatgatcatttctagggcatgaccagtaagaatgagtgcgaaggacttaaggatcacaactgaacaagcattgctttaaaaaattgggttcagctttgctatcctg

SEQ ID NO: 93 - DNA, 242 bp, Triticum aestivum
  Clone ID: uC-tsfl189003c07b1
cccattcgtccgcccacgcgtccgcccacgcgtccggtccttctcctcctcctcattcctaccttagcgctgcatgctgcatgcatgcaacgatagacgtgggctgatcatctcctgtggaatagctcaacatctaaccgtatcatcaagaggagagacaagggagaggagatctcacatgaattattgttatttaattagccaggcataaataaaaactaccaaccgatttgttgtttgtt

SEQ ID NO: 94 - DNA, 431 bp, Triticum aestivum
  Clone ID: uC-tsfl189003c08b1
gtgctcttaaggtagctttggatggtggtcttgatattccgcacagtgacaagagatttgctggcttcaagaaggatgagaagcagctggacgctgagattcaccgcaaatacatctatggaggccatgttgctgactacatgaagtcactggctgatgaggaacctgagaagtaccaatctcacttcagtgagtacatcaagaaggggattgaggctgataacatggaagcactgtacaagaaggttcatgctgccattcgtgctgatcctaccatggcaaagtcaaccaaggaacctccaaagacgcacaagaggtacaatcccaagaagctgacctatgagcagaggaaggccagtctcgtggagcggctcaacgccctcaactcatctgctggtgctgatgtcgatgaggacgacgacgaatgagtg

SEQ ID NO: 95 - DNA, 434 bp, Triticum aestivum
  Clone ID: uC-tsfl189003c09b1
atgctgcctggtgtatcattgaagcctggtactcctgtggaggatgttttccccctggtggaagcagaaacccctgtagagttggttctcgtgatgacggtcgagcctggctttggtggccagaagttcatgccggagatgatggataaggtgcgtacgctgaggaagaagtacccgtccctcgacattgaggtcgacggtggcctgggtccttccaccatcgacgccgccgcgtcggccggcgccaactgcatcgtcgccgggagctccgtgttcggcgcgcccgaccccggagaggtcatctcggcgctgcgcaagagcgtggaggcgtcgcagatcaagagctgatcatctgtagctctgcgcgctcggacggacgcatgtttctgctgtaaactagaaccactctgcacgaccgacgctcggtcagcagt

SEQ ID NO: 96 - DNA, 299 bp, Triticum aestivum
  Clone ID: uC-tsfl189003c10b1
cactttccgggagatccagacctccgtccgccttgtcctccccggcgagctcgccaagcatgccgtctctgagggcaccaaggccgtcaccaagttcacctcctcctaggcgtcagtctcgtttctgaacccgttggattctgtatgtagttaggtgcaagattgtcttctgaatttgtgatcttgtgctgcttgttggtctgcagaaatgttcatgggactacttaatgatattcttgctgcttgaagaaaaaaaaaaaaaaaaaaaaaaaaataaaaaaaaataaaaaaaaaaataa

SEQ ID NO: 97 - DNA, 438 bp, Triticum aestivum
  Clone ID: uC-tsfl189003c11b1
gctgatgaggctgctgctggtggtggctctcgccgtggcggcggcggcggcggagcagcgcgccacgtacatagttcacatggccaagtctgccatgccggccgagtacgccgaccacggcgagtggtacggcgcctccctccgctcggtgtccaccggtcgcgccgccgctgccaagatgctttactcctacgacaccgtcctgcacggcttctcagcgcggctcacggagcaggaggccagcgacatggcgggcatggacggcgtcctggccgtgaaccccgagacgcggtacgagctgcacaccacgcggacgcctgagttcttggggctcgccgggagcgagggcctgttcccgcagtctggcacgggcggcgacgtcgtcgtcggggtgctcgacaccggcgtctggcctgagagcaagagctacaacgacgc

SEQ ID NO: 98 - DNA, 155 bp, Triticum aestivum
  Clone ID: uC-tsfl189003c12b1
cccacgcgtccgccatagcctacccagtgttgcctagttagttggatcttgtatgtagtgtggtggcccctttcatcagatctcgatgagcaaggccggcattgtgtatctgtgatttctgtggtaatggttaaagatgcaatcctttcaatctt

SEQ ID NO: 99 - DNA, 231 bp, Triticum aestivum
  Clone ID: uC-tsfl189003d01b1
cccgtgtgtagctatgggtataggcggccgcgttatgagtactttctacgaccttagcaacgcacggtcttagcttgctggctggcaagctagtactggactgcctgccgtattttggaaggattaacgacaacatatacgattgactctcgagcgtcttgtactatacattgtgtaaatgaacgaaacaatcttagtagtccgtttcacaagatcggcttatgtgtatca

SEQ ID NO: 100 - DNA, 147 bp, Triticum aestivum
  Clone ID: uC-tsfl189003d02b1
ctgttctctggggttttggtggtgttatcgatgaagctgatttttgcccgtttggcgccggggctgtatccatccatgtcttttgaaaaatgctacgtggctactcttaatgtagtgtgatactcgtataaaagcaatctgtttgtg

SEQ ID NO: 101 - DNA, 304 bp, Triticum aestivum
  Clone ID: uC-tsfl189003d05b1
ggcatacttggctgggccattgatgaggattttggttctattgagaaacttataaagaagatgaatgcagagggtgctgctttacaaggatctggatgggtgtggctagctttggataaagaggccaaaaagctttcagttgaaactactcctaatcaggaccctcttgtgaccaaagggtcaaacctgtatcctttgttgggaattgatgtctgggagcatgcgtactacctgcagtacaagaacgtgaggccggactacctgaccaacatctggaaggtggtgaactggaaatatgccggag

SEQ ID NO: 102 - DNA, 104 bp, Triticum aestivum
  Clone ID: uC-tsfl189003d06b1
attctctcttcgagctcatgtatgattactttcatttgtatgcatagtgtatgtacgtatggtgtcgatttacatatggccccgtgattgcttcttcatcgatc

SEQ ID NO: 103 - DNA, 252 bp, Triticum aestivum
  Clone ID: uC-tsfl189003d07b1
gtgtttggccgcttgtgggtttatatataaaggcagacaggcgccgcagagcgggcgcgtgcgagcgagacgaagatcgatcgagccatcgagggaacatgtcctctgcacgttttgaacctttgcagcgttttggatgccggtcgtggaccgaacgtttattgttttgttttcagttgtatcccgtttaaacctgatgcccgagggctttattattaatttaaagccggacgtttctagcgtctccgttcc

SEQ ID NO: 104 - DNA, 480 bp, Triticum aestivum
  Clone ID: uC-tsfl189003d09b1
ctcgaagacccatctaaatgtcaagggtgtatttgatgcggcaataaaggtggtacttgcgccaccaaaggcgaagaagaagaaaaaggcgcagaggggggcttgctccatcttgtgatctaatcatcggtagacaaagaacaagggcgaagttgccgccatgctatattattgttacgtcttgcttcagcggagctgcactctcatggtcgtcgtccctcccccctaccccaccctaggttacccaccggcagctgcagcaaggtctctttgtcgaggcatcgggcgatccatttgtttgatttctcttcttcctgccttgtgattatctcgtgtgactgacaagtcgtggcaatttaggtaacttgcttagtagacggtatttcccgtgtttgagaccccgtaaaaaaaaagtatctcgttgttatctcggttccataagtagagacatgatgtaatcgcactcagtttattttattt

SEQ ID NO: 105 - DNA, 481 bp, Triticum aestivum
  Clone ID: uC-tsfl189003d11b1
gtatactccatttccatcacacacacggacacacctgcaagagcgagagcgtgaaccatggcgggcatgatgaagaagcaggtcgtgacggcgctgatgttggcgctggtggtgctggcggcggcgccgggcggggcgcgcgcggcgtgccaggcgtcgcagctggcggtgtgcgcgtcggcgatcctctccggggccaagccgagcggcgagtgctgcggcaacctgcgggcgcagcaggggtgcttctgccagtacgccaaggaccccacctacgggcagtacatccgcagcccccacgcgcgcgacaccctcacctcctgcggcctcgccgtcccgcactgctaggcgccggcaggcccctggcgcatatggctagctagctgccgccgtgagagtgtcagactatagctagccctagctgagtgcgtacgtgttgcgtccatgaacgcatcttcctgctaaactactatgtggttcg

SEQ ID NO: 106 - DNA, 231 bp, Triticum aestivum
  Clone ID: uC-tsfl189003e01b1
agagctggtagctatggctatagccggccgtgttatgagtacgtactacgaccttagcaacgcacggcctttgcttgctggctgccgagctagtactggattgcctgccgtatttttgaaggattaacgacaacatatacgattcactctcgagcgtcttgtactatacattgtgtaaatgaacgaaacaatcttagtagtccgtttcacaagatcggcttatgtgtatca

SEQ ID NO: 107 - DNA, 330 bp, Triticum aestivum
  Clone ID: uC-tsfl189003e02b1
gcttcaggtggtattcatgtttggcatatgccagctctgaccgaaatctttggggacgattctgtattacaatttggtggaggaactttaggacatccttggggaaatgcacctggtgcagcagctaatcgagtggctttagaagcctgtgtacaagctcgtaacgaagggcgcgatcttgctcgcgaaggtaatgaaattatccgagcagcttgcaaatggagtcctgaactagccgcagcttgtgaagtatggaaggcgatcaaattcgagttcgagccggtagatactattgataagtagataaaactaaagataaagaagagaagg

SEQ ID NO: 108 - DNA, 196 bp, Triticum aestivum
  Clone ID: uC-tsfl189003e03b1
cagctaatgcgcatgtgtctttttaggcgcggaaaaggcccctgctgtatgtagcgctgcagacctacattcgttgtacagcgaacctaatatgattaattaattagattatgagaatttggttttgcgaactgtcttatcttctgtactggaatattgacataaatatagatcatggtaattttcttttcctgtt

SEQ ID NO: 109 - DNA, 131 bp, Triticum aestivum
  Clone ID: uC-tsfl189003e04b1
cccacgcgtccgctgaatgcttgactacaacatgtcgtaggttgcttggatctgtataatatacatatgtgatggaaatttgtagaatgtgtgttctgagatatttccgtaatattcagctaattcgtggt

SEQ ID NO: 110 - DNA, 447 bp, Triticum aestivum
  Clone ID: uC-tsfl189003e05b1
ctactacttgccttcccctccccgtctctctccgcccccccccgcgtctccattgccttctccgttcccccaccccacgcctcgtcggcgggcggcgacgcgacgagacgagagcggcggcggcgccggcggaggcaggaatgcggatgttctccaaggcctgctcgctcgtcgtctcctccctcccgcgctgctcctcctccgcccccgcgattaggggccagccgtcgttgataccgagggtgagcaggaaatggctcgggaagccgctcatgtacgggatcggcacgctgctggtcatgcccctgaggaccatccacggggtgggccggatgttcggcgccgcgcgctacctctgcaacatgaccagcgtctcctcgtcgctgcaaatcgagctcgtaccctgtcttcaagataactatgcgtacatcttgcatgatgtggata

SEQ ID NO: 111 - DNA, 132 bp, Triticum aestivum
  Clone ID: uC-tsfl189003e06b1
cccatctcgtccgcccacgcgtccgcccacgcgtccgcccacgcgtccggtacgatgttacgaaataagttgcttcaataacttatcagaatgtacccaggattgcaatgatttgtcaaactagtttagagg

SEQ ID NO: 112 - DNA, 307 bp, Triticum aestivum
  Clone ID: uC-tsfl189003e07b1
ggcgtgtctacccgctgagtttaagcaccagggaggaggggttagatagttggcatttgcaagcggcaaccaaatgcgcattccattgagtttgtatggtgggctgctctttgcacaagctgtgtgcttatgaggtgctggtacttatcgaggacagcaggggggtagcgtactcgtggtgttgcactatgttttgtttctttgttatatttttgagtgtttgatctgtttgagcctttgtgacctgagaaaataaaaataatatgagttacctttgttaatttaaaaaataaaaaaaataaataaa

SEQ ID NO: 113 - DNA, 472 bp, Triticum aestivum
  Clone ID: uC-tsfl189003e08b1
gccttgctcaagcggcagcaatggagggcaaggaggaggacgtgcgcctgggcgcgaaccgctactcggagcgccagcccatcggcacggcggcgcagggcggcggcgcggacgagaaggactacaaggagccgcccccggcgcccctcttcgaggcggaggagctcacctcctggtccttctaccgggccggcatcgccgagttcctggccaccttcctcttcctctacatctcggtgctcaccgtgatgggcgtggtgggcaacccgtccgggtccaagtgcggcaccgttggcatccagggcatcgcctggagcttcggcggcatgatcttcgtgctcgtctactgcaccgccggcatctccggcggacacatcaaccccgcggtcaccttcgggctgttcctggccaggaagctgtcgctcaccagggcggtattctacatggtcatgcagtgcctgggcgccatatg

SEQ ID NO: 114 - DNA, 398 bp, Triticum aestivum
  Clone ID: uC-tsfl189003e09b1
gttgtgcttctcctccccactcagtcctcggttcccggtccggttcggttccgttcggttcgttagggtttagtagcggggaagaggaaggcatggcggacgtcgagtaccgctgcttcgtgggcggcctcgcctgggccaccgacgaccagtccctccagaacgccttctccaagtacggcgacgtcatcgactccaagatcatcactgacagggagacgggccgttcccgcgggttcgggttcgtcaccttcgcgtcggacgaggcgatgcgccaggcgatcgaggccatgaacggccaggacctggacggccgcaacatcaccgtcaacgaggcccagtcccgccgctccggcggaggcggcggcggcttctgcggcggcggcggcggcggcggc

SEQ ID NO: 115 - DNA, 469 bp, Triticum aestivum
  Clone ID: uC-tsfl189003e10b1
gcgtatttgtttacggctaattgcatcgccggtgatgcgcgagatcttgaaagattccatcttgtttggccgctccggccaggggcgagctgcgccctcttgatttcagtgccgccaccacggctactttggcattaaactacggacggcgtcgcggctccgtcggggaatcagatcacgtcgtgatcatcatcagattaaaacaaacaaacgaacacgaattcatctttgccttgtcatctctgtctggactgtgcgctgattggattcgatccgtgtgttgtttgcttgcgtgcgcgcagatggtccgcgattgccgcccggctgccggggaggacggacaacgagatcaagaacgtgtggcacacccacctcaagaagcggctcgaccccggcgcgcaggagcagctcgaggaggccagcgccgctaagaagcgcaagaagccggcggcggcggcgcggaagcgcg

SEQ ID NO: 116 - DNA, 400 bp, Triticum aestivum
  Clone ID: uC-tsfl189003f01b1
cccacgcgtccgcccacgcgtccgttttttccctcctactaaaataatgatcagtaaaatcaaaataaatacttggtaaataaatttatttggcaacaaacattgttgaatgttctgtgtaccttcattttttcctgaagaaaaacttagtaaaaacaaaattttaaattatatttactttttttatattattgttcatggcctgcatttgacccgcgcaacagaaacttcacgcccgcaaaagcgccaaagtggtgatactacattgactggataaaaattctttgtgttgtgtccctcttctttttttgagaacctgcgttgtgtcatcctaaacaatcactcacttcaagttttcaactgctactatgaaagaaaaaatgcgcacccccagaccaaa

SEQ ID NO: 117 - DNA, 323 bp, Triticum aestivum
  Clone ID: uC-tsfl189003f03b1
aaaaaggaacaaccccccaaaaaaattaaaaaacacgggggggggaacaccaaactgtttcatcccccaaagaaggaacaaagccccacaaaaaaaaaaaaaccccgggcggggaaccccggcaccccaaaaacacggttaaaaaaaaaaaaaaacaccccccacggggggggccccactgtcctaaaggggaccccgggggcccccaaaactgccacaagaaaagggcgccaccacccgggggggggggggtatataatgaaccccccccacccccgggatgacaacaacccgccggaaactcctgggcccccccccccccc

SEQ ID NO: 118 - DNA, 418 bp, Triticum aestivum
  Clone ID: uC-tsfl189003f04b1
cagggctcgcctgtggcctcgcggggctcgccgccggcatggccattggcattgtcggtgatgctggagtcagggctaatgcgcaacaaccaaagctgttcgtgggcatgatccttatcctcattttcgcagaagcacttgccctttacggtctcatcgtgggcatcatcctctcgtcccgtgccggccagtcccgtgcggattaggcgcctcgctctaccattctgcaattgccacacaggctacattcttgagaagctttctaattttgatgtattaaggagatatttgtagattattaaggaaggtgacacttccagtaccgttttcattctttttgggttgtggtgggcgtttgctgttcgtgcagaggattttggggtaggctggattgctgctcctgggaatatgggtttta

SEQ ID NO: 119 - DNA, 381 bp, Triticum aestivum
  Clone ID: uC-tsfl189003f05b1
cggacgcgtgggcggacgcgtgggcggacgcgtgggcggacgcgtgggcaatcccctccaatcccaccttcggaacagcagccagcaagcgtcgccagccatgtcgggccgcggcaagggaggcaagggcctgggaaagggcggggcgaagcggcacaggaaggtgctgcgcgacaacatccaggggatcacgaagccggcgatccggcggctggcgcggcggggcggcgtgaagcgcatctccgggctcatctacgaggagacccgcggcgtgctcaagatcttcctcgagaacgtcatccgcgacgccgtcacctacacggagcacgcccgccgcaagaccgtcaccgtcatggacgtcgtctacgcgctcaagcgcca

SEQ ID NO: 120 - DNA, 315 bp, Triticum aestivum
  Clone ID: uC-tsfl189003f06b1
gttttgcatatgccaactctgaccgaaatctttggggacgattctgtattacaatttggcggaggaactttaggacatccttggggaaatgcacctggtgcagcagctaatctagtgggtttagaagcctgtgtacaagctcgtaacgaagggcgcgatcttgctcgcgacggtaatgaaattatccgggccgatctcaaatggagtcctgaactagccgcaccttgtgaagtatggaaggcgatcaaattcgagttcgagccggtagatactattgataagtagataaaactcaagacaaagaagacaatgtat

SEQ ID NO: 121 - DNA, 397 bp, Triticum aestivum
  Clone ID: uC-tsfl189003f07b1
cccacgcgtccgcccacgcgtccgggagaacggcgccatcgtgtcggcattgaccggatcatatggtttccctggtagcacgtcgttgcatttggcagctcgcagcggggacttggattgcatccggaagctgcttgcgtggggagctgatcggctccaaagggactctgctgggtgagaactagatccctgccatgggtctgccttacacattgttggtgtatatatagcagcacagtttggttgctctgttggtaatccagtagagtagactagccaattaacaagtgaactcactataaagcatttcctgaatccatatttggaaagttcactggcccctgcttgtactataacaaacttttatgtgctcaattgatgaattaaatcttatgtc

SEQ ID NO: 122 - DNA, 468 bp, Triticum aestivum
  Clone ID: uC-tsfl189003f08b1
cgcgtgtgttgcgagccatggccggcgagaagaagatgttcggcttcgaggaggtcgccaagcacaacgtcgccaaggactgctggctcgtcatcgccggcaaggtgtatgatgttacccctttcatggatgagcatcctggtggagatgaggtactgctggcagtaaccgggaaagatgcaaccagcgatttcgaagatatcggacacagtgattccgcaagggagatgatggagaagtaccacatcggggaaattgatgcttcaaccatcccagcaaagcgtacatttgtacctcctcagcaagggtcccatgtccaggccaaggatagcgacctcctcatcaagatcctgcagtttcttgttcccattttaatcttggggcttgcatttggtatccggcactacagcaaatctgagtaggctgttgttggcgagttgcttcggagaaatagctttcaagtaatat

SEQ ID NO: 123 - DNA, 463 bp, Triticum aestivum
  Clone ID: uC-tsfl189003f10b1
agattccaccagcctcctcctcctcttccctcgccgcccgccgcccgccgcccgctgaggttggtcgccggacgccatggcccccaccaagaagtcgaagaagagcacggagaacatcaacaacaagctgcagctggtgatgaagagcggcaagtacacgctcggctacaagaccgtcctcaagacgctccggagctccaaggggaagttgattatcctcgcaaacaactgccctccgctcaggaagtctgagatcgagtactatgctatgctgtccaagatcagcgttcatcatttccatggaaacaacgtggatcttggaactgcgtgtggcaagtactaccgggtgtgctgtttgagcatccttgaccctggtgactcggacatcatcaccaccgttcctcagtgaagacaagcttacctatcctagcctaagatgatgtagtgtggagagtcgtgctta

SEQ ID NO: 124 - DNA, 383 bp, Triticum aestivum
  Clone ID: uC-tsfl189003f11b1
cttttacggcgacgacaccaggaaccactactaggccccgaggcggaggcggaggccgggcaaaataagaggtgtggcctggcgggggcgtctcagccaggcagcggctaccacgggcgggcgtgccgtggtcttctttatgacgaatgaatgaatggatggaagtggaatggaatgaacgaatggtgtttgatgacggcggtgggtttgcttggccgttttaatttgtacagtttgttttctccccctttgttgtggccgcttgcggcggcgttaattttagttccttgaagaagatggatgatgttgtatttcggagagatgtatgcaggccggcgcggcgtaacgccgctcgtttggaatcccgttggtttttaaattaa

SEQ ID NO: 125 - DNA, 477 bp, Triticum aestivum
  Clone ID: uC-tsfl189003g01b1
tttcggccttgctccacgccgccagcaccagccgcggctccctctccggcggcagggccgcatcgtccaggaacgagtgggtgctgtgcagggtgttcaagaagagccttgtaggcggcgtagtgtcgtcggcgccggcgtcgtcagcagcaaagaaaagcggcgtggagatgatcgaggagatagggtcgtccgtggccgccgtcaccccgctccctgcgctcctggacatgtccggctccggcgccttcttcgacccggcggcgcacgtgacctgcttctccaacaacgcgctggaggcgggccagttcttcaacccgacggtgacgggcggctgcgccacggacacggacaaccacggcctagcctcgtcatactccccgttggcaagcttcacgcagtacggtgggcagctgcaccacggcgtgagcctgagcctggtgcagctcctggagagcagcgggtaccaccgtggtc

SEQ ID NO: 126 - DNA, 220 bp, Triticum aestivum
  Clone ID: uC-tsfl189003g03b1
tcgaaattaaaaaaaaaaaaaaaaaaaaaaaaaaaaaaaaaaaaaaaaaaaaaaaaaaaaaaaaaaaaaggaaaaaaaaaaaaaaaaaaaaaaaaaaaaaaaaaaaaaaaaaaaaaaaaaaaaataaaataaaaaaaaataaaaaagggggggggcctttttaagggtcccaagtttcctcccccgggctggcaaggtattatttttttttttgggcccc

SEQ ID NO: 127 - DNA, 352 bp, Triticum aestivum
  Clone ID: uC-tsfl189003g04b1
ctcggtcgtctcagaggccaggctgccgcctctgctgccaaggccgacaaggccacttagagctatcgttgctgtttatctatgtttgctgcctctagattacccgtcaaggacatgtattgcaatatggatgtcgtttttgctcggtactttggtaacgtggtgatatttgttatcagttttcgctgtcgtggtctggattcgtcggtccacataaagaagattgtgcttggtaaaaaaaaaaaaaaaaaaaaaaaaaaaaaaaaaaaaaaaaaaaaaaaaaaaaaaaaaaaaaaaaaaaaaaaaaaaaaaaaaaaaaaaaaaaaaaaaaaaaaaatataatggggggggc

SEQ ID NO: 128 - DNA, 292 bp, Triticum aestivum
  Clone ID: uC-tsfl189003g05b1
tgcataacttagtccattcaatccaatacataaagatataaggtctgtccccatcagacgacacaagataacttcaaacgaacaacacgccaccaacaatacttttggaaccaagctcgcatcgtcgattcttcttcctacgagaagcacggggaacactacggcgacatatactaatactgataggtataggtatgacttgctgcagagtcaggcggtaggaaaaggagcgaaggggaacggggcactcagatctgacgggcaaagccgtctagttggtcttgttggggca

SEQ ID NO: 129 - DNA, 187 bp, Triticum aestivum
  Clone ID: uC-tsfl189003g06b1
cccacgcgtccgcaaaaatggtggaccacatatgattattagattaggttagaagtagccagattgaggggtggggttttttcagattcttattagattagtagtggaatttctgcaattctttaggtgtttggagtcaaatatatacttctgcttgatgattaattaaatggatgcttagttctaa

SEQ ID NO: 130 - DNA, 333 bp, Triticum aestivum
  Clone ID: uC-tsfl189003g08b1
taactaacacaaaccgcataggaggataccgatcgatcataggtggaactgacactgtgacacacaccgcaacaaagctccagctgagcagacgcaggcacgggggtgccggcgagagtggcgctgcgtcgctcgctcgctcgctgctgacccgacactgggcgtcgactggccccgacaacacttttatttagcccacgtcacgcgcgaccccgcgcatagcgctcccactccacacctagtaaaaagcagtagcactccactccactggctgactcagcatcacgccgtgccacgtaggagcacacggccgccgccgtcgacgctgaccca

SEQ ID NO: 131 - DNA, 281 bp, Triticum aestivum
  Clone ID: uC-tsfl189003g10b1
cccacgcgtccgcccacgcgtccgaggaaacttgtgggtccttagatgaatctacaaagttactcccaaagttcactgtgaaacacattctgttgtcctctaacctttgtacgttatgctgtataagatctgattatcaatttatctgttgggaatctacccgcctatgggtttcctaggagtacagacagaccaggtgaatacctactgggaaattgtttgtaccatggatctttgtttgcgctgatgcagtttaacgggaatagtgggctttcaacttg

SEQ ID NO: 132 - DNA, 432 bp, Triticum aestivum
  Clone ID: uC-tsfl189003g11b1
cccacgcgtccgctcctcggctgcacggacgggaagggagggagaagaaggagcgcgaacgctcagccccatggcctccatctcggtcccggaccccgccccttccccgaccgaggatgcagagagcatcagaaaagcagtgcaagggtgggggacggacgagaacgcgctgatcgagatcctgggccaccggacggcggcgcagcgcgcggagatcgccgtcgcctacgagggcctctacgacaagcccctcctccgcacgctccaggacgagctctccagccacttcaagggcgcgatgacgctgtgggcgatggacccggcggcgcgggacgccaagctggcctacaaggccctcaggaagaagggcggcgaccggcacgcctgggtgctcatcgaggtcgcctgcgcgtcgtcgccggaccacctcgt

SEQ ID NO: 133 - DNA, 366 bp, Triticum aestivum
  Clone ID: uC-tsfl189003h01b1
gggatggtggcgccgggttcgtcggtctccgccggcgtggttggctcctgcttcacaacggagttgagccactgctcctcctcttcgttcggcgtcacctcccactccatcatggcgggcacagggccatagcctggaggggcgaagtgctcctcgtcttcgtcggcgggcgtcggcgttgggaggtccgggtaggcgagtggctcgtcgatgacctccggtttcggtggtggagtggccggcggtggagggcacggcccgtacccgtgcacggggcagaaatcgcgggcagggcaaggtccgtatctgtgcaccggacagaaggccacgcctgcatccatgccgttgccgaagaagatccctggc

SEQ ID NO: 134 - DNA, 477 bp, Triticum aestivum
  Clone ID: uC-tsfl189003h02b1
tttcgcgatcgttcactagctacacacacatcacgtagctaagctaagcaagaaagaagcactcgcccctcggcgagcatggcggcggccggatcagctgctgctggtcgtcacaagttgggggaggagaagctgatcatccggccggagaaggtgcggttcatcgacatcctgtccctgctgatcctgcgccggcccatcaccagctacgccttcatcgacgccggcgaccagacgacccacgacgtcggcgtcacgccgggcgacatcttcgtcgtgctcacccagatcatccagaaggccctcgctgctgcctactacccggcaaagataatcggggccatcgtcgagctcctcctcaacttcttcgccctcaacggaggcctgctcggcatcgtatggaacatcatcagatttaagctggtgatcccgcgccgggaggcggccaactaccggacgatgatcgggatgatcgac

SEQ ID NO: 135 - DNA, 355 bp, Triticum aestivum
  Clone ID: uC-tsfl189003h05b1
cccacgcgtccgcccacgcgtccgcccacgcgtccggccgcaccgcacccgcacccgcacagcccatcggcgacctcgccggagaagagagaagaaggtgagagatggaggcggcggcggcggcggccggcgtgcagctgggcacctcgaagccgcagatcgcgacccaggcggagatggcggaggcgcgcctgccgatcccctaccgcgaccagtgcgcgcacctcctcatcccgctcaacaagtgccgcgtcgccgagttctacctcccctggaagtgcgagcccgagcgccactcctacgagaagtgccagtacgagctcgtcatggagcggatgctccagatgcagaagat

SEQ ID NO: 136 - DNA, 357 bp, Triticum aestivum
  Clone ID: uC-tsfl189003h06b1
tcgccctctcgtccgcacgtggtcgtgcgcgggggcgggggctgcgacgtgcgcttcgcccggtgcggcttcgcggcggccgaggcctgcggcgccgtgtcgttccacaggtgcgacgcggtgcgcgtcgacggggccggggaagtctccgtgcggcggtgcatgtccgcggacgtggagcgcgcggtcacggtgagcatccggaggtgcaagggggccgcgcgcgtgcacggcgccgtggagctgcgcctcgggcggtgccgggaggcggacgtgggcatctgctcggacgtggcgctggggcggtgtcgcgaatcgcgcgcctactggtgcggctcgctcggcgtctcgcggtgc

SEQ ID NO: 137 - DNA, 53 bp, Triticum aestivum
  Clone ID: uC-tsfl189003h07b1
aaaaaaaaaaaaaaaaaaaaaaaaaaaaaaaaaaaaaaaaaaaaaaaaaaaaa

SEQ ID NO: 138 - DNA, 493 bp, Triticum aestivum
  Clone ID: uC-tsfl189003h09b1
aatttatcggactattgcgagcggaacgagcagggcgagctttggatgaatcgatctattatcgggcaatcttattgggaataacaagggcttccctgaatacccaaagtttcatatctgaagcaagttttcaagaaactgctcgagttttagcaaaagctgccctacgaggtcgcattgattggttgaaaggcttgaaagaaaacgtagttctgggggggattatacctgttggtaccggattccaaaaatttgtgcatcgttccccacaagacaagaacctttatttcgaaataaaaaaaaaaaatctattcgcgtcggaaatgagagattttttgtttctccatacagaattagtttcttcagattctgacgtaacaaacaatttttatgagacataagaacccccaatatgttgtacacacacaaattatgtaaaaacaatcaaccatttactgaacatttggaataagcgtgaatacatttgtggaat

SEQ ID NO: 139 - DNA, 407 bp, Triticum aestivum
  Clone ID: uC-tsfl189003h10b1
ctcttagcaagctatatacctacatagtacagccatggcccccaccgtgatggcctcgtcggccacctccgtcgctcctttccaggggctcaagtccaccgccggcctccccgtcagccgccgctccaacggcgctagcctcggcagcgtcagcaacggtggaaggatcaggtgcatgcaggtgtggcccattgagggcatcaagaagttcgagaccctgtcctacttgccaccgctcagcacggaggccctcctcaagcaggtcgactacctgatccgctccaagtgggtgccttgcctcgagttcagcaaggttgggttcatcttccgtgagcacaacgcatcccctgggtactatgatggccggtactggacaatgtggaagctgcctatgttcgggtgcaccg

SEQ ID NO: 140 - DNA, 217 bp, Triticum aestivum
  Clone ID: uC-tsfl189003h11b1
gccgcacactagtttagaccatgggcgccgccacctccaccgtctcctgcctcgccggcgccgcgcttggccgccggacagtcttgtgtaccaactacacgagtggcggccggatgtcgtgcaggaacccgctgatgactaggaacctggagaggaacggcaggatcacctgcatgacgctcccgcgggactggctgcagagggacctgaacgagat

SEQ ID NO: 141 - DNA, 425 bp, Triticum aestivum
  Clone ID: uC-tsfl189003h12b1
cccacgcgtccgcccacgcgtccgcccacgcgtccgcccacgcgtccgcccacgcgtccgcggacgcgtggggtacagccatggcccccaccgtgatggcctcgtcggccacctccgtcgctcctttccaggggctcaagtccaccgccggcctccccgtcagccgccgctccaacggcgctagcctcggcagcgtcagcaacggtggaaggatcaggtgcatgcaggtgtggcccatcgagggcatcaagaagttcgagaccctgtcctacttgccaccgctcagcacggaggccctccttaagcaggtcgactacctgatccgctccaagtgggtgccttgcctcgagttcagcaaggttgggttcatcttccgtgagcacaacgcatcccctgggtactacgatggccggtactggacaatg

SEQ ID NO: 142 - DNA, 116 bp, Triticum aestivum
  Clone ID: uC-tsfl189004a02b1
acgatagatacttttgataaagaagataaaactaaagataaagaagagaaggtataaataaaaaagaaacgaataaataaaaaaaaaaactgggtggctcttttttggggacccag

SEQ ID NO: 143 - DNA, 478 bp, Triticum aestivum
  Clone ID: uC-tsfl189004a03b1
aggcggtggagctgctggccgagaccaacatgccgctgggcctgctgccgctggcagacatcgaggaggtgggctacaaccgcgccaccggcttcgtctggctgcgccagaagaaggcgctcacgcacaccttcaagcagatcgggcggcaggtctcgtacggcaccgaggtgacggccttcgtcgaggaccgcaagatgaagcgcatgaccggggtcaagagcaaggagctcctcatctggatcaccctctgcgacatgtacatcgagaaggacgatccctccaagatcaccttcaagacgcccacagggctggggaggaccttccccgtctccgccttcgagaagcaggacgacggcaaggccaaggccgcggctgccgacggcaaggaggccgtcgtggccaagtaggtgaggacggccggcatactctacaaagtttggatgaagagtcctcgagtccaatattaactatatac

SEQ ID NO: 144 - DNA, 423 bp, Triticum aestivum
  Clone ID: uC-tsfl189004a05b1
tctccattggcttcggccccgccctcgccagcttccgcctcggcgccgtcgagtacgcgctccgggccatcccgctcggcggctacgtcggcttccccgacgacgaccccgagtccggcttcgcgcccgacgaccccgacctccttcgcaaccgccccgtcccggaccgcctcctcgtcgtctccgcgggggtcatcgccaacctcatcttcgccttcctcatcatctacgcccaggcggtcaccgtcggcgtccccgtccaggcgctgctctccggcgtcctcgtccccgacgtcgtgcccggctccgccgccgcgcgctccgggctgctcgccggcgatgtcatcctcgccgtccccggcgccgcgccggacccatccgtgccggccctggtcgacctcatcaaatccagccccaacaaga

SEQ ID NO: 145 - DNA, 396 bp, Triticum aestivum
  Clone ID: uC-tsfl189004a06b1
tggacgtatgtacggccgcctgggcccacacctggatggagtcctgaactagctcgcagcgttgtgtatgtcatgggacgcagagcaaaccgccgttctagccggaggatactatttgatcagtgctagccttggcagcgtcagcaacggtggaaggatcaggtgcatgcaggtgtggcccatcgagggcattaagaagttcgagaccctgtcctacctgccaccgctcagcacggaggccctcctcaagcaggtcgactacctgatccgctccaagtgggtgccttgcctcgagttcagcaaggttgggtttatctttcgtgagcacaacgcattctctgggtactacgatggccggtactggacaatgtggaagctgactatgttcgggtgcac

SEQ ID NO: 146 - DNA, 394 bp, Triticum aestivum
  Clone ID: uC-tsfl189004a07b1
tatacctacatagtacagccatggcccccaccgtgatggcctcgtcggccacctccgtcgctcctttccaggggctcaagtccaccgccggcctccccgtcagccgccgctccaacggcgctagcctcggcagcgtcagcaacggtggaaggatcaggtgcatgcaggtgtggcccatcgagggcattaagaagttcgagaccctgtcctacctgccaccgctcagcacggaggccctcctcaagcaggtcgactacctgatccgctccaagtgggtgccttgcctcgagttcagcaaggttgggtttatcttccgtgagcacaacgcatcccctgggtactacgatggccggtactggacaatgtggaagctgcctatgttcgggtgcaccga

SEQ ID NO: 147 - DNA, 428 bp, Triticum aestivum
  Clone ID: uC-tsfl189004a08b1
agcggcctcatttgccacggcagaggtagcattcatcctgcaatcagcccagggccgtgcccttcagtttaccatcgctccagactccccaaccaccccacagcatgagccacagcagcagcagcagcaacagcaatagctaaacgacccagtagttccacaagtactggcataatgcgtgcttgaagatgtaggtctgggtgcctattttgctgttggtgctggctcctcaggaatgctaggaagccttcctgtggccacgtaaaaacctcgtatggtgtcagagtcttatttgtctcgagcaatgtgactaaacctgtgtgtctgaatgtaatttaagcattgatttaatgtaaatttaacatctattacctttactattttggtgcaacccgagtcttgtgctctaagcgcaatgatttgatggg

SEQ ID NO: 148 - DNA, 503 bp, Triticum aestivum
  Clone ID: uC-tsfl189004a10b1
gcaaacttatcttgaggctagccaccatgaagacaatgttcatcctcgctctcctcgcccttgcagcatccaccgccattgcccaattggaaaccatatgtagccagggcttcggacaatgccaacaccaccaacaactagggcaacaacagttgctggatcagatgaagccatgtgtggctatcgtacaacatcagtgtagcccagtgagaacaccattcccccaaacacggggagagcagcatagcagttgccaaaccgtgcaacaccaatgctgtcggcagctagtgcagatcccagaacaagcccggtgcaaggccatacagagcgtggaagaggctatcattcaacaacagccccaacaacaatggaatgagccccaacaggaagcacaccttaagagcatgaggatgtcgcttcagaccctgccgtctatgtgcaacatctacgttccggtacaatgccagcaacagcaacaactggggcgacaacaacaacaacag

SEQ ID NO: 149 - DNA, 383 bp, Triticum aestivum
  Clone ID: uC-tsfl189004b01b1
cccacgcgtacggtgggttctaggttagcgcgcagttgggcaccgtaacccggcttgcggttcatcccgcgctggattccttttgcagaaggaacttgactacctggatggagctgtttcaaaccctaagcgcccattcgctggcattgagggtggctcaaaggtggcggccaagattggggttatcgaaaccctggtggagaagtgtgatatccttcttttgggtggtggtatgatcttcacattttacaaggcacaaggactctcagttggttcttccttggttgaggaagataaacttgagctggcaacatctgtccttgcaaaggcaaaggcaaagggtgtgtcccttctggtgccatctgacgatatcattgctgata

SEQ ID NO: 150 - DNA, 388 bp, Triticum aestivum
  Clone ID: uC-tsfl189004b02b1
cctgcaaagcctgctgcagcaccagctgcgaagcccgcacctgctgagaaaccagcaccggcagctgctgatgtagccaagcagattccagctggcattccaggtagccgggcgaacaactattaccgtgcagatggccagaacacgggcaacttccttacggaccgtccttcaaccaaggttcatgctgctcctggcggtggctcgtccctgggctacttgtttggcggaaagtgatgttaatgatggtgcctgcttaatgaacgagcgatgaattggcctgtatctctgttatccatgtggtgaaaactggaagtgtttggtttgagcagtttaccacctgcgtcgatgtactctgtctgtatggttcattgtgtccaagctgacc

SEQ ID NO: 151 - DNA, 456 bp, Triticum aestivum
  Clone ID: uC-tsfl189004b03b1
cgctgggtatccgcaatatcctcctacgacccaccctccagctggttatcccgctcaagggccaccaatgcaggttcctccttatggtcaagctcctatgtacgggggaggcagccatggcgtagcaggcggtatgattgccggcggcgcggcagcggcagccgcagcatatggagctcacaaggtgtcacacggcggcgcccacggaatgtacggccacgggcaccaccacggcaagttcaagcatggcaagttcaagcacggcaagtttggcaagcacaagaagatgtacgggcgcaagtggaagtgaagaggggaaaagatacggctactcggatgtacgtacgtactacgtagacaacatgtagacccgtataattcgccatcttgctctctcacatctcaccaatgactcctcgcttgtgccgctcagaaggggaaaaaatgtgatcacct

SEQ ID NO: 152 - DNA, 194 bp, Triticum aestivum
  Clone ID: uC-tsfl189004b04b1
gagcaatttgttttcctgaacatggctgtagctgtgcgtcaagctcaaaccatttgtttatcttagttttgaacaaaagaaatcttattgtcttatgtaaattctgtttaccgatgtagttggatgctaccaaatggatctttgaatgttgaaatactgatgttttgagtcattatgtgtttgagatccggtac

SEQ ID NO: 153 - DNA, 448 bp, Triticum aestivum
  Clone ID: uC-tsfl189004b05b1
gctatatacctacatagtacagccatggcccccaccgtgatggcctcgtcggccacctccgtcgctcctttccaggggctcaagtccaccgccggcctccccgtcagccgccgctccaacggcgctagcctcggcagcgtcagcaacggtggaaggatcaggtgcatgcaggtgtggcccatcgagggcatcaagaagttcgagaccctgtcctacttgccaccgctcagcacggaggccctccttaagcaggtcgactacctgatccgctccaagtgggtgccttgcctcgagttcagcaaggttgggttcatcttccgtgagcacaacgcatcccctgggtactacgatggccggtactggacaatgtggaagctgcctatgttcggatgcaccgacgccacgcaggtgatcaacgaggtggaggaggtcaagaaggagtaccctg

SEQ ID NO: 154 - DNA, 394 bp, Triticum aestivum
  Clone ID: uC-tsfl189004b07b1
cccgactcaccaccgcgcctcttcctcctcccgctcacccacccatggcgacggctatgatggctgcagccaccacctcctgctccccgcgccgagcgctcctcaagcccgcggcctcctccagctccgcgccgccgcccaggccgcagcctcggtccttcctcaagcagctcccggggctcgccgcgacggcggctgcggcggccgtcgcctccgtgcctctcccggccctggccgtggagatggagaaggcggcgctgttcgacttcaacctgacgctcccggcgatcacgatcgagttcctgctgctgatggtggcgctggacaagctctacttctcgccgctgggcaagttcatggacgagcgggacgccaagatccgcgcggagctcgg

SEQ ID NO: 155 - DNA, 509 bp, Triticum aestivum
  Clone ID: uC-tsfl189004b08b1
caggcaccaacacagctagcattagcgccaccaccaccacccatctgccccatcaccacctctcaatcactactgccagtagctagcttaagcttgcagctgctgcttgcgctccgacttcaagcttttgattcgccggcatactcaagctaagcttctcatggcgccggcgtcgaaggtcatgagtcacatcgtccaagacggcggcattgccacctacgccgtttacgccgcgccgtgtgatgcctggtgcagcgggcggcataggaaggccgagacggacggcgacgacgacgatgacgactatgactgcgcgcctgccgcctgaagtgtacgtacgttcgtacctggtcgccggcgaaacgaatctgggacctgcccgccaagagctagtatatatactgcgaactgatcgctgctgctgtgtatgctaatacgatgtcaagtacgtaggtacgtatatgcgtctgtttacagctacttatgaatgtatcccccctagtatatga

SEQ ID NO: 156 - DNA, 413 bp, Triticum aestivum
  Clone ID: uC-tsfl189004b09b1
cgtcgtttcatggcgctcgccgacgtggcggacgacgtgcaccggtgggtgcgtgaggccgcgacggacgagcacttccggggcttgatcgactgggtggaggcgctgcggcccaaaccggccgcggccagggcgtacctgggcggcaccggcggcaccaaggcgacggcgtgcatcgtgtcgtcgggcatgggttttccggtccgggagatcaactttgggacgggcctgccggcgttcgcttcgtaccacttcccgtggcccgccggcgcggcatacgtgatgccgatgccgagtgcgcgcgacgacggggaatgggtggtgtacgtgcatgcagcgccggagctggtgaaggtgatggaggaggagccgactgttttcaaagttctcgagaacagctacgtgttcggatg

SEQ ID NO: 157 - DNA, 475 bp, Triticum aestivum
  Clone ID: uC-tsfl189004b11b1
cccacgtgtctggaggttggatagcttggttgaaaaaagctcagacctgagtgctgcttcacagatgttctataagcaggcgaagaaaacaaacagttgttgtactatactttgaagtttgaagtgtgatcctgcaattatcttggaaggctccaggttaatgctgttttccgacaaagatcctgatactgttatacttgctccttgtaccttcagttacgcctctgctcccgtttctcagaaagaaaatcaaccggatattgttgtgctgtactaagtctggttgcccatgaaagtgtctgtgaggcacgggatcaatactgtaaatctgttattctttggtgacgccttcgaatagcaactaacatcacttagcaatggccaacatcattgtcttccctgcttagattgtcgctatctcatttctcaagtatgttggagcacagctgctgcccttacattatgtactgtatgt

SEQ ID NO: 158 - DNA, 157 bp, Triticum aestivum
  Clone ID: uC-tsfl189004b12b1
tatcccttacttggtcttgtgttgttaaagagagccgcactattttgtatcgatgagtcttgctgttaatgacctatttgtcgtgatactgggaactatgttttgagatgtctggtgatgtaacggatgttttacttagattatgtatctgttgtcc

SEQ ID NO: 159 - DNA, 442 bp, Triticum aestivum
  Clone ID: uC-tsfl189004c01b1
gagttacaatggtctccgaccgcctcagcgccctccgggccttcgacgacaccaaggccggcgtcaagggcctcgtggacgccggcgccaccgccatcccggccattttccaccacccacccgacgccttcgccccgtccactgtcgccaccgacgtcgccgttccaatcgtcgacctctcctgcgagcgctcggccgtggtcggcgcggtgagggccgcggcggagacggtgggcttcttcctgctggcgaaccacggcgtgccggaggcggccatgtcggggatgctggcggcggtgcggcgcttcaacgaggagccggcggaggccaaggcgccgtactacacgcggggcgcggccaggcgcgtgcgctacagctgcaacgcggacctcttccagacgctggtgggcaagtggcgcgacaccgtgtacatggacgacgc

SEQ ID NO: 160 - DNA, 475 bp, Triticum aestivum
  Clone ID: uC-tsfl189004c02b1
catgtattaaaacgatatgtgtagttgtacatataggccacgcttggtttgatgtgggccccacaattatattttcatttcgaacgaaggaaatcgtagaagtaacttgagcctgcataggttctatctgtaactcaccaatccggaattaagtttgttaagaagccacgttgctaagaatactaactagctcactgcctttgaactccttgtatttctgcaggtaggatagaagacactttttccaggtggttccaacagttgggggacagcagattttgtgtggtgctgcgagtgaaataaactactgtacactgtaaaggcaaagacagaagttacaaatgtgttcccttttccatttcattcttttggagggggtgcgtccgtgcgtggccaggtggcgcatgataacttggatagtaaggatatattatctccacaggaagtcctcaatacgatacacatagaaattcat

SEQ ID NO: 161 - DNA, 455 bp, Triticum aestivum
  Clone ID: uC-tsfl189004c03b1
gcccttggattcgggtatgccgcctccaccttgagtgctaccttcatcaatggcgtccttggcccccagaccagaccggaaaatgatacggcgcgcatgtccatctacatcgagaacatccacaagggcatccatgggagcgattcaggcgcgtatgactctcaaggaaggttcgttcccgagaagttcgaggcggcattcgccaagcacgccaagacggtgccggacgccctgacgtccgcggaggtggacgagctgatcaccgcgaatcgggagcccagcgactacgcgggatgggcgggcgcgtcggcggagtggaagttgctgtacagcatcggcaaggacaaggacgggctcctccgcaaggacgccgccaggggcgtctacgacggcagcctcttcgccagggtggtgcaggagcggaggacatctataggagaaacccaggcatgatc

SEQ ID NO: 162 - DNA, 474 bp, Triticum aestivum
  Clone ID: uC-tsfl189004c04b1
ctagagccacagctacagcaatggaagctctcgcctcgtcgccgcgggctctcttcgcccgcaccgcctctccgacgacggcgctggtcacgccagcaagatggacgccgtcatcgagcaggcgtgtcaaggccgccgccgccgccgagccggccggcgaggcgaagccggctgccgcagcggcgccgtcggcacccaagaagatcctcaagaagaagcccgtatactccatgaagaaagggcagatcgtgcgcgtcgagaaagaaaagtatctgaacagcatcaattacctatcagtggggcacccacccttctacaaggggctagactacatatatgaagaccgcggcgaggttttggacatcagaatctttgaagagaccggagagtatgctctgatcgcgtgggtggggattccaaccccgccggcatggctcccaacttatatgctcatcaagtcagacaaactcgact

SEQ ID NO: 163 - DNA, 92 bp, Triticum aestivum
  Clone ID: uC-tsfl189004c06b1
gatcttgttctcgatggttctgaaattatgcgcgcaactcggagatggagtcctgaactagccgcagcttgtgatgtgtggaaggtgatcaa

SEQ ID NO: 164 - DNA, 436 bp, Triticum aestivum
  Clone ID: uC-tsfl189004c09b1
gcgcaatgtctggtacccatgtacgtggcgaccaagatggcctcgatcaggcaggcgtccctgttcgccccgtcgccggagacgtacgcccgcgccgccgtgcgctacattgggtacgagcctcggtgcgcgccctactggccgcacgctctactgtggttcctcttctccgtggtgcccgagcccctcgtcgatgggtacgtcctcggcatgtccctcggtatacgcaaaatgggccgcgccaaggaggccaggaagaaagcggtgtgacacgcgcggtggaagaaagggcacgtacggtcgtaaagatggactcagatgaatgtgttaattctacaatcttcatgaccaattgtaacacgacgaacgactgaatgcagcctcccttgcccttccaaacagttttatctgtattaagacttaattcgtgatattt

SEQ ID NO: 165 - DNA, 432 bp, Triticum aestivum
  Clone ID: uC-tsfl189004c10b1
cccacgtttctggttcgacgtggcggggtacaccgagggcttcccgcgcctcgtctacttcgaggactcgtggacccgggtcagcaacgtcatcttcctcgacgcgcccgtcggcaccggcttctcctacgcgcgcgaggaggagggcctcgacgtcagcctcaccggtaccggcacgcacctccgggtcttcctgcagcggtggatcgcggatcatcctgagttcgcctacaacccgctctacatggggggcgactcctactccgggtacaccgtccccgtggccgcgctcgagatcgccgaccagccggataagggaggcctgaacctcaagggctacctggtgggcaacgccggcaccgacgacaagtacgactccggcggcaagatccccttcatgcacggcatggggctcatcttccacgagctcta

SEQ ID NO: 166 - DNA, 402 bp, Triticum aestivum
  Clone ID: uC-tsfl189004c11b1
cccacgcttccgcccacgcgtccgcccacgcgtccggcgctacatcaagaacctctctgccaagcttgaaggggatgacctagatgttttcaagaagaatgttgagtctgccacaaagtatcttcttagcaagctcaaggaccttcagttctttgttggcgagagcatgcatgatgatggcggcgtggtgttcgcctactacaaggagggagctgctgatccaactttcctgtactttgcacatgggctgaaagaggtcaagtgctaatcgcactgtatgctaaaatctatgcggtcgtcagtatttttgctctgctctatggttgtcagtcgactctccaatgttgtgtcggtaactatcagatgttgagtgtcttgaaaactttctgataattgtgggat

SEQ ID NO: 167 - DNA, 331 bp, Triticum aestivum
  Clone ID: uC-tsfl189004c12b1
ggacctttctgacaagcccatggggctcggcgtgcggtcccgccgctacgtgctcctggcagacgacggcgtcgtcaaggtgctcaacctggaggagggcggcgccttcaccaccagcagcgccgaggagatgctcaaggcgctctgagccgcgcctgctctgctccttgcctgagtcgtgtctagtgctccggagtagtgaataataatccgacgaactgttgctcgtgtgagtgtccttcgatgcgtcgacatcgtggagaggattttgttttgttttgttgagaattgcgtgctgtccatgtgctcgatgaaatgacttgaatttttc

SEQ ID NO: 168 - DNA, 440 bp, Triticum aestivum
  Clone ID: uC-tsfl189004d02b1
gtgtatccgatgacggtggccgccgcacgctgcctcattctcacccccaccgtctcctccacctccttctcctccgccgcgctccggctaccccggatcgcccgccgccgcccgctctcctgctcggcctcgccgctcgccgtgttcgccaccatggactcgccgcccgagggctaccgcaccaacgtcggcatctgcctcgccgacccctccctcaccaagatcttctccgcgtccaggatcgacatccccacggcgtggcagatgcctcagggtgggatagaccaaggggaagagccgcgagcagctgccattagggaactgagggaagaaaccggtgtcagatctgccgagattgtcgccgaggcccccaattggttgacatatgatttccccgcggatgtcaaagacaagctgaatgctaggtggggaaccaactg

SEQ ID NO: 169 - DNA, 244 bp, Triticum aestivum
  Clone ID: uC-tsfl189004d03b1
agtttatacagatgcaataatatggcacacaaaaaagaaggaagtagcagctatttacaagagcctcgcagtgtgcaatatagctacgagatcctattgtctgttggaatttcactttagaacggttggttttattcttcaaacagttagcctagaagaagatacacttgtaaggcacatacataaatacaagttcaatatgtggtctgatcaaatacatatagcctacctgatactttcgatc

SEQ ID NO: 170 - DNA, 439 bp, Triticum aestivum
  Clone ID: uC-tsfl189004d05b1
cccacgcttccgggagctcatcaaggtagctgattttgggcttgctcgtgagattatttctgaaccaccatacacagaatatgtgtcaactcgctggtatcgtgccccagaggttctacttcaagcttctgtttacagctcagcagttgacatgtgggctatgggtgccattattgcagagctttttttcgcaccgacctcttttcccaggctcaaggtacacatgatcctttttctgctgagcctcatttggttcccctattctcttggttgttgtgcccaatttaattgaagatttttaagttggtcctaatagtttgctgggagctaaatattaggcaaagatgctgttgattatatatgaaataaccatcatcggccactttaataagtgaacccattttttgtatagtctagaaagcaccccataatgtgaaaa

SEQ ID NO: 171 - DNA, 440 bp, Triticum aestivum
  Clone ID: uC-tsfl189004d06b1
gaagaagttctgttttattctgatgaagcgcgcgccaaacggcgcgaggaattcaatcgcactgaagcaagttttgagcagagcatgaaggatatacagaaagatttggattttttgaaagaacttcacagtcgtgaatggcctgatcctgaagaaaatttccgcaaggagcttcgcaaatttgagaagaaatgtgatattgctcttcttgtactcgtgcctacaactgctgtgctctttatgagtataccatattacctttagcgggttataagaaacacactatcttagttttagctatcctggttgtagtgatcgaggctttaggcattattaagtacgtagctatgtattatcctggtttgactcgtgtaatctgaatgcacctacttacactaaacagtggatgctactcgtcgaattcccatggctgtatactc

SEQ ID NO: 172 - DNA, 433 bp, Triticum aestivum
  Clone ID: uC-tsfl189004d08b1
cacgcactttcactctcctgccgcggtgcgccgtacgtgctctctagccaagatgtcgtcggtcagtgcccgcgctcccgtggccgctctccggccggcggcgtcagcgtcgagcccccggttcctgggcgactccggccgcgtcggcctcgccaagtccacgcgccgcgacgtcgccgtccaggccaaggggtcgtggctccccggcctcccctcccctgcctacctcgacggcagcttggcgggtgacaatgggttcgacccgctggcgctggcggaggacccggaggacctgcggtggttcgtgcaggcggagctggtgaacgggcggtgggcgatgctgggggtggcggggatgctgatcccggaggtgctgaccaaggcggtgctgctgaacgcgcccgagtggtacgacgccggcaaggagacctac

SEQ ID NO: 173 - DNA, 134 bp, Triticum aestivum
  Clone ID: uC-tsfl189004d09b1
cccacgttttcgaaaaaaaaaaaaaaaaaaaaaaaaaaaaaaaaaaaaaaaaaaaaaaaaaaaaaaaaaaaaaaaaaaaaaaaaaaaaaaaaaaaaaaaaaaaaaaaaaagggggggccgttttaaaggatcca

SEQ ID NO: 174 - DNA, 97 bp, Triticum aestivum
  Clone ID: uC-tsfl189004d10b1
gtcagttccttgctgtactccagtctagccgagatgtgtacgtgtgatgtgcctgacctacttgttcaggcaattaatgaatagtaattattttcct

SEQ ID NO: 175 - DNA, 320 bp, Triticum aestivum
  Clone ID: uC-tsfl189004d11b1
gtgtactctttgttcgtgttcgaggactacatgaacctgtacttgctccacaagttcgaggccaaggagccgcgcttccaggccatgaaggcggacgccgcgcccatcgccaccgcgtgattagggacgtggtcgtacgtgccagagtccccgaacaagagtattttgggacgtattgaagtggtgtatcgtagataatttgtgtatgcgtgtgtaatgttttcgctggtggcttcgcagtgcgccagtgcatgccgtgatgcttgttttaccgtacgtgtgagtcaacttctttttatagtatgtgtgttaagtaatgt

SEQ ID NO: 176 - DNA, 85 bp, Triticum aestivum
  Clone ID: uC-tsfl189004d12b1
atttagtttacttcatggattgatcacttacctttatgtagctaacacaaatatatgtatgtgccagctcagagccacttgatcc

SEQ ID NO: 177 - DNA, 438 bp, Triticum aestivum
  Clone ID: uC-tsfl189004e01b1
ggttttccggccccgaacccgtcggctgtcggcggattgctcgagctgctcacgcggcgagagcgggtcgccgcgtgccggccgggggacggaccgggaatcgcccctttgggggctttccccgagcatgaaacagtcgactcagaactggtggaccatacagtacggatgatgcaataattgaagatatgaagaaggattacatggtcgcgcaagagatcaaggagaataacaaataagctttatgcaatggataatttgcaaggcaaggttctccatgcttgtatgtacgttgctgcttttggaatttggcagttgcttactggtcatgtttggtgattgatgctgaattcctagatacattttgtaaacatttggatttgtccaggcgcatgcctgtatgtactagatgtgtacttgttttcacttatctgcaga

SEQ ID NO: 178 - DNA, 451 bp, Triticum aestivum
  Clone ID: uC-tsfl189004e02b1
ccctttcgtccgcccacgcgtccggccacacttcttctcgaaacatccatccagcaccgtcgccggcgacctcacccgccgccgccgccgaagatgccggtgagggtggtcgacaccgccaccccttcctcgcagacctcctcaggacaagatgcaaatgctgtgcagccgtctcctcctagctgttcactcttaactgctggaagatgttttgcaggaactcagaatgtttcaagtttacaaaaagatgaggcatggaaagtcaatgttcgtatccatggttgtgatattgaacagggttatttatgtggaacgatggaggcacttaatgttcccttagccgacacacctgtggttacattctgggagggggagatagtagatgctaaaaattatactttttttactggcaagtgggaggcatcagcagaggatgatgtaagacactggt

SEQ ID NO: 179 - DNA, 391 bp, Triticum aestivum
  Clone ID: uC-tsfl189004e04b1
cccactcgttcgcccacgcgtccgagaaccaggacacgcccacggtatacgcacgtacagctcgatcgcaatggcgtcgctcgtcgccgtccagccggtcgccgtgcggggcctggccggcagctccatctccggccgcaagctcgtcgtccggcccgcctccgccgccgtctcccgctccacccgcagggctcgcggggcggcggtggtggccaagtacggggagaagagcgtctacttcgacctggacgacatcgccaacacgacggggcagtgggacctgtacggcagcgacgcggcgtcgccctacaacggcctgcagagcaagttcttcaacaccttcgccgcgcccttcaccaagcgagggctgctgctcaaggtcctgctgctc

SEQ ID NO: 180 - DNA, 314 bp, Triticum aestivum
  Clone ID: uC-tsfl189004e05b1
cggtctctttgggtgtcggacgatgactccgacgactccgacagcccgccagggcccgccagctcgccagactcagactcgccagctgactcgcctgaccccgccgcagacgacgaggagagcggcagcgtcggcgtgaggagtggcgtggtggcttccgtcgtggccgtggccacctcagcctccgtcgtgcttttattttagaacatcgtagcgatgtcaaatgtactacttaggttgtagacataaacttttttggcaatctgtactcagttttgggtgaaatttcaggcgcgggtgagtaattatgtggc

SEQ ID NO: 181 - DNA, 312 bp, Triticum aestivum
  Clone ID: uC-tsfl189004e06b1
ttctttttctttcagtgatttgaaggtcactggaattcatcctctgaaggaaggcaaccctccaaagtattcacagagggtccgtttggttgctgcgaactatcaaatagtctaaagccataattaaagcagttactgctgtttcttgttagtggcacaaggagtataattttgcatcaaatttgtttaaatatgtgtgatttggcctgtcccatacctagcgtgtcgcaccattgagaaataaaagcatgaattctcctgtaccctgtttgtagtattccttgtgagattgttgtttctgtttcgtacatg

SEQ ID NO: 182 - DNA, 387 bp, Triticum aestivum
  Clone ID: uC-tsfl189004e09b1
tcggttattttattactatttcttaatgacacagtgaggccacgtacagacgaacagacggtccttatgaaggttttttttttaagaaatagtaataaaataaccttgataatgaccagcgagggcacgtacagacgaacagacggcccttacactgaacaacacaacggatgggtgcagcacacgcactgcatgtgcacatccaaattacatacacaaacaaaagtcgcgatacttaatcaaacgcagcagcatacgcgcgcgcgcgcgcatgcaggagctccgggcggccgggcgatgcgatcgatcctgcccgcccaccgcaggagccatgcacgcgtgcatgtaagcacggggtaaccggaggatattatttaattagtactc

SEQ ID NO: 183 - DNA, 252 bp, Triticum aestivum
  Clone ID: uC-tsfl189004e10b1
gttgtgttgcaatttccccatcttttgtgctgaaccttagttcgtggatggcagctttgccccattaggcatttagactaggtgagttagttgtcttttttttattttctcccttttatgcaaccttggatattttgtgacgaaggtgttcagcgaacctcatgtttcgatgcacgaacccaatgtctacccccaggaaattcaatttgtatgaggtagcgaatcatgaatcaggcaactatgctcataatc

SEQ ID NO: 184 - DNA, 125 bp, Triticum aestivum
  Clone ID: uC-tsfl189004e11b1
gtggctcatgtagggaatatgtctctgtaaatacggtatactgctgcttgtaaatatctgaacttggaagcacaaggtgcactggctatgagcaccaaggaggaaggaaataatcagaatggatt

SEQ ID NO: 185 - DNA, 472 bp, Triticum aestivum
  Clone ID: uC-tsfl189004f02b1
aaattattgaaaggggatatcaccatgttgagttcaattctaaatgttattgcatctacaatgaggttgtctatgaaaaggaagatataccaaccgcattttaccttgtccctccatggcatatttaagttgtgccaagctattgatggcaattcaagaagtatcgaacttaagccatcaatggagcttggtactgatgtcgtccttatgaacggtcctctgccaattttttctgaaatggataagtcaagaactgtgatggttgtttcctgggtaacttccaatatcttctggttgtgtaaacaaaagtctgcagcggaaatgtcatgtgaagagccactaaacaatgagtgtctactatcaaagatattgcgttggttagtggcttctgtaatccttggcagaatctcccgcatctctcctgaaaagaggggaggtcttgccacgagcacaaatagtcccggaactcttc

SEQ ID NO: 186 - DNA, 442 bp, Triticum aestivum
  Clone ID: uC-tsfl189004f03b1
gttcgtccgacgacatggcggccggagcagctggaggagggagtgacgagctcaagctgctgggggtctgggtgagcccgttcgtgcaccgggtgcaggtcgcgctgcacctcaaggggctcaccggctacgagtacgccgaggaggacctcaccaacaagagcgacctcctcctcgcctccaaccccgtccacaccaaggtccccgtgctcctccacgccggcaagcccgtctgcgagtccatgctcatcgtgcagtacctcgacgaggccttccccggctccggccccgccctcctccccgccgacccccacgaccgcgccgtcgctcgcttctgggccgcctacgccgacgaccagttctttgcctcgtggatcaaggcgttcgtggggacgacggacgaggagagggcggcggcgacggaagccgcggtggcagcgct

SEQ ID NO: 187 - DNA, 391 bp, Triticum aestivum
  Clone ID: uC-tsfl189004f05b1
ctctttttctggatgatcgccggcatcggcgtcttcaacttcgtctacttcatgatctgcgccaggtggtacaggttcaaggggaccagggatgcttgatgcaatttggatgatcaaaagaagggggtagaataaggtcaggtgattaattcacgtgtcttataccacagtagctatttcccttttgcgttcttataattttttggttctgctgttatgaaatcgatcaatcaatctatagatgaagtgggcggggaaagagaggaagaaatgtactgtagacaacagtggggtggttaattccttgtaagttgttaaaaatgaaagaaacaacaatggggtggttgatttcttgtaagttgttcaaatgaaagataaacgatttcactgt

SEQ ID NO: 188 - DNA, 425 bp, Triticum aestivum
  Clone ID: uC-tsfl189004f06b1
cagtggttggcctcccgacccctatcttctcccccactaatccccccattcccctcgccgccgccgccgccgccggcgtcgcctgcccaagatgaatgtcgacaagctgaagaagatggccggtgccgtgcgcaccgggggcaagggcagcgtgcgcaggaagaagaaggccgttcacaagaccacgaccaccgatgacaagaggctccaaagcaccttgaaaagagtaggagtcaacaccattcctggtattgaagaggtcaacattttcaaggatgatgtagtcatccaatttcagaacccgaaagtgcaagcatctattgctgcaaacacatgggttgtcagtggaacaccacagacgaaaaagctgcaagatttactgccgacaattatcaaccaactgggccctgataacttggacaacc

SEQ ID NO: 189 - DNA, 348 bp, Triticum aestivum
  Clone ID: uC-tsfl189004f07b1
catatacttgagagagcgcacgcgagatggcagcctccatgatcacctcgccgattgtggcgccgacgagcgtgccgtccctctcccgccggggctcctccttcgccgtcgtctgcagcggtggcaagaagatcaaggtcgataagcccctcggactcggaggcggcttgacagtcgacatcgacaccaacggcaggaaggtcggcatgaagggcgtgtaccagtttgttgacaagtacggtgccaacgtcgacggctacagcccaatctacacgccagaggaatggtctgagtctggtgaccgctacgccggcggaacgaccgggcttattatatgggccgtcaccc

SEQ ID NO: 190 - DNA, 334 bp, Triticum aestivum
  Clone ID: uC-tsfl189004f09b1
gcttcgtctgcgattgcacctggaccggcccctggagagcccgtaatggacagcggcaccgcagtagtggcctcgtcacatgggcgcgccttgatgttggtggtttctagcacaacacttgcattgatggggacgattcgggcctgaatgcgtgtgtgagacacaatgcggcgtggcattgtaggtcgtctagttcagattctttagcatggttaatttcttagttgcagatcgagccgtacggtatgatagttagagaatgtgtgcagtttgagtttcttattggtgaacacaataaatatttttcaagacaattattgcttgctccagagta

SEQ ID NO: 191 - DNA, 471 bp, Triticum aestivum
  Clone ID: uC-tsfl189004f11b1
cggacgcgtgggccgatgaccagtcgtgtggtgacgctgtggtaccggccaccagagctgctgttgggtgctacggattatggagtaggtgtcgacttgtggagtgccggatgtatccttgccgagttgctggctgggaagcctattatgccgggacggaccgaggtagaacaattgcataaaatatttaagctatgcggatcccccgctgaagaatattggaaaaagtcaaagctgcctcatgcaaccatatttaagccccagcagccgtacaaaaggcgaatagcagagacattcaaagatttcccgcaatcagcacttcggctgattgaaacactcctatcaattgatcccgccgatcgtttaacagcaactgatgcattaaatagtgatttctttaaaacggaacctcgtgcttgcgatccatcaagtctgccacaatacccaccaagcaaagagatggatgcaaaa

SEQ ID NO: 192 - DNA, 368 bp, Triticum aestivum
  Clone ID: uC-tsfl189004f12b1
ctctcgcctccgattactgcaaagctgcgacggacgccgggaacctcgacgcatgctaccttcttggcatgatccgggtctactgcctggggagccgggggtcgggagcggcgctcatggcggcggcggcggtcggtggccaccgggaggcgctctactcgctggccgtcatccaattcaacggcagtggtggcagtaaggacgaccgcgacctccgagcgggcgctgcgctgtgcgcgcgcgcggtgtcgctcggacacgtagacgccctccgcgagctcggccactgccttcaggacggctacggcgtgcgccgctccttgctcgacgggcgccgtctcctcatccaggcgaacgcgcgggagctc

SEQ ID NO: 193 - DNA, 408 bp, Triticum aestivum
  Clone ID: uC-tsfl189004g01b1
ccctcgcgtccgcccacgcgtccgggaagatgttttgatacagtgttgtaagagtctgtccctgcttccttgtgacactattatattcttgtctttatgttattccgctgcagtactactctatcactagatgcaaaaattagctggatgtatggaatttggggaggcagcccaaacacaagacatttatctttagctgtgctattctccataagatgcggtgtcttttgcatttaacttgtgattgcccttttggttgtcgaatgcagctgaaccttactatctatgcaattatgtcaaacattacagtttacagcttctctgtatgccttcctgttgtttgtactttgttctggagcgttttattgtaccagcctgcaagctaaagtgaaaggagtaacacttggt

SEQ ID NO: 194 - DNA, 467 bp, Triticum aestivum
  Clone ID: uC-tsfl189004g02b1
tggttgaatgctgcttcttctcttgtcaggtggctgtccgagatggaaacaaagggttcctctggtggtttgaaggcacaagaacaggaaataaagttccataatccgaagtttgtttctctgctaaaccatttacggttctacatccctcaaatactccccaatctggagaaggtggtttttcttgatgatgatgttgtggtgcaaaaggacttgacacagcttttttccatagaattgcatggcaatgttataggagcagtggagacttgtttagagtcatttcatcggtatcacaaatatcttaatttctcgcaaccaataatcagctcaaagattgatccacatacttgtgggtgggcttttggaatgaacatatttgacctaattgcttggaggaaagcaaatgcaacatcgctctatcattattggcaggagcaaaatgctgatcaactgctttggagaac

SEQ ID NO: 195 - DNA, 489 bp, Triticum aestivum
  Clone ID: uC-tsfl189004g03b1
cccacgcgtccgcttttcgggatcacagactatcagatcgatattgctatgcgggagaatgccaaaattctatacgcgttagagctcaagtctattggaagaggtcttgacataggcacgctcattgaagtgaggagagtacaacttgcatataaactttttgatgaggttgctgctgacatgttcaaggagcatgccaagaagttggttcaagaaaacatttcatctgctttatccatattgaagtccaataccagtgcagggaacattcccacagaggtcattagtgaggtgaatagtatccttgcattcaataagttgctaacagttctaagcaagtttcctcaaggcgaccgatttgcacgtgggctaggacctatctcgttagctggagattttgatcatgataaaatggttggtgatctaaagatactctatgcggcctatacaacagaagtactttcagatggacgtcttgatgatgagaag

SEQ ID NO: 196 - DNA, 189 bp, Triticum aestivum
  Clone ID: uC-tsfl189004g04b1
cggtcgcgtgggggatagtgaaggtggacgtggtgttcttggctcatgggagcccgagaaaacctactatgtctcaacctaccgttacttacacgatcgggatgtatgtagtaaaaacgcgccaaatattttcccagggacatacgtggttgatatacaattgatattacagacgtttatttaaagttg

SEQ ID NO: 197 - DNA, 334 bp, Triticum aestivum
  Clone ID: uC-tsfl189004g05b1
ctcctagttccaggcctggccccgtgtcgccgggccgccggtcatcatgaaccccatcagccgccagaacttcatggtcaagaacccctgaatgggcgccgcggcggcgcaagctcgaccagggttatgctcccaccatgcagacaaagattcctttgtagggttttgaactagttcctaataaaagggactttaaagggcgggtatactattttgttttacgaatttcagtttccgggagcaactttggggggctttaccgatcgctcgctcgcctttcgatgaactatgttcctcggtgaaatttcccacgaggcaggaaaataactgcatt

SEQ ID NO: 198 - DNA, 426 bp, Triticum aestivum
  Clone ID: uC-tsfl189004g08b1
ccctttcgtccggatgatccgagcggtgcaggtcgtcaccagggttgagagccgccgggctgcgcgggcgtcggtggccggctacgccagccgctgcggctactccacggcctcgagctcccagaggttggctggaaaggtggccgtgattaccggcggggccagcggcatcggcaaggcgacggcggaggagttcgtcaggaacggcgccaaggtcgtcctcgccgacgtccaggacgacctgggccgcgccgtggcggccgagctcgggccggacgcggcatgctacacgcactgcgacgtgaccgaggaggcgcaggtcgccgcggcggtggacctcgccgtggcccgccacggcaagctggacatcatgctcaacaacgccggcatcgtgggctccctggcgcgtccccggctgagcgatct

SEQ ID NO: 199 - DNA, 392 bp, Triticum aestivum
  Clone ID: uC-tsfl189004g09b1
cactcttctgcatagctcccagcccagcttattccctcttccacgcttccattccatcaccacactgaccacgcgccaccacgagcaacacccatggcgcgcaccggcgccgccgctgccctcttcgtgctcgtctgctgcctcctcgtcggctctgtcccggcgcgcctccccgtcgagcttccgacgcaggtggtacccgaagccgttgacctcctggccaccgccgagccgcttctggccaagcagttggcggctgccgaggcggccaacccgaccaaagtccactccatgataacagaggaggaggagaatggtggttcacccggcccgccagcgcccccagatcatccggtgcggcggcggagacgacgtggcggtctccgacgagt

SEQ ID NO: 200 - DNA, 473 bp, Triticum aestivum
  Clone ID: uC-tsfl189004g10b1
ctttgcatgtggatatggtgagttcaagtgtgcggaaatcctccttgaggcgggtgctgctgtagatgccatggataagaacaagaacaccccactgcattacgctgctggctatggccggaaagagtgtgtggatcttctgttgaagcacggtgctgctgtcactctccaaaacatggatgggaagacgcccatcgacgtcgccaagctcaacaaccaggacgaggtcctcaagctgctcgagaaggacgtgttcctgtaaatcacttcacttggcccccatgaagagacatcatgttttacatcccttggcattggttttatatagtcatacacgaatcggcattttattcgttgtgtaagaatctactgttagctagcctgcaggccgactggctgaggttagaactgcatgttactgtatatggagacctgtgtatcgtccactttgtttctggtgattccactagagt

SEQ ID NO: 201 - DNA, 135 bp, Triticum aestivum
  Clone ID: uC-tsfl189004g12b1
gcatcttaccccattgacactgtccgcagaaggatgatgatgacctacggagaggccgttaagtacaagagctacttggatgctttccagcagatcctgaagaaggagggtgccaagtccctcttcaagggggct

SEQ ID NO: 202 - DNA, 412 bp, Triticum aestivum
  Clone ID: uC-tsfl189004h02b1
cccacgcgtccgcccaaatcccccacccgaaccctcggaatccctctctcgccgccgctgacccctccgccgatctccccgccgccgacgagatgtctcgccgctacgacagccgcaccacgatcttctcgccggagggccggctgtaccaggtggagtacgcgatggaggcgatcgggatcatgtccgacgccaacatcctcatcaacaccgcccgcctccacgcccagcgctacgcgctctcctaccaggagcccatccccgtcgagcagctcgtccagtccctctgcgacaccaagcagggctacacccagttcgggggcctccgccccttcggcgtctccttcctcttcgcggggtgggacaagaaccacggcttccagctctacatgagcgacccctcgggcaacta

SEQ ID NO: 203 - DNA, 425 bp, Triticum aestivum
  Clone ID: uC-tsfl189004h04b1
ccctctcgtccgagctctcgaggccgacaaggagttcataaagcagtgcgtgtggtccttgaacaaaggaggcaagggttttgttcttcttcaggagatcttgcagcatcttcgggacctcagaaggatcgagcagcgtgcacggaacaactctggagaagtctcgccccactacgtgcatccttacacggattgaagataagcgccgccgagccccgcgatcgtgctcgtcagcgccaccgcatcattcaagatgaagacaccaacactctgaaaaaggaaagtttgcgcaccaccaacagcaacaacaacagcgagtgaagagagaggagtttgccgactagctagcggcatagtcaggccagaagctgggaagctgggctctgtcatcccgggaggagaaggagctcccccttgggtaggtc

SEQ ID NO: 204 - DNA, 470 bp, Triticum aestivum
  Clone ID: uC-tsfl189004h06b1
ccctttcgtccggtacaatcacagatgacatgcggatccaagaggtcccagcaatgaaggttaccgctctgaggttcacagagacagcgagggcaaggattgtcaatgctggtggggagtgcctcacttttgaccagcttgcactccgtgctccaactggggagaacactatcctgttgaggggacccaagaatgcccgtgaggcggtgaggcacttcggcaaagcacctggtgtgccgcacagccataccaagccctatgtgcgctccaagggtaggaagtttgagaaggctcgtggtaggaggaacagccgtggcttcaaggtttaagtcgccctttcttgttagtcgctgtttgcgtggagcggctgttgttctgtttgagcaattgacagtaattagtaaagtactttgtactgagagtagcaaaatctatcgccccagtgtttgaatgatattttgcaggattct

SEQ ID NO: 205 - DNA, 103 bp, Triticum aestivum
  Clone ID: uC-tsfl189004h07b1
aattttattaaaaaaaaaaaaaaataaaaaaaaaaaaaaaaaaaaaaaaaaaaaaaaaaaaaaaaaaaaaaaaaataaaaaaaaaaaaaaaaaaaggggcggc

SEQ ID NO: 206 - DNA, 422 bp, Triticum aestivum
  Clone ID: uC-tsfl189004h08b1
caccttcctcccctcgccaccacccaccaaggaaaggaggatgtcttgctgcggcggcaactgcggatgcggcgccggctgcaagtgcggcaacggctgcggcgggtgcaagatgttccccgacgttgaggccaccgccggcgccgccgtcatggtcatgcccaccgcctcccacaaggggagctccggcgggttcgagacggccggcggggagaccggcggctgcgactgcaccacctgcaagtgcggcacggcctgcggctgctcctgctgcagctgcaactgagccggcgcccaggaggccggccggcgaggcgagcacgaggatgaggaggacaactggacaagcaaccaccaccaccaccaccaccatcactagccgctgcatgcgcccgcccgcgcgcgcgctgaataaaataaaa

SEQ ID NO: 207 - DNA, 485 bp, Triticum aestivum
  Clone ID: uC-tsfl189004h09b1
cgttctcgtgggctgagattgcaaggttgagggagctcaacacactcaagggccacgttgaatccgtggtgaagctcaagggccttgacatcgacaccatcaaccagaactacaccgtgtgaggagtatcgacattggaccaacaaacatgacatccgtattggagcgagattggaatggagctccgctttaagatttttccggtgaatgaatgaaacaaacatggctgatctgaccagcccctagttgtaaagtgctaccaaatatatggtttcggttgtccgtcttctagagaggttttaatgttctagtggagttataccgtgtttggagcacggcgtggttgtaattgttttcgcgttttacccagtttcccctaactagtcggtgatcttgcggaagcaagacgagaaataatcactgcaaattttctgccccatgcttgctatcccttcccttgggtttatacaaagacaattctcgtc

SEQ ID NO: 208 - DNA, 415 bp, Triticum aestivum
  Clone ID: uC-tsfl189004h10b1
cgctctttgcccggttcggcgtcggcgtgcgcgccgcgcgggtggtgacgcggatggaggagtcgtggaccatcgacgacgtggcgttcgacgtgccggggctgggccccgacgccttcatcccgccggaggaggtccggcggagccgcttttacgacgccatggccgccggcggcggcaagtgaacgtactactcgatcgtacgcaggagtgtaacacgtagtagtccagtagcattttgtttagtttcgtcggtgtgtcgattattgtttgtgattgtggcaccaagaaaatgcaagcgcgtgtacatacatatgtgtaccctgggtttttacctaaaaagaaagaaaaactcacagtttctaagtagctgcctgtaaaaactgaaaccttcttgagatgaactccttgattt

SEQ ID NO: 209 - DNA, 442 bp, Triticum aestivum
  Clone ID: uC-tsfl189004h11b1
ccctttcgtccggcctcctcctagcaagctatatacctacatagcacagccatggcccccaccgtgatggcctcgtcggccacctccgtcgctcctttccaggggctcaagtccaccgccggcctccccgtcagccgccgctccaacgggcgctagcctcggcagcgtcagcaacggtggaaggatcaggtgcatgcaggtgtggcccatcgagggcatcaagaagttcgagaccctgtcctacctgccaccgctcagcacggaggccctcctcaagcaggtcgactacctgatccgctccaaatgggtgccttgcctcgagttcagcaaggttgggttcatcttccgtgagcacaacgcatcccctgggtactacgatggccggtactggacaatgtggaagctgcctatgttcgggtgcaccgacgccacacaggtgatc

SEQ ID NO: 210 - DNA, 439 bp, Triticum aestivum
  Clone ID: uC-tsfl189004h12b1
gctcattcctgccagtgaattgtcccagcatatcagtaccgctggaatggaagctagtggaaccagcaacatgaagtttgcaatgaatggttgtattcttattggaactttggatggtgcgaatgtggagatcagagaagaggttggagaggagaactttttcctctttggtgcacatgcacctgaaatcgctggtttgaggcaagagagggctgaaggaaagtttgtgcctgacccgagatttgaagaggttaaggaatacgtccgcagtggcgtctttgggactagcaactatgatgaattgatgggttctttggaaggaaatgaaggttatggacgtgcagattattttcttgttggcaaggattttcccagttacattgaatgccagcaaaaagttgatgaagcataccgagatcagaagctatggacaagaatg

SEQ ID NO: 211 - DNA, 411 bp, Triticum aestivum
  Clone ID: uC-tsfl189005a04b1
cccacgcgtccggcctaaccacataaaatttcggccgatccaccacaccctgcaatggcgtccgcgctcaccaacgtgagcctgtctaccttcgcgcccacggccaggggcgacgtcctggcgaggccgcaggtggcccccgcccgcgtcaccttcccgacggcgtaccgcggcagcggcgccctctcctgcagggcgggcgggccggccacgccgccgggcatctccgacaagatgtcggacagcatcaaggaggcccaggagacgtgctcggaggacgccgccagcggggagtgcgccgcggcgtgggacgaggtggaggagctcatcgccgcggccagccacgcccgggacaagctcaaggactcggacccgctcgagaactactgcaaggagaaccccgagaccgac

SEQ ID NO: 212 - DNA, 291 bp, Triticum aestivum
  Clone ID: uC-tsfl189005a05b1
ctgcagctgctcacctgcaacagcggcaaggtcagcacgctcgccacctacaacgtcgtcaagaaggactacagcttcgacgtggagaaggacggcgagaccgcggagctcgacaccaaggtgaactccgcgtcggtcacctacaccatgaaggacgacgacccgctcgccgtctacgccatctccaagttgctgcagaccaaggtgctgttcaagatcgccaaggacatggcccccgcgccggcgcctgagggccccaagaagtagaagaccaccaagaagaagccctcc

SEQ ID NO: 213 - DNA, 138 bp, Triticum aestivum
  Clone ID: uC-tsfl189005a06b1
cccacgcgtcctaaaaaaaaaaaaaaaaaaaaaaaaaaaaaaaaaaaaaaaaaaaaaaaaaaaaaaaaaaaaaaaaaaaaaaaaaaaaaaaaaaaaaaaaaaaaaaaaaaaaaaaaaaagggggggccgttttaaagg

SEQ ID NO: 214 - DNA, 468 bp, Triticum aestivum
  Clone ID: uC-tsfl189005a08b1
caaactatgattgtcccctgccagaaggaacttggcagaaatggcgaagacagtgaactcccggagcaatcagaccttttggtaaaagagtgaaagggtagcaatcctgcatgagaagatccctggtatttttgcccgcaaacatcttcatgagtgccagcgaagttattcactgtttgccatgaaggacacagttacgcaggggggacaatcctttgatatgtatcgctcatgttatctgtagctttctaatggattaggtagagcgtggttggcatctacatcaaaacttgtcttttgttcacctcaagttctagttggatttcacaccctgttttatacatagataaataccatttggttcaaaatgcaacttctgcaagtatgcctttctaatttttgttttccacttgatgttgacatacgtggatctgggttacccttaccttatgatactatatcatttct

SEQ ID NO: 215 - DNA, 349 bp, Triticum aestivum
  Clone ID: uC-tsfl189005b01b1
ggcggttcggctgctgcagaagggtcacttgccaactagtcggtattgtatttgaggagaaaactcccgaggagcttcagaaccatgctaccgttaagccctcagtggtggaactactactggaaatatccaaatactgtgatttttatttgatggaaactgtacttgatgataagagtgaggagaatgctcttatggccctggagaaagccgggcttttcaataccggtggcttgatgaaagaaaaggtactcttttgcagcagtgaagtaggccgaacttcgtttgttcgacagttggagtcagatttccacatcgacgcaagccttgagataatttcccaactatc

SEQ ID NO: 216 - DNA, 82 bp, Triticum aestivum
  Clone ID: uC-tsfl189005b03b1
cccacgcgtccgacctgtactgtgctactctgtgacctgcattgtctccatttttctgcgatctaatcaatgggctcaccta

SEQ ID NO: 217 - DNA, 398 bp, Triticum aestivum
  Clone ID: uC-tsfl189005b05b1
ctgagaggcacccagcagcaacagccggctaggccaccgtactacggactccggagcagcagacatggcatccacgatcatggccgccgcctcccgcgccgttgtcgccaagacgccgttcctcagcggccagggccgcgccgccagcgccagccccctgcgcgacatcgccgccgcggccaacggcagaatcaccatgggcaacgacttgtggtacggcccggaccgcgtcaagtacctgggccccttctccgcgcagacgccgtcctacctgaacggcgagttccccggcgactacggctgggacaccgccgggctttctgccgacccggaggcgttcgctaggaacagggcgctggaggtgatccacgggcggtgggcgatgctcggcgctcttg

SEQ ID NO: 218 - DNA, 81 bp, Triticum aestivum
  Clone ID: uC-tsfl189005b06b1
attagtttatatgctatatgaaactgacatccttcttggataaacatttacttacacgcaaaaaaaaaaaaataaaccaag

SEQ ID NO: 219 - DNA, 412 bp, Triticum aestivum
  Clone ID: uC-tsfl189005b07b1
cgcaaactagcaagcatgaaagcaggctacacacaaaaaactgcttcacctttcgctgacatgctggcttttcgcaaggtcaaggcaaggctcggtggccgtcttcgcctactaatctccggtggtgcacccttaagtactgaaattgaagagttcatgagagtgaccagctgtgcatactttatccaaggctatggtttaacagaaacattgggacctagcacagtcggttaccctgatgatatgtccctggttggaactgccggtgttgccgccaccttcactgaactgcgactggaagaagtacctgagatgggttatgatccacttggtgttccttctcgtggtgaaattctcattagagggtctactgtcttcactgggtactacaaaaatcctgagctcacaaatg

SEQ ID NO: 220 - DNA, 110 bp, Triticum aestivum
  Clone ID: uC-tsfl189005b08b1
cccacgctactttaaaaaaaaaaaaaaaaaaaaaaaaaaaaaaaaaaaaaaaaaaaaaaacaaaaaaacaaaacagacaaaaacaaaaaaaaaaaaaaaaaaaaataaag

SEQ ID NO: 221 - DNA, 441 bp, Triticum aestivum
  Clone ID: uC-tsfl189005b09b1
gatgacttcatgtggttcaagggagacactctcctccggggctactggaaatagttcacctatcagtactgggctgaaggcaggaaatgcgtctgatggttctggttcatcaatctgcattggattctcatcccagggtcatgaggcttctgaccttggattggaagctgggcactgcaaggtatttatggaatcggaggatgttggtcgcaccatcgacttgtctgtctttgggtcatacgacgagttgtatggccgtctggctgacatgtttgggatcgagaaggaagaaatcataagccatcttcgttaccgtgacacagctggtgccgtcatgcacactgggggattaccattcagcgacttcatgaaagtggcacggaggctgacgataataagtggcgaaaagggagggctggcgaaacctctcatcgaatgcat

SEQ ID NO: 222 - DNA, 148 bp, Triticum aestivum
  Clone ID: uC-tsfl189005c01b1
cggatatttcggctctcgcatcgatgaagaacgtagcgaaatgcgatacctggtgtgaattgcagaatcccgcgaaccatcgagtctttgaacgcaagttgcgcccgaggccactcggccgagggcacgcctgcctgggcgtcacgcc

SEQ ID NO: 223 - DNA, 415 bp, Triticum aestivum
  Clone ID: uC-tsfl189005c02b1
gctcgttccatggaagctagtcaggctaaatacatctccatacttaacatcattcaaggagaggtggacccaacacaggtccatgagagcctacaaaggatacgtgaaaggaagcttgttaacttcgtagagtggggacctgcaagcattcaggttgcattgtcaagaaaatcaccatatgttcaaaccacccacagggttagtggtttgatgttagcaaatcatactagcatccgtcacttattcagcaaatgtctggggcagtatgaaaagctgaggaaaaagcaagcctttcttgacaactacaggaagttcccgatgtttgcggacaatgatctctctgaatttgatgaatctcgagaaattatagagggtctggttgatgaatacaaggcttgcgaatcacctgactaca

SEQ ID NO: 224 - DNA, 78 bp, Triticum aestivum
  Clone ID: uC-tsfl189005c03b1
caaatttatttgaaatttctctgcaactaacatctaccaggtcatcaaatttacagctactgtagcttttgtgaaaaa

SEQ ID NO: 225 - DNA, 271 bp, Triticum aestivum
  Clone ID: uC-tsfl189005c04b1
cccacgcttccgcggaaatgtcaagaccgaatcaggaagctctaccaagttgcctgacccaccagccatctaccagaagccatgattgtaagcattcggaccgtgcggcttcttgcatgtgtttttggcagtaaaaagacgaagtgacgagtggtagtctcgagtgtctgacccatgtatacatgtagcatggattattaagctgtaatatgtatagtcgattaaatgagccgcgaggcagaattttcttggctaaaaaaaaaaaaactaa

SEQ ID NO: 226 - DNA, 328 bp, Triticum aestivum
  Clone ID: uC-tsfl189005c05b1
cagctgttgctgctcctgctgcagctgctagatccatcatcgatcatgcatgcaccgtgccgtgcgtgcatcatcgatcgtatcgatctactactaccataccatgtaaccgcaacctgatcgagggcctttatgtacgcacctgacctgcatcagcagtcaggtgccatgccatgattgtaaacaggcccccctaaataaaacctcccttgattaactatacatgtgtcgtctgtggtatgcatatatcatcaccttctttttcttcttcaaaaaaaaaaaaaaaaaaaaaaaaaaaaaaaaaaaaaaaaaaaaaaaaaaaaaataa

SEQ ID NO: 227 - DNA, 464 bp, Triticum aestivum
  Clone ID: uC-tsfl189005c08b1
cccacgcttcctaaactgctctttcttctcgagacgtaagaccggtaatcaagagggtgaggcaggaagtactgcagggctgcaaactggttttcagtcgagtgttcccgtccgattgccggccgcagcatcagataatgtggaagatggccgagcagctgggcgccgcttgctgctcggaggtggatcccagcgttacgcatgtggtcgccgtgcatgccggaacggagaaggcccgctgggctgtcaaacacaagaagtttttgctccacccccgctggatcgaggcctgcaattatcgttggcaccgccagcgggaggaagatttccctgtacctggcctcaaggagggcaagggcaaggaaaaagttgcagagaatgcccacctgtaactgagtataactgactcatctagtgttcgtgtactaccatgattgaagatgaatagattgaaagttttttgt

SEQ ID NO: 228 - DNA, 105 bp, Triticum aestivum
  Clone ID: uC-tsfl189005d01b1
ctcgcgtttctcatgtcaaacctgattgagtgatcctcatgagggaccaacaagaacagacgccacttttgtcattgtgttgtgaaggccttatctgattctagt

SEQ ID NO: 229 - DNA, 375 bp, Triticum aestivum
  Clone ID: uC-tsfl189005d02b1
gacagtcaaatacacactcatataaaaagagttatgaatttacagatggtgtttcatgtaactttgattcaaagcattacacacagtggttcatgcagcacaaactaaaacgcaaagcaggtgttgccgcacagcagcagcattctcgcctccatacacaggcggataccacagtgaccatccacacataataccactgtccaccacaagccaaacaagacactacaacgagatactgactcctacagctattaggtaataatagaactccgggtagctcttattgttactgcgtcgggatgggctgcatctcaggagctgtggcaggcgcagtgtcggcggccgggttggcgaaaacccttgcaatgcgctcag

SEQ ID NO: 230 - DNA, 335 bp, Triticum aestivum
  Clone ID: uC-tsfl189005d03b1
ttcatgtttggcatatgccagctctgaccgaaatctttggggacgattctgtattacaatttggtggaggaactttaggacatccttggggaaatgcacctggtgcagcagctaatcgagtggctttagaagcctgtgtacaagctcgtaacgaagggcgcgatcttgctcgcgaaggtaatgaaattatccgagcagcttgcaaatggagtcctgaactagccgcagcttgtgaagtatggaaggcgatcaaattcgagttcgagccggtagatactattgataagtagataaaactaaagataaagaagagaaggtataaataaaaaagaaac

SEQ ID NO: 231 - DNA, 442 bp, Triticum aestivum
  Clone ID: uC-tsfl189005d05b1
actaccttcaccccttctaaccatttgagctcctcaatggctgcaatccacgagcctgtgctacaaattcaagcatccgcatcgttaactcaactgcagcatacacacgctgattgtattcctgagctgtccgtaagcactgctgggactactgagaatgaaaaaagcattcagcaagctcctcacagttcgaaagacgtccaaagcaagtcccatggtgcttccacaaggagttgcacaaaggttcacaagcaaggtgttgcacttggtagatcagtggatctgtcaaagtttggtgactatgacgaactcacagctgagctagacaggatgtttgagtttgatggtgaactgatgtcttcaaacaaagattggcagattgtgtatactgatcctgagggtgacatgatgctggtgggagatgatccatgggaggagttct

SEQ ID NO: 232 - DNA, 337 bp, Triticum aestivum
  Clone ID: uC-tsfl189005d06b1
agagagtagaccctctctgaccagtttgaggccaagcgcgccaagagcaaggcaagcagggagaggaagattgccaggagggaggagagattggctcagggcccgagagatcatgcaccagcaccagcggctgcagctcccgctcaggcagcagctgcacctaagaaggccaagaagtgaaggtctgataagaagctttatctttctggtaatatcaagggttagcctaattttggaacatcagaagttcagaactgttttctgtgcaatatcttgtttgtgtcagcgtgtcagataccttaaatatcatatcgtgtttgttcaaaaaaaaaaataa

SEQ ID NO: 233 - DNA, 417 bp, Triticum aestivum
  Clone ID: uC-tsfl189005d08b1
acactgttagagcctggcacctgagtatgagaaggcggcccaactgttgagcaagcacgacccagcgattgtccttgctaaggttgatgccaacgatgagaagaacaagccgcttgcgggcaagtacgaggtccagggcttccctaccctcaagatcttcaggaacgggggaaagaacatccaggaatacaagggccccagggaggctgagggaattgtcgagtacttgaagaagcaggttggccctgcttccaaggagatcaaggcacctgaagatgccacttaccttgaagacggcaagatccacattgttggtgttttcactgaattcagcggcactgagtttacaaacttccttgaggttgctgagaagctgaggtctgattatgactctggccacaccgtgcatgccaacca

SEQ ID NO: 234 - DNA, 447 bp, Triticum aestivum
  Clone ID: uC-tsfl189005e01b1
cccactcttccggcctcatccaaaacccggaactcaaagagagcgcagcaaccgtcagagcccgactagtcgaaggccacagccatggccgcccctaccggcacttccatgctgagcgccctgctccagcttcccctggccccgttctcgcggaagagctccgcgccttcggcggtccacatgaccgcccgccgcgcgccgacgtccgtgctggccgccaagggctacaacgtgcagatcgtggtggacgagaacgagggggaggactccatcttccggcggttccggcgggaggtgatgaaggccggcctgctccaggagatcaagcgccgccggcggcatgagaacaccaaggacaagaagatccgcaaggcccgcgaggccggccgccgcaaccgccgcaggcgtatgatggatgatcgtaggttcccagaagatgagggagac

SEQ ID NO: 235 - DNA, 373 bp, Triticum aestivum
  Clone ID: uC-tsfl189005e02b1
atctccttaaccaggacacgcccacggtatacgcacgtacagctcgatcgcaatggcgtcgctcgtcgccgtccagccggtcgccgtgcggggcctggccggcagctccatctccggccgcaagctcgccgtccggcccgcctccgccgtcgtctcccgctccacccgcagggctcgcggggcggcggtggtggccaagtacggggagaagagcgtctacttcgacctggacgacatcgccaacacgacggggcagtgggacctgtacggcagcgacgcggcgtcgccctacaacggcctgcagagcaagttcttcaacaccttcgccgcgcccttcaccaagcgagggctgctgctcaaggtcctgctgctc

SEQ ID NO: 236 - DNA, 199 bp, Triticum aestivum
  Clone ID: uC-tsfl189005e03b1
gaccgccggcctgccggtcagacgtcgctccggcagggccggcctcagcaacgtcagctacggcggaaggatcagatgcatgcatgtgcggccgattgcgggcatcaagatgttcgagaccctgtcttacttgccacccctctccagtgaggccctcctaaagcaggtcgactacctgatccgatccaagtgggtgccc

SEQ ID NO: 237 - DNA, 59 bp, Triticum aestivum
  Clone ID: uC-tsfl189005e04b1
cttatgctgatatgctatatgaactgccatccttcttggataaacatttacttacacgc

SEQ ID NO: 238 - DNA, 356 bp, Triticum aestivum
  Clone ID: uC-tsfl189005e06b1
ggatcattaaggggtcagatgcagtgggcctcgctccgagggccgccgagaagagtaagaaccagaagtagcaagaacgatgaacccgatctgtttcctttcctgcgatcgcatcttacaagggtgatggactttatgtgtgatgagaaagggatttacttatatatataacctacgtgtattctctttgttatttccttgtatgttcgttcggaacaagcatgttagattgtgtaagctgatgtgtgtgtatctactactactgcactactttgatttgattcgcgtgtgttgtatgcggtttccgttgtaaattggtgtgctctgtctgtaccgcaaactcttttctttcatct

SEQ ID NO: 239 - DNA, 436 bp, Triticum aestivum
  Clone ID: uC-tsfl189005e08b1
gttcatttagaccaacccgctgctcaacaaggtggacggcccggctccgtccacgggcggcaccgcctccaggaaggccggcggcaccacctccggcaagaagcccgcggccggcagcgagggcggcggcgggttcaacctcggcggcctcttcgccaagaaaggctgaactacataagcacgtgcgcgcgcttgggtgcgtgcttcgatctcatagctcgatttattgctgtaactccatggaaaacatcgcagagatctgcatatatgtacacgcggtgtaactactcaaatgattcttgctgtgatgccttatagatttgtattcttcttcacacaacttctggagtaatttctctcaaaggctcagtatgtcatatacccatgttaagctttgctttgctaagatcccaataccgacaacctttatatctct

SEQ ID NO: 240 - DNA, 314 bp, Triticum aestivum
  Clone ID: uC-tsfl189005f01b1
cgcgcggcgggcccagccgcgccatcaacgtggtgctcacggccgacgacgtggccgtcgacggcttctgcatgagccgctgcggctcccacggcgcctccccgcggtcccgcgccgggcggttcgcgtacgtgtgggtgggcaacccggcgacgcagtgcgccgggcagtgtgcgtggccgttccaccagccgcagtacggcccgcagatggcacccctcgcgccgcccaacggcgacgtcggcgtcgacggcatggtggtgtccctcgcgtccatggtcgtcggcaccgtcaccaaccccttcggcaacggc

SEQ ID NO: 241 - DNA, 417 bp, Triticum aestivum
  Clone ID: uC-tsfl189005f04b1
gttccgtgagtgcgagctcatccacggccgctgggccatgctcgccaccctcggcgccctcaccgtcgagtggctcaccggcgtcacctggcaggacgccggcaaggtggagctggtggacgggtcgtcgtacctggggcagccgctgccgttcacgctcaccacgttgatctggatcgaggtgctggtgatcgggtacatcgagttccagcgcaacgcggagctggacccggagaggaggctctaccccggtggctcctacttcgacccgctgggactcgcggcggacccggtgaagaaggagactctgcagctggcggagatcaagcacgcccgcctcgccatggtcgccttcctcggcttcgccgtgcaggccgccgccaccggcaaggggccactcaacaactgggccaccca

SEQ ID NO: 242 - DNA, 106 bp, Triticum aestivum
  Clone ID: uC-tsfl189005f05b1
ggtcgttgtagcggtgaaaaaataaagtgacatgcagtatcatgtaagaacccgaactatactagttcaaacatgggaataaaagacaaacacatgtcttgtctac

SEQ ID NO: 243 - DNA, 353 bp, Triticum aestivum
  Clone ID: uC-tsfl189005f06b1
ccctctcttccgcaaaacaatccaatccaatcccccaagagagagaagaggaggaagatgtcgggccgcggcaagggaggcaaggggctcggcaagggcggcgcgaagcgccaccggaaggtgctccgcgacaacatccagggcatcaccaagccggcgatccggcggctggcgcgcaagggcggcgtgaagcgcatctaggggctcatctacgaggagacccgcggcgtgctcaagatcttcctcgagaacgtcatccgcgacgccgtgacctacaccgagcacgcccgccgcaagaccgtcaccgtcatggacgtcgtctacgcgctcaagcgcctgtgccgcaccctcta

SEQ ID NO: 244 - DNA, 135 bp, Triticum aestivum
  Clone ID: uC-tsfl189005f07b1
tcccactccacacagagacctccctgctctcgtctttatctcctgtcacacacagagaagagaacgaacgagaaaaatgccgcgccacctgctgcagcagtccgtcgaccgcctcgccgcgctggccgcgcctcc

SEQ ID NO: 245 - DNA, 119 bp, Triticum aestivum
  Clone ID: uC-tsfl189005f08b1
gtccatgttcactccccccccctcccaagtatgatggacttggggtgctcaacattgataaatttgcgcaaaaaaaaaaaaaaaaaaataaaaacaaaaaaaaaatacaaacaaacaaa

SEQ ID NO: 246 - DNA, 422 bp, Triticum aestivum
  Clone ID: uC-tsfl189005f09b1
ttcgccgtcctcacccaggaggagttcctggctaggtacgcgtcgtcctacgacgctgccggtgatgatacaggcattacgttgcctgtgggcggcggcgacgccgagctgtggtcgtccggcggcgacgatggtagctccttggaggctccgcctcccagctgggactggagatccaagggcgccgtcacaccggtcaagtcccaaggcgcaggatgcgctagctgctgggcgttcgtgacggttgcgacgatcgagactctgaactggatcaggacggggcagttggtgcccctctcggagcagcagctggtggactgtgaccagtacgacggcgggtgtaaccgcgggtcctatcacagggcttacaattggattgtggagaatggcggcctcaccacggcagcggattacccgtacac

SEQ ID NO: 247 - DNA, 385 bp, Triticum aestivum
  Clone ID: uC-tsfl189005g02b1
ccctcgcttccgcccacgcgtccgcccacgcgtccggtcctactgtcacatacacacacacaagtgctagctagctaatcgatcagccagccatggcggaggagaagcaccaccaccacctgttccaccacaagaaggagggcgaggacttccagcccgccgctgacggcggcgtcgacatgtacgggtactcgaccgagacggtggtgaccgccaccggcaacgagggcgagtacgagcggatcaccaaggaggagaagcaccacaagcacaaggagcacctcggcgagatgggcgccgccgccgccggagccttcgccctctacgagaagcacgaggcgaagaaggacccggagcacgcgcacaagcacaagatcgaggagga

SEQ ID NO: 248 - DNA, 423 bp, Triticum aestivum
  Clone ID: uC-tsfl189005g03b1
cttcgctgcacacaaccctctccacccccagcaatccatccatccaccccacccccacccccctttgccctcccctacccggcggattccctccccgagctcggcaatggcaaacgcttcatcaggagctgggatccatgatgactgcaagctgaggttcgtggagctcaagtccaagaggatgcaccgcttcataacctacaggctggagaaccagaaggaggtcattgtggaccaaactggggagcgtgaggcaacctatgaggacttcaccaagaccctccctgagaacgactgccgattcgcagtgtttgacttcgacttcaccaccccggaggatgtgccaaagagcaggatcttctatatcttctggtcccccgacacggcaaaggtgaggagcaagatgacgtacgcgagcaccaa

SEQ ID NO: 249 - DNA, 194 bp, Triticum aestivum
  Clone ID: uC-tsfl189005g04b1
gctttttggctcggccaggccggcgtcgagatcggcacgtccgtcggcggggccgtgcagcacgccgtgcgccagctgcccgtgcccttccggggcgcccagatccgtcgtcgcaagctgcacccgcccccttctgcggacggggccgtcggcctcctctcctcggagagggccgtcgatagatgccctctcga

SEQ ID NO: 250 - DNA, 390 bp, Triticum aestivum
  Clone ID: uC-tsfl189005g05b1
cccacgcttccgctcgtccactgcgccagtctccgggagcgcaacctgctcgccgacgtgtccacgctcgtggagcgccaccgcgcggcgggggcgcgcaagcgcgacctcctccgcctcctcgcggcgtccctccgcgccatgggccacgacgccgcgctctgcctctcccgctgggacaagtcgtcgtcccaccccgccggcgagcacgcctacgtggacgtcctcctccccgccggctcggagcgcggcgaccgcgagcgcgtgctggtggacgtcgacttcaggtcccagttcgaggtggcacggcccaccaaggcctaccgcgccgtgctgcagcggctcccgtcggcgttcgtcggcaaggaggaccggctgcgcctgctggtg

SEQ ID NO: 251 - DNA, 419 bp, Triticum aestivum
  Clone ID: uC-tsfl189005g06b1
atctgatcagagaacagagcggagcggataaactcgagttcgatcatcaccaaccatgtcgtgctgcggaggcaactgcgggtgcggatccggctgcaagtgcggcaacggctgcggagggtgcaagatgtaccctgacatggacgagggagtgaacaccgcctcccagaccctcatcatgggcgtggccccctccaagggcaccccgtcgttcgaggccgccgtcgagaacggagggtgcaagtgcggccccaactgcacctgcaacccgtgcacctgcaagtgatccatgaggcctcaatcaaatcagatcaaggagatggcatggatggacctgatgaaggagcgagtagtagttatgcatgaatcgcaagcgtgtgtttcgttttaaattgccacccagaataagacgagatcta

SEQ ID NO: 252 - DNA, 321 bp, Triticum aestivum
  Clone ID: uC-tsfl189005g08b1
aagagatcagatcagatctcatctcagtctcctctgctcggctcaggtcgccggcgatggcgatggcgccgtccctccgcaccaccgtcctgctcctcctcttcctcctcgccgcctcttctcaggcggaggcggcacaagcggcggaggacggcatccgtgtcctctccgccgagaaaaggatcgacctcaccggccccattgtcaaggtcttcctcaccctcaaggtccagaacgccgccaccggcgccgacgcctcacacgtcctcatcgccttcacgcctgccgaggccgaccacctcgccatcgtcaaggccaccc

SEQ ID NO: 253 - DNA, 470 bp, Triticum aestivum
  unsure (1)..(470): unsure at all n locations
  Clone ID: uC-tsfl189005g09b1
gtcatggcggagcggctcgcgtcctcggcctccctcctccccagcgcggcctcgccttcctcgtcgacccgccgcgccgccgtcgcctccgggctccgcctccgcccgtcgccctcgcgcttctcacaggctgcgaggagagtgcgcggtggcgctggcgccgccggggtggtgccacggctgcgggtggtgcgatgcatggcggcgtcggaggccgcgcagctcaagagcgcgcgggaggacatcaaggagatcctcaaaaccacctactgccaccctatcctggtccgtttgggatggcatgattcaggtacatatgacaaaaatatcgacgagtggccgcagagaggcggagccgacggaagcttaagatttgatcctgagttgagtcatggagccaatgctggtcttactaatgctntaaagcttattcaaccaatcaaggacaaatacccaggtatcacttatgc

SEQ ID NO: 254 - DNA, 193 bp, Triticum aestivum
  Clone ID: uC-tsfl189005h01b1
cccacgcgtccgcccacgcgtccgatctgctcgagcgttcacttgctagcatggccgatatgatagtattgcgagctagtaagtgtatgatcatttgtgaatgcatgacatatgctgacttttagatatggtggcaacggtcatgcgtacatatgtatttgaacaatatccataaatggacctatttccagtt

SEQ ID NO: 255 - DNA, 416 bp, Triticum aestivum
  Clone ID: uC-tsfl189005h02b1
tcctcgcttccgcgccgccgtctcctcctactcttcgccgctcccgctcccgccgtcgcgccaccgccgtcagccatggcacccaagaaggagaaggccccggcggcgtcgtccaagccggccaagtccggcggcggcaagcagaagaagaagaagtggagcaagggcaagcaaaaggagaaggtgaacaacgcggtgctgttcgaccaggccacctacgacaagctgctcaccgaggtgcccaagtacaagcagatcacgccctccgtcctctccgagcgcctcaggatcaatgggtctctggctcgcagggctatcaaggacctgatggagaggggactcatcaggatggtgtcaatccactcaagccagcagatcttcaccagggcgacaaacacctgatttatcattatcat

SEQ ID NO: 256 - DNA, 383 bp, Triticum aestivum
  Clone ID: uC-tsfl189005h03b1
cctacgcgtccgctacccgctgagtttaagcatataaataagcggaggagaagaaacttacaaggattcccctagtaacggcgagcgaaccgggagcagcccagcttgagaatcgggcggctgtgccgtccgaattgtagtctggagaggcgtcctcagcgacggaccgggcccaagtcccctggaaaggggcgcctgggagggtgagagccccgtccggcccggaccctgtcgccccacgaggcgccgtcaacgagtcgggttgtttgggaatgcagcccgtgcccaagaccgtgtgggcgcagatcttcgtctggctcgtaaaacccggagcggggatcatgatcatggacccctacggcgccgtcatcagcgccaccccc

SEQ ID NO: 257 - DNA, 204 bp, Triticum aestivum
  Clone ID: uC-tsfl189005h05b1
cccactcttccgcgcaaatcttgtactacctccttcccaagatataaggtgtgctttgacttttaaaaaaaaaaaaaaaaaaaaaaaaaaaaaaaaaaaaaaaaaaaaaaaaaaaaaaaaaaaaaaaaaaaaaaaaaaaaaaaaaaaaaaaaaaaaataaaaaagaaatcaaaaagataaaaaaaaaaaaaaaaaaaaaacaaa

SEQ ID NO: 258 - DNA, 321 bp, Triticum aestivum
  Clone ID: uC-tsfl189005h09b1
acgccaccgactcctcctccagcgaggacgagtcggcgccgccgccgttggccccgatgccgacgaccaaggaggagcgccggagggagcgcaagaagcgccgccgcgtcatggaggccgggaggagggacgactcggggccgccgcagccgcaggcaaccggggcgcgcacgccctcggtgcggtaccgcggcgtgcgccagcgccgctggggcaagttcgcctcggagatccgcgacccgatccagggccgccgcctctggctcggcaccttcgacaccgccgaggaggccgcagcagcctacgacgccgtcaagatcc

SEQ ID NO: 259 - DNA, 348 bp, Triticum aestivum
  Clone ID: uC-tsfl189007a05b1
caataccatggcccccgccgtgatggcttcgtcggctaccaccgtcgcacccttccaggggctcaagtccacggccggtctgcccgtcagccgccgctccagcggcagcctcggcagcgtcagcaatggcggaaggatcaggtgcatgcaggtgtggccgattgagggcatcaagaagttcgagaccctgtcttacttgccacccctctccacggaggccctcctgaagcaggtcgactacctgatccgctccaagtgggtgccctgcctcgagttcagcaaggttggcttcgtctttcgtgagcacaacagctcccccgggtactacgacggccgatactggacaat

SEQ ID NO: 260 - DNA, 302 bp, Triticum aestivum
  Clone ID: uC-tsfl189007a06b1
atcaccatgggtttaggatcaaagatgtggcttgctatacaggccagagcatacaatgtgcaattttcagggtgcaggtctgtatgccttgccggtactcgaagattgactgtagtgctgtttgtatgctgtattgtactccctccgtcccaaaatataagaacgtttttgacattatgctagtgtgaaaaacattcttatattttgggatggagggagtattatttttcctgtataccggttgatttattgatcttgcagtgcaaccatcatttcgcaggagaatatagcatcccttgctt

SEQ ID NO: 261 - DNA, 58 bp, Triticum aestivum
  Clone ID: uC-tsfl189007a07b1
gcattatatcagtatttgttgccgagcatgaaataatgctcagttcaatgttcaattc

SEQ ID NO: 262 - DNA, 80 bp, Triticum aestivum
  Clone ID: uC-tsfl189007a10b1
cagaactccgaagttaagcgattgctgggcatgttttgttaatataaaaagatattgagtatacctatttggtaaagaca

SEQ ID NO: 263 - DNA, 159 bp, Triticum aestivum
  Clone ID: uC-tsfl189007a11b1
aattttcaaagtatatatgcattaaggagggtggagtcaggctagatctatactataatatccttaatgtctataagtggagtcctcttttatgcgggtttccactttaagcaatgattttagaatccgattcaatagaaaatgagaaaatatgcaaac

SEQ ID NO: 264 - DNA, 391 bp, Triticum aestivum
  Clone ID: uC-tsfl189007a12b1
ggagagcagagctgagcacaacccttggacacctcttcttcttcttccatagtaacccaacccaccctttgcgaagatgtataacgctccgtcggggcaggagatgtcctacacggagcacgtgcagaagcgccacgaggagaagggctgcatctacgcatgcgtgttcacagcgctgtgctgcttctgctgctacgagacatgcgagtgctgcctcgactgcctctgctgctgctgcaactaaaccggacatggccgccatggacggaggccgcaaggcgcagaggagatccaccggcctccgccgcctttcataataagcatatgtgtctagtgtcttagctcgatgagaactgtatcacaactttgctataatactatctgtccttgt

SEQ ID NO: 265 - DNA, 83 bp, Triticum aestivum
  Clone ID: uC-tsfl189007b04b1
ctcactctcttttgcatgtgaccacacaacaaataaaccacaaccggaaacgcaccctcatttggtactgtactggatctggg

SEQ ID NO: 266 - DNA, 337 bp, Triticum aestivum
  Clone ID: uC-tsfl189007b05b1
ggggggtggcctccagctccgatgagcccggcggcctgaccctgcacatcgaggactacccgtacgccgtcgacgggctcgaggtgtggcacgccatcgacgggtgggtgcgcagctactgcgcccacttctaccacagcgacaaggaggtggacggcgacgcggagctgcaggcgtggtggcacgacgtgcgcaccgtcggccacggcgaccggcagggcgaccaggcgtgctggctggcgctggacaccgtcgaccacctcgcccagacgctgtcgacgctcgtctggatcgcctccgcgctgcacgcggccgtcaacttcgggcagtacgccta

SEQ ID NO: 267 - DNA, 309 bp, Triticum aestivum
  Clone ID: uC-tsfl189007b06b1
gcactactcacggtaagaaccacaaccaccacaagtgagtgaccatcggagcaaggaaagaccaggagagatggcaatgaggccgcttgtcgtcctggccctggccgtggcgctcgccggcgtggcactgggagggggcgcggcggagggggccggcgagtgcgggaggtcctcccccgaccggatggccctgcgcatggccccgtgcatctcggcggcggacgagccggactcggcgccgtcgagcagctgctgctcggcggtgcacaccatcggcaagagccccagctgcctgtgcgccgtcatgct

SEQ ID NO: 268 - DNA, 298 bp, Triticum aestivum
  Clone ID: uC-tsfl189007b07b1
gtgccgaaaaatctgacggcgctgggcctgcagctcactcagttagagaagataatcagggacaccgagaagagcctgcgcagcagagggtgcaatcgactgatggcgggagcatgatcaggtgtactggctacctgcggctatgttgctggatcatgaccaaaccttgctcaagagatgtgctgtggactgtgcccagccctgcgctagaccttatagttgcctgtatgatttgtgcaataacggctggttgatctgctggtacactgtaatggttcttttgctagactgttccgac

SEQ ID NO: 269 - DNA, 419 bp, Triticum aestivum
  Clone ID: uC-tsfl189007b08b1
gcccaccaagttcgtcgccaagatgaagctcattcagggctaccctggcaacgccggcttcaagttcggtgtcgggctcgagagccacttcaccacgcccaacctcccctacgtcaggggcgccctcgacacgctcgcgcagctcaagctgcccatgtggatgaccgaggtcgacgtcgtcaagggccccaaccaggtcaagttcctcgagcaggtgctaagggaagcctacggccacccgggcgtgcagggcatcgtcatgtgggccgcgtggcacccctacggatgctacgtcatgtgcctcaccgacaacagcttcaagaacctacccgtcggcgacctcgtcgacaagctcatcgccgagtggaagacgcacaagacgtccgccgccaccgacgcgaatggaatgctcgagctcg

SEQ ID NO: 270 - DNA, 418 bp, Triticum aestivum
  Clone ID: uC-tsfl189007b09b1
ggcgtggtcggtgggctgtggctgctgcagctgctgctcctgggctgcctgtggaggcggctcaagtcgaacgggcggcgaggggacgcggtcgcgagcggcgacggcggcaggtctggcaagagcgcgtccggctccggcggcgtgggaggggagagattcctagtgagtgacatatccgagtggctggacaagtacagggtgttcaaggtggaggagctgcagcgcggcaccgacggtttcgacgacgcgcacctcatccagggcagcgtgtacaaggccaacatcggcggcgaggtcttcgctgtgaagaagatgaagtgggatgcctgcgaggagctcaagatcctgcagaaggtgaaccacagcaacctggtgaagctggaggggttctgcatcaacacggcgacgggcgact

SEQ ID NO: 271 - DNA, 343 bp, Triticum aestivum
  Clone ID: uC-tsfl189007b10b1
cggacgcgtgggcgcacaacgtggtgttcgacgaggacgcggtgccctccggcgtggacgtctccaagatctcccaggaggagtacctcaacgcccccggcgagaccttctccgtcaccctcaccgtccccggcacctacggcttctactgcgagccccacgccggggccggcatggtcggcaaggtcaccgtcaactaataagctgtcttgttgcgaattgttgcgggtgggttgatcgatcgggcgtgtcatgcatgcatgcatattgattaattgtacgaacgtacgctatatgtatatgttttctactattataagatgagatgaggctcttgctgata

SEQ ID NO: 272 - DNA, 257 bp, Triticum aestivum
  Clone ID: uC-tsfl189007b11b1
cccacgcgtccgcgatagccaatttattggctaattcgaattcgtctgtacaattcgtaaaattctttcttatttcttattgttgaaatccaaaattaaagtctcttggctctcttcacgctttctcacaaacagattaaaaaatagatttttatttttgaagtttggataaaccattgcttcgtctggtgtctacaatacatataactcattatagtactaatttcatttttaccagatcgaaaaattttatgttg

SEQ ID NO: 273 - DNA, 366 bp, Triticum aestivum
  Clone ID: uC-tsfl189007b12b1
cccatcttgtccgttgacgcgtgggcggacgcgtgggagaagaggcacgcatgcgtgagaaagaagcgagagacatggcggaggaggggaaggtgatcgcgatccacaggcaggtgcagtggagcaccaagatcgaggaggctggcagcagcacgtatctggtggtgatcgacttcactgcaacatggtgcggaccatgccgcttcatttctccaatcttagatgagattgccaagaagcttccaagtgttactttcctgaaggtggatgttgatgaaatgaagtcaattgccgaggagttcagtgttgaggccatgccgacgcttgtgctcatgaaagaaggaaaggtggtggacaaggttgtgg

SEQ ID NO: 274 - DNA, 217 bp, Triticum aestivum
  Clone ID: uC-tsfl189007c04b1
gtctttgaaccgctggactgtgaaccgtccctatggtggagtgctctctggaactgcagtgagggaaaggatcatccgcgccttcttggtggaggagcataagatcgtgaagaaggtgttgaaaatacagaagaccacggacaagacgacctgaatgtaatctgatcgaaacagaagtgcgaagtgagatggtgttctgtaaacaaggaaaatattt

SEQ ID NO: 275 - DNA, 152 bp, Triticum aestivum
  Clone ID: uC-tsfl189007c06b1
gtatcctcaaaatcttggagtgctccggtactctgtctgcaaataccacttcaaaagtggtaaaaaattcaagaaaaatggaagacagagacacaacatgtgtcaactatgtcatgtgttgaaatccaaattccaatctcaaatctagaaac

SEQ ID NO: 276 - DNA, 384 bp, Triticum aestivum
  Clone ID: uC-tsfl189007c07b1
cggacgcgtgggcggacgcgtgggagtctcccctccctctcccaaatcgaagcgagaaattccccaaaaagctaccccatttccgtcccagccgaggcaccggcgccgcagccgcgcccgcgcccgcgcgatgccgaacgcgatcccggccttcttccgcgcctcgccggccgcggcgtcgggctccggcgccggggcggggcccagcctcgccacctccgtctacgagacccgcctcggcctggcggcgctctcctggtcgcgcgccgcgttcggcctcagcctccgggccgtgctccgcgtcggggcgctcgcctcctcctcctcggcctccgactacggctgctacgacgacggcccggagttcgacgaggagaccaccat

SEQ ID NO: 277 - DNA, 386 bp, Triticum aestivum
  Clone ID: uC-tsfl189007c10b1
agaactgaaggctagaagagcccaaagatttcttggagactcttctccaatccccctttcccctccatggccacgctccagcacgctctcctcactccgtccccgctctgctgctgctcgcacgctctcctccacccaagggccaggaagatatctccgaggtacccagatggggccttctccatggcgaagccattcttgcggcgcgagctcccggagaggggcggcaccttggcgcggagaatggcgggcgggcggcgccttggcgtggccggggccgggaaaggccccttctttggcggcgggcggcggcagggggggaccggccgcggccgggtcgtggcgaacctcgccttcgtcgccctcgtggcctacctcgtggtgag

SEQ ID NO: 278 - DNA, 299 bp, Triticum aestivum
  Clone ID: uC-tsfl189007c11b1
cctcgttgtgattaagactgcaaattatgaggtcaggaagtatacaccatcttcagcagctgaagcaaaaggtgaaaaactaacaggatcatcaggtcataacactgttactgggtctatatttggcacgaatgcttcatctgagaagactgcactgactacacctgtattgactcaggcttctgatgacgaactctaagacgcatccatacagatagctctgccaatgaacaaagacttgaacagtttaccagctccaaatacagaagcggttaccttgcgaaaggctgaaggaggca

SEQ ID NO: 279 - DNA, 226 bp, Triticum aestivum
  Clone ID: uC-tsfl189007c12b1
cgctgttcactcttccgcacacataaagcagtggtgcaatacaacgattggacctagcaagaaactagctagtttttgttgtagagaaacttagctagttaacgccgtggacgacgaatatggtgggtagcgctagggtgctgctcgtagccgccgtggtagggtttttggcaaccacggcgtgcgaagccgtccagtcggactacgccaccgcgctcaccaagtc

SEQ ID NO: 280 - DNA, 359 bp, Triticum aestivum
  Clone ID: uC-tsfl189007d05b1
tgatcttccattgcctgggtcaggctatgaaaaggcacagaacgctcggcggttcatgatctatgttcactccaagatgatgatagttgacgacgagtacatcatcgtcggatcagccaacatcaaccagcggtcgatggacggggggagggactcggagattgccatgggcgcattccaaccacaccacctgaacaccaaagggcaggttgccagagggcaggtccatggcttccggatgtcgctgtggtatgagcacctcggcatgctgcacaacgacttcctcaacccgggaagccgggagtgcgtccagagggtgaacacgatggctgacaagtactgggacctctatgccagcg

SEQ ID NO: 281 - DNA, 104 bp, Triticum aestivum
  Clone ID: uC-tsfl189007d06b1
cacaaacatgtgcacaactggtacttgtaataatggatgatgccaataagattgtgaaccttaattcatcaggagtgtgactgaatttgcaagtctgcttcatc

SEQ ID NO: 282 - DNA, 55 bp, Triticum aestivum
  Clone ID: uC-tsfl189007d07b1
gtcagtctggactacccgctgagtttaagcatataagtaaccaggaggtggaagc

SEQ ID NO: 283 - DNA, 145 bp, Triticum aestivum
  Clone ID: uC-tsfl189007d08b1
cttgtagtggttatcatttgttcaatactattggtactgaaatggtatttgcatgtgtgtctgcgcaaatagagaatagtgatgaaccctttaggttattcagtgtacaaggggattcgagcttctatgtgattatattgtaata

SEQ ID NO: 284 - DNA, 480 bp, Triticum aestivum
  Clone ID: uC-tsfl189007d09b1
aattgtttcaagactcagatccagatgcaactattgtggaagtaaccttgggtgaccgtcttggggatctccttgatactatgagtgccttgaggaatttagggctaaatgttgtgaaagctagtgtttgcctcgattcttctggcaaacacaataagttcgctataacaaagtcgtcaactggtcgcaaaattgatgacccagagttgttagaagcagtaagactgacaattataaacaacatgcttgagtatcatcctgaagctagcagtcaattggccatgggtgcaacttttgggctagagccccctacagaagtggttgatgtggacatagcaactcacatagagatctatgacgatggtcctgaaagaagtttacttgttgtggaatcagctgaccgtccagggttgttggttgatctagttaagatcattgctgacatcaatatcactgtccaatctggagaatttgacactg

SEQ ID NO: 285 - DNA, 414 bp, Triticum aestivum
  Clone ID: uC-tsfl189007d10b1
cgcccttcccctctcttccttcctcccccgtcgtcggctccagcttagggtttctcgcccccgccctcccgcctcaccgccggccccgtacgccatgtcgaagcaaggagggaaggccaagccgctcaagcaggccaaggtcgccgagaaggactacgacgagaatgacctggcatacctccagaagaagaaggatgagcaaaaggccctgaaggagctgaaggccaaggcaggccagaagggtgcgctgggaggatctggtctcaagaagagtgggaagaaatgagtctgcccacccttacgtaatgcccagaaaatgataatctatctatctacctatctgtgtcgcgcttcactatctgtggctgtaaaagactaccttcagctgtgttgagcattaagcattgtcgcagt

SEQ ID NO: 286 - DNA, 340 bp, Triticum aestivum
  Clone ID: uC-tsfl189007d12b1
cgacctcagagctggaggcgaagctcgacgagggccgccgccgcgtggaggcagagctcgtggaggcgctcgcgagcctcgaggggcagaaggaggaggccatcaaggcgctggacgcgcagatcgtgtcgctcagcgacgagatcgtcaagaaggtgctcccatccgcgtgaaaactagtagatcacgcagcgcgcagcagccggcgcaatcccccgtttcatagtaaagatttctagttcttgatgtgtaatgtatacgcccactgggctgcctcccctaagaatgtaactgaatcaaacattctgtgatcgggtataaatgaatgatccttttgtac

SEQ ID NO: 287 - DNA, 344 bp, Triticum aestivum
  Clone ID: uC-tsfl189007e05b1
cagattgtgacacgggacaacccgtccccaagggcctacttccgatgcgccttcgcaccgtcctgccgtgtcaagaagaaggtccagagaagcgcggaggacagctcggtggtggaggcgacgtacgagggcgagcacaaccacccgcaccccacgcgggccggcgagctgccgagctgcgccacgcagggcggcggctcggtgccgtgctccatctccatcaactcctccggtccgaccatcacgctggacctcaccaagaacgggggaggcgtgcaggtcgtcgatgccggggaggcgcaaccggacatgaagaaggtgtgtcgggaggtcgcgtcgccaga

SEQ ID NO: 288 - DNA, 384 bp, Triticum aestivum
  Clone ID: uC-tsfl189007e06b1
gcggttaagaggaaggagagcagagatgactgcgtccgtctcctacgggctgcgagcacttccgacgtggtccagctctgtgtccggtgacgaccactgctcggcgctggccatgtcggtgtcggcgcgggggccccggtggacgcggccccttcggacgccggcgaggatgggcaatgtaaacgagggcaagggcatcttcgcgcccctggtggtggtggtgcgcaacatcgtcggacgcaagcgcttcaaccagctcaggggcaaggccatcgcgctgcactcccaggtgattaccgagttctgtaagaccatcggcgctgaccccaagcagaggcagggcttgatccgcctcgccaagaagaacggagagaagctcggatt

SEQ ID NO: 289 - DNA, 335 bp, Triticum aestivum
  Clone ID: uC-tsfl189007e07b1
ctcgtgtctcgtcgagctatctgtctacggagtagtacctcccaagctagctcgccgctccgccgcgatggccaccgtactgagcagcctccgcttgcccttctccatctgccccgccgcccctgcggcgcccatggcggcatcccgcgtcgcgctcccgctgtcgtcgacggccgccaggggcatgaggctccgcgcgcaggcgacgtacaaggtgaagctgatcacgccggagggcgaggtggacctcgaggtccccgacgacgtctacatcctcgaccacgccgaggaggaagggatcgacctgccctactcctgccgcgccggctcctgct

SEQ ID NO: 290 - DNA, 417 bp, Triticum aestivum
  Clone ID: uC-tsfl189007e08b1
aagatgttcgggaccgaggccatctacggatccgccttcaacatccgcagggatctcgacgcccagatcctctccaggttccaaaggcccccaggtgcattgccatcatctatgctaggatatgaggcgatgacaggttccttggatgattttggatttgaagattaccttaacttgccccaagactctgacagcctccgcataccggacatgcaccacggaatggaggttcgccttggcctgtcgaaggggcccatctgccccagtttcaattgattccacccatgtattagtcttgtgatacgtcgtgctccccgtccagcatctataaccagtcactagactgtatcatggatttgtgaaacgcgagaactaaattggcattgcatcagtttgaaattccttaacttcgattgg

SEQ ID NO: 291 - DNA, 393 bp, Triticum aestivum
  Clone ID: uC-tsfl189007e09b1
tcgcccactcgtgcgcccacgcgtccgcggcccatctgagcttgctgtcaaggaagctgcctggggtcttgcccgttacgcggccatctcacaggacaatgggctggtgccgattgtggagcctgagatcatgctcgacggtgagcacggcatcgagaggaccttcgaggtcgcacagaaggtgtgggcggagaccttctactatatggcccagaacaacgtcatgtttgagggcatcctcttgaagccaagcatggtgacccctggtgccgagtgcaaggacagggccacccctgaggaagtagccagctacaccctcaagcttctacagagaaggatccccccttccgtccccggcatcatgttcttgtctggtggtcagtcggaggtgga

SEQ ID NO: 292 - DNA, 109 bp, Triticum aestivum
  Clone ID: uC-tsfl189007e10b1
gaacttactcccatagcggagcggcagtctccgcattgtggaatgtttaataagaggttgagttggagtgggttcagtggatgtcgtaataactaattttagctttttt

SEQ ID NO: 293 - DNA, 278 bp, Triticum aestivum
  Clone ID: uC-tsfl189007e11b1
ccttatctgaaattaggacttcttgcatatcgagtgctctttctagacccccaccccccctcccccccttaatattggctcctaagtttcagttaggtctaggaatctatatttgtggctccatcataacattgaaggcacagagatgagagcatgctaattgaaccatattggttgtattgtatgagctggtcacttattgaatgacctatgctggcgctgagttcatatttgacagaactggagaggaaaaagcagaacatgtggtctgttactag

SEQ ID NO: 294 - DNA, 88 bp, Triticum aestivum
  Clone ID: uC-tsfl189007e12b1
cccacgcgtccgcccacgcgtccgcccacgcgtccgcccacgcgtccgcccacgcgtccgcccacgcgtccgcccacgcgtccggcga

SEQ ID NO: 295 - DNA, 344 bp, Triticum aestivum
  Clone ID: uC-tsfl189007f06b1
gggtaatagaactatatagtgttggggggggggggggtccaaggtttaaattttggggcacatgaatatttcagaccccaacctaaattattagagcaaaatttatcatattttttaccaagaaaatgtttttagtatgaatttaatttgaatctagctagtccaaattgcatatagaaaagtatattttatttcctatgggaggtgccgatgaaactatttatatgtgtatggaatctatctcaagaaacttggaactcttgattatcagctattcttgctactcctaagtgtaggcttacaccacatagggcaaatttagcaggtttgaaaagcaattcaca

SEQ ID NO: 296 - DNA, 366 bp, Triticum aestivum
  Clone ID: uC-tsfl189007f07b1
gagatctcacgcaaggagcacgaggaggaggcaagggaagccgccgccgccgccgccccgtccctcctcgccggccggccgccacaggtttcaagatgtcaacctgcacgtttgcagcttcctgtgccctcttgggcaatgctcgaacaaccgatgccccccagaaagcggtcaagagccgcctgagcttcctcggccgaggcgcgccgcagctgcggagcctgaggtcctccttcccctccaagaagctggtgacatctgcatacaaggggacgagcacgtacaaggtgaagctggtgaccccggaaggggacgagcacgagtttgaggcgccggacgacgcctacatcctggactcggcggaga

SEQ ID NO: 297 - DNA, 468 bp, Triticum aestivum
  Clone ID: uC-tsfl189007f08b1
aagtctataaggctgctgagactgatcgtatctatcgcatgaagctgcatgagtatctgcaaaagatcaatgaagggaagatatttgggcctgttatctctgttatccacgacatcgaatttttaaaaaaagggctaccgcatgcccgggtccttgtttggcagaagaaaaaacataacaaagtggtcatcccagctttcatgaaaacctttgcttcagccactgttgggatctgaacttactgatactattggcgatgttcctgggtatggtcagatgcctaagctagaaagagatgagccggctgttgcagcgtatgattcatcaggcacattagagtcgagctgaacccaactttcaaatgagcataagaaagcgatgattttgtgcatggagtcttgctgccttgatcattggtacctcggccctcgctatcttcaccccacgacaagtaacaattaccttttg

SEQ ID NO: 298 - DNA, 415 bp, Triticum aestivum
  Clone ID: uC-tsfl189007f09b1
gttctctcagcccatggaggccatcaagaagggcctctcccgggcgctcgcccactactacaccatcgccggccgcctcaccgccaccgccgacgaagaaggtgtgctcctccacgtcgcgtgcaccggcgagggtgtgccgttcgtggccgcgtcggcgggatgtgccttgcaggatcacgggctcctggatgcgcccttcacgacgagcctcctggatgatctcgtcgtgtactacccggcacctgagggctgccggagcacggacccgatgctgctgatgcaggtcaccgagttcgcctgcggcgggttcaccctgggcgtgacgtggaaccacacgctagccgacgccacgggcatcgcgcagttcctgcaggcagtgggcgagctcacccgcgctgaagttgatgcgtcg

SEQ ID NO: 299 - DNA, 66 bp, Triticum aestivum
  Clone ID: uC-tsfl189007f10b1
cgcgttcgttagtgtgatcataaattctcttcgaattacattcaaatatattgagatcttcgctag

SEQ ID NO: 300 - DNA, 325 bp, Triticum aestivum
  Clone ID: uC-tsfl189007f12b1
gctgccccgatgtatctcccgccttagagcttagctgcggttttttaatgctatactaaagtcaaacattaaggaaatcagctttgtcatgttcgagaagaagagggtgtttagctgtgaatcctgtgcctcttcagccatgatcttcttcaagcttgtctcccagatcgtggaggaaacgccatcactttttgcttttctgtccgggttggaaaaggacgggggttggacccgttaagttcctatttgacctgtgcggcttgtttaaaagtgggacaggaaaatggacatacagggtacaagggacagtgaacagttgtcacaa

SEQ ID NO: 301 - DNA, 277 bp, Triticum aestivum
  Clone ID: uC-tsfl189007g04b1
gcttgatcgcatacctgatcctcccagctagccatgaggaacaaacggacggtgctggcgaaccaggcgagacatgcagggtcccaagtaccgatcaccaaaggtggctggaaagcgggttggatagttaggtttattccctagctctctttttctcctgtcatcgtcgtattatccgtatttcagtttgcttagctctaaagactcctcctatagtggtatcatcggaatcaccagaaaaagagaaaagagaacctgtggcaagacaaaggtagtg

SEQ ID NO: 302 - DNA, 432 bp, Triticum aestivum
  Clone ID: uC-tsfl189007g05b1
cccacgcgtccggaaaaaagagaacagcaacgggaataatctcgcctcctttcctcctccccctccccgtccgcgtgcgatcgacgcggaggcgccgcccgtccccctccgctccgccccgacccgaccccatggccttcatgcgcacctcctccaatgcatcctctggcatgggagttgctcctgatatcagggagacattcctggagcttcagatgaagaaggcatttcgctatgtcatcttcaaaatagaagaaaagcaaaagcaggttgttgtggagaagacgggggctacaactgagagttatgatgatttcctggcttgtctcccagaaaacgactgcagatatgccctttatgattttgactctgttactggggagaatgtgcagaaaagcaagattttcttcattgcctggtcccctgacacat

SEQ ID NO: 303 - DNA, 284 bp, Triticum aestivum
  Clone ID: uC-tsfl189007g07b1
tgatgtgctgatcaatgctgccatgggctcatccaacagctatgccatcaagaagaaggacgagattgagcgtgttgccaaggctaaccggtaagatggatgtgcatctgagggtctcgcttttggctggagattttgaagtgaatgtgttctacaagatatctagaactgttttagctatgcgttaagttttatggaatgaacatttcgatgtagtggcaagaacgtgcctgatgcttgtctttgtgaaacctattcctgttcagacatatttggatatgttg

SEQ ID NO: 304 - DNA, 363 bp, Triticum aestivum
  Clone ID: uC-tsfl189007g08b1
ggaagaatgtcgcatcacttccgtgaaatgaaagttggtgattatatgtctgtaaagggacctaagggtcgtttcaagtaccaagtaggacaagtgagagctttcggaatgctggctggtggatctggcatcactccgatgttccaagttgcaagggcaattctcgagaaccctaatgacaaaacgaaggttcatctagtctatgcaaatgtcacacctgaagacattcttctgaaggaagagctggacagcctggccgaagaatatcctgaccgcttcaagatcttctacgtgttgaatcagcctcctgaagtctggaatggtggtgttggctttgtgtcccaggacatgattaagactcac

SEQ ID NO: 305 - DNA, 428 bp, Triticum aestivum
  Clone ID: uC-tsfl189007g09b1
cccacgcgtccggctccggccgccagcgacaatgccgctctgcagcttctacgcctccacgtccctcccggtgccgaaaccccactccttgccctcctccgccgcggcggtcaccaccgtgcaggcaaagaagtcgccgccggccgtggctgcggctgcggcggcgaccgtcctgccgacgacggccgagagcacagcgtcgatgatgccggcggaggcgctgtcgctgcacctgccggagctgccgtcggcgatgcgggacaagatcctgagcctggagctgatgggggtggactacgggcgcgcgctgtcgctgaacccggcgctccgggacgcggcgccggagtccatccacgcggtggtgaccttcctccagtcgcgcgggctccacttcaaggacctgggccgcgtcttcggcatgtgcccgt

SEQ ID NO: 306 - DNA, 384 bp, Triticum aestivum
  Clone ID: uC-tsfl189007g10b1
tttctcctcctagcaagctatatacctacatagcacagccatggcccccaccgtgatggcctcgtcggccacctccgtcgctcctttccaggggctcaagtccaccgccggcctccccgtcagccgccgctccaacggcgctagcctcggcagcgtcagcaacggtggaaggatcaggtgcatgcaggtgtggcccatcgagggcatcaagaagttcgagaccctgtcctacctgccaccgctcagcacggaggccctcctcaagcaggtcgactacctgatccgctccaaatgggtgccttgcctcgagttcagcaaggttgggttcatcttccgtgagcacaacgcatcccctgggtactacgatggccggtactggacaat

SEQ ID NO: 307 - DNA, 345 bp, Triticum aestivum
  Clone ID: uC-tsfl189007g11b1
ccagttcccgctggacgcgctgaagctgggggtgtgcgcgaacgtgctggggctgctgaacattaccctggggagcccgccggtgcagccgtgctgctcgctgatccaggggctggcggacctggaggcggcgccgtgcctgtgcacgacgctgaacctcaacctcctgggcatcaacctgaccttgcccatcgccctcagcctcgtcctcaacaactgcggcaagaacgtcccctccggcttccagtgccccaactgagcccggccggaccttgcatgctgcatccgccatacctcatgcatgcatgcatgcatgattggctatttgaagtaccaccacgtact

SEQ ID NO: 308 - DNA, 301 bp, Triticum aestivum
  Clone ID: uC-tsfl189007g12b1
atctgtccactcgtgcgcccacgcgtccggctcctcctagcaagctatatacctacatagtacagccatggcccgcaccgtgatggcctaggaggccacctccgtcgctcctttccaggggctcaagtccaccgacggcctgcccgtcagccgccggttcaacggcgctagcctcggcagcgtcagcaacggtggaaggatcaggtgcatgcaggtgtggcccatcgagggcatcaagaagttcgagaccctgtcctacttgccaccgctcagcacggaggccctccttaagcaggtcgac

SEQ ID NO: 309 - DNA, 324 bp, Triticum aestivum
  Clone ID: uC-tsfl189007h04b1
ctctctctcccgcagcacatgcgcgtcgcccgccgacacccacacccacagcagcggcagcggcaatggagcatcggggcctgcttctcgtcctcgtcgcggcggcgtgcctctcgggcggcgcccacgccaggcacgccaagaagtcgtacggggccgtcttcagcttcggggattcgctctccgacgccggcaacctcatcgtcgacggcatccccaagtcgctcaccaccgcgcggtcgccctacggcatgaccttcttcggccgccccaccggccgctgctccaacggccgcgtcgtcgtcgacttcctcgccgagcact

SEQ ID NO: 310 - DNA, 400 bp, Triticum aestivum
  Clone ID: uC-tsfl189007h06b1
agcgatggttcatgcgcttgaagcaaaaccttctgaaatgccttgcgagaaagaagagctgcttaatgccgctgtccgccgcgtggatgcactggaagccgaactcattgtaacaaagaaggccctgcacgaggctcttatcaggcaagaggaactacttgcttatgtggacaggaagacaattgccaaggcccagaaaaagaagaagaagccgatgtcttgctactaggacacaaggagagagagagagagagccccctttggttccagttttcttttctctgagatgccggagatggcgtttgagatgatgtaaacggttgatccgttcgttttcctgacaaatgtgaaaaggacagacatatgggtttgtaaatggacagaaaatcctgacataaat

SEQ ID NO: 311 - DNA, 402 bp, Triticum aestivum
  Clone ID: uC-tsfl189007h08b1
tcaattaacctcaaaacaatgaggaaatcaaggtgaaggccaagattgaagcacagaaggtcagagagattgcagaggagagtgcggggtcaaaagctcggatgaatatttaccttgcactgacggcgatactcggtcttacaatcgcaaatgccgtctttgcaacgccagaggtggaatggaggaaggttgctgctctgggtctaattttcattggcctggttgctcaggtaatctatgagcaagatatatccccaccggtagctgacaaggatgaaaaaagagaagaatgaaagagctgtgcaccctgagtgaaacatcaaaaagcagcaagagcttcatcgatatagacgtagactgtataaattcaagatatagattgtgtaatcttagttatcattt

SEQ ID NO: 312 - DNA, 223 bp, Triticum aestivum
  Clone ID: uC-tsfl189007h09b1
taccaacatggctcgagaaagcatgctcgtatgtgaatgctatcggtggctatgtatatgcacggacgcataatattatacaatatgtcaactatatacgttttaatggttaaaaaaaaaaaaaaaaaaaaaagacaaaaaaaaaataaaaaaaaaaaaaaaaaaaaaaaaaaatacataaaaaaaaaaaaaaaaaaaaaaaaaaagggggggccgttttaaa

SEQ ID NO: 313 - DNA, 358 bp, Triticum aestivum
  Clone ID: uC-tsfl189007h11b1
tcgcggttccggaggagacccgaggaagaaggagaagcggcgcggcgaggcgcggcgaggagaaagatggggaagatgccggtgcggatgaaggcggtggtgtacgcgctgtcgccgttccagcagcaggtgatgccgggcctgtggaaggacatcaccaccaagatccaccacaaggtgtccgagaactggatctccgccacgctcctcatcacccccgtcgtcggcacctaccagtacgcgatgtactacaaggagcaggagaagctgtcccacagatactagatgtgaagctttgtcaaatgtcaaagcagttggaatttccatgttctataatccgccaagagtgatttaacat

SEQ ID NO: 314 - DNA, 293 bp, Triticum aestivum
  Clone ID: uC-tsfl189007h12b1
tcccactcgtccgacccactcggcggcggcggagcacgcgaagatggtgaagttcctgaagcccggcaaggcggtgatccttctccagggtcggttcgccggccggaaggcggtcattgtgcgcgttttcgaggagggcacacgcgaccgcccctacggtcactgcctagtcgccggcctagccaagtaccccaagaaggtgatccgcaaggactcgtccaagaagacggccaagaagtcgcgcgtgaagtgcttcctgaagctggtcaacttcacccacatgatgcccaccc

SEQ ID NO: 315 - DNA, 435 bp, Triticum aestivum
  Clone ID: uC-tsfl189008a03b1
gcgcatgcggaggcggacgtacccgcaacctcgctcttcggtgcggaccgccgcctctgctcagccgacgtgctctcgcccctcgaggttcgggcaaggatcgaggtggcggtgctcaatttcctcgccacgctctcgtctccctcttctccggccatccctgtcctccccctgatctcacgcaagtccaccaattgcagcctgcgcagcggcttgctgagtgatgtttcatcggtgtatctgtcctacgccttttgcaagaggtcactaatgagagaaaatgatgccaaggcattcgtcagagtatggaaagtcatggagatgtgctacaagatcttgggcgaagggaagcttgtcacccagcgggagttgttctacaaactactatcggactcacccaagtacttcagctgtcagcgccatgtcaatcaaacc

SEQ ID NO: 316 - DNA, 134 bp, Triticum aestivum
  Clone ID: uC-tsfl189008a04b1
cggacgcgtgggcggacgcgtgggtggtactggatgatgaatgtacctgagttatttgtttgccagatatttatccgaatgaggctcaacctcttaacttttttgctctgtgggttaaaagatctcttttatca

SEQ ID NO: 317 - DNA, 413 bp, Triticum aestivum
  Clone ID: uC-tsfl189008a05b1
tctcagagcaaacacaaagttggcagtaagatctgagtctggacaatccgcaatcagtttcatatatctgatggagatgatgaacaagtttgggatacacaaattaacaggtgatcaggatacatgttacagttggtacggttaattacacataaacagcgcaaacggcataatcaccacacgacacgaaggagaacgaacgacatggtgagcaacatggagaaggaacacggccaacagaaagtacacctggaactctaagtctccttttcctttggttcagggagagacttcctgaaccaggggatcagaacagaggtcctcttctggtacagcctgtaggcctctgcccggtgctcctgcttcagcatgcgccgctcgacgagcacggtgacgtagccgaggcacatgct

SEQ ID NO: 318 - DNA, 480 bp, Triticum aestivum
  Clone ID: uC-tsfl189008a06b1
cccacgcgtcctcccacgcgtccgcccacgcgtccgagagaagcaaactggaagcatctacgagcactgggatattcttcctcccaaggaaatcaaggacccagaagctaagaagccagaggactgggatgacaaggagtacattcccgatcctgaggacgtcaagccagagggctacgatgacattcccaaggaagtcaccgatcctgatgctaagaagcctgaggattgggatgatgaggaagatggtgaatggactgccccaaccatccccaacccagagtacaagggcccatggaagcaaaagaaaatcaagaaccctaactaccagggcaaatggaaggcacctatgattgccaacccagacttcaaggatgatccttacatctatgctttcgacagcctgaagtacatcggaattgagctgtggcaggttaagtcaggaactttgtttgacaacattctcatcactgacgatgc

SEQ ID NO: 319 - DNA, 268 bp, Triticum aestivum
  Clone ID: uC-tsfl189008a09b1
ggctcatggcagcgcaaagcgtgtgttagctgatgtgatgttacaccgtagaatcatcatcgttcgtgacgataataatgatccgacgagaacctctattgtcattgttctgttgtcattgtgtagtttactctgtatctgaactcggtttagtctgcggaaccgtactgctatgatgaatgtgtcgatgtaaatcgtggctgtcgtgcctgtctgactgatacattgttatcgtagtcgataaatgatatcatctgtgtcgtctcag

SEQ ID NO: 320 - DNA, 454 bp, Triticum aestivum
  Clone ID: uC-tsfl189008b01b1
gggttctggtgttggtgtttcctttgttgggtcaaaaggattatctcaaggtcttttagttactgtagctatagcagtgcacaacatacctgaaggcctggctgtaagcatggtactatcatctaggggtgtctccccacaaaaagcaatgctatggagtatcataacatctttaccacagccaattgttgctgtgcctgcattcctttgtgccgatgcatttcagaaggtgcttcctttctgtactggttttgctgcagggtgcatgatatggattgttattgcagaggttcttcctgatgcttttaaggaagcaactccatctcaagtagcctctgctggaacacttgctgttgcttttatggaaacattaagtaccgtgcttcagggattcacggatggccacggcttggaagatacatcaggctttttggtatcacttgtatttggtctt

SEQ ID NO: 321 - DNA, 451 bp, Triticum aestivum
  Clone ID: uC-tsfl189008b02b1
cccacgcgtcctcgcctccaccccacccgtcccgacccctctcctccaaggtaagcccgcggcggcggcgagcgagcgagcggcggcgatgacgacccgcttcaagaagaaccggaagaagcgcggccacgtgtccgccgggcacgggcgtgtgggcaagcaccgcaagcatcccggaggccgcggtaacgccggaggcatgcaccaccaccgcatcctcttcgacaagtaccatcccggctacttcggcaaggtcggtatgcgctacttccacaagctcagcaacaggttctacacaccgacggtcaacgtcgagaggctctggtccatggttccgtccgacaaggcggcggaggccggcggcgacaaggcccccgtggtcgacgtctcgcagttcggctacttcaaggtgctcggcaaggggatgctgccggagaagcccatcgtcgtc

SEQ ID NO: 322 - DNA, 269 bp, Triticum aestivum
  Clone ID: uC-tsfl189008b03b1
ctcctaatacgttgtaaaatgtactacagcaaccaaactttccagcagaatgttagcagtgctttgtaacttaaaaaaaaaaaaaaaaaaaaaaaaaaaaaaaaaaaaaaaaaaaaaaaaaaaaaaacaaaaaaaaaaaaaaaaaaaaaaaaaaaaaaaaaaaaaaaaaaaaaaaaaaaaaaaaaaaaaaaaaaaaaaaaaaaaaaagggggggccctttaaaaaaaaaaaaaataaacacccggtgcatggaaaaaaaaatttttttt

SEQ ID NO: 323 - DNA, 486 bp, Triticum aestivum
  Clone ID: uC-tsfl189008b04b1
tttggctacatccgtctttctgaaagacttcggaaaacagcaagcgcacccgcaaaggctcctccacgggctgatgtgattaaaagtctgaaaaatggcattgtgctcaatattcttgggatgggcgcagctgttctcggtatgcaggcacttgttggtgctttggtagcaaaagcccttactacctccgcagtcccctattatcaggcaacttccgccggccaaagtcctgttttggctctagatgtattcctggttcaggcctcagcaaacaccatactgtcgcatttcctaggtgtggcgacttccctggagctgctccgttccgtgtcaatcgccccgaccgagcctgctgcgacatgagccaggagcccaagagctgctggattcctttactttgcacttgttttcctttctccctgactgcctaggaatagcatctcgtgtgcgccggtattatgtcttgacatttcggcttaaatgagc

SEQ ID NO: 324 - DNA, 79 bp, Triticum aestivum
  Clone ID: uC-tsfl189008b05b1
cccacgcgtccgctgctactttcagcgttgttgagttgtaattgatgctgttttgcgtgaacatgggtaccttatggtc

SEQ ID NO: 325 - DNA, 427 bp, Triticum aestivum
  Clone ID: uC-tsfl189008b06b1
cccactcgtccgtcgccgccagcgccacagcctccaaaccctcgatctcccgcatcggagctccctgcccccaaccccccacccccacccaaccatggcggaccgcggcggcgagcgtggtggcgaccgcggaggcgagcgcggcgggttcggccgcggcttcgggcgcggcgggcgcggggaccgtggcgggcgccgcggcggccgtcgtggccctcgccaggaggaggagaagtgggtgcccgtcaccaaactcggccgcctcgtcaaggagggccgcttcaccaagatggaggagctctacctccactcgctacccatcaaggagcaccagatcgtggagcagctctgcccggggctcaaggacgaggtgatgaagatcacccccgtgcagaagcagacccgcgccggccagcggacccgcttc

SEQ ID NO: 326 - DNA, 297 bp, Triticum aestivum
  Clone ID: uC-tsfl189008b07b1
cccacgcgtccgggagctgcagatattcaacaagaggtggaaggaggcggtggcggaggacatgtgctggacggacccctacccgcagccgccgacgccgacgcccaagggatgacccacggtgcccgccgccggcgatgtcctttgcggttgagtagatgacatagaagatacatcaaaatttacaggtctagagagcttcagataacatgtcatgtacagatctctttctccccggtcaataagataggttcaaagacgatgtaattatcataattttcggtaaaaagatggatt

SEQ ID NO: 327 - DNA, 183 bp, Triticum aestivum
  Clone ID: uC-tsfl189008b08b1
cccacgcgtcctggaatgtgaggctattttggcttgttgatgttgctggtgtgtgtttttctaaaaaaaaaaaaaaaaaaaaaaaaaaaaaaaaaaaaaaaaaaaaaaaaaaaaaaaaaaaaaataacaaaactaaataaaataaaaaaaaaaaaaaaaaaaaaaaaaaaaaaaaacgggggc

SEQ ID NO: 328 - DNA, 478 bp, Triticum aestivum
  Clone ID: uC-tsfl189008b09b1
cgcgcgcgccccgccgcggcatcgtcgtgtgcagcgccgcggcggcggccgaggcctcggaggcggagcccgtggagaagttccggctcgacaacctgagcccgcagaagggggcgcggcggaagccgaagcggaaggggcgcggtatctcggcggggcagggcgccagctgcgggttcggtatgcgcggccagaagtcgcgctccgggcccggcgtccgccgagggttcgagggcgggcaaatgccgctctaccgccgtcttccgaagctccgcggaatcgccggcggaatgcatatcgggttgccaaagtacgtgccgttcaatttgagggacatagtgcagggtgggttcaaggatggcgatgagatttccttggagtccttgaaatcgaggggcttgatcaatccatccggcagggaaagaaagcttccactcaagattttgggagatggtgatctatcagtcaaattgaacat

SEQ ID NO: 329 - DNA, 491 bp, Triticum aestivum
  Clone ID: uC-tsfl189008c02b1
tgaggaacaagatccttgccgcggtgagcaggagggacgccttcatgctgcgtctcatcgacaacgagcgccggaggcttgacgatggcggcgccgaaggcgacaagaagagcatgatcgccgtgctgctcactctgcagaagacggagccagaggtgtacaccgataccatgatcatggctctctgcgcgaatttattcggggctggaacggagaccacgtcgacgacgacggagtgggcgatgtcgctgctgctgaaccacccggcggcgctgaggaaggcgcaggacgagatcgacgcggccgtggggacctcccggctggtgaccgccgacgacgtgccccggctggcctacctgcagtgcatcgtgagcgagacgctgcggctgtacccggcggcaccgatgctgctgccgcaccagtcctcggctgactgcaaggtcggcggctacaacgtgccgagcggcacgatgctgatggtgaacgcgtac

SEQ ID NO: 330 - DNA, 225 bp, Triticum aestivum
  Clone ID: uC-tsfl189008c04b1
cccacgcgtccgcccacgcgtccgctctgcatgctttaccatgcggagctaaaattacgctgggcgcctattagtagaatttggcattggttttgtgtcgatgccggggttcagagctaaaattttattctcacgccaagactcgtatcaagagttgttttttagaggctgtataccgaactactgtcgatcatatcaatatgaatagaaatgattttttgtttc

SEQ ID NO: 331 - DNA, 260 bp, Triticum aestivum
  Clone ID: uC-tsfl189008c06b1
agaatgtgagaccattaacacggttaaagctaaactgcttgaagtctaggcaaaaagaggtactctttctacaactatattagtattagtaccgaatttaaacgggaaatagctaatgtaaaatttatctgatatagaacactcatatcgataaaatggtttgaactatttactagaaaaaaaaagggggcaccctgcccttttttaaccaatgccgaatcgacgacctatgtataaaaaagagaaattttttggatttg

SEQ ID NO: 332 - DNA, 76 bp, Triticum aestivum
  Clone ID: uC-tsfl189008c07b1
gtagtaaagtaattaatatcatatgtcaactgtctctgtgtgatctttagcatttgctaattgattcgattaaaaa

SEQ ID NO: 333 - DNA, 305 bp, Triticum aestivum
  Clone ID: uC-tsfl189008c08b1
ctctgttcgaaatctttggggacgattctgtattacaatttggtggaggaactttaggacatccttggggaaatgcacctggtgcagcagctaatcgagtggctttagaagcctgtgtacaagctcgtaacgaagggcgcgatcttgctcgcgaaggtaatgaaattatccgagcagcttgcaaatggagtcctgaactagccgcagcttgtgaagtatggaaggcgatcaaattcgagttcgagccggtagatactattgataagtagataaaactaaagataaagaagagaaggtattactcc

SEQ ID NO: 334 - DNA, 317 bp, Triticum aestivum
  unsure (1)..(317): unsure at all n locations
  Clone ID: uC-tsfl189008c09b1
gaccgaaatctttggggacgattctgtattacaatttggtggaggaactttaggacatccttggggaaatgcacctggtgcagcagctaatcgagtggctttagaagcctgtgtacaagcttcgtaacgaagggcgcgatcttgctcgcgaaggtaatgaaattatccgagcagcttgcaaatggagtcctgaactagccgcagcttgtgaagtatggaaggcgatcaaattcgagttcgagccggtagatactattgataagtagataaaactaaagataaagaagagaaggtataaataaaaaagaaacgaanna

SEQ ID NO: 335 - DNA, 398 bp, Triticum aestivum
  Clone ID: uC-tsfl189008d01b1
cccattcgtccgtggacatcggccgagaaggttccggaaggatgcctcgcgcggggttgtcggcggggtcgagcaaggcggacgtggccatcgacctcgggaacccgctcctcaaccgcaccgtcgacggcttcctcaagatcggcgccgacggcgcctgcagggtggccgccgaggacgccttcgactgcctccaaagtgggagtgtctcgaagcacaagcttgagaagacactggaaaaaatgtgcaaggagggcgcatattggggtgctgttgctggagtgtatgtaggcatggagtatggagtggaaagggtccgcggagagtatgactggaaaaatgcgttgattggaggcatcgtatgcggcgccctgatctctgctgctagcaacaacaaa

SEQ ID NO: 336 - DNA, 428 bp, Triticum aestivum
  Clone ID: uC-tsfl189008d02b1
cccactcgtccgcggacgcgtgggctgatgtgcaaaacccatcggccgcgctgacggaggaggcgcccgcggtggagacgcccgtcgccgctgaggaggtcgcgaagacggaggaggtccccgcgccggcggagaccgaggtcgaggcgcctgctgcccccgtcgaggtcgtggagaccaaggaggaggcaccggccgccgccgagacggaggatgccaaggaggccgagccagcagctgcggccgagccggaggccgaggcgcccaaagagacagaggcgccagccgtggtcgagacagagaccaaggaggccgtggctgaggcagagccggcggcggccggggaggtgaaggaagaggcggcgcctgctgccgaggccgagccggccgctcccgctgctgctgaggaagcaccggtggaggcagcc

SEQ ID NO: 337 - DNA, 485 bp, Triticum aestivum
  Clone ID: uC-tsfl189008d03b1
gcaagaagcactcaggaagctcctagccaacaccaatcaaagcctccatccaatcccaagcaacctcgaagatgtcttgctgcggaggaagctgcggctgcggcagcgcctgcaagtgcggcaacggctgcggcggctgcaacatgtacccggaggtcgaggccgccggcgccaccctcctcgtctccgccactgccacccacaaggcgagctccggcgggatggagatggcggcggagaacggcggctgcggctgcacccagtgcaagtgcggcaccagctgcggctgctcctgctgcagctgctagatcattgatcatgcatgcgccgcgtgcatcatatctatgatctatctaccatctactaccatgtaacgctgcctgatcgagggtctttgtatgtatgtacgcacctgcctgcatgagcagagcgggtgccatgccatgcatgtaaacccctaaataaaatctcccgtggttatgctt

SEQ ID NO: 338 - DNA, 263 bp, Triticum aestivum
  Clone ID: uC-tsfl189008d06b1
agctttcccaacaaccattcccccagcaaccacaccaacctcaacaaccatatccacaacaacaaccatatgggagtagtcttacaagcatcggtggccaatgaaatgaacacctgtaatacaagacggatggatcatcgttgtttagtcaatgagcgttcaatgtaacgatgataaataaagtgatgtgcaccataatgtgtaaccccgacctatactagttcaaacatgggaataaaagacaaagaaagttcttgtcacat

SEQ ID NO: 339 - DNA, 420 bp, Triticum aestivum
  Clone ID: uC-tsfl189008d08b1
gccgtcggcccgccgccgcctttctggcagcttctcgggggcctgcttcctgtgccggagggagctcagtcccgacaaagacgtgtacatgtacaggggtgaccaggggttctgcagcgaggagtgccggggacagcagatcttgtcggacgaggcgagagagcacgaggccatgatcagcaaggagcgtcgaggtctggctcaccgtcgtcaccaccacgggccacgcccggcgccgtcgggggcgatccggggcgtgcggaggagattactggcggcagcctagcctgattatgcataataatgcatgcacgaacatgacatccatgaacaaatcgatcaagaacctatgatgctggaaagttaattacaagtaatcgaggggcaaatcaaggaaaccaatatgcgtatttgcatgta

SEQ ID NO: 340 - DNA, 447 bp, Triticum aestivum
  Clone ID: uC-tsfl189008d09b1
cggactcgtgggcggacgcgtgggattttcatcccctcgcccgccgccgccgccgctcccgccgctagaccagctcgccagcagcaatggcccggatcaaggtgcacgagctgagggggaagaacaagggcggagctgcagggccagctcaaggacctcaaggcggagctctccctcctccgcgtcgccaaggtcaccggcggcgcccccaacaagctctccaagatcaaggtggtgcgcacctcgattgcgagggtgctcacggtgatctcgcagaagcagaagtcggcgctgagggaggcgtacaagaacaagcgtctcccgctcgacctccgccccaagaagacccgcgccatccgcaggcgtctcaccaagcaccagctctctttgaagacggagagggagaagaagcgcgagaagtacttccccatgaggaagtatgctatc

SEQ ID NO: 341 - DNA, 428 bp, Triticum aestivum
  Clone ID: uC-tsfl189008e01b1
gagcgctcatatatcctcgagacctccagatctgtggtctgttgcagtctctgcctcctcacaacaacaagcccctgcagatggacaccgccatgcaccccgccgccggcgacgacgacgtcctcgccgacctgctcaccgtcggcaccggcaccgacaccgagggcattatttgtggtatgccagacttcaagatgggtggaaagaggggcgatgaatctgcccctactgatgctggtgatgaagatggcgaagatgatgacggggacgaggatggcgacttcgcggagggcgaagaggaaatctcggaaggagaggagtatgacaaccccaaggccagtgacgccaagaagaaacaaataggcgagggtgaggagaatggcgaggatgatgaggaagaacaagaggagcaggaaggtggaggaggt

SEQ ID NO: 342 - DNA, 298 bp, Triticum aestivum
  Clone ID: uC-tsfl189008e03b1
tcgcgcctcgcctcgcctcggctcggctcgtgcttgtgtaccatggatctgatggattcccctctatctatgcttctgttgatacttgatcgttgtacttcgtatcagtaattggaaagatgctgcatgcatgatgcatgcaattactgtaaaaaaaaaaaaaaaaaaaaaaaaaaaaaaaaaaaaaaaaaaaaaaaaaaaaaaaaaaaaaaaaaaaaaaaaaaataaaaaaaaaaaaaaaaaaaaaaatatagaaaaaaaataaaaaaaaaaaaaaataaaaaaagggggggccttt

SEQ ID NO: 343 - DNA, 221 bp, Triticum aestivum
  Clone ID: uC-tsfl189008e04b1
ggagtaagcaagggaatccagcattggttagaataacaggaaggaaatgagtattgtctattgtgtgtacaaagtattgttaggtcatgtccaaggttaagtctgtctctatgtcgttgtagattctcgtctacattcatgatctgtgtgttgttatctgttcaaatcaagtcatcaagtaagctgtcatgtaaactcatgtattagtgttatttgtaaaa

SEQ ID NO: 344 - DNA, 225 bp, Triticum aestivum
  Clone ID: uC-tsfl189008e06b1
gttctaactgaaaatgaagggtgactaccacaggtaccttgcggagttcaaggcgggtgctgagaggaaaggaaacattgctggctttggctctaaaaaaaaaaaaaaaaaaaaaaaaaaaaaaaaaaaaaaaaaaaaaaaaaaaaaaaacaaaaaaaaaaaaaaaaaaaaaaaaaaaaaaaaaaaaaaaaaaaaaaaaaaaagggcgcaaatggggggggttct

SEQ ID NO: 345 - DNA, 459 bp, Triticum aestivum
  Clone ID: uC-tsfl189008e07b1
tatccccccattctcattctgcacggcacagcacagcacagcacagcggagaagaggaaggagagcagagatgactgcgtccgtctcctacgggctgcgagcacttccgacgtggtccagctctgtgtccggtgacgaccactgctcggcgctggccatgtcggtgtcggcgcgggggccccggtggacgcggccccttcggacgccggcgaggatgggcaatgtaaacgagggcaagggcatcttcgcgcccctggtggtggtggtgcgcaacatcgtcggacgcaagcgcttcaaccagctcaggggcaaggccatcgcgctgcactcccaggtgattaccgagttctgtaagaccatcggcgctgaccccaagcagaggcagggcttgatccgcctcgccaagaagaacggagagaagctcggattccttgcttgacctgcctcacaatccccctt

SEQ ID NO: 346 - DNA, 438 bp, Triticum aestivum
  Clone ID: uC-tsfl189008e09b1
cacacaccgcacgcgtttgacattttccgcccaccaccaccggagggagcgagctccagccatggccgccaagtgctacccgacggtcagcgacgagtacctggcggcggtcgccaaggccaagcgcaagctccgcggcttcatcgccgagaagaactgcgcgcccctcatgctccgcctcgcgtggcactcggccgggaccttcgacgtggccaccaagaccggcggccccttcggcaccatgaagtgccccgcggagctcgcgcacggcgccaacgccggcctcgacatcgccgtcaggctgctcgagcccatcaaggagcagttccccatcctctcctacgccgacttctaccagctcgctggagtcgtcgccgtcgaggtgaccggcgggcctgaggtccccttccacccggtgagacaggacaagcccgagcc

SEQ ID NO: 347 - DNA, 413 bp, Triticum aestivum
  Clone ID: uC-tsfl189008f02b1
atgagcatcgccgaccgcctcctccgccagaacctcctcctggactgccaggtggacgtggccaaggcgagcttcgacgtgcggcagccggacaaagagttctggaagaaggtgtgcagggggttcctcaagggcaggctccagccgcagcagcagaagcagcaacataagctgcagctataggagtcggaggagtcggagccggcggcgagtccgagaagaaggccggtgccgccggaggaggaggaggaggaggacatagtagcgttactgagctgggggggttgcgattgcgagcctagaattaatccttatttttctgcttcggagtttgacatcgtcgtcgtcatcatcatcatcttgtacagaaaccgcctatttaatcgaagcattaataaagagcgatcggtgct

SEQ ID NO: 348 - DNA, 399 bp, Triticum aestivum
  Clone ID: uC-tsfl189008f03b1
cccacgcgtccgcccacgcgtccgcccacgcgtccggtgtgtgtactacgtgagcgtgagcagctcggcacggacgtccgtacgcgcgtgggggtcacccaccggggcacgcaggcagccgctgacgagggccaggccggcacggtggaccagcggcgagcgggcgcgccactgtgcgtgacacgcgtgcacatgcatggcgttcgtcgtggggcgctccccaacgggcagaagctgccgtgctgtggatctgtgttcgtgttggtgttcgtctcgtgatgtgtttgtttggttgtgttcggcgcgtggtgtttcttctcttgtcatgagactcggagcgtgtgtatggctctgttcgtttcatcttctctgctgtaatatatgagcgtttcatgtgca

SEQ ID NO: 349 - DNA, 83 bp, Triticum aestivum
  Clone ID: uC-tsfl189008f04b1
tcgccctttcgttcgctcctagcatgctatatacctacatagtacagccatggcccccaccgtgatggcctcgtcgtccacct

SEQ ID NO: 350 - DNA, 455 bp, Triticum aestivum
  Clone ID: uC-tsfl189008f05b1
ccaccgcgctcaactccaaggtcgtctcccagtactccggcctcctggcccctctcgctgtcgacgccgccctctccgtggtcgatcccgcccacccggagcttcttgatctccgcgacatccgcatcataaagaagctcggcggcaccgtggatgacaccgagcttgtccgcggcctcatctttgacaagaaggccagccatgctgccggggggccatctaggatcgagaatgccaagatcgctgtcatccagtttcagatctcaccgcccaagactgatattgagcagagcgtcatcgtgtcagactatgcgcagatggaccgcattctccgtgaggagcggaattacatcctagggatggtcaagaagatcaaggcgtctggatgcaatgtcctcctcatccagaagagcatcttgcgtgatgcggtgactgagttgtcgctgcactatctc

SEQ ID NO: 351 - DNA, 324 bp, Triticum aestivum
  Clone ID: uC-tsfl189008f06b1
cccatttcgaggccggcgacgagcgcgccaaggagttcgcgggcatcctcaagtccaacgaccccgtcggcttcaacctcgtcgacgtcctcgcctggggctccatcggccacatcgtcgcctactacatcctcgccaccaccagcaacggatacgacccacccttcttcggctgatccctcccatgtctgcctgcctgcgtgccgaccggaccggcttgctgttgtaatccgccgtgttttcattagttctctatacgctgatgatgtactatcatgtttgtatgtatgtgagatggtgaaagattaatctggacaagtagtg

SEQ ID NO: 352 - DNA, 487 bp, Triticum aestivum
  Clone ID: uC-tsfl189008f07b1
caagatgaagcctgccccgaagccgaagcccgcccccgtggccacctcgagcgtaggcatcgacgacgagctcgccaagtggtacggccctgacaggaggatctacttgcccaacggactccttgaccggtcggaggtgccggagtacctcaacggagaggttcccggagactacggctatgatccttttggtctgggcaagaagccagaggacttcgccaagtaccaggcctttgagctcatccatgccaggtgggccatgctcggcgccgccggattcatcatccccgaggcgctcaacaagttcggcgcaaactgcggtcccgaggccgtttggttcaagactggcgcccttctccttgacggcaacaccctcaactacttcggcaacagcatccccatcaacctgatcctcgccgtcgtcgccgaggtcgtcctcgtcggaggcgccgagtactacaggatcaccaacggactggaatttgat

SEQ ID NO: 353 - DNA, 394 bp, Triticum aestivum
  Clone ID: uC-tsfl189008f08b1
cccgttacgcggccatctcacaggacaatgggctggtgccgattgtggagcctgagatcatgctcgacggtgagcacggcatcgagaggaccttcgaggtcgcgcagaaggtgtgggcggagaccttctactacatggcccagaacaacgtcatgtttgagggcatcctcctgaagccaagcatggtgacccctggtgccgagtgcaaggacagggccacccccgaggaagtggccagctacaccctcaagctcctccagagaaggatccccccttccgtccccggcatcatgttcttgtctggcggacagtcggaggtggaggcgacgctgaacctgaacgcgatgaaccaggcgccgaacccgtggcacgtgttcttctcctacgcgcgggc

SEQ ID NO: 354 - DNA, 441 bp, Triticum aestivum
  Clone ID: uC-tsfl189008f09b1
gccttctcctagcaagctatatacctacatagtacagccatggcccccaccgtgatggcctcgtcggccacctccgtcgctcctttccaggggctcaagtccaccgccggcctccccgtcagccgccgctccaacggcgctagcctcggcagcgtcagcaacggtggaaggatcaggtgcatgcaggtgtggcccatcgagggcatcaagaagttcgagaccctgtcttacctgccaccgctcagcacggaggccctcctcaagcaggtcgactacctgatccgctccaagtgggtgcctcgcctcgagttcagcaaggttgggttcatcttccgtgagcacaacgcatctcctgggtactacgatggccggtattggacaatgtggaagctgcctatgttcgggtgcactgacgccacacaggtgatcaacgaggtggag

SEQ ID NO: 355 - DNA, 419 bp, Triticum aestivum
  Clone ID: uC-tsfl189008g01b1
aacgcacgcaaaggccgaggaggacaagctaggaggagcgagcagccatggcttcgtcggtggccgccgcggcgagcacgttcctcgggacccggctggcggacccggcgccgcagaacgggcgcatcgtggcgcggttcggcttcggcaagaagaaggccccgccgaagaaggccaaggcgcccccgaccaccgaccggccgctgtggttccccggcgcgcaggcgcccgagtacctcgacggcacgctcgtcggcgactacggcttcgaccccttcggcctcgggaagcccgcggagtacctgcagtacgacgtggactccctggaccagaacctggcccagaacctggcgggcgagatcatcggcacccggttcgaggacgccgacgtcaagtccaccccgttccagccctacgcc

SEQ ID NO: 356 - DNA, 357 bp, Triticum aestivum
  Clone ID: uC-tsfl189008g03b1
tcgcccattcgtccgcccacgcgtccggaaaaacagttttccgaagcttcgagccagggcggttggcggcagccgcggggacgatggtcgggatcttctccaggttctcttccggcgccggccaccgccgcgccaagagtgccgtggaggttgtggagacattggcgcccaacatggagaccggggagtctgacccggcagctgatcctggagatagcccgcacggcattgaggtcggcatcgagttcaagccggtggagcaccctgtggagcctgtcaaccttgaccaaccagtgaaatgcccgcttcctgagccatctatactgcatgatgggaggatatggcaagagaggatgt

SEQ ID NO: 357 - DNA, 445 bp, Triticum aestivum
  Clone ID: uC-tsfl189008g04b1
actaattgcccttcccgaatcaataggaggctgcaagtccctggaagaattgcaggctaatggaaatacaatcgaagatgtgccctcatcaatttgcaaccttgcttgcctcaaatctgtatcattgaatggaaacaaaattcgtcagcttcccccaaacttgctgaaggattgcaaggctcttcagaacttgtcactgcacagcaacccaatctcgatggaccagtttcagcaaatggatggattcggggagtttgaagcacgcagaaggaagaagtttgacaagcagattgattcaaatgtgatgatgggctccacagccctggatgaaggcattgatttacgctagttttgcgagtgaacttattttttcctcattagtcggaagtaattgtaatctttgtatatatcagtctccccacaatctgattcggtaaagaagtca

SEQ ID NO: 358 - DNA, 401 bp, Triticum aestivum
  Clone ID: uC-tsfl189008g05b1
tcgatccttctctcggttcttagtttcttttccaccacccacaggccaaggaggatgtcttgctgcggcggcaagtgcgggtgcggcgccggctgccagtgcggcaacggctgcggcgggtgcaagatgttccccgacgtggaggccaccgccggcgccgccgccatggtcatgcccaccgcctcccacaaggggagctccggcgggttcgagacggccggggagaccggcggctgcgactgcaccacctgcaagtgcggcaccgcgtgcggctgctcctgctgcagctgcaactgagccggcgcccaggaggccggcagaggcgagcacgaggatgaggaggaggacaagcaagcaagcaccatcgtcaccagttcacagcatgcgcccgcgcgcgcgct

SEQ ID NO: 359 - DNA, 349 bp, Triticum aestivum
  Clone ID: uC-tsfl189008g06b1
ttgcggacgcgtgggcatcgacgaccttgtgtctgtcgacacccttattgaggaagtgctctgtgaggcgcccatcaacgagtatgtccagtcgtgtgacatcgttgccttcaacaagatctagaatctttgttcgcccacctgttgctgctggattcttggtactgggattggttgatctggaaaacattatgtcgtcccatttagttacccctcttacagaaatgctactggttttgtttttgagtgatgccctggtcttgaatgcctgctacctttaaatagttgaattgctgagcggtttgtaatggcgaaacatctatcatgtggagtaaaatcagtctttgat

SEQ ID NO: 360 - DNA, 447 bp, Triticum aestivum
  Clone ID: uC-tsfl189008g07b1
gccagccatgggaagcaagggcttcaagggtgtgatagtgtgtttactcatactggggttggttctggaacagctgcaggtagaaggcaagagctgctgcaggagcaccctgggaagaaactgctacaacctttgccgcgcccgtggtgctcagaagttatgcgcaggcgtctgtaggtgtaaaatctcaagtggcctaagctgccctaaaggcttccctaaattggcccttgagtccaactcagatgaaccagacaccattgagtactgcaacttgggatgtaggtcttccgtgtgtgactacatggtcaacgcagctgctgacgatgaagagatgaaactctatgtggaaaattgtgctgatgcttgtgtcagtttctgtaacggtgatgctggcctcccatcccttgatgcgtactgatgcgtgtccatggtctgagatttcac

SEQ ID NO: 361 - DNA, 290 bp, Triticum aestivum
  Clone ID: uC-tsfl189008g09b1
ctccgagtacgaaaagattgttcatgatgctccgccaccgcattcgcatcgaataactgatatattcagcttcaggaggtcgagacctttatatggttcattcaaaggtggtgctggtcagatgaagctataggacaactttgtttcgagtcatatttacatgtcacacttgaattgttcctatagaaaataatgtgtgggacaaatgttcgcacttttggctaggctgaatattccataccaaatctagtagtatcagtttgaaattttacatgttgtattcttctcta

SEQ ID NO: 362 - DNA, 413 bp, Triticum aestivum
  Clone ID: uC-tsfl189008h03b1
cccactcgtccgcggacgcgtgggctcctcctagcaagctatatacctacatagtacagccatggcccccaccgtgatggcctcgtcggccacctccgtcgctcctttccaggggctcaagtccaccgccggcctccccgtcagccgccgctccaacggcgctagcctcggcagcgtcagcaacggtggaaggatcaggtgcatgcaggtgtggcccatcgagggcatcaagaagttcgagaccctgtcttacctgccaccgctcagcacggaggccctcctcaagcaggtcgactacctgatccgctccaagtgggtgccttgcctcgagttcagcaaggttgggttcatcttccgtgagcacaacgcatctcctgggtactacgatggccggtattggacaatgtggaagc

SEQ ID NO: 363 - DNA, 462 bp, Triticum aestivum
  Clone ID: uC-tsfl189008h05b1
agaaggtgctctggctgaggagaacatgcgtggcatttgctttgaggtctgtgatgttgttctgcacactgatgctattcacaggggtggtggtcaggtcatcccaacagccaggagggtcatttacgcttctcagctcactgctaagccaaggctgctggagcctgtgtacctggttgagatccaggccccggagaatgcactcggtggtatctatggtgttctgaatcagaagagagggcatgtgtttgaggagatgcagaggcctggtaccccgctgtacaacatcaaggcttacctcccggtcatcgagtcgttcgggttctcaagtaccctcagggcggcgacatccggccaggctttcccccagtgtgtgttcgaccattgggacatcatgtcttctgatcctttggaggccggctcccagtctgccacacttgtcacggagatccgcaagcgcaa

SEQ ID NO: 364 - DNA, 463 bp, Triticum aestivum
  Clone ID: uC-tsfl189008h06b1
ggaacatctcgtcttcgccgtgaatcgcgtggtggccgaaactctagtagccaacttctccagacttctccagtcatcgtctgcggcaattgcagatcgccggagtggcctcctctggccatagagaggccttgccgtttgccgccgctgtcgtcggcagtcatgtggcggattgaagcgccggagggcgccgcttcgacgcgcctacagaggagggcgttgtcaaccatggggtgcctctggtgctgcgccgctggagcgctgtcgaggccgagggtcctcgtgtccttggggccggagggagggtcagggacggtggagccgtcgagttcttggcctaattgctctctggaagaggcgtgcgtgataacgtgttggagagaatcgagagagaggagcgaatggaaaacagatatatgaatgaacagttattctattgatcgaagattggggtatttatacc

SEQ ID NO: 365 - DNA, 400 bp, Triticum aestivum
  Clone ID: uC-tsfl189008h07b1
tcggctatttagaagtccagccattagccactcaccaagctgattatatagatagcaccggtcgcctatcccctcgcctcatcttatccccctccgtccccgcttcctcctcctcttcctcccgctcactccccgaagcgaagcctcgagagctcccaatggcttccaccacgttctcctccgccttctccatcctctctctcccctcttcctcaccatccccctccgcctcggcccccaggaccctccccgtcgccaaccgccgccgccgcgccgtcgccgtcgcctccaccgtcactgagtccccgaaggtccttgagctcggcgacgccattgccgggctcacccttgaggaggctcgcaaccttgtcgaccatctccaagaacgtcttggcgtctc

SEQ ID NO: 366 - DNA, 171 bp, Triticum aestivum
  Clone ID: uC-tsfl189008h08b1
tcggcgcgatcttgctagcgaaggtaatgaaattatccgagcagcttgcaaatggagtcctgaactagccgcagcttgtgaagtatggaaggcgatcaaattcgagttcgagccggtagatactattgatcagtagataaaactaaagataaagaagagaaggtataacat

SEQ ID NO: 367 - DNA, 327 bp, Triticum aestivum
  unsure (1)..(327): unsure at all n locations
  Clone ID: uC-tsfl189008h09b1
cccactcgtccgaccggaagagacaatgactggcatctgcaagcaagcaattgaatgcattatggcggcatcataaatcaggatacagttcagaagtagtttgagatctacaaacaagaaactggctgncgcataaatgagagcatagtggcattaggttcacatcacatggttgattagtttcttcagaagttatttgaacaaagacacatatattgttatcgtaaaggaacctgtactgttgtaatgtgacaaacagaagatttattaccatgcaaaccggtatgtccgtagcctgttacaagcacggaattgcaatgatcaana

SEQ ID NO: 368 - DNA, 418 bp, Triticum aestivum
  Clone ID: uC-tsfl189009a07b1
cggacgcgtgggcggacgcgtgggcggacgcgtgggcgccaactacggctactccccaaactacgtcactgacctgagctacaacgcgcagaagctgggccaagcggcggcagcggcgccaggcgcgggcgggtcctacatgcagccgcaggggcacttctcgtacccggcggcggcggcgcagggaggcatgctcgcgcccaacggcatgatgcccgtgtacccctactaccactatcatcactaccaccacggctcgcaggggctgggcgtcccggccgcgcgcttcttcccgccggtctccgccgccgtgcccaccgttcccgccatcatctccaagcccaccgtcatggtgcctcccaaagtggagcaggtggctgggtgcagctgaaggcacggtgacggtgcgaggaattag

SEQ ID NO: 369 - DNA, 81 bp, Triticum aestivum
  Clone ID: uC-tsfl189009a10b1
ctgttaattgtttgtgtacgggtgatttaagtaacctgtgcacttgtgcttataattaatcagttgaagcattgcatgaat

SEQ ID NO: 370 - DNA, 490 bp, Triticum aestivum
  Clone ID: uC-tsfl189009a11b1
gggagattagaggagttcgttctaaaattggcaacaacgagtgtcttctgtgctgtgttgattttttctttcatattgtggagacgcttgttcgtttcttcaacaaatatgcatatgtacagatagctgtcaacggacagagtttcaatcgttcagctagggatgcttgggagctgttccagtcgactggcattgaagcacttattgcttatgattgttctggtgctgttcttttgatgagcacaatattaggtgggttaattacaggaacttgtactggtgtttggacatatttcacacaacgtgataaagcaattatggttggctcgacctctatgctgattggcatgatactggttgggctagctgtcgtggttgttgaaagcgcagttacatcaatatacatatgctatgctgaggaccctcttctaattcagagatgggatcctgaattttttgagcaaatgtcagaagcactgcaccagcgact

SEQ ID NO: 371 - DNA, 471 bp, Triticum aestivum
  Clone ID: uC-tsfl189009a12b1
gtcgaactccgctctttcgcccactctgaagggcagcgaggtgtgcacggtttcgccgagcgtgggcgagtggagcccggagctggtgaaccctcacgtggtccgcgcgatgaaaggtcgcatcgaatggccccagggcgcgaagaagcagagcctgaagtcaaagcctctggattcgagattcgacggccgcaaggtccagctgcgccaagcattgaagcagaagatataggatggcccgtccacacgctgtatccaatttctgaatataggacgatcttgccttggaagggtgcctggtctgtaagaaggaatgacttgtagtaacattggtccctgaaatgggtgcctatcatcggctgtacctaattgatgttctgatagccctttagctcgcatagaatattcacgacgcccttgtaatcaaatgtagtattagtagtgtctttcaatcaaatgcattacttaggc

SEQ ID NO: 372 - DNA, 296 bp, Triticum aestivum
  Clone ID: uC-tsfl189009b07b1
gcttcatcggccagcgcccacacgagcagctccccaccgccgactactgaaaatatcaatccgaatcccatccatcagtcatcgccatgagagactgaaattgcttcaagaatcaagcaggtgttatcgtgtcatcagcaagcccgtttagtttcatcgtctctctctcttgtctttgagaaattcagggtaaacagtgagtcagtcagtcagtcaggaataatctcttgtcttggtgtacgtacgtcctcaattatgaatgcttctattccatggtcatgattgatgtttgtcca

SEQ ID NO: 373 - DNA, 412 bp, Triticum aestivum
  Clone ID: uC-tsfl189009b08b1
ctctcacgcgcatcctagcaaccggcggcggcaggcggaaggcgaacaagaaggcggcgacgatggggcactccaacgtctggaactcccaccccaagaactacgggcccggctcccgcgtctgccgggtctgtggaaactcccatggactgatcaggaagtatgggctgatgtgttgcaggcagtgtttccgcagcaacgccaaggacattggcttcatcaagtaccgttaattcacctgttcctggtaccctgaagtgaagctgatcagggatgaaggattggagcacttaatagaatgcttaatttcaattccagtaatgtttgctcgtggttttatgttttgatggatactgaatgatgtaattgttgaacatgagttaattacccatggagaagtcttttatcgttc

SEQ ID NO: 374 - DNA, 283 bp, Triticum aestivum
  unsure (1)..(283): unsure at all n locations
  Clone ID: uC-tsfl189009b09b1
ccatccttcctatgcttatgtgccgagcctgcgaggagctatgtccaagtgaaaacaggctgatgctggtattgtatgtgtacacaagaataaacacggtgctgtcacgaggtcctggaacctggagttgctgctgagctgctctgtagtttacctggtatattctggtgcattggcgaccaggctgcagtgatctcagattggaatatccgtctctatgaaggaacatactttgtaaacatatgttgtcgaacctttgctttgtttgccggacaagtnttgt

SEQ ID NO: 375 - DNA, 448 bp, Triticum aestivum
  unsure (1)..(448): unsure at all n locations
  Clone ID: uC-tsfl189009b10b1
acctcgccgtttcagtcggttcccatcccccctcgcgtgcgtttcttcttcctccaagtccaggccgggtgggagagaggcggggcgaccgacgatgaaggagtactggacgatgctggcgtccctcatgggcgcgctggcgttcctgcaaggggtgctgcacgccgtgttcccggcggagctgcgggcggcgctggcgcggctgctcgggcgcctcacccgcgccttctcgccctactgctacttcgacgtcacggagacggacgggatgagcaacaacgagatctacgacgccgtgcagctctacctcagcagcacggccgcgccggcatcgggggcccggctcagcctcacgcgcccgcacaacgccacctncttcaccttcgggctcgccgccagcgaccgcgtcgtcgacgccttccgcggcgcggccgtcacgtgggagcac

SEQ ID NO: 376 - DNA, 264 bp, Triticum aestivum
  Clone ID: uC-tsfl189009b11b1
gctttgcaccgttgctttgtcggccgtgctgcctgtcgccgtaaggggcaggccggcggcgaggaggaggagcgccaccgttgctggcggcggcagaaggaccgtgggtgccggcgtccgggcatcggcggcggcggcgccggaggcggactacagctccagcgtctcggtgttccccatggaggcctgcgacctggtcggcggcgaggcgtgcgaggcgcatatgtacccggagacgaagctcggcgccggtgcaggcgcccc

SEQ ID NO: 377 - DNA, 419 bp, Triticum aestivum
  Clone ID: uC-tsfl189009c07b1
cgctcactggctcgcctcctctcacccatggccggcgccgccacgctcgtcctctccctcacggccgccggcgccgttcctcttcgcgcccagcttctcacctggacggcccccgaccccgcggccggccccgccgtctggacgtcgctgtcggacgccgtcatgggcgacggcgccgaccagccaccccgccgctggatcctccttccccggccggcgccggccatggcgaccaccacgcgtacaagtacaaaagccctcatgctccaatgagatccagcgagacaggttcgtccccatctagcccggtcagcgctcgtaccctgcatcgaccagatccactcgacgtcgtcgtacagatccgcacgatgtcgacggtcagtgttgaggagcgcctctgccaccactcctctgggatc

SEQ ID NO: 378 - DNA, 467 bp, Triticum aestivum
  Clone ID: uC-tsfl189009c08b1
ccctcgcgtccgcggacgcgtggggggcattttcttgcatccacgacggcaatggccaccgctgatgtccagaacccgacggccgcgctgacggaggaggcgcccgcggtggagacgcccgtcgccgccgaggaggccacgaagacggaggaggtccccgcgccggcggaggccgaggtcgaggcgcttgtccccgtcgaggttgaggagaccaaggaggaggcgccggcagccgctgagacggaggagaccaaggagcccgagccagcagctgccgccgagccggaggccgaggcgcccaaagagccagaggcgccagccgtcgtcgaggcagagaccaaggaggccgtggctgaggcagagccggcagtcgtcgaggaggtgaaggaggaggcggcgcctgctgccgagccagaggtgccggccgtcgccgaggaagcaccggctgcagcggagcgggcacccgc

SEQ ID NO: 379 - DNA, 479 bp, Triticum aestivum
  Clone ID: uC-tsfl189009c10b1
gcttacaagcaccagcgaggagagtcgaggcgcgcacgtgggtgggtctgcgcgcgccgtccgcctcctccaccaggccgccgtcgcggtcgtcgtcgtcctagatccaacagcctacgtccctgctcggacgcgtgcgccgagcggagggacgagcgatggccgccggccgtgggctcccgctcctcctcgtcatcgccgccctcctggtcgggctcgcctccgcttcccccttcatctccgacggcgtgttccaggcgagcgccggatctaccacggggaggaccttgctgcaggccaagagggattgtcctgtgaacttcgagttccaaaactacaccgtcatcacaagcaggtgcaaagggccgaaatatcctcctaaagactgctgtgattctttcaaggaatttgcatgcccgtttaataactacatcaatgatgaaagcaatgactgtgcatccacaatgttcagctacatc

SEQ ID NO: 380 - DNA, 442 bp, Triticum aestivum
  Clone ID: uC-tsfl189009c11b1
ctctcctggtcaccggcgagaaaaagcaagatggactacatgaatgggccaggccggaaccacctgttcgtccctgggccggtgaacatcccggaccaggtgatccgcgccatgagccggcagaacgaggactaccgctcgccggcgatccctgccctcaccaagaccctgctggaggacgtgaagaagatcttcaagaccaccaccggcacccccttcctcttccccaccaccggcaccggcgcctgggagagcgcgctcaccaacacgctctccccgggggaccggatcgtgtccttctcgctggggcagttcagcctgctgtggatcgaccagcagcagcgcctcggcttcagcgtggacgtggtggagtccgactggggctacggcgccgacctcggcgccctcgagtccaagctccgcactgactcgcagcacacca

SEQ ID NO: 381 - DNA, 407 bp, Triticum aestivum
  Clone ID: uC-tsfl189009c12b1
cggtcgcgtgggcgggaagatatcggacatggacatccagcggctggccatcgaggccggcgagcacttcacgctcgacgaggtcagagagatgatccaggccgccgacgaaaacggtgacggcgaggtcgacatggaggagtttatgaggatgatgaagcggacgggcttcggcactggattctagtagaacagagcagaggacaagctgaatgaaccgacataattcgcgggttgtacttacttgtacatgtacctactcgatcgtgctgcatacctacatgtagtcacgcatgttcgcacctgggatttcttttgcgaggtgtttgcgtacatgtaccaaaattacctggcgccgacaagtggtgctgttctgctgccaaaaaaaaaatgggtttgcttatctc

SEQ ID NO: 382 - DNA, 141 bp, Triticum aestivum
  Clone ID: uC-tsfl189009d07b1
ctctgttctcgcatcgatgaagaacgtagcgaaatgcgatacctggtgtgaattgcagaatcccgcgaaccatcgagtctttgaacgcaagttgcgcccgaggccactcggccgagggcacgcctgcctgggcgtcacgcc

SEQ ID NO: 383 - DNA, 63 bp, Triticum aestivum
  Clone ID: uC-tsfl189009d08b1
aaatataaaaaaaaaaaaaaaaaaaaaaaaaaaaaaaaaaaaaagggaggacgaatctaaaga

SEQ ID NO: 384 - DNA, 74 bp, Triticum aestivum
  Clone ID: uC-tsfl189009d09b1
gagtttagcaatgttgggctcatcttccgtgagcacaacgcatctcctgggtactacgatggcctctctccctc

SEQ ID NO: 385 - DNA, 435 bp, Triticum aestivum
  Clone ID: uC-tsfl189009d10b1
gggttatggccagcctattggtcgctacgatgatatgtgggctggatggtgcaccaaggtgattactgatcatttgagcctgggtattaagactggtctgccctacatctggcacagcaaagcaagcaacccatttgtgaacctaaagaaggaatacaacggcatcttctggcaggaggagctgatccccttcttccagtccgtgactctctcaaaggaggccaccactgtccagaagtgttaccttgagctggccaagcaggtgagggcgaagctgggcaaggtggatggctacttcaacaagcttgctgatgccatggtcacatggatcgaggcttgggatgagctcaacccaccaaagggtgcaattaccaccaccaacggccctgctctgaagagcaagtgagactgtgagaggcagtagcatacatatac

SEQ ID NO: 386 - DNA, 441 bp, Triticum aestivum
  Clone ID: uC-tsfl189009d12b1
cagttgccgccgccgcctcctcttcccccaatgcagtggaggacaatgagacaaacaacttccctagatgaagaaagagactctacagctaaagacatgcttaagaatgcctcaagtctaccacctgtacacactcctgtgcaggaacaatatcttccgccgtgtgcaccaccatttccacaaggaaatgttaaggaagtgaaccatcagaaagttgatgtgatcaaagaagggagtaatcttcctaatatatttgagatcaaatcaagcttgcttcagcaaatcagggataagccagatctgcacaagctgaatggacatgaaaagcccaaagcagtatttaatgatgttaacagtttggacgaaaggggggagttgcttcagcaaatcaggagcaagacattcaacttaagacgaacaaatggatctaagacaaacacc

SEQ ID NO: 387 - DNA, 367 bp, Triticum aestivum
  Clone ID: uC-tsfl189009e08b1
gtggacccaagaaggttaagctgatgtgctcctattgcaagcggcatacggagtctgaagttccagatccttactatggaggcgctaagggatttgaaaaggtactggatctgctggaagatgcatgcgagtcattacttgacagcatcatggcggagaatgaaaacatttctgcttgatctcagaatgaatttccctgagccaatgtaagcgtcacattttaatttgattgtaccagggatcagttgcaaagatgtggattagctttctgtgagccatcatctcttcagcccagataattgtaatgataattaactaaaaatacactctctcatcaccatgcgtatatatgtgttaggctggatac

SEQ ID NO: 388 - DNA, 438 bp, Triticum aestivum
  Clone ID: uC-tsfl189009e09b1
acctagctccagacgcctcctcctcctcccccgccgccgccgcactctccagagaccgcaggcatgggcgtcttcaccttcgtgtgccgcgactccggcgccgagtggtcggccaagcagcacaagggcgagctcgaggcctccgccgccaccccctacgacctgcagcgccagctcgtgtccgccgcctgcgccgaggacaagtccggtggcgtccagtcctccttcaccatggtctcccccaagtccgccatcttccaggtggtcattggtggcgcctctgctggtccgatcggtggtggtggtgctgcaggtggtgccgctgcatcaggtggagctgccgccgaggcccccaaggctgaggagaagaaggaagaggagaaggaggagagcgaggatgaccttggcttctccctcttcgattagatcttctttacc

SEQ ID NO: 389 - DNA, 420 bp, Triticum aestivum
  Clone ID: uC-tsfl189009e11b1
cccacgcgtccgcaacaagatgctttcgtgtgccggggctgataggctccagactggtatgaggggtgcttttgggaagccgcagggagtctgtgcccgtgttgccattgggcaggtcctcctttctgtgcggtgcaagcccaacaatgccatccatgccactgaggcccttcgtcgtgccaagttcaagttccctggccgccaaaagatcattgagagcaggaagtggggcttcaccaagttcaaccgcaacgactacctcaagttcaagagtgagggcaggatcttgcctgatggagtcaacgctaagctgctcggatgccatggccgccttgcgaaccgtgcccctggacaagctttcctgtctgccgcataatctagcagaagaagtctatccgttctatcagaacttattttact

SEQ ID NO: 390 - DNA, 480 bp, Triticum aestivum
  unsure (1)..(480): unsure at all n locations
  Clone ID: uC-tsfl189009f07b1
ggaggatctgggaagcgaggaggctctgagggagaccgtgcagtgcctggcgacgccggagaggtacttcagccaggtgatggcggcggcgctgagggagggcgcggaccaccacgggaaggaggccctgtcgcgggtggcggtgacgcggtcggacgtggacatggacggcatcagggcggcctaccaggagcagttcggggccaagctcgaggacgccgtcgccggcagcgcgcacgggcacttcaaggacgcgctcgtctcgctcatcgtcggcaagtaaaccatatccggagggggttcttcttcgtcttccagtggtgatggcgcgccggccgtgcgtgtgtttttcttcctgcttcatctcgtgtcgtgtgtgcctttgtatgttgaattgttgtcgagcggngcatgtaaacatttgcagctgaggtcgtgtacggctgatcggngatcaaataaagttgaacatttgggtct

SEQ ID NO: 391 - DNA, 472 bp, Triticum aestivum
  Clone ID: uC-tsfl189009f08b1
cggacgcgtgggcggacgcgtgggtcacaacacccctccatccaccttttgccagcgtgagagcttcttctttcttgcgagggagaggacagcgagcaaccagggagctaggcgtcaatggcgaccatagccacgatgaccatgctcaagcccgccggcctggccgccgcgccggagccggcctccgccgccgtgcaggagctcgccgcgctggcggcggtagcgcccgccgacgacaaccggggcctgctgctgctcttcgtggtggcgcccgccctcggatgggtgctctacaacatcctgcagccggcgctgaaccagctcaacaaaatgcggtccaactgagcgtcgtcgtcgtcgtggcatcgcatgcggtccggccgagtgggttcgtatgtgtgtgttcgtctattaagagtcgtggtagtagcgtggaacgtggtgtgagtgcctgcttgcatactctctaatc

SEQ ID NO: 392 - DNA, 395 bp, Triticum aestivum
  Clone ID: uC-tsfl189009f10b1
cggacgcgtgggttgcgtgtctactccgtccagctccaggcgctcgacgcgctccgcggctccggcatcagcctcagcctcggcaccaccaacaacgacgtggccgtcctcgccagcagcctgtccgccgccgccgcatgggtgcaggccaacgtcaagccctactaccgcgccgccgtggacgtgcgctacatctccgtcggcaacgagcttgccagcgacaccgcgcagagcatcctggcggcgatgcggaacctcaacgacgcccttgcggccgagggcctcggcggcgccggcgccggcatcaaggtgtccacggcggtgaggctggacgtgatcgccaactccttcccgccctccgccgctgtgtttgcgcagccctacatgggcgacgt

SEQ ID NO: 393 - DNA, 451 bp, Triticum aestivum
  Clone ID: uC-tsfl189009f12b1
ccatcttctccgtcctggccgccgccgccaccgccaccagtatctacacctgctacgaaggggtgggcctccccgtggacccgctccagggctgccactactacgtgacctcgcagacctgcggcttcgtgccgctgctcccaattgaggtgatgaaggaccggtgctgccgggagctggccgccatctcgtccaactgccgctgcgaggggctgcgcgtcttcatcgaccgggcgttccctcccagccaaagccaaggcggtggccccccgcagccgccgctggcacctaggtgcccgacggaggtgaagagggacttcgccagaacgctcgccctgccggggcagtgcaacctgccgaccatccatggcggcccctactgcgtcttcccatgaacgctagcttgttcatgaaaacattgtgtgaatgaataagctagcagcatgtcaca

SEQ ID NO: 394 - DNA, 451 bp, Triticum aestivum
  Clone ID: uC-tsfl189009g08b1
accagcctcctcagtcctcacagcatcctctcagtccttagcttccttccctcgccgccacccaccaaggaaaggaggatgtcttgctgcggcggcaactgcgggtgcggcgccggctgcaagtgcggcaacggctgcggcgggtgcaagatgttccccgacgtggaggccaccgccggcgccgccgccatggtcatgcccaccgcctcccacaaggggagctccggcgggttcgagacggccggggagaccggcggctgcgactgcaccacctgcaagtgcggcaccgcgtgcggctgctcctgctgcagctgcaactgagccggcgcccaggaggccggccggcagaggcgagcacgaggatgaggaggacaatgcaagcagcaccatcaccaccagttcaccaccacccagcgtatcatcaccagccgccgcatgcgctcgcgggcgc

SEQ ID NO: 395 - DNA, 202 bp, Triticum aestivum
  Clone ID: uC-tsfl189009g10b1
gggtgttcaatctgctccacacttggacgacttgagcctcagctttaccctatgtaatgcatgcatttcctcttgttccaggcaagagcctttgatgaccatgtatttgccttctatgagtatctttgtctaactgtcaacataccttcaaactgtatgtggtgcaatctttggataagagaatgctaaacttttttcgatt

SEQ ID NO: 396 - DNA, 76 bp, Triticum aestivum
  Clone ID: uC-tsfl189009g11b1
tttcgcccacgcgtccgcccacgcgtccggaaataactttgaaatcgcggtaatagaaaccagaacgttcccatgg

SEQ ID NO: 397 - DNA, 249 bp, Triticum aestivum
  Clone ID: uC-tsfl189009g12b1
ggagcttttggatggtgattgacaaaggcaccaacaaggaagatcagagagttgcatttccttagtagcagttctaactgtctcttctataccttgtagaccataatgaaataattaggacgctacggaactggagttctaccactatatgtatctttactgtctgcgaccaagatgtgtgttttctcccgtttgtatatttatttgtatcgtgtgatccacttgcgtagtgatgacatgcttgctcta

SEQ ID NO: 398 - DNA, 449 bp, Triticum aestivum
  Clone ID: uC-tsfl189009h07b1
atctagcgggtgggatggacaacgtgagcgacaacgggcgcgagggcgggtgggggcggctgccgtctctgtgggcgccggcgcgcgacggcgagcagaggcagcacctgccccgtgccggcgcggcggcggggagggagctggggcggcgcgcggaggacggcgtcggccacggcaacggcaagacggccaaggtgatgcacctgctgctctgggggcccaagtgagatgagatcggccaggtttcccgccggccggcttcccgcgtgcccgtgggcggtggcggaccggccggactgtacactagttgctgcatgctccttcagtttgccgcgttctttcttcaccgcttttgtttgtaatggccagtttgctgctgtgtatgcgaagtttgtactgtacatagcgaaatatatatggatgcgatctgtgtcgttagaccatgtaat

SEQ ID NO: 399 - DNA, 367 bp, Triticum aestivum
  Clone ID: uC-tsfl189009h08b1
cccacgcgtccgaaaagagttgctaatccgccatggcaattctcaagagaaacacaagggttgtatgcttggtggtgcttgtggtcatggcgacgaccttattgcccttctcaactacacatggggcgtgcttagtggcaccggaatgctcgggtccctacccgaatgtaatatgtggtgagttatgcgctcgttatggttacagcaaaaatggatagtgcaaagattcaagaaattgttgttgtagtggcaaaaaattaaaagagtcggtccaggtggatcctacaacaaatccataggagagaaactctagaagctgctgcgccacaatatgtaattgtgagatgaataaattcgaaatgaaata

SEQ ID NO: 400 - DNA, 251 bp, Triticum aestivum
  Clone ID: uC-tsfl189009h09b1
cggtacgcgtgggcggacgcgtgggcgctggtgaataagctgttatttatcaaaagagggtacgtctcaacatggtaactttctcggttaattaacctgtattgcaacccccagtggcggtaggatttccatcatgtaaaagtgttgtctgtaatcacgagggacaaggatagaacatttgctgccactttgtggcgcggtctaaagtcttggagcaatcacaagaagcaacatattctagtctggatatg

SEQ ID NO: 401 - DNA, 206 bp, Triticum aestivum
  Clone ID: uC-tsfl189009h10b1
gggtgtgctatgcgcggggtcgcgtgacgtgggctaaataaaagtgttgtcgggtcgggtcgacgcccagtgtcggtcagcagcgagcgacgcagtgccactctcgccggcctgcgtctgcgtctgcttagctggagccttgttacggtgtgtgtcacagtgtcagttccacctatgatcgatcggtatcctaaccggtttgcgtt

SEQ ID NO: 402 - DNA, 78 bp, Triticum aestivum
  Clone ID: uC-tsfl189009h11b1
tgtcctcatattatattttatatcctctcactagttggttccgttccttttgatgaatgacgaagtgtggttggcagt

SEQ ID NO: 403 - DNA, 459 bp, Triticum aestivum
  Clone ID: uC-tsfl189009h12b1
cgtatatatatgtggccgtatggaccatcaactgatgaacatgaactcatcaaggaccaattaaaaactgggactagatcgggagaagaagatgtggtgcttgaggtatttgttcatgtttctcttggagagatgcatgcatgcatggggagatctcgcctgacgggtttggtgcatatatatggcctatgggtgttgctgcctggccggttgaagctgcagctttgttgtagccatgaacctgttttttttgtttctctccagaaaatctgtaccaagagcctgtgaaaagctatgtgtgtatgagagactatgagctagcaaaaagttcttcctccttcccatgccatgtttatccggttgttccttgccttgttggtttctcctgtgcatccaaaataaccgtggtgttaattcctgcaatacgcagaggaagaaccagccatggtgcttaattct

SEQ ID NO: 404 - DNA, 439 bp, Triticum aestivum
  Clone ID: uC-tsfl189010a01b1
acggcggccagtgcggtggcggcggctacggcggcggcggcggcggctacggcggcggcggtggtggctacggcggccagcgtggtggcggtgactccggcggccagtggaggaactgagcggcggggccctccagttatcgatctatctaccatctcgtcgtcttcgtcagcaagttatcttcagttcctgtgtcagtcagtctgagtcgtcgtgtgtgtcgttgagtcctgtggtgtttttgatcgcgagctcgagtgtcgctctgtccggggttaattagagctggttacgcgaggaagaaacaacatgtgttatctttcagtcttggtcggtcggtcgtcggtgatgcagcaatcccttctgtcatggattgggatgtgatgttggaatatcctatgtttgaactcggtttaaatggaagaaaatgcaagtcgtc

SEQ ID NO: 405 - DNA, 409 bp, Triticum aestivum
  Clone ID: uC-tsfl189010a02b1
atgttggctattttcacgctgtctgacaagcagattaaaaaagtatattgttattttcgaagtttgagtaaaccattgcttcctctggggtctacaatacatataactcactatagtactaatactatttttaccacatcgaaaaattttatgttgagaaggagatccgcaaggactcggccaagaagacggacaaaaagtcgcgcgtcaaggtgttactcaagctcgtcaacttcacccacctcatgcccacccgctacaccctcgacgtcgacctcaaggaggtggcctccggggcgcccgactccctcacctccaaggacaagaaggtgggcgccgacaaggccgccaaggccaagctcgaggagaggttcaagaccggcaagaacaggtggttcttcaccaagct

SEQ ID NO: 406 - DNA, 491 bp, Triticum aestivum
  Clone ID: uC-tsfl189010b01b1
gtccaggcccgggatgaagaccagcgtcaagctcatccacgccaggcttcacgctcaggccctcactctggctgccttgggttgttctgcgcttgtggagtactatgatcaccagtcaggttcaggatcaaaggttcacgactatgcaaagcagttccttccatcggacagaaacgccaaaaaggactccgtgtagaagaggcagcaagttataatataggcttccattagctgatatggaatttgttgatgttattttctgagcaaacaatctggcatttcacatgccgttatccaagttctgcaggcttcctgttctctgtataagctaccgaaccagcatttagatgcagccgtatgcaaatccgtggggatggaaatatgtgctttcctgaaccgtgcatgaatgtaatgaatgaaatgtttctctcttacagtactactgatgaagtaaaccgacaaggcgagttcgtgcgcagaagcttctgctc

SEQ ID NO: 407 - DNA, 335 bp, Triticum aestivum
  Clone ID: uC-tsfl189010c01b1
tcggctttgtctggatattttgttggggagccagatttgttacatggggatccatttgtacctgaagacgctgacagaccaatagcagtgtggataaaggagcataccccgggaaaagcatttgaagaggcaaaacctgtgattgctgctctaaaggaacaaggagcgtctagcgttggggctgcaggttattgctggggtgcaaaggtagttgcagagttagcgaaagctaatgagatccaggcaggcgttatgttgcacccttcatttgttactgccaatgatatagaagaggctaaatgccccatcgctatacttggagctgaaactgacgt

SEQ ID NO: 408 - DNA, 264 bp, Triticum aestivum
  Clone ID: uC-tsfl189010c02b1
ctttttgagccttcaccaccatcaccacgctccgggcccggtgtcgagccaccaccaccattaccaccctccggccccgtcgtcgagccaccacatcgacgcggatgagctggacacttttacagacacggagtgggtccgcggccatcactctgaggcgccgtcgctgtaccacctcgacgccgacgagctacacaaggtaccaagcccgcaccaccacggccaccacgctacagcaccggtgccggttcaccaccaccacca

SEQ ID NO: 409 - DNA, 198 bp, Triticum aestivum
  Clone ID: uC-tsfl189010c03b1
ctactcgtggtcgagagccgctggcggggctacccggacgcgccctccgagggcagctccccctggggcgtcgccatggtcgtcctcctcctcctcgtactcaccagctttcactccaccttccaggacatgtggaaggcttgatggaacgaacggttctccgatccatacctcgtacgtatgtgagtatgtatgtga

SEQ ID NO: 410 - DNA, 311 bp, Triticum aestivum
  Clone ID: uC-tsfl189010d01b1
acctgacctccatggcgagggcaacgacaactggtggctctgtggcggcgcgctcagcacgtcactctctctcatccgtcagcctcacgggccccggcgggccgccacagggacgcactggaacctcgtcccaaaggaccgtgggcaactggcatcttcccaacgagaaggtcgcggcggtggtggcggaagaccacgagtgcgagatgagggccggcgagaagcagcgggatgagtgcatggcgaggaggacgctcgcggcgcacaccgactacatctacacccaagatatcaaatggtttgttggcccc

SEQ ID NO: 411 - DNA, 160 bp, Triticum aestivum
  Clone ID: uC-tsfl189010d02b1
cggtcgcgtgggggttggctcatggttgtgtgtcaagcaacactatcgtctatgctatagcgctgatgatgtttgaactgtcgatagttggtaatggtgcatgcttgctatatttgctatgccgacctcaaatatatcgtttatggaggttcctgttaaa

SEQ ID NO: 412 - DNA, 245 bp, Triticum aestivum
  Clone ID: uC-tsfl189010e01b1
ccctcgcgtccgggaggtcgctgatggagcaatgctgggcgacagaaccgtcggaacggccaagcttcacccagatcgccgtcaggctgcgcgccatggccgcgtcccagaaggtgcaatcctagtagcgccagcagtggtcttgagaaaacttctggggccatccatccgtcttggacaagttcgtcttcgcatattgcgtattttaagaaaatccggtgctgatatatataaatattatattt

SEQ ID NO: 413 - DNA, 461 bp, Triticum aestivum
  Clone ID: uC-tsfl189010e02b1
gttttctgaatgttgatgtcaacgagttccagaccaacctggtgccctacccgaggatccacttcatgctttcctcctatgccccagtgatctcagccgagaaggcctaccatgagcagctgtctgttgccgagatcaccaacagcgcctttgagccttcctccatgatggccaagtgcgacccccgccatggcaagtacatggcctgctgcctcatgtaccgtggtgatgttgtgcccaaggatgtcaacgctgctgtggccaccatcaagaccaagcgcactatccagtttgttgactggtgccccactggcttcaagtgtggtatcaactaccagccacctggtgtcgtcccaggcggtgaccttgccaaggtccagagggctgtgtgcatgatctccaactccaccagtgttgtcgaggtcttttcccgcatcgaccacaagtttgacctgatgtac

SEQ ID NO: 414 - DNA, 280 bp, Triticum aestivum
  Clone ID: uC-tsfl189010e03b1
ggactattctgtattacaatttggtggaggaactttaggacatccttggggaaatgcacctggtgcagcagctaatcgagtggctttagaagcctgtgtacaagctcgtaacgaagggcgcgatcttgctcgcgaaggtaatgaaattatccgagcagcttgcaaatggagtcctgaactagccgcagcttgtgaagtatggaaggcgatcaaattcgagttcgagccggtagatactattgataagtagataaaactaaagataaagaagagaaggtat

SEQ ID NO: 415 - DNA, 365 bp, Triticum aestivum
  Clone ID: uC-tsfl189010f01b1
cccacgcgtccgcccacgcgtccgcggcgttctcccggatctgcctgtctaacattaagctccatggcagcgcaccagtccgcccatggaaatgcgcggctgtgagtggtggtgcactcgacgtgcagccctccccgtgcacagaattgactagcacgtccgggatgagcttctgtacaaattccctctgatgctgaatcaagtcttgcacttcagtttcggtgtgtcaatgcccttgattcctccaatgagatgacatcaaagggtaggccaaacaatttttgttttgtttattacgtattatatcactggaatctagtagttcaacaagtgaaatgttatccggtggttcaatgcttgtccac

SEQ ID NO: 416 - DNA, 482 bp, Triticum aestivum
  Clone ID: uC-tsfl189010f02b1
ccctcgcgtccgaagcagtgaaagagaagaggctaatcaagctcaacagccttcttttccagagagtgtgctgtgtacgtagcagagcgaagagttagagccatggctggggtggtcggcgtctggttcgccaagttcggccgggaggcggcgccggcggtagaggcagaggccgaggtcgtcggacggcgacaccagggcgacggcctgctcgaggtggaggccgtgaagacggtgcagatccaggagaggaggaggaggaacagcgccgtcctcgccaactccgaggacacggtgtgcatgctcatggaccgcttcgccccggcctgatgcgccggtgaaccggcggtgtccgtacgtacgtgtaaattccagggcacgtacgtaggggcgcgggcacaagggaggagccataccttgatgtgcgggttcctcttgtacataagctctttttcatcgctaatcgagtgatagtagtagta

SEQ ID NO: 417 - DNA, 87 bp, Triticum aestivum
  Clone ID: uC-tsfl189010f03b1
ggttatgtcgcttgagttatagattgtgttatctggattatgtgccgtgctggcatttggatcttaatcttaatcctttagtctggc

SEQ ID NO: 418 - DNA, 472 bp, Triticum aestivum
  Clone ID: uC-tsfl189010g01b1
gcgctctccacgctcgtcccgggggtctcctacatccacgcgggccccgtgctccgcctccgctccccggccgccgaggcgctcggccccacccacctcctccactcccgctacgccaccaaggccgacctcgccgcctacgcgccgcacccggcccacgtcgccgccgtgcaggcgcacgtcgcccccaacgcgctcgacgccaccgccgtcgactgggtcaacgccgcgggcgccccgtcccccgtcggccccggcgccgccgtgcgcctcaccctcgccaaggtcaaggagggcgtggaggtcgggcagctcgtggagaaggtggccgccgccaccaaggacgccggcgaggccagcggctccaaggtcagcttcggggagaacttctcccccgcgcgggccaaggggtaccagttcgggatggtggccgtgttcggcagcgtcgaggagctggacgccgtggagggcg

SEQ ID NO: 419 - DNA, 414 bp, Triticum aestivum
  Clone ID: uC-tsfl189010g02b1
cccacgcgtccggatcccccgtgggattccattcctgatagagcttactgctgctgttggtgttcctggtgccaagtgtgcagtcaagactccaaacagggagtttgtgcctctattctttgaagccatggagtctcttatcaagtaagtgacggaaacttgaggatcggtattccatcaaagttattcagttatgagcatacactggtgtgctgttccatggaagtgtgaattgtattgtgttgttattgtatcactattagatcaccgtatttaaactgttagtttcttggtttcagaattttcctctagggatacacaacctggacattttgtgccgcataaattgtatatcggcctgaacattttttcttgccatgtcacagcacatgaaaatacgtcttgtttcttttt

SEQ ID NO: 420 - DNA, 416 bp, Triticum aestivum
  Clone ID: uC-tsfl189010h01b1
gcacaattgtcgccaggcaagacaaggggaaggtctctgacagctagcaagagagcaaggcgatgtcaatggcggacgagcagaacgacgctggcccgcccggcgcgccgcacttgctgctgctggcggtggtggtggggctgctggttgcgtggccgcttttcctgggtggcagccgcgaggcggtcatcgataccatcgccaaagccatcgccgagctgctcggccccgtgggcctgctcctcctcccgctggggctcctcctcctcatccacctcctctcctgcgacggcggctcgcccgacgccgtgtaccatgtcggtggatcccccatcggcgtggcgctcatgctggtcctcatcctcgccctcctctactaccggtcggcactcttcggcagcggcggaggcgacgac

SEQ ID NO: 421 - DNA, 338 bp, Triticum aestivum
  Clone ID: uC-tsfl189010h03b1
cggacgcgtgggcggacgcgtgggttccgatccagcaccgccgccgcaaacaccacacctcgagagccctcttcgccggtgaagtagcaagcaagatggctggaaggaagggaggcgacaggaagaaggcggtgacccgctccgtcaaggccgggctccagttccccgtcggccgcatcgggcgctacctcaagaagggccgctacgcgcagcgcgtcggctccggcgcccccgtctacctcgccgccgtcctcgagtacctcgccgccgaggtcctggagcttgccggcaacgctgccaaggacaacaagaagacccgcatcatcccgcgccacctt

SEQ ID NO: 422 - DNA, 370 bp, Triticum aestivum
  Clone ID: uC-tsfl189011a01b1
aaacgcacagcatgcgcttgcagagaagccatagagctgcccgtgatcggttccagcaccaggcgccgcaggccgcagaacaagttcgagagctagaaatggcgccggctttgtcgttcccgatcatcgacatggggctgctggccggggaggagcgacccgcggccatggacctgctgcatgacgcatgcgagaactggggattctttcaggtcctggaccacggcatctcgacggagctgatggacgaggtggagaagatgaccaaggggcactacaagagggtgcgcgagcagaggttcctcgagttcgcgagcaagacgctgcatgacggcggcagggcggcggagaacctggactgggagagcac

SEQ ID NO: 423 - DNA, 395 bp, Triticum aestivum
  Clone ID: uC-tsfl189011a02b1
gctgttgattaaccaagctctgcaaggactgaatgaaacttgggagaagaagtttctgtccttggagcaaaacatgcgtagcgtgccctcggcacgtgctgttcgtgttggtgctaaaaagatcagcggtggctgttgcaaggggcaagcgatgtcaaatttcacggcaggacacatttgattcggcggagggagaagaagatcaagacgacggcgaggagcatgatgatgagcgttggagttagacccaacgcgggcctcctgttgtggctcagattttgtctataggaggacggtgcatctgcacgggagcaatcagccccgcgtgcgtgcagctcagggtgtaaatcatgtgcaaatccctttgaccagatagatcatgtgcatatgttttc

SEQ ID NO: 424 - DNA, 482 bp, Triticum aestivum
  unsure (1)..(482): unsure at all n locations
  Clone ID: uC-tsfl189011a03b1
aagaatagattggatctatccggctgcactttataatattttttagtatttttcggataaataagaaaagggtgcacgatctcgacgaattacttctgaataaattcagaaatcatatggaaagaaccatagcatttcgcgactcattggtaaatcaactttgattctctataaaccaagaatgtgagaccattaacacggttaaagctaaactgcttgaagtccaggcaaaaagaggtactctttctacaactatattagtattagtaccgaatttaaacgggaaatagctaatgtaaaatttatctgatatagaacactcatatcgataaaatggtttgaactatttactagaaaaaaaaagggggcaccctgcccttttttaaccaatgccgaatcgacgacctatgtataaaaaagagaaattctttggatttgaagaaaaaaaaaaaagaattctattaattntcattttccattta

SEQ ID NO: 425 - DNA, 177 bp, Triticum aestivum
  Clone ID: uC-tsfl189011a06b1
gtccttgccctgcaccgcctagttgtttttatcttagtgtcgacgttggatggttttggcacgttttagctgtatcggttttgtcttttggctggccaaacattaagcgcggttagctgtttgtggtactcgtggaacagttcgttattgttggttctacaatatgtgttagttatt

SEQ ID NO: 426 - DNA, 114 bp, Triticum aestivum
  Clone ID: uC-tsfl189011a09b1
cccacgcgtccggatttattatgttatgctgtttgagactaagtatctgtgcaatgagtactgcaaaacctccttgggatggtcttgttagaatgaaaatggttctacattaaa

SEQ ID NO: 427 - DNA, 311 bp, Triticum aestivum
  Clone ID: uC-tsfl189011a10b1
tcttgaggagcttagggaacttggttctggtacttttggaactgtttaccatgggaaatggagaggaactgatgtggctatcaagcgcatcaagaaaagctgttttacaggacgatcatctgagcaagaaaggctggcacaagaattctggcgagaagctgagattctgtcaaagcttcatcatccaaacgtcgtagccttctatggcgtggtgaaggacgggccgggcggtaccctggcgactctgaccgagttcatggttaatggttctcttcggcatgtcttgcagcggaaggacaagtgtcctgatc

SEQ ID NO: 428 - DNA, 386 bp, Triticum aestivum
  Clone ID: uC-tsfl189011a11b1
ctcccctctcgctctctccaccaaccaagaacagcaggaactcgacctcggagcagcaacgaatccgccgccgcccggcaaaagggatccaaagctccaatggctggcaagtacatcgtcgccggcctcgtcggctcctgtgtcatctcgtatgcctgtgactacatcgtttctcagaagaagatcttcggtggcaccatcccagggactgtgtccgacaaggagtggttgaaggcgacggagcagaggttccaggcctggccccgggtcgctgggccgccggtcatcatgaaccccatcagccgccagaacttcatcgtcaaggacctcaacccctgaggctcaagatcttaaggtttgcggtcggttggaacctttaccctgat

SEQ ID NO: 429 - DNA, 241 bp, Triticum aestivum
  Clone ID: uC-tsfl189011a12b1
ctcagcgaggcgcgcgaccgccccgttgcagatcatatggcggctgaagcggttcttcaacgtcggggacgagagaaagctccgggaatccgtgcgcctcgtcgacgggttcgccgcggaggtcacccggcaacgacacaagctcggcggcgccgcgttcggcagcgacctcctgtcgcgggtcatgggctccatcagcgacgagaagtacctcagggacatcgtcgtcagtttcgtgctc

SEQ ID NO: 430 - DNA, 383 bp, Triticum aestivum
  Clone ID: uC-tsfl189011b06b1
ccctttcgtccgcccacgcgtccgcaaggaagctgcctggggtcttgcccgttacgcggccctcacaggacaatgggctggtgccgattgtggagcctgagatcatgctcgacggtgagcacggcatcgagaggaccttcgaggtcgcgcagaaggtgtgggcggagaccttctactacatggcccagaacaacgtcatgtttgagggcatcctcctgaagccaagcatggtgacccctggtgccgagtgcaaggacagggccacccccgaggaagtggccagctacaccctcaagctcctccagagaaggatccccccttccgtccccggcatcatgttcttgtctggcggtcagtcggaggtggaggcgacgctgaacctg

SEQ ID NO: 431 - DNA, 431 bp, Triticum aestivum
  Clone ID: uC-tsfl189011b07b1
cccacgcgtccgaaaaaaaagctgtcaaaaaaaaaacctcccggtcgccgcgcgcagctagcttccggcgctcccccagctccaccggtccgtccggcgatcgcgcggcgcggggtttcgcgggtggatcgccggcagattcgggcctccgggcatggagcgccgcgggttgctcaaggcggctctactggcgtcgtgcttgctcgtggtttgctccgggagagtacctacggttatacagcagccatccactaccatatacaactcaacccttgccaagacactagtggaatatgctgctgccatatatactgctgatttgacacaattgttcacctggacatgtgatagatgcggtgacctgatcgaggggtttgagatgatggacatcatcgtagatgtggagaactgcttagaggcatatgttggtt

SEQ ID NO: 432 - DNA, 323 bp, Triticum aestivum
  Clone ID: uC-tsfl189011b08b1
ggggtcgaccacgtcgaggggacggtcaaggccgtcgtcggccccgtgtacgaccgctaccacgccgtgccgctcgacctcctcaagttcctcgaccgcaaggtcgacgagtctgtccaggagctggatcgtcgtgtcccgccggtcgtgaaagaggtgccgacctatgctcgctctgcagcagctgaggtgcagaagacaggcataatgggcacagcaactggcctggccaagtcggccattgctcgtgctgagccaaaggcccgtgacttgtatacccgctatgagcctgtggcggagcgcaaggctgctgaagcctgggc

SEQ ID NO: 433 - DNA, 460 bp, Triticum aestivum
  Clone ID: uC-tsfl189011b09b1
tggactggatactccaaatccaccgccaaacacagagctcgtgatgatgtacggcggatgttccagaaatttttgtttttgtgtaaactgctgcagattaggctgctgtgccagtccccgggtcgccctcataaccattggaacaaaaaatggcgagccagccgtgttctacaaatgccatcctgttagcagcagcagcgctctcgctgtcggcgagcaatacaaactttattgttaatatttcgttcttgtgattatttttcgtgacgagaaaaggatacacagctgttgtaccagaataagtaggcagcacctttggtaaattgtacaagcgtttggagtctttggtaggggtttgtacgcatttgtatcgtcgacaatttttagttgcaaagattgtgtaaactcttgtttgactgttggtactgatctgtctgcaataggaagcacctttttactc

SEQ ID NO: 434 - DNA, 69 bp, Triticum aestivum
  Clone ID: uC-tsfl189011b10b1
ctttccaaatgatccattccattaccatatagtattttataatttaaggaaactgagtccaagcatcca

SEQ ID NO: 435 - DNA, 244 bp, Triticum aestivum
  Clone ID: uC-tsfl189011b11b1
cgaaacggttcatcaatgacaccatcagaagtgatttccaccgcaagtttctgcataggtacatgaaatgatgctgctgtatgctttatgttgtctggacagtatgcatgctgaaagagcctgtgatgtttctgtattctgaagatcgatttgtatgacataactgtaacagctacgttatcttaatggtgatatgtttaccctgttcctaagagtaaagaaaagaacccactgcttgtgtatt

SEQ ID NO: 436 - DNA, 370 bp, Triticum aestivum
  Clone ID: uC-tsfl189011c01b1
tcggtggtaggacattaccaccaagatccaccacaaggtctccgagaactggatctccgccacgctcctcatcacccccgtcgtcggcacctaccagtatgcgatgtggtacaaggagccggagaaagctgtcccacagatactaaaggtggagctttctccaatatcgcagcagttggaatttccatgttctataatccaccaagagtgatttaacattttcggaatcacttctagttgtactcttttgctctttccgttgcatatgcaatgatgcagtaagtgtgacttgcaaacctattttgaggcctcaaatgttgagttgctcatcactggagtgattttgtgcaataaagcaaattaaccagtc

SEQ ID NO: 437 - DNA, 282 bp, Triticum aestivum
  Clone ID: uC-tsfl189011c04b1
tcgagattaaccgctcgttatcgtttcccccgtgaaaccacccgacccccttggccgtctccccgccggtcgccggaggcatccaatccaagcgccgcccgcgcgcccctgctccgacccgatggcgtggggcgcgcccgcgcgggcgcagtcgttgcgggtgcaggccctctacgacctctgcaggcgcacctttctcttccccttctccgccgaccctcccccggccagcgccgtccgcgccatatcctccctcatggatactatcagccccgcggacgt

SEQ ID NO: 438 - DNA, 352 bp, Triticum aestivum
  Clone ID: uC-tsfl189011c06b1
gccgggaagaagatgaacgtccatttcatggccaccccgggcgccggcgagaagttcctgccgcggagcgaggccgacgccatcccgttctcctcggagaaggcccccgagatcctcagccgcttctccgtggcgccggactccgccgaggccgcggagatgaagcagacgctgcgcgagtgcgaggcgacggcggccaagggggagaagaagtcgtgcgccacgtcgctggagtccatggtggacttcgccacgtccagcctcgggaccagccacgtgagggccgcctccacggtggtcggaaaggaggggtcgccggagcaggagtacaccatggccggcgtgaggcgcg

SEQ ID NO: 439 - DNA, 217 bp, Triticum aestivum
  Clone ID: uC-tsfl189011c07b1
ggagttagctgcactgtaatgctgaagcatgcgctgtaattttttgtgagacggtggcctgggcatggtgaactgaagcatggaggtagttgagactcgttgtactcgctggatcatttgggccatgtcgtctatcattcttcttgcttcgagaaaatctctgtctaatactgtgtggttaaaaaaaaaaaattaatttaataaaataaaaatatag

SEQ ID NO: 440 - DNA, 192 bp, Triticum aestivum
  Clone ID: uC-tsfl189011c09b1
ggccagaactgtcgattgaaatgatcctacaagcagctcagccaaaactagagccattcccctttgaagagcacaccgacctgccggttcaaggcctcggtggcatcggtggtggggaggttgaaggccccactggtggtatgggtggggaggttcaagacctcactggtggcatgggtggggagctcccgg

SEQ ID NO: 441 - DNA, 64 bp, Triticum aestivum
  Clone ID: uC-tsfl189011c10b1
acgaccacgcgtccgaagcggtgctgcaaggagagatggcgccaacatgttctgtttgttcacg

SEQ ID NO: 442 - DNA, 132 bp, Triticum aestivum
  Clone ID: uC-tsfl189011c11b1
cccacgcgtccggtgaaattgtatcagtttctggaagtcttctattgttttctatatcaatgtgttcatatgggaaacgtgatctgtcgaattgactttatatgaataaaatgaaactcatattgtattgta

SEQ ID NO: 443 - DNA, 300 bp, Triticum aestivum
  Clone ID: uC-tsfl189011c12b1
gggagaggcggttgcagacggacatcaacatggcgcgccgcgcgctgcgcgaggcgctcaccacgctcgacgacatcaagccgcagcagcccgacgtggccgacggcgtcaatggggctgccgcagccggcgccgacagcggcagcccggcggcctcgagctcgtcggccgcgttgctgtcccagtgctcgccctccgcggtcgggccgtacgtgctcaccaccgcgaacatctcggggatgctcgacgggtgggccagcaagggccgcagcgccggcgccgcggcggacagcccctccg

SEQ ID NO: 444 - DNA, 77 bp, Triticum aestivum
  Clone ID: uC-tsfl189011d04b1
gtcatccagtgttagtggagtggaatgatactttttactaggtgtggagtgggagtgctatgcgcggtgtcgcgtga

SEQ ID NO: 445 - DNA, 468 bp, Triticum aestivum
  Clone ID: uC-tsfl189011d06b1
ccaccaccgccgtccccaccttctccgacgaaaccctagcgatggcgttccgcggcgcagcctcccgctccttcctcgccgccgtccgcggtcgcaccgcctccactgccccgcgcggacgcgcggtccccattcccgcggcccctccccgtcgcatccctgcctcagcgccctcctcccctctcgccgccgcaaggccattggcggcgttgatggggtcgccggtgttggttgccgcaaggctgacggggcactgcgcggcgagcgcgcgggcgtgctgtgagctctcccagggtacttaaaggacgagttgctgcccttcgcaaggatacaacagttcttttgggtgcatctctttggaagctcttctgagttcagttcgttttcctggattctgcaaagttacaagaaactccccactcccagtgctagcttttgtctcctagacaaacggacattctacttgat

SEQ ID NO: 446 - DNA, 75 bp, Triticum aestivum
  Clone ID: uC-tsfl189011d09b1
tcgcccacgcgtccttccacgcgtccgcccacgcgtccggggagctccggcgggttcgtgacggacggggagacc

SEQ ID NO: 447 - DNA, 91 bp, Triticum aestivum
  Clone ID: uC-tsfl189011d10b1
tgattatccctttttcgacgacctcccccatgagatccagcagcctgcgtggcgcagagaatcggttcttttttcaggttggacacgaccg

SEQ ID NO: 448 - DNA, 331 bp, Triticum aestivum
  Clone ID: uC-tsfl189011d12b1
cttattttgagcacttggccatggcgttcaacggcgcccagatgctcgctgccttcaccctgggcattctcctcatggccttctgtgcggaggctcgggtatgcatgtcccctagcaagtggtacaaaggggacccttgcaagaacctgcgttgcaccaaggcttgtcacaaagaacacttcaagggtgggttttgctccagtaaaaagtcgatcgttgatgacgagctcaatgaagacaatggcgacaacagctttggcaaacggcctaagaaaaaatcgaaaaaattgtgcatgtgtacattcccatgcggtcaaaccccaccaccacc

SEQ ID NO: 449 - DNA, 387 bp, Triticum aestivum
  Clone ID: uC-tsfl189011e02b1
gctgtacgcacgccatggccgccaccgcgtccctgtctgccgtcgcggcgcccctgtccgtcgccgggctcaagaaggccacgtcgttccggcccctgccggtggtcagggcccggaggcccgcggcgaggatgacggtcgtccgggcgtccttcgcgtccgtgcaggagaagctcacggccgggctgaccgcggcggccgtggcggcggcgctggtgctgcccgaggtcgcggaggccgcgtccccggggctgtccccgtcgctcaagaacttcctgctcagcatcgtgtccggcggggtcgtcttcgccggcatcgccggggcagtcgtcgccgtcttcaacttcgaccccgtcaagaggacctgatcgcctcgccggattctca

SEQ ID NO: 450 - DNA, 87 bp, Triticum aestivum
  Clone ID: uC-tsfl189011e03b1
tcgcccacgcgtgcgcccacgcgtccgcccacgcgtccgcccacgcgtccgcccacgcgttcgcccacgcgtccgcccacgcgtccg

SEQ ID NO: 451 - DNA, 250 bp, Triticum aestivum
  Clone ID: uC-tsfl189011e04b1
tcggagaacttcagcgacacggtcaccgccgtcgtcgtgccgccgtacatcgacagctccgagatcgtgaagcacgcgtggaagcggtacaacctcagcctcgggctcgggctgaacaaaggtcgcccggcaaggtcttcaggatcggccacctcggccacctcaacgagctgcaacttctgggctgcctcggcggggtggagatggtgctcaaggacatcgggtacccggtgaagctcggcagcggcgt

SEQ ID NO: 452 - DNA, 346 bp, Triticum aestivum
  Clone ID: uC-tsfl189011e05b1
tcgcgacgacacggcggagctcaaggacgtgctgggcgacgggtacctggagcgcgtgcaggggcgcgggctggtgaccaaggagtgggtggaccaggaggcggtcctgcggcacccggccgtggggctgtacctgagccactgcgggtggaactcggtgacggagtcggcggcgtacggcgtgccgatgctggcgtggccgacgctgggcgaccagcggctgatcgccaaggtgataaagagcggcgggttcgggctgtgggtggagcactggagctgggacggcggggagggctcgctggtccgcggcgcggagattgcggagaaggtgaaggaggtgatgggc

SEQ ID NO: 453 - DNA, 159 bp, Triticum aestivum
  Clone ID: uC-tsfl189011e06b1
tcgcgcgaaggtaatgaaattatccgagcagcttgcaaatggagtcctgaactagccgcagcttgtgaagtatggaaggcgatcaaattcgagttcgagccggtagatactattgataagtagattaaactaatgataaagaagagaaggtgtttcttt

SEQ ID NO: 454 - DNA, 374 bp, Triticum aestivum
  Clone ID: uC-tsfl189011e09b1
cggacgcgtgggcggacgcgtgggtgaagatcacctttgatatcagaaaacagcctggaaagccgcaagagactaccatccatgccacttttacaaatttgacatctagcaattatacagatttcattttcaggcagctgttccaaagttcattcaattgcgactggatccagctagcggtaacattgttccagccaatggaaagggttcagtcacacaaggtttcagtgtcacgaataatcagcatgggcagaaaccgcttgcaatgcgtatccggatgtcttacaaagtgaacggcgaggacaggttggaacaaggccaagtcagcaattttccacctggagtatagtgccatttgtgtgtaacctatgttt

SEQ ID NO: 455 - DNA, 276 bp, Triticum aestivum
  Clone ID: uC-tsfl189011e11b1
gcgatacatccatatctatcgccgccaagaatcgccgagaaatccaggagagccagtagctagcaatggcgtctgtggggttcggcagcagcgtggcggccgtggcgccggcgtcgtctacggcggggaggacgagccttcgcccgcagcggacgctgctggcggtgccggcggcgacgaggggcacgccggctccggccaagaaggagaagagcatcctggacttcatcgtcagcgccatcgtcaaggacgagcaggagttcatcgagaccaacc

SEQ ID NO: 456 - DNA, 345 bp, Triticum aestivum
  Clone ID: uC-tsfl189011e12b1
gcggcctcctcctagcaagctatatacctacatagcacagccatggcccccaccgtgatggcctcgtcggccacctccgtcgctcctttccaggggctcaagtccaccgccggcctccccgtcagccgccgctccaacggcgctagcctcggcagcgtcagcaacggtggaaggatcaggtgcatgcaggtgtggcccatcgagggcatcaagaagttcgagaccctgtcctacctgccaccgctcagcacggaggccctcctcaagcaggtggactacctgatccgctccaaatgggtgccttgcctcgagttcagcaaggttgggttcatcttccgtgagcac

SEQ ID NO: 457 - DNA, 406 bp, Triticum aestivum
  Clone ID: uC-tsfl189011f01b1
tcgcggactcatgggcggacgcgtgggcggacgcatgggctggcggtggcctgggtggtgtcccaaatgttccaactgtgccaccggaagagcgctacgcgacgcagctagctcagcttccagaaatgggtttctttgacccacaggagaacatccgggcgctgctggctaccaatgggaatgtccatgccgcggtggagcggcttcttgggaactttgggcaatagtagactatatatgcagggccagtcacctgtagtagttggcattgtgaggcttgattggctgtataccctacccggtcccggtgagattgaaaggcagcgtctctagattctatgtgttttaagatggatgaataaaccagtctctctgctggctatcctttgcagcttgcatggataca

SEQ ID NO: 458 - DNA, 83 bp, Triticum aestivum
  Clone ID: uC-tsfl189011f02b1
aaattaaaaaaaaaaaaaaaaaaaaaaaaaaaaaaaaaaaaaaaaaaaaaaaaaaaaaaaaaaaaaaaaaaaaaaaaggggcg

SEQ ID NO: 459 - DNA, 109 bp, Triticum aestivum
  Clone ID: uC-tsfl189011f04b1
tcggcgacttacatttatgaacggagggagtattaaatatggagctgccaaccccatcaagcagaagatttgcttttttggggctggcacctacaacaagcataaaaat

SEQ ID NO: 460 - DNA, 352 bp, Triticum aestivum
  Clone ID: uC-tsfl189011f05b1
gccaggtgttataccggtagcttcaggtggtattcatgtttggcatatgccagctctgaccgaaatctttggggacgattctgtattacaatttggtggaggaactttaggacatccttggggaaatgcacctggtgcagcagctaatcgagtggctttagaagcctgtgtacaagctcgtaacgaagggcgcgatcttgctcgcgaaggtaatgaaattatccgagcagcttgcaaatggagtcctgaactagccgcagcttgtgaagtatggaaggcgatcaaattcgagttcgagccggtagatactattgataagtagataaaactaaagataaagaagagaaggtat

SEQ ID NO: 461 - DNA, 387 bp, Triticum aestivum
  Clone ID: uC-tsfl189011f06b1
tcgctggaaatcaaggaaaccgatgcagaaatctggaaaagatcattctcttctgttgatccttccttctggagtttatcgttatagatttgttgtagatggagagaggagatgttttcctgaccttccatgtgaaactgatgccatgggcaatgctgttaacctacttgatgttcatgattttgttcctgaaagtgttgaaagtgtatcagaatttgaggctcctccatccccagaatctagctacagtttccagtcacccgaggaaaaggactttgcgaaggagccacctgctcttccgtctcagcttcacctcggcgttcttaacttacagaactcggaggaaatatgtgcacggccccaacacattcgtctcaaccacctttt

SEQ ID NO: 462 - DNA, 282 bp, Triticum aestivum
  Clone ID: uC-tsfl189011f07b1
cggacgcgtgggcccacgcgttcggtcaccgtccggcccaacactgaaatttcatcaccgggttcagtgagtgatcgaggtcgttgctttggtcttctgccattcgctgccccgttttagtttctgcactgcagagctgagagttcagaataaactttgtgaggaacacatgcatggattagtgtgcttcgattgcttttttatgattgtaatttcggtgtgtgctttgtataagaagttattgtggatcaagtaatttaatcaagtccatttgtgttagtg

SEQ ID NO: 463 - DNA, 418 bp, Triticum aestivum
  Clone ID: uC-tsfl189011f08b1
accacaccctgcaatggcgtccgcgctcaccaacgtgagcctgtctaccttcgcgcccacggccaggggcgacgtcctggcgaggccgcaggtggcccccgcccgcgtcaccttcccgacggcgtaccgcggcagcggcgccctctcctgcagggcgggcgggccggccacgccgccgggcatctccgacaagatgtcggacagcatcaaggaggcccaggagacgtgctcggaggacgccgccagcggggagtgcgccgcggcgtgggacgaggtggaggagctcagcgccgcggccagccacgcccgggacaagctcaaggactcggacccgctcgagaactactgcaaggagaaccccgagaccgacgagtgccgcacctacgacagctgagcgtacgtgctaatttgttctgga

SEQ ID NO: 464 - DNA, 324 bp, Triticum aestivum
  Clone ID: uC-tsfl189011f09b1
tcggtgaatacagatgtggattcggtggcttcagacttcatcaagcgtaagcacatgtcttgggcactccagaagagcacaactatgtatccatcttcttaagagaaccaaggttccttagtcatggtattatctgttcatgcttcgtccagcatgaaagttcaaataagaggtgctgcttggaggtgctctagatatcctgaggttatgctactatggtgttcttatttgtaacatgaataagagtgatgtgaaataggctgtactgttattcactgctgtatgatattcttatatatgaaatgaaagtgtggttattacaaa

SEQ ID NO: 465 - DNA, 432 bp, Triticum aestivum
  Clone ID: uC-tsfl189011f10b1
gcgcgagaaccagatcggagcgctacccaccggagatgaagttcttctcggcgttcgacccgtggccggtgttcttccgccgggagtggggccgcacctggcccttcctcgccggcttcgccgtcacgggggccctcatcaccaagatgaccgccggcttcaccgaggaggacctcaagaactccaagttcgtccaggcgcacaagaagtagtcaccgcccgcccggtccgtccgtcgccaggtcacaggggcagcagctgagtaaccggcatgtgtccttgatgcggcgagccagtcctcaccctcactattgtgattgagcttttatgtttttcttttcaaatccaactgcatgcatttttgctgctctggtttgtaatgtaataagcgacatttgaatcgttgaatccaagaaaaaaacagcttcggat

SEQ ID NO: 466 - DNA, 303 bp, Triticum aestivum
  Clone ID: uC-tsfl189011f11b1
gcgcccacgcgtccgcgatgatgacgatgagttgaagcgggttcctgcggtccgactccagcaggcctacggatatagtagtaactggtagctaacctaacttggcgcgtaatgccatgagctatatcatgttccttgttatatgcaattagagactttcaacatgtagatttgcttccaagacttctgtcatagaagagtacctttcctgttatcccacggtaccttcttgaattaatgaatccacggtaccttcttgaattaaaaaaaaaaaaaaaaaaaaaaaaaaaaaaaaaataaaaa

SEQ ID NO: 467 - DNA, 299 bp, Triticum aestivum
  Clone ID: uC-tsfl189011g01b1
tcgggggtcgtcgctcatgcagctgccggcagggaactgccgtgtcgacccccggtgcgacccgccgggcggcatggactgctcggcgcacgccgtggagttcgattcaacactggcgcggtccggtcttttaagatcttaaccgattcgtggtgctcgtcgggagcgttcgacgtggacggtatgctggtgcaaacgggcggctacttcgaaggggtgaaggttgtgagacgcctgaacccacaaggaaatgccgactgggtcgagtttcccaataccttggccgaaggaagatggta

SEQ ID NO: 468 - DNA, 218 bp, Triticum aestivum
  Clone ID: uC-tsfl189011g02b1
gagggttccgttactaacatgtttacttccattgtaggtaacgtatttggtttcaaagccctacgtgctctacgtttggaggatctacgaattccccctacttattcaaaaactttccaaggcccgcctcatggtatccaagttgaaagagataagttgaacaagtatggtcgtcctttattgggatgtactattaaaccaaaattgggattatccgc

SEQ ID NO: 469 - DNA, 368 bp, Triticum aestivum
  Clone ID: uC-tsfl189011g07b1
cccacgcgtccgcattaccactcctcccccaatccaactcgcgcagcagctccaagaggatcgtcagcgaccatgtccgggcgcggcaagggcggcaaggggctcggcaagggcggcgccaagcgccaccggaaggtgctgcgcgacaacatccagggcatcaccaagccggccatccggaggctcgctcggaggggcggcgtgaagcgcatctcggggctcatctacgaggagacccgcggcgtgctcaagatcttcctcgagaacgtcatccgcgacgccgtcacctacaccgagcacgcccgccgcaagaccgtcaccgccatggacgtcgtctacgccctcaagcgccagggccgcaccctcta

SEQ ID NO: 470 - DNA, 350 bp, Triticum aestivum
  Clone ID: uC-tsfl189011g08b1
cccacgcgtccgggctggggaagagcggagtggaggaagtgatggggctgggcgagctgtcggccttggagaaggaggggctggagagcctcaagggcgagctgctgtcttccatcgagaagggtgtcaagttcgcgcaggagagctaggtgtcaagttcgaacggttcacacttgaactcatgcaatttttgttcggccgcttttttgttgcctccaaacccggttgtgctgcggggcatcgtggcgtcgtcgtgctccacaataaaatgtactggctttgatgtcgccagactgaactgaacctgtagtatcagaaaatgcagacaccggtgcctatgtgtttacagc

SEQ ID NO: 471 - DNA, 401 bp, Triticum aestivum
  Clone ID: uC-tsfl189011g10b1
cggacgcgtgggcggacgcgtgggggcgggactacccgctgagtttaagcatataaataagcggaggagaagaaacttacaaggaaaccattttccaaattattctctaggacctcttcattattggggctaccaataggcctgaccttcttgattctgcacttctccgccctggccgatttgataagcttctctacattggtgtaaatactgaagcatcatacagggaaaggatactgaaagcacagactcgcaagtacaaactacacgagaatgtatctctcttgtcgattgctcagcactgtcctccaaacttcactggtgccgatatttatgcattatgcgcggatgcatggtttcatgctgctaagcgttccgtcaaaacgcttgaagctgatcct

SEQ ID NO: 472 - DNA, 396 bp, Triticum aestivum
  Clone ID: uC-tsfl189011g11b1
aagcgcccgatgtttactactgcctcaagcttctggaagccactggaatttccactgttccaggctcaggttttggtcagaaagaaggggtgttccatctgaggacgacgatcctgcccgcggaggaggacatgccggcgatcatgtcgagcttcaagaagttcaacgactcgttcatggagcaataccaggaccactcgaggctgtgaagagagaagaagacaaccgcatctacatataatacaatgctgctcttttctaccagcaattaaagttgattaattagctgtaagctgtaactatggtgaagaaaactggttgctatgcttgatatgtataggggggaagatatatgcggaaatattcggtccatttactacataatatgatgatact

SEQ ID NO: 473 - DNA, 209 bp, Triticum aestivum
  Clone ID: uC-tsfl189011h01b1
ggagatgtcaagtgtcctcaggaagatgaggtctggtggtggtggtgccgcggacaagaagaaatagattttgcatgttggtgaaattctatttatctcaacgctttgccccgtattttcatattatgccaagtttgtagcctgtggcaattggatacgaatgtagcacattgcacttcaagttcagagtaaaactatgaatttttgac

SEQ ID NO: 474 - DNA, 361 bp, Triticum aestivum
  Clone ID: uC-tsfl189011h02b1
ctacgtactctttcccacttagctagctagcagccatggccgccctctcctctgcagccgtgtccgtcccttccttcgccgccggcgccaaggtggccgctccccggagcagcaggaaggtggtgcgcgcgtccctgggcaagaaggccgccagcgcggccgtggccatggccgcgagcgcgatgctgctgggcgggtcggcgatggcgcaggacgtgctcctgggcgccaacggcggcgtgctggtgttcgagcccaacgacttcagcgtcaaggacggcgagaccatcaccttcaagaacaacgccgggtacccgcacaacgtggtgttcgacgaggacacggtgccctccggcgtcga

SEQ ID NO: 475 - DNA, 309 bp, Triticum aestivum
  Clone ID: uC-tsfl189011h04b1
tcgggtctatgtcatccctgcaaatgatgccaatgttgattgatactgttaatgcttttgtgttggtgatagtgctttcatttgttgttggttagtgaatcgttggtgagggcagtagtgatgttgtgttagttagtgaattgtctgtgaagttttctgcttttcttacaaggataactgattccttgttaattagttgactactacttaactcgcataatgaggaatgatgcatacttttgatgcaagactgaataaataatgtaattgtgttgtgtcgaatttatgttcattggattttggactcct

SEQ ID NO: 476 - DNA, 304 bp, Triticum aestivum
  Clone ID: uC-tsfl189011h06b1
tcggattatatggacacatctgctggaattgaggaggagtatcaccacaaaaataatcgtgtttattgctggaaaggtttacggtttcaagccagacaagatctggaaggattttcttgattttgtgactacgggatcgaaggtgttgtacctcccgagctgttgccacccgacgtccgcgccaaattcaattctaagccaggcgagaaggccaaacggtctaaacgggaagacacaagaggcacttcagctcaccccaaggagccacaggttgccgcggccacgcccgagacagacggcggcg

SEQ ID NO: 477 - DNA, 414 bp, Triticum aestivum
  Clone ID: uC-tsfl189011h07b1
aggtgaagagcatagtgaagcctgggtgctcgcaggatgttctcaaggcggcgctgagtgccatgtcttccgtgacggagacactggctatcatgacttcctcttccactggccagcccccactctgagggccaagcaccacttcagtgggttacgaatctactacgcgttttctgattctcttttgctccatctgactgttgggattcgagacagtgatcttgtcatcccatgggttattcttttcctagctttttggagagttttattatcatttttggctctgatagcgtatgcgggtgtgctgttggcgagattcagcttgaataattttgatcaaactgtcggctgtgatctattaataatctaaattttgagagggtccatctctagcgctctctttgattcatagga

SEQ ID NO: 478 - DNA, 326 bp, Triticum aestivum
  Clone ID: uC-tsfl189011h08b1
cccacgcgtccgtttttttttttttaaacatataacgaagactttatatcaaaatccaacgcacagccacatgatagattcacattaataaaggttcccaaacgtcaccatcgaacatcttacgaatgataaaggagcatatttcaggtagcatatcctaacaggactggtgatattaaaaaactaggatagcaagagcagtatggcaaccggcagatccaccgagcttaatcgatctcctggagcgaggcgccggtggccgtggcacccccagcggcggcggtgacgtcctcggccgtgaacttgcccttggccttgtcagcagc

SEQ ID NO: 479 - DNA, 202 bp, Triticum aestivum
  Clone ID: uC-tsfl189011h11b1
gccgaggcttttttttggaggacagatggtgatgagtgttcagtcaagcctgcgccgtatgctaagcctgtggttactgaattaagctagagatttccgtccattttcttgttccgagggtggatctggatctcattacccgtatgctattactttgtgtttgacggtttgacctgagtacttggttatattacagttttgg

SEQ ID NO: 480 - DNA, 279 bp, Triticum aestivum
  Clone ID: uC-tsfl189012a01b1
gcgcccacgcgtgcgcgctagccaagcaagacccgagcaagccacactctccagcaccagcagaggccggcggcaaagcagcgcagcacagcaacaaatggccaccatcagcgccgccgcggcgaccaccgtcggcgcccgtgccgcgatcgccaggccacaggccctaggtctgccccagctgaggacgaggagcgagagggtgaggtgcagctactccaaggacgccaaggaggcgacccctgccgccaccgtgcgcggggccagcgcgtccctgct

SEQ ID NO: 481 - DNA, 369 bp, Triticum aestivum
  Clone ID: uC-tsfl189012a02b1
agcgtgataaaatactgattctttttctagaagattaataaacaaatttctcaggttgtcctaatttttcaaaaaaattggagttgcagaagtattcgagagttacagattactacagactgttttgtttttgacagattctgttttcgatgcatagtttgtttgtcttatagtttatatggcttatattgcttaatataaattgtagaattgatagggtacagtaggcatcatgtgcgaaaaattatgaatcttatcttgacagtacctaagtggtgatttgctttattatactaacggagcttacgagttttctgttaagttttgtgttgtgaagtttcaagttttgggtaaagttttgatggacta

SEQ ID NO: 482 - DNA, 414 bp, Triticum aestivum
  Clone ID: uC-tsfl189012a03b1
cgcacgctcgctgactacaacatccagaaggagtccaccctccacctggttctcaggcttcgtggtggcatgcagatcttcgtcaagaccctcactggcaagaccatcaccctggaggttgagtcctcagacaccattgacaatgtgaaggccaagatccaggacaaggagggcattcccccggaccagcagcgtctcatctttgctggcaagcagcttgaggatggccgcacccttgcggattacaacatccagaaggagtccaccctgcaccttgtcctccgccttcgtggaggcatgcaaatctttgtcaagaccctcactggcaagactatcaccttggaggtggagtcatctgacaccatcgacaacgtgaaggccaagatccaggacaaggagggcatccccccggac

SEQ ID NO: 483 - DNA, 390 bp, Triticum aestivum
  Clone ID: uC-tsfl189012a04b1
gctacgcaaatacctgaggcatgagcagaggaagagcctgagaagattcatctcattcgtccatggcaaggatccaccaaagaacgacgagaggcggtccatgagcctgcttggaagctcgacgccggcaacgccgatgagcagccttactacccttgagatagaaaggccggccatggaagtcagaaacaccagcgttattgaaatggaaagctagttcatgtgtacaaagctagttcgtgctttatctcccaaagcagcggggcaactgttttgtgtgaagcaacaatgcggccgactaacctaggtcccggtaacctaggttggaaagccaaacaccagggatgtatagagggggttcaaatacttcttaaaggaagggttgataat

SEQ ID NO: 484 - DNA, 75 bp, Triticum aestivum
  Clone ID: uC-tsfl189012a05b1
gaaaaaaaaaaaaaaaaaaaaaaaaaaaaaaaaaaaaaaaaaaaaaaaaaaaaaaaaaaaaaaaaaaaggggcgg

SEQ ID NO: 485 - DNA, 334 bp, Triticum aestivum
  Clone ID: uC-tsfl189012a07b1
ctctgattttggcactcaaggagctgattctaacaacattctgtacctaagggaaattgacgacgcggacaatctgtatgcagctatccaagcaaagaagggtggaaaggcagtggttgttggaggaggttacattggccttgaactaagcgcagtattgaagatgaacgatcttgatgtgactatggtgttccctgaaccttggtgcatgcctcgtctcttcactgccgagattgcagctttctacgagagttactataccaacaaaggagtcaagatcgtgaagggtacagttgctattggttttgatgctgacgccaatggtgatgtgacc

SEQ ID NO: 486 - DNA, 362 bp, Triticum aestivum
  Clone ID: uC-tsfl189012a08b1
accttctctcctccaacaccatggcccccactgtgatggcttcctcggccacctccgtcgcacccttccagggtctcaagtcgaccgccggcctgcccgtcagccgccgctccagcagcgccggcctcagcagcgtcagcaacggcggaaggatcaggtgcatgcaggtgtggccgattgagggcatcaagaagttcgagactctgtcttacttgccacccctctccacggaggccctcctgaagcaggtcgactacttgatccgctccaagtgggtgccctgcctcgagttcagcaaggttggcttcgttttccgtgagcacaacagctcccccgggtactacgatggtcgatactggaca

SEQ ID NO: 487 - DNA, 411 bp, Triticum aestivum
  Clone ID: uC-tsfl189012a09b1
caacaacaacaacaaccgttgagccaggtctccttccaacagcctcaacaacaatatccatcaggccagggctccttccagccatctcagcaaaacccacaggcccagggctctgtccagcctcaacaactgccccagtttgaggaaataaggaacctagcgctagagacgctacctgcaatgtgcaatgtctatatccctccatattgcaccattgctccagttggcttcttcggtactaactgagaagagaagaactctagtagtagacatatgatacaccgttttcttagtccatggtttggtcgttgtagcggtgaaaaaataaagtgacatgcagtatcatgtaagaacccgaactatactagttcaaacatgggaataaaagacaaacacatgtcttgtctacat

SEQ ID NO: 488 - DNA, 274 bp, Triticum aestivum
  Clone ID: uC-tsfl189012a10b1
attgggtagttcgtcttcttttgccatctgaggatctgctagactctgatgctgccttcatcataccgcatcattcgtttcgttccacaattttgagagctcagttcgttaatagcttagcaaggttttgttcgcaaattttgttcttgccagatacggtttatatcctttttatgtcttgtcttaatacacctgcatcgttcaggtgtccctagtagagatgatcagaggacgacttgtgtccatctcattcattacgaatatttgcccttcc

SEQ ID NO: 489 - DNA, 79 bp, Triticum aestivum
  Clone ID: uC-tsfl189012a11b1
ctgggattggctttgggcctttcctgcgcagcttaggtggaaggcgaagaaggcccccttccgggggggcccgagccat

SEQ ID NO: 490 - DNA, 431 bp, Triticum aestivum
  Clone ID: uC-tsfl189012a12b1
cggtttgatcaaggcacgaggaagaatattcaaatgatcatgggcccaaatgttttctgctggctttgccccaccgcgacaggacatcttaaggatggcaccgagttccagaatacgaacaactgatcagagacgaagaacagcattgctgcataaacacaacatgtagacgtgggaatttatctgctgaccagattgatcatttctgccattgcgttgttgtcacccaggcagaggtgaagagctcgggcagtttcacaatcttgtaaatcatgtaaacctcacctgaaattatatgtgtgtgtatgctgtaaagtagtttgggttttgagtactgttgtgtactgactgagtcattcaattgcaaatgtaaccagaatatgtttgtcaccatttgaggtgtgaaaaagggaatggaaattggatatatg

SEQ ID NO: 491 - DNA, 390 bp, Triticum aestivum
  Clone ID: uC-tsfl189012b02b1
tccatggcgaatgttcacagacagctgtaggaggatgaggatcatgaaggggtcagatgcagtgggcctcgctccgagggccgccgagaagagtaagaaccagaagtagcaagaacgatgaacccgatctgtttcctttcctgcgatcgcatcttacaagggtgatggactttatgtgtgatgagaaagggatttacttatatatataacctacgtgtattctctttgttatttccttgtatgttcgttcggaacaagcatgttagattgtgtaagctgatgtgtgtgtatctactactactgcactactttgatttgattcgcgtgtgttgtatgcggtttccgttgtaaattggtgtgctctgtctgtaccgcaaactcttttctttc

SEQ ID NO: 492 - DNA, 238 bp, Triticum aestivum
  Clone ID: uC-tsfl189012b04b1
tcggttcaagggtgcatacaaccagttgaggaagcacgctagggaggatcatcctgctgtccgaccaatggaggtggaccccaatcgacagcgagactggcataggatggagcagcagcgtgatcttggggatttgttcagcatgctgcgttcggggatcagtggcagagaagatggggttggagtcagagaaagtgaccagggcgtgagtgagagatccttgcacgccacgtccata

SEQ ID NO: 493 - DNA, 398 bp, Triticum aestivum
  Clone ID: uC-tsfl189012b05b1
gagctaccgaggtgccgatgtcttcctgctcgccttttctcttatcagcaaagcaagctacgagaatgtcactaagaaggcaacccatctcctttgatcctctctgtttccttgctcccactctcgttgacttgttgtagtttcataaattgtttgttatcttgcttatgagatatgacatgtgcttgtaattttccagtggatccctgagctacggcactatgctcctggtgtgcccataattcttgtcgggacaaagcttgatctgcgggatgaccagcagtttttcgtggatcaccctggggctgttcctatttccaccgctcagggtgaagagctgaagaaggtaattggcgcgacggcctacatcgagtgcagctcaaaaacacagcagaaca

SEQ ID NO: 494 - DNA, 78 bp, Triticum aestivum
  Clone ID: uC-tsfl189012b08b1
cccacgcgtccgtccacgcgtccgctttgtacaatgaaagcataattggccatcggtctcagttgtagtttgtcgatc

SEQ ID NO: 495 - DNA, 156 bp, Triticum aestivum
  Clone ID: uC-tsfl189012b09b1
tgcgggcagaaggggaactgcgtgggcgacgtcgtcggcggcgtcgtcccagggacggggcagggcggcacgcactgcgggcccgtgcacaggcacaccgtgccgttgccgccgtccgccagcgcgccggcggccgacaggaacagccacagccac

SEQ ID NO: 496 - DNA, 74 bp, Triticum aestivum
  Clone ID: uC-tsfl189012b10b1
ggcaatgtaacttccctgttgataatatgtcaacaagcactaagtatgattctatattgagtctttcacaggtg

SEQ ID NO: 497 - DNA, 367 bp, Triticum aestivum
  Clone ID: uC-tsfl189012b11b1
ggagacctgatgcggttatgagtacgaccgggcgtgaacggtactcggtcctccggattttcatgggccgccgggggcgcaccggacaccgcgcgacgtgcggtgctcttccggccactggaccctacctccggctgaaccgtttccagggttggcaggccgttaagcagaaaagataactcttcccgaggcccccgccggcgtctccggacttcctaacgtcgccgtcaaccgccacatcccggctcgggaaatcttaacccgattccctttcgggggatgcgcgtgatcgcgctatctgccggggttaccccgtcccttaggatcggcttacccatgtgcaagtgccgttcacatggaacctttc

SEQ ID NO: 498 - DNA, 267 bp, Triticum aestivum
  Clone ID: uC-tsfl189012b12b1
gccacccgaccggccggcgacgatgccgatgctcatccccgacgacgttcgcgccaaggcggagatctacaccggcgacgcggcggggcaggagaagacgcggctgatgctggcggagacggagctccccagcggcctcctgccgctcaaggacatcatcgagtgcgggtacgtggaggagactggcttcgtgtggctcaagcagaagaagcgggtggaccactacttcgccaaggccggccgccatgtcttctacgccaccgaggt

SEQ ID NO: 499 - DNA, 440 bp, Triticum aestivum
  Clone ID: uC-tsfl189012c01b1
cggacgcgtgggcggacgcgtgggcgcggcgggcgcgagggaccaccaccaccaccaacaggacgaggacggggccggcggcgggtactctctgttcgcgccggggccgtacgggcagttcggcaccgaccagtcgttcgcgttcgccggggccgggcagcacggcggcgtctcgctcacgctcggcctcccccacggcgccggcgaccagacggcgttcctcatgggaggcggcagcagcaacggcgccgacagcggtggcagcggcgccgccggctacgacatgaacatgcagaccaccaagtccttcgcggctcagctcatgagagacttcgtggcatagtatgaatatcaccactattacatagcgcaatccattaatcaaatcccaaaaaaaaatcggttaatcaatcaatttagggcttgtatagaaaataaaa

SEQ ID NO: 500 - DNA, 434 bp, Triticum aestivum
  Clone ID: uC-tsfl189012c04b1
gcattaccaataaggcatgacaaagcggccatcgttgattgttgcaaataaaatagatgaagtgggagctgacgagatgtatgaagaactgaagaggagagtgcaaggtgttccgatatttccagtgtgcgccatcttgcaagagggagtacctgatctgagagttggcctgagagaccttatggatgcctcggatccgcaaggtgtcgatttgagcaaagttattgtagactaaaaggctttgcccctcgttggagaagaattgttctccaattttttccccttgagcactgtctgcttacagatgcactgtagacccgtgttgcaaaaattgctctaattttctgtgttgcagaatagatcatccattgtattagaaaattcagtgtaataataactaagggtaaccagtatgtatgctttggtctttgata

SEQ ID NO: 501 - DNA, 214 bp, Triticum aestivum
  Clone ID: uC-tsfl189012c05b1
cccacgcgtccggccccacttagtcccaactagtaggatagtttatggaggattagatttccttgcggactgtaccccaacaaggttaggaaatggacagaatgttgtgtaaattgtgcttgacatgtactgtaggtaggtaggtaggtacatacgtactataaggcttgttgtatcgaccttccttgtttagcttgaagagtctttccttttc

SEQ ID NO: 502 - DNA, 362 bp, Triticum aestivum
  Clone ID: uC-tsfl189012c06b1
gcggagagcctatttggacgccttacaatcgtgcccatgaccatctcccagctagaaaggagtatgtcgacaagattatcaacagaggtgggaaccaaaccgtcgaagctcgttgatggctcctacagtgttcggcagcgagtgagtcttctgtatgtatctacatatcacaccaaaaggttaccgaataagatgtgtgattggctttcgccgtgtacccataccagcatcgatcctgtatcacttgtgtggtagtttgcacaaaacctgcttgaaaatgtttcatggaaacttctttgcctggcgatgatgcctgtattgaataataaatgattcagtgtcaacaacggcgtaatgaaaac

SEQ ID NO: 503 - DNA, 159 bp, Triticum aestivum
  Clone ID: uC-tsfl189012c07b1
gtttgttgctatggctgtggaagctgtttaacctgtgttatgtccaatttagctgtttaattctagtctggttatgttccaagacagagttttatgtaatgtggggattatatgtgtttgtgactgaattttatgcacctattaattttgcggcgtctc

SEQ ID NO: 504 - DNA, 139 bp, Triticum aestivum
  Clone ID: uC-tsfl189012c08b1
cccacgcgtccgtggacgcgtggggtgaaacaaagcaagcggtactgcagcttttttttcacctgtacgattattcatccgatgaggtcatgtaacagtatttgattggtttatcgaacaagaatgatggtaaacttcc

SEQ ID NO: 505 - DNA, 431 bp, Triticum aestivum
  Clone ID: uC-tsfl189012c10b1
cccacgcgtccggccacgcgtgcggctcccatcgagagaactgaggcgtctcttgcttcagaatctcataatcaagtgcaagctgctccatttgcatctcaagatcctcacggtctttcttgtacagctcgatctcatcactcagttcaagaatcttctcttgtagttcagaactagcgacgccatcactcttcttcaccaatgcatccaacataagctcgtcttctttctcttggtacgagcttgtttcagacatgtccatcttgtgtccagcactgtgcacatttgacagtgcatgctcatattctgcctcctggggatcctctactgtttcttcttgcaaaatggacatatctctattcttctgctcgagcatttcatcaagatccttcacagccagaagcagctcagagttggactcctgcattttc

SEQ ID NO: 506 - DNA, 63 bp, Triticum aestivum
  Clone ID: uC-tsfl189012c11b1
aaatttaaaaatttaaaaaaaaaaaaaaaaaaaaaaaaaaaaaaaaaaaaaaaaaaaaaaaaa

SEQ ID NO: 507 - DNA, 157 bp, Triticum aestivum
  Clone ID: uC-tsfl189012c12b1
atcgtgggatatgtttccctggtttggagaatataggcgcaaatttgtttgtaacattttcttcgcctgaatggttggataattgaatagtttgttgtactacgatctgtggactcctttcgtccgaagtattgaatcatatgcttaaaaaataaaa

SEQ ID NO: 508 - DNA, 246 bp, Triticum aestivum
  unsure (1)..(246): unsure at all n locations
  Clone ID: uC-tsfl189012d04b1
cccacgcgtgcgctaaggcattcctatggttttgttctatgagatgtttattcctatggtcctttacataggcaattggatgattagtactgtcagcattgtttagcttgccttgctcctccagcgaaacgccacacattgtttttttttccccgcaaagaaagggaactaggacaacctgtgttgctaaactgaagaattgcgtgaaactggctggttgatgcttgtgcaatctttgctttcgng

SEQ ID NO: 509 - DNA, 183 bp, Triticum aestivum
  Clone ID: uC-tsfl189012d05b1
gccagatcatgcttttactagttggatttagcagcgtctgtgttcagtaaacgaatttttactatgagtatgttctagactgaaatgtaatgttggaacctgcgaggattctgtgttatttcacttgctggagaatggagatatgttaccttatatattctataatttgattggattgtgcac

SEQ ID NO: 510 - DNA, 284 bp, Triticum aestivum
  Clone ID: uC-tsfl189012d06b1
catttctgaagatgggaagaactgaaggcaatgaacatctattttctcggaaaagtgcaggcgcatgaaatgaagaagattgcctgcattagctgcttttacactcgggctctatgaatttacttaatcctcttgtaactgctttgatgacaactggcgagagaacttgtattatgtctgctctcacgaatgctccttcatgtttgtcttaagtgagtacatgttgcaaattcatttgtacactttatgtctgttgaaggtgaaattgaacacattgacagctt

SEQ ID NO: 511 - DNA, 464 bp, Triticum aestivum
  Clone ID: uC-tsfl189012d08b1
gacggtgcaggtgaccgacaagggcgccgacggcggcggcgcggtggtgaactggaccatggacttcgacaaggccagcgacgaggtgcccgagccggacgtcatcaaggagaccgccgccaagaccctccacgaccttgacgactaccttctcaagaactagagtagcttttactagctgcctcgtcgctggccgccgcgtccgtcgtccgtccatccatccatccatgtctactgtcatcgttacttgctgtctgccgtgttcccccatctagcttactctcacgaaaacgaccgtgtgtaccatgtacgtgtgcatctgcctgcgctgggacggacgcgtgagtagtagtggactgataataaagtcccaactttatggtcacgtatacgtacgaatggtgttagatttgtgtgacttggtttgattcgatctgcaagaaaaatttagtatgttgtggcgg

SEQ ID NO: 512 - DNA, 383 bp, Triticum aestivum
  Clone ID: uC-tsfl189012d09b1
cccacgcgtccggcccacggtctaatccgattcaaacgcaccgcttcctcgtgtccgaactaagccccaatcccaccaccaccgccgctggtgctcggcgcgatggcgcagaaggacgccgccaatggcaacggcgccaccacgcgcccgccgcccactccctcccccatccgcttctccaagttcttccaggccaacatgcggatcctggtgaccggcggagctggcttcatcggctcgcacctcgtcgacaagctcatggagaacgagaagaacgaggtcattgttgctgacaactttttcactgggtcaaaagacaacctgaagaagtggatcggacacccaagatttgaactcatccgtcacgatgtcaccgaaccact

SEQ ID NO: 513 - DNA, 188 bp, Triticum aestivum
  Clone ID: uC-tsfl189012d10b1
agcacatatcctgtcgataccagttttagcccttcgttgtgttgtcacttgttttgattgacgagctatctagttttgtgacgtgagttcacactttgtagagcttgagacagtagcacatatcctgtcgataccagttttagcccttcgttgtgttgttcggatgcttaatgctatggttttggacc

SEQ ID NO: 514 - DNA, 330 bp, Triticum aestivum
  Clone ID: uC-tsfl189012d11b1
ctcctcccctttcggttcgggttctggttcggttcgggttcggttcgagagagaggccgagtagctagcctagtctagggtttcggtagagaggaagtgagatccatggcggagacggagtaccgctgcttcgtgggcggcctcgcctgggccaccgacgacaacaacctccagcaggccttcagccagtacggcgagatcctcgacgccaagatcatcaacgaccgcgagacggggaggtcccgtgggttcggcttcgtcacgttcggcagcgaggagtcgatgcgccaggccatcgaggagatgaacggcaaggagctcgacgggcgc

SEQ ID NO: 515 - DNA, 412 bp, Triticum aestivum
  Clone ID: uC-tsfl189012d12b1
cccacgcgtccgcccacgcgtccgcccacgcgtccgaccggcgaggccgcgtcgccgaagaatacacggaggaggtggcccgggtcggcgtcggcgccatccggtgcaggccacgggcctgcttccaagtgcgtctgcgcgccggccacccatgccgggtccttcaagtgccgtttccaccgcaccaactcccagggccacggccacggccagggaagccgtccttcttcgcctccttcaccggtcgcggccaacgcggtgccgcggcacccggcctcgccgtcctcgtcctccggcaccgtcacgacccagtgacgcaactcaagcatcggcttcgagaatcaagaacgctcgacaatgaaaagggaaaggaagatcatatacatatcataagaaagggagtttatttact

SEQ ID NO: 516 - DNA, 241 bp, Triticum aestivum
  Clone ID: uC-tsfl189012e01b1
gcggccactcgtgcgcccacgcgtgcgcccacgcgtacgggttatccaatacgcacagaaatgcccatctgaaaaccctagccctgatgcccgatcccggcgagcgagatggccaacccgagggtgttctttgacatgaccgtcggcggcgcgccggcggggcgcatcgtgatggagctgtacaaggacgcggtgccgcggacggtggagaacttgcgcgcgctctgcaccggctagaagg

SEQ ID NO: 517 - DNA, 244 bp, Triticum aestivum
  Clone ID: uC-tsfl189012e02b1
caaaaatggcaaagttgtggagagatatccaccaacaacttcaccattccaaattgagaaggacattcagaaactcactgcggcataagtgcttttgagtccggcttcagttaagcactcctgtatatattgcctttttttttcttccggaaactagagttttacttgtgattatgactcttgtgcgatataatgttttccattcctgtaaagtaattcactgatatgtatagacatttccgaa

SEQ ID NO: 518 - DNA, 353 bp, Triticum aestivum
  Clone ID: uC-tsfl189012e04b1
ggcggtcagtcggaggtggaggcgacgctgaacctgaacgcgatgaaccaggcgccgaacccgtggcacgtgtgcttctcctacgcgcgggcgctccagaacacctgcctcaagacgtggggtgggcggccggagaacgtggccgcggcgcaggaggcgctgctgctgcgcgccaaggccaactccctggcgcagctcggcaagtacaccagcgacggcgaggccgcggaagccagcgagaacatgttcgtcaagaactacagctactgatccgtcggcgagctatctatctaattatctacctatggagggagagtgctagtagcgccttgagcagcttgagggcaccttag

SEQ ID NO: 519 - DNA, 328 bp, Triticum aestivum
  Clone ID: uC-tsfl189012e05b1
gcggacacacacacacaagcgaaacccactccacccaaccgtctgggagcagagcagagcctctctttgtccttcaccttcgtcttcctccctctcggcagctcgacctttgcatggcagcagtggctagctccaaggggcgggtgatcgctgggagcctcgtcgcgcgcgtactcgccggcaaggccaacgcctccccgaggagggcggtgcacgcgtgggcctacgacaagaacgtggacgagcaggtgcgcccggccttcgtgccggacgatgtgatcggcggcgccgggagcccagacaagtactggggccctcaccccaccac

SEQ ID NO: 520 - DNA, 179 bp, Triticum aestivum
  Clone ID: uC-tsfl189012e06b1
tcgcggacgcgtgggcggacgcgtgggatacggtctactgctatgcttggcctgcactcggtttcataagcacgtacatattctgcaatgctgtgaacatatattatccgtgcttccagtgatggatatgctagttttatcagcaataataaatatataatgatccgtgttgtcctctg

SEQ ID NO: 521 - DNA, 279 bp, Triticum aestivum
  Clone ID: uC-tsfl189012e07b1
tcgcggacgcgtgggcgtctcgtctcctccttcctcctggtcctccaagccaagaaactcctcatctccaccgtccgcccgtgaaggaaggaggcgatcggccatggggaagatgtgctgcagccaggaggaggacgaggcggggttcaacctgctgccgctggtgatggccgccttcgtcatcatgctgctcttcgtcggctgctcgccgccgccccggcgcaggcgctgcgtcgtcgttccgtgctactgacctgacctgacctcatggtggccggg

SEQ ID NO: 522 - DNA, 401 bp, Triticum aestivum
  unsure (1)..(401): unsure at all n locations
  Clone ID: uC-tsfl189012e08b1
cagtatgtaacttacaattgatggtcggtaccactgatatccctgattggtgctttctggaggtttatggaaaagaagggaaaaactgctttacggaatctcctttggcggacactcttactcagttttaccagaaatcaccaatatcacatatttccaaggttaagacaccaacactctttcttctcggagcaaaagatctccgtgttcctgtttctaatggcctacagtatgcaagggctttgaaggagagggggattgacaccaaaattattgtcttcccagaagatattcatggacttgacaagccacagtccgactttgagagcttcctcaacataggagtttggttcaagaagtacttgagcaaataagcattgngctcttaaacacaatgatct

SEQ ID NO: 523 - DNA, 195 bp, Triticum aestivum
  Clone ID: uC-tsfl189012e09b1
ttttctcctcccaataaagatgaggatcgacatcatccaaaaaaaaaaaaaaaaaaaaaaaaaaaaaaaaaaaaaaaaaaaaaaaaaaaaaaaaaaaaaaaaaaaaacacaagaacaccagagccgatgacaacgaacaaaaaaaaaaaaaaaaaaaaaaaaaaaaaaaaaaaaacaaagggggggggggtttta

SEQ ID NO: 524 - DNA, 215 bp, Triticum aestivum
  Clone ID: uC-tsfl189012e10b1
cgcgaaggcgctgatgaagaggcgcacataccttctggagatgaatggcttctaggagttcttcctgggtatctgcttgctggtgcaagcaaagggtcgtttggctgctttaaacttttggtctgtgtaatagtctgtgcttgttgtctggtgtgttagctctttgtacagtggtgacatttggttagctatatgaaaaacatatcaagttggtc

SEQ ID NO: 525 - DNA, 421 bp, Triticum aestivum
  Clone ID: uC-tsfl189012e11b1
gatcgaacccaagaatatcatcatccgttagccgtcgccaccaccaccaccagcaccatggcagcgcccccctcctccgtctccgtcagggccggcgcgtccgtctcggcgaagctgacccctcgccaggccgcgagggctgggttcggtggcagggtcagcgtcagctcgggcaggaagtgcggcggccccgtgcgggcgtcgctcttctcgcccaagcccgcggtggccatggacgcgaggccgaccaaggtgcaggagctgcacgtgtacgagctcaacgagcgcgaccgcgagagccccgcctacctccggctcagcgccaagcagagccagaacgcgctcggcgacctcgtccccttcaccaacaaggtgtacaacggcagcctggacaagcggatcgggatcacggcggggatct

SEQ ID NO: 526 - DNA, 429 bp, Triticum aestivum
  Clone ID: uC-tsfl189012f01b1
ggtatgaaggtttacatatactcaagtggcagtagagaggcacagaagctactatttggacatacatcttatggtgatctgcggcaatttctgtgtggttttttcgacaccacaaccggaaacaaaagagaagcaaggagttattttgagatctcgcaatcacttggggtggacaatccgtctcaaatcttattcatcacagatgtgttgcaagaagccgttgccgcaaagagtgcaggtttcgaggtaataatctccattcgcccggggaacgcaccgcttcctgcgaatcatggcttccggactatcagttccttcagtgagatctgacaaatgtgcaagaaacgaacatgccagggaatctctattgggtgtgtaacatgacagtgcttcgtggccccccggatcatgttcttgtaatagtagtat

SEQ ID NO: 527 - DNA, 399 bp, Triticum aestivum
  Clone ID: uC-tsfl189012f02b1
caggcatttgctgagatgtacaatcgtccaattcacatatattcatacagtacagagcctattaacatttttcagggaagttataacacagatgttcctccggttaggttaagttaccatcacggtaaccattataattcagttgttgatcctcgtcggctgacagttggggcaggccttggatttagctcccttagagggaccaacagtgttgacagagaccaagtgaaggctgcaataaaagctcagcaagatcagcagattgagaacgcacttttggctgaagggcgactctactctgatctggagttaactgagaaggaaatagagcggatggtgatggaggcctctcgggcagagtatctgaaccagcagcaagttaacttcagagagtcatca

SEQ ID NO: 528 - DNA, 86 bp, Triticum aestivum
  Clone ID: uC-tsfl189012f03b1
gcgcccacgcgtccgcggacgcgtgggcaagaatagattggatctatccggctgcactttataatattttttagtatttttcggat

SEQ ID NO: 529 - DNA, 428 bp, Triticum aestivum
  Clone ID: uC-tsfl189012f04b1
gcgcccacgcgtgcgccagcctcctcagtcctcacagcatcctctcagtccttagcttgcttccctcgccgccacccaccaaggaaaggaggatgtcttgctgcggcggcaactgcgggtgcggcgccggctgcaagtgcggcaacggctgcggcgggtgcaagatgttccccgacgtggaggccaccgccggcgccgccgccatggtcatgcccaccgcctcccacaaggggagctccggcgggttcgagacggccggggagaccggcggctgcgactgcaccacctgcaagtgcggcaccgcgtgcggctgctcctgctgcagctgcaactgagccggcgcccaggaggccggccggcagaggcgagcacgaggatgaggaggacaagcaagcaagcaccatcaccaccagttcaccaccacccag

SEQ ID NO: 530 - DNA, 387 bp, Triticum aestivum
  Clone ID: uC-tsfl189012f05b1
gtttggagccataaacatgagagtctgggcatcatctcttgcttccgtgtctcttggtgggcaatcttctccccgagctgctagattggattgatgatttggattttaacgtcgggcgggagagcatgcgggctgtctgaattgcgctggatgtggaagctcttgtaactcacatgaacatgtagtggaacatcttgtttgtagcatgtaaatcttagggatactgttgagcctgtgtagacacactgtaacattaatcatgagcaccaattgtcatagtttttgagcaactgggcacacatcataagcccttgtactatttttcacatgtaatctgcaattgcagtatgttcatctgtcttgtactaataagtgaaagacatttcg

SEQ ID NO: 531 - DNA, 382 bp, Triticum aestivum
  Clone ID: uC-tsfl189012f06b1
gcgcccacgcgtgcgatcgacaacgtgaaggcgaagatccaggacaaggagggcatccccccggaccagcagcgcctcatctttgccggcaagcagcttgaggacggccgcaccctcgctgactacaacatgcagaaggagtccaccctgcacctggtgctccgcctgcgtggtgggatgcagatcttcgtcaagaccctcaccggcaagaccatcacgcttgaggttgagtcttcggacaccatcgacaacgtgaaggcgaagatccaggacaaggagggcatgcccccggaccagcagcgcctcatctttgccggcaagcagcttgaggacggccgcaccctcgctgactacaacatgcagaaggagtccaccctccacc

SEQ ID NO: 532 - DNA, 280 bp, Triticum aestivum
  Clone ID: uC-tsfl189012f08b1
cccacgcgtccgattgtgttggcctcgtcgaataaaacgtgtcaagcctccagtcttcagggtgttgctgttgcatcactgtttcgcaatcagatagatctttttcgtcagctttggagaccaactgaaagctcaggtcaacgtgtaatcgtactgttaagtgcttgctgtttgttggaagttgttgggtccagatcagatcgatcgggatcagggagtacagctctgtgcagaagtggtttctgacgtgctaaaaactatacaagaaagagagctaaat

SEQ ID NO: 533 - DNA, 202 bp, Triticum aestivum
  Clone ID: uC-tsfl189012f12b1
gctaaacagcagcgcgcgagcaatggcgtccacctcctgcttcctccaccagtccaccgcgcgcctggccgcctcggcacgccctgcgcccgccgtcgggcgcacccagctgttcgtctgcaaggcgcagaagagcgacgaggctgcatctgacgctgccgtcgtcaccagccggcgcgccgcgctgtccctcctcgccggt

SEQ ID NO: 534 - DNA, 246 bp, Triticum aestivum
  Clone ID: uC-tsfl189012g01b1
cttgtcctccccactcagtcctcggttcccggtccggttcggttccgttcggttcgttagggtttagtagcggggaagaggaaggcatggcggacgtcgagtaccgttgcttcgtgggcggtctcgcctgggccaccgacgaccagtccctacagaacgccttttccaaggacggtgacgtcatcgacttcaagatcatcactgacagggagacgggccgttcccgcgggttcgggttcgtcacct

SEQ ID NO: 535 - DNA, 379 bp, Triticum aestivum
  Clone ID: uC-tsfl189012g02b1
gcgcggcggtggcggcggcgactccggcggccagtggaggaactgagcctcgaatctcccagttatcgatctatctaccgtgtcgtcgtcgtcgtcgtcgtcttcgtcagcaagttatcttcggtgtcgtcgtgttcctgtgtcagtctgagtcgtcgtgtgtgtggtgtttttgatcgcgagctcgagtgtcgctctgtccggggttaattagagctggttacgcgaggaagaaacaacatgtgttactatctttcagtcggtcggtcggtcggtcagtcggtgatgcagcaatccccttctgtcatggattgggatgtgatgttggaatatcctatgtttgaacaagtttaaatggattaagaaaatgcaagtcata

SEQ ID NO: 536 - DNA, 119 bp, Triticum aestivum
  Clone ID: uC-tsfl189012g03b1
gcctctcaaagctgcatgtgctactgtatgttgatgtacatagagaagattacatctaaaaaaaaaaaaaaaaaaaaaaaaaaaaaaaaaaaaaaaaaaaaaaaaaaaaaaaataaaaa

SEQ ID NO: 537 - DNA, 323 bp, Triticum aestivum
  Clone ID: uC-tsfl189012g05b1
tcttcacccaggatatgcagggggaggaggacatggagcggccactgccaagggaacggccgctctatttacccttattgtcggtttcacttgcctagcctagtttgaagagtttcccgggggtggcgaggagtaccggcatatcgagtccctggtgttttcctctacgagctggggagggcgtgtggttctctcctcgattggaacgaaaagaagaaactacagcgtcacataactgcagcaaagaaggtactgcatgagatgtaacagggtcgtattatggaagaacagaatccctgctgttgcacggagtgagtacagtt

SEQ ID NO: 538 - DNA, 377 bp, Triticum aestivum
  Clone ID: uC-tsfl189012g06b1
gcgggccgtcggactcgatgccgcgggcgcacgccgactcgagctgctcggagcacgtgctgacggcgtcgtgcgagcggccggaggtgcagagccagcccaagatctccgagtgggagcgcacgttcgcctccgccaccccgggcgtcaacccggccggctcgatgctcgacccgtcggccgggctccccgccggcgacccgctcctccaggacatcctcatgtactggggcaagccgttctgagaatccagctccgtggctgtacgtgtggtttgggagggaatcgatcggggtgactcgggcgagccgccggaatctatcggcaggagatactcgtagccgttggatggcagatatcaatagggcacaaggagc

SEQ ID NO: 539 - DNA, 377 bp, Triticum aestivum
  Clone ID: uC-tsfl189012g08b1
attggagggtcgattcttgcctcccttagtaccttccaacagatgtggatctcgaagggtgagtatgatgagtcaggtccagcgattgtccaccggaagtgcttctaagttgcgagttgtctgggtcttctgaatctattctggctgttcttttctcaagtccttgccatgtaagctactatgtttgagattgctgggattctgttgactgtattaccggattaatttgttgggtcaaaatatgttcagtgggctgctatatttgaccggtgctgaatcatatgccgcatgttctggttttttttttcatgccaaaaagtttggtgctagcgtggggggagtgtcaaactatctaccagagtctttgtaagattttt

SEQ ID NO: 540 - DNA, 271 bp, Triticum aestivum
  Clone ID: uC-tsfl189012g09b1
tcgcttttttgctcgagtgacggttaatgcgcaacccggtttgacctgttgcagatttgttcattggccgtctaatattaggtgggtgattagcagtagtcattagtgccacattactcttgcttgtataatacagtacagtatatggtgattgtcaccgtgtggtcaaactcctatctggtttgctggtgtaccgtatgtacgtgttgtagctatgggtattgtatttgtagggcagatttcatttgttcattctcaggtggtttttggt

SEQ ID NO: 541 - DNA, 413 bp, Triticum aestivum
  Clone ID: uC-tsfl189012g11b1
ccgagcaatcctctctccgcgcccacgcagcaagccctccactcccgatggcccgcacgaagcagacggcgaggaagtccaccggcggcaaggcgccgcgcaagcagctggccaccaaggcggctcgcaagtccgccccggccaccggcggcgtgaagaagccgcaccgcttccgccccggcaccgtcgcgctccgggagatccgcaagtaccagaagagcaccgagctgctcatccgcaagctgcccttccagcgcctggtgcgggagatcgcgcaggacttcaagaccgacctccgcttccagagctccgccgtctccgcgctgcaggaggccgccgaggcctacctcgtcgggctcttcgaggacaccaacctctgcgccatccacgccaagcgcgtcaccatcatgccc

SEQ ID NO: 542 - DNA, 172 bp, Triticum aestivum
  Clone ID: uC-tsfl189012g12b1
ctaatacttgtcgtgtgtagtaatatgtcagtgccgtactctgtgccatactatgttggtagagctggatcatttgttcgttggtcgtcctaaatcatccacctggtgggtgcttatctgaaccttgcattttatgtctgagaattagtgattgtgtgaaccattattaaca

SEQ ID NO: 543 - DNA, 327 bp, Triticum aestivum
  Clone ID: uC-tsfl189012h01b1
gccgcaactgcgtgctgctgctgaacgcgccgcccaacgccacgggcctcatcgacggcgccgacatggccaggctgcgcgagttcggcgccgccgtgaggcgcatcttcggcacggacctggccgagggcagcagggcgcgggccagcagcgagcgcggcggcggattcgaggcggggaaggtgctggacgggcgcgaggagacgtactgggcgccgacggcggaggacgggtggcggaacgggtactggatcgagctgcggcggccggcgggggcgcgggcgttcaacgtggtgcgggtgcaggagcacgtggcgctggggcagc

SEQ ID NO: 544 - DNA, 344 bp, Triticum aestivum
  Clone ID: uC-tsfl189012h02b1
cggagatcctgtccaagaacggcatcaagttcggcgaggccgtgtggttcaaggccggcgtccagatcttctccgagggcggcctcgactacctgggcaaccccaacctggtgcacgcgcagagcatcctcgccatctgggcggtgcaggtggtgctcatgggcttcatcgagggctaccgtgttggtggcggccccctcggcgagggcctcgacatcatctacccaggaggcgccttcgacccgcttggcctcgccgacgaccccgacaccgccgccgagctcaaggtgaaggagctcaagaacggccgcctcgccatgttctccatgttcggcttcttcgtg

SEQ ID NO: 545 - DNA, 322 bp, Triticum aestivum
  Clone ID: uC-tsfl189012h03b1
gcgccctctcgtgcggcaaaccatggcgtccatgaccggcctgtcgcagggcgtgcgtctcccaggcccggccggcaggcgcgccagcaggttcatcgtgagggcgtcgtcggcggaggcggaggccgccggccgccgcgcggtccttggcctcatggccagcggagtcgtcggcagcgcgttcgctcaggtggtgcacgccggcaccgtcgcggccatcaaggttggcccgccgccgccgctcttcggtggactccccggaacggacaactccgacgaggcaagggacttcgacctgcccctgaagaaccggttctacctg

SEQ ID NO: 546 - DNA, 263 bp, Triticum aestivum
  Clone ID: uC-tsfl189012h04b1
gcgcccacgcgtgcggctcctccttccactcctacttcgccgtttccgggagattcttggattggtttttcggcaaagatggtttcgcccgtcgtgatcgcgtcggcggggctcgggatgctggcgggcgtggcgatggcgagccggggatcgggcgacgggctgccggcggcgtccaggtgggacgcgcggccccgttgctccacgtgcagcggcaccggccgggaggagtgcctctgcagccgttggtccgacggcgacgt

SEQ ID NO: 547 - DNA, 385 bp, Triticum aestivum
  Clone ID: uC-tsfl189012h05b1
ctttaaactgtattcgccatggtagatgggttgatgcagcccacttgaaggagtcttgtggttcactacattcaacaaggaaaaagcaaaagagtgtagtcttgtgatgcagcccacttgtttcatttttgtgtgtattttgaagatggggtgcaggaagacagtgatttttgtgtgtattttgctcagggttgacattttttccgctttacagattttggctgccatcccatgggtgcacaggtgcagtgctgtggggactggacatgcagtgtgctggcaccgacttgcatttcacaaacaaaactgtggatttattttttaagtccctcgtcactgtaaattgtgtgtgtttgtattgtagattaaaaagaggaacattgta

SEQ ID NO: 548 - DNA, 362 bp, Triticum aestivum
  Clone ID: uC-tsfl189012h06b1
gcgtgccggaggcggccatgtcggggatgctggcggcggtgcggcggttcaacgaggagcccgcggaggccaaggcaccctactacacgcgggacgccgggcggcgcgtgcgctacaactgcaacgccgacctcttgcggacgctgctgggcaagtggcgcgacaccatctacatggacgacgtggaccagctggcgccgggcgaggaggaggaggtcctcccgccggcgtgcaggggcgtcgcaccgaagtacacggcgcagatgcggatgctggggcgcgcgctcttcgagctgctgtcggaggccctgggcgtgcggcgcgggtacctggaggaggaggccggctgcctggagacgctc

SEQ ID NO: 549 - DNA, 72 bp, Triticum aestivum
  Clone ID: uC-tsfl189012h08b1
ctccacgacgcgcgcgagcgagccatggccgccctccgcctcgcctcctccgtcaccctctgcccggcggcc

SEQ ID NO: 550 - DNA, 397 bp, Triticum aestivum
  Clone ID: uC-tsfl189012h09b1
cccacgcgtccgatttcctactggatccttacactcgactaccaatatgagagggagcagcctagtgcaggcgaccatgatattcttcattggatgccttgtgctttgtgcacagtgtgctgtcgataataagcaaacgatggtcaaccaagatgatcatgcagcgaacacaaataccaacgctaccatcgtcaactcaacatctgtaggcgagagcaagaaaaccgagctattttgcagcctctatctcgtatgttatttcaactttgagctccgtgctaagtgctactgttgccagaataagaatggcgaatgttacaagacgaagagtgagtgcctgcagaagtgccattcctacaacggttaatgcccaccttcatcggggtctctgggatag

SEQ ID NO: 551 - DNA, 249 bp, Triticum aestivum
  Clone ID: uC-tsfl189012h10b1
tcgcggacgcgtgggcggacgcgtgggcggacgcgtgggcggacgcgtgggtcgtgttcggtagtagaatttggctacagttttgaattatgatacccccctgtgtttgttatccaagacttcgttgaagtagatcgcatgctattctggtacaatggttattgtctgagcttttaaattatctgcccgcctgggagaatcttatgcttgtgagttcttgtcataaagatggattttactccttgcgtg

SEQ ID NO: 552 - DNA, 202 bp, Triticum aestivum
  Clone ID: uC-tsfl189012h11b1
cccacgcgtccgcctcatcctccatgtggagatggctgcacctaggcctacttagttacttgcctactaagcatccagatttcctacaagtgtcgtatcattatggtctccgaaataccagtacttttgtgtcgtgagcttgtgtctgtgttttgccttgttgagaataactacactctgttggtgaaaaagtgaatttcgt

SEQ ID NO: 553 - DNA, 407 bp, Triticum aestivum
  Clone ID: uC-tsfl189012h12b1
tcgctcatcggcgcatcgcatcgcatcccatcgcatggcggctgcggcggtggcctccaacgggggtgcggcgcccgtgcccgggcgcctcgcgtccgtctacagcgaggtgcagacgagccgcatcgcgcacgcgctgcccctcccctccgtcctccgctcccacttcaccctcgccgacgggcccgccagcaccgccgtcggaagccccgatgagatcgccaagctgttcccctgcctgtacggccagccgtcggccgccgtggtgccgtccgccgagccggtcgagacgaagccgctcaagatcggcgtcgtgctctccggtggccaggcgccaagcggccacaatgtgatctgcggcatctttgattacctgcaggagcgtgccaaaggcagcaccatgtatg

SEQ ID NO: 554 - DNA, 296 bp, Triticum aestivum
  Clone ID: uC-tsfl189013a02b1
ctgcggctccgacggcctgccccacctcatcgtcagcggcgaccagcggcactggggcgagttcatcacccccggcgtgctcttcctctacatcgccggctggatcgggtgggtcggccgcagctacctcatcgccgtcagcggcgagaagaagcccgccatgcgggagatcatcatcgacgtcgagctcgccgccaggatcatccccaggggcttcatctggcccgtcgccgcctaccgcgagctcatcaacggcgacctcgtcgtcgacgacgccgacatcggctactaagtag

SEQ ID NO: 555 - DNA, 264 bp, Triticum aestivum
  Clone ID: uC-tsfl189013a03b1
cggacgcgtgggcagcgcagtctagctagtcaacagtgcgatccaagatagggagccaggacgcgacgaggcggccactgatggcggcaccggcgccgaggagcgtgggcgtggcggagcgggcgctgcgcggggtggcggacctgatcaagctactgccgagcggcacggtcttcatgttccagttcctcagcccgctcgtcaccaacaacggccactgcgccgtctacaacaaggtgctctccggggcgctcctcgcgctct

SEQ ID NO: 556 - DNA, 135 bp, Triticum aestivum
  Clone ID: uC-tsfl189013a05b1
tttggttcataagcagtgaagggtgatgcgataggggcagaaatttccgaaaaaaaaaaaaaaaaaaaaaaaaaaaaaaaaaaaaaaaaaaaaaaaaaaaaaaaaaaaaaaaaaaaaaaaaaaaaaaaggggggg

SEQ ID NO: 557 - DNA, 345 bp, Triticum aestivum
  Clone ID: uC-tsfl189013a06b1
gcgtcagcttcatcgccttcaagccaccgggctgcgaggagtccggcaaggcctaaacagctgactcacgacaggccatatataaagtgccattgcaggtgtgacaactctgacattgctttgggcattgcttctccatttatctttcttattagctcctaagaatatgcgtatgaccatgttcatgtaccaacatggctcgagacagcatgctcgtatgtgaatgctatcgggggctatgtatatgcacggacgcattgcacctgacgcatgttgtcgaatacgatgatgcggacatacgcgtcagggtactccttattgacctccttcacctcgttgatcacc

SEQ ID NO: 558 - DNA, 364 bp, Triticum aestivum
  Clone ID: uC-tsfl189013a09b1
ctctcacgtcatcctcgattccttccgctccctcgcgacccccgccgccgcctcctctcccgctaccgccgcgccagggcctcgcctcgccctcactggccaccggcgacctccaacccttgttctccgcctcgtcgccatagccaccttgagctcgagcagaggagcggctcggcaggagggggcaacagccagccgcgcctcgtccgtgtcgcgtggtggcccagatgcggtcgtcccgtgctctgcctccacgagcgcggcctcgatccaaactcggcaggaggaggggagcagcagctggccatgctgtgttggccgtggaggaggaaggagctcatgtggctagggattggctaccctc

SEQ ID NO: 559 - DNA, 337 bp, Triticum aestivum
  Clone ID: uC-tsfl189013a10b1
gcgtcccgagccctgaccagtgccatacaggccactcaaccaaaacgaggtcagatttctcaatttccactcggaaatccgaaccgtggtcatctccgtcgccgccgcctgccgcctgccgccgccatcgccatggcttccgctctacgggcccttcaccaccgcctcccccgctctctccaccactccaatcccctttccacctccgcctcacctcacgacctccgcgagctcctccgcatccaacgcatcctcggtgaccccgcagcaaccacccagcccacgcaaacgcaacaacgcccacgagccgccgccaccgcagacctgcaccgacttc

SEQ ID NO: 560 - DNA, 323 bp, Triticum aestivum
  Clone ID: uC-tsfl189013a11b1
cccacgcgtccgcttaatctgtagcggctagatagaagttcatgggctgctgcggtgggggcgccatgtcgtcgtcgtcgtcgtcgaggccgaggggcggcatccgggaggagacgctgctgcgcgtcccgggcgcggcggtgcacctcgtggccggctccgaggggcccctcgagctcggccgcggcgagctttccgtcgtgaggatcttcaaggacgacgtggcggtgaccaccgtggtgcgcgtcggccgcgacctcggctggccgctggcgagggacgagcccgtggtcaaactcgaccgcctgcactacctcttcacg

SEQ ID NO: 561 - DNA, 332 bp, Triticum aestivum
  Clone ID: uC-tsfl189013a12b1
atcctttccaccttctcagccacacagagaaagagcgtccaagctccagctagctagccaccaatggccgccgcactgagcctacgcgcgcccttctccgtgcgcgccgtggcgccaccggcgccccgcgtggccctggcgcccgtggtcctcagcctcgccgacgtcaagcaggtgcggggagccaggctccgcgcgcaggcgacgtacaaggtgaagctggtgacgcccgagggcgaggtggagctggaggtcccccacgacgtctacatcctcgaccaggccgaggaggaggggatcgacctgccctactactgccgcgccggttcctg

SEQ ID NO: 562 - DNA, 305 bp, Triticum aestivum
  Clone ID: uC-tsfl189013b01b1
cgcacccactccaccccatcctcctcctctccggcagcccgaccgacgccgcagccggcgcatcgccgcgatgggccgcaagctcgcgctcctggtgggcatcaactaccccggcaccaaggccgagctcaagggatgccacaacgacgttgaccgcatgcacaagtgcctcgtcgaccggttcggcttcgacgaggagaacatcaccgtcctcctcgaccgcggctcctccgggccgcagcccaccggcgccaacatccgccacgcgttggccaagctcgtcggggacgcgccgccgggggact

SEQ ID NO: 563 - DNA, 371 bp, Triticum aestivum
  Clone ID: uC-tsfl189013b02b1
caacagcaacgaagaagtactctgcttttggatcgaggactgaagaaaatagataggagaatcgatggctaccttcgcgacgtcgacgccggcggtgatggggtctgctcgcacgggccgggtggccgggcctcggcggtgcgtggtggcgcgggcgtccgcgacgatggcggcgccggcggcggtggccgcggggaggacgcactacgaagtgctcggtgtgggtgccggggcgagcaggggcgagatcaaggcggcgtaccggcgtcttgccagggaggtgcacccggacgctgctggcggcggcggcgacgaggggttcattcggctgcacgcggactacaccacgctcgctgaccccgacgagcgcg

SEQ ID NO: 564 - DNA, 116 bp, Triticum aestivum
  Clone ID: uC-tsfl189013b04b1
catgtttgaagtcattacccttaaccgtaaggagggggatgcctaaggctaggcttgcgactggagtgaagttatcgtcgctgtaattttatcatcaagtggaattctgtaatttt

SEQ ID NO: 565 - DNA, 364 bp, Triticum aestivum
  Clone ID: uC-tsfl189013b05b1
ggttgcaggcccagagctctttagctgaagcaggtgctgtctccggcgtggcgctacccaaagggccaatggatgtggcgaggcatgtcatgagggacgctggcatcaaaggtctgttcaagggcattgtcccaacaatgggccgtgagatccccggcaacgccataatgttcggcgtgtacgaggccgtcaagcagtacatggctggtggtcgggacacttcaggcctcggccagggctctctcatcctcgccgggggcctcgccggaggagccctgtggctcacggtgtacccaaccgacgtcgtgaagagcgtgatccaagtggacgactacaagaagccgaggtactcggggtcgatcga

SEQ ID NO: 566 - DNA, 401 bp, Triticum aestivum
  Clone ID: uC-tsfl189013b06b1
gcttcctacatatccgtatgatcgcttgaggacatcttcaagcaatcctgtcacagacattgatagtaccaggcgtgagacgtatctatcttcggcagagttcagggagaagtttggcatgacaaaggaggcttttgcaaagctaccaaagtggaagcagaataggctcaagatcgctcttcagctcttttaaaatgttatgctgtcaaatatgcactagttatgtcttgcctgttggtgaaagcaaggacgttgagattggttttcaaaggcaaatctcaaacacgaagatctctctcgcactcgtcgcaatgttaagaagagacatcggtaagtgtaagcctatctgggtcaaggggaccctcggtaggcgtcggaggggctggagcagtgagttttga

SEQ ID NO: 567 - DNA, 352 bp, Triticum aestivum
  Clone ID: uC-tsfl189013b07b1
cggacgcgtgggcggacgcgtgggagaagaagggtgttgatgagttctctcactgtgttcaccttgtctcatgggagaaggagaatgtgtccagtgaggctcttgaggctgcccgtattgcttgcaacaagtacatgaccaagcatgcaggaaaggatgccttccacctcagggtcagggttcacccgttccatgtgctccgtatcaacaagatgctttcgtgcgctggggctgataggctccagactggtatgaggggtgctttcgggaagccgcagggagtctgtgcccgtgttgccattgggcaggtcctcctttctgtgcggtgcaagcccaacaatgccatccatgc

SEQ ID NO: 568 - DNA, 89 bp, Triticum aestivum
  Clone ID: uC-tsfl189013b08b1
ggaatggacatctctgcattttacccctgaattcgtctgcaatctcttgctctgttgttaaatcttatcagttggctctgttaaatctt

SEQ ID NO: 569 - DNA, 287 bp, Triticum aestivum
  Clone ID: uC-tsfl189013b09b1
gtcaaggattagcaagcagtaatagtgaagttgtactgaggagcgagcgaaacgatcgaaggttcacgaccccttattagctattaagagagtttgaggcaatgtatgtgatacagattcagagttgttatggagatattaacctgcaataagctgctatgctgttgtgtactagtgctgccttatgtataccctgtttcctgtagtgcactgtaggttttatctcaactactatgtatgtattcccctctgaaaatgatgaattctcctgaggatttctttcatca

SEQ ID NO: 570 - DNA, 278 bp, Triticum aestivum
  Clone ID: uC-tsfl189013b10b1
gcgacgggctccgagtgccgacgtacctctacggcgcggcgcaccgggagggccggaagctggcggccatcaggaggcagctaggctacttcaagccccagagcagcgccgagtggcacgggccgctcccggtcgcggccgacacgacggcgctgccagtcgcgcccgacgccggcccggacgcggagtaagcgtccaagggcgtgctggtgctcggggcgacggactgggtggacaactacaacgtcccggtgcgcaccgacgacgtggaggccgtg

SEQ ID NO: 571 - DNA, 229 bp, Triticum aestivum
  Clone ID: uC-tsfl189013b12b1
actaaacaagagcttgagctcgatcgatcgaactcaaagatgtggaaaccatgtaccgatgaataatactcaatcaaccttttgcttcaaaaaaaaaaaaaaaaaaaaaaaaaaaaaaaaaaaaaaaaaaaaaaaaaaaaaaaaaaaaaaaaaaaaaaaaaaaaaaaaaaaaaaaaaaaaaaaaaaaaaaaaaaaaaaaaaaaaaaaaaaaaaaaaaaaaaaagggggg

SEQ ID NO: 572 - DNA, 203 bp, Triticum aestivum
  Clone ID: uC-tsfl189013c01b1
tcgctctgacattgtttttgggctttccttctccatttatctttcttatttgttcctaagaatatgtgtatgtccatgttcatgtacgaacatggctcgagaaagcatgctcgtatgtgaatgctatcggtggctatgtatatgcacggacgcataatattatacaatatggcgactatatacgttttaatggtaaccaatgg

SEQ ID NO: 573 - DNA, 358 bp, Triticum aestivum
  Clone ID: uC-tsfl189013c02b1
gcctggccgagcagctagcgaagaagttcaagggccaggagtgcaccaacaccaccggagccaacaccgtgcccggcaccgagccgcagttccccgactacccccagttcctcgaccgatgccacctcaacgcgtcggtgaccgaggacgggcaggtgatgccggcatgcgtgcccggccttgtggccgacattgtgctgaccaactacaccaagtcccagtacaaccggtttctcaacgacaccaagtactctggcgtcgggatcgccaacgaaggcgactgggtggtcgtcgttcttagcaccagcaccgactccggcgactacttccctgctcccccaggctccaactgggcttc

SEQ ID NO: 574 - DNA, 249 bp, Triticum aestivum
  Clone ID: uC-tsfl189013c04b1
cccacgcgttcgatcggagcaccaggtaccgagggctgtgggagagccgctttcgcggcaaatacggctccttcgacgaccagacaactcttggggccatgcgctatacattcggacccatcccgagctacgccagacctcattggaccatccagatcttgggcatgcgggtggacaacctggaagacggtctgcagcggccggtgcatgtccacggctttgtcgccgtgagggacacctcggatcaca

SEQ ID NO: 575 - DNA, 355 bp, Triticum aestivum
  Clone ID: uC-tsfl189013c06b1
ggaagaagtcgttctttctgggggagatgggaaatggagcaaagatgaaactggtggtcaacatgatcatgggaagtatgatgaatgctttttctgagggactctgtttggctgacaaaagtgggttgagcccccagacgcttcttgatgtcctggatctcggtgcaatcgcaaatccgatgttcaagatgaaagggccttcaatgctgcagggcagctacaatccagcatttcccctgaaacatcagcagaaggatatgaggctggctctgtcgttgggagatgaaaatgccgtgtccatgccagtggcagctgctgccaatgaggcattcaagaaagcaagaagcttgggact

SEQ ID NO: 576 - DNA, 59 bp, Triticum aestivum
  Clone ID: uC-tsfl189013c07b1
aaattattaaaatatttaaaaaaaaaaaaaaaataaaaaatatatcaaaaaaaaaaaaa

SEQ ID NO: 577 - DNA, 468 bp, Triticum aestivum
  Clone ID: uC-tsfl189013c08b1
gcaactaccatttccaccacaacaaccatatccacagccgcaaccatttccatcacaacaaccatatctgcagctgcaaccatttccgcagccgcaactaccatattcgcagccacaaccatttcgaccacaacaaccatatccacaaccgcaaccacaatattcgcaaccacaacatccaatttcacagcagcagcagcagcaacaacaacaacaacaacaacaagaacaacaaatacttcaacaaattttgcaacaacaactgattccatgcatggatgttgtattgcagcaacacaacatagcgcatggaagatcacaagttttgcaacaaagtacttaccagctgttgcaagaattgtgttgtcagcacctatggcagatccctgagcagtcgcagtgccaggccatccacaatgttgttcatgctattattctgcgtcaacaacaaaaacaacaacaacaacc

SEQ ID NO: 578 - DNA, 359 bp, Triticum aestivum
  Clone ID: uC-tsfl189013c09b1
caaagctgaaggtgtgaggcaaatgttcttccctgctaccgtccccgcgtattaccgtgcacctcctgaagcggagttctgatctatgaaggtgcagctaatctctcgcacgatgacatttttcctgtgttggtagttgttgaaaatgtgctgtgttggtagtccgaatggatcgaggaacgtgtatagtatctccgttgggtgctgatcctgcttttggaatgttctgaattgctgcatcggtgcccatgttgattcgtcctagctaaattgtacatctttgttgtgctactaatgaattgcgcctgctgttctaactagtggaccaaggtggtgttccttgtctactgatcgtgagc

SEQ ID NO: 579 - DNA, 94 bp, Triticum aestivum
  Clone ID: uC-tsfl189013c12b1
cccacgcgtccgccggactatttaaactctgaactatgctgtgatggttgaactgatgttggattgttaagggttatgttggaggccactttat

SEQ ID NO: 580 - DNA, 360 bp, Triticum aestivum
  Clone ID: uC-tsfl189013d02b1
ccccggtatcgctgccgctctggtcggaggctgtgagagagggagatgacgggactaggcggcggcgcggcggcccccggggactacgtctacttcaagtccgtcgtgccgctccacaagatctctcttgcaggtgccgatgagtccgtgcagatgatgcaaccaagctcaggaggagctcgttgaagatcttatcctttgtgttgtttcgttctagttgatcagtagtggagcccagttggggtcaatcggggaccgtgtcacatttgggttcttcttttattttgggttccgtagtcagaccttgattgtatctagatgatgtaatgctttattcatgtaattgtgtgaagtgcttgc

SEQ ID NO: 581 - DNA, 373 bp, Triticum aestivum
  Clone ID: uC-tsfl189013d04b1
cttttccccaagtccccaaggagagaaacgagaaaggctcaccgtggaaccgatcgaatcgcagcgaagcagcggcggcggcggcgatggggatcggcgagcactttgagggcgtgaagcagcactgggcgcgcaacttcgccttcctcgactacttcaagaaggtctacggccgcgaccagcccctccccaagtggtccgacgccgacgtcgaagagttcatcgcctccgaccccgtctacggcccgcagctcaaggccctgagggagtccaggaagttcgcgctcggcggggccctggccggcgccgcgcacctcggcggcgttgccttcaagtactccaagagcccgcacggtgtcgtgctggcgaccgg

SEQ ID NO: 582 - DNA, 127 bp, Triticum aestivum
  Clone ID: uC-tsfl189013d05b1
gcgaggggagttgaaaataagcatagatccggagattcccaaataggtcaaccttttaaactgcctgctgaatccatgagcaggcaagagacaacctggcgaactgaaacatcttagtagccagagg

SEQ ID NO: 583 - DNA, 400 bp, Triticum aestivum
  Clone ID: uC-tsfl189013d06b1
gcagcgcgtccttgacgatggccatggacacgttctacatctcccacggctcgcccacgctctccatcgacgactcgctgccagcgcgccacttcctcaagtcgtgggagccggccggtctcgccggcccgcagccgcctcgcgccatcctgatcgtgtccggccactgggagacggacaccccggctgtcaacgtcatccgtggcaccaacgacaccatctacgacttctatggcttccccgaccggatgtacaagctggtgtaccctgcgccgggcgcgccggacgtggccatgaggaccaagaagctcctggaggacgccgggttcgggccggtgagcgaggaccacggtcgcgggctcgaccacggcgcgtgggtgccgctgatgctcatgtaccc

SEQ ID NO: 584 - DNA, 62 bp, Triticum aestivum
  Clone ID: uC-tsfl189013d07b1
aaaattatataaattataaaaaaaaaaaaaaaaaaaaaaaaaaaaaaaaaaaattaaaaaaa

SEQ ID NO: 585 - DNA, 391 bp, Triticum aestivum
  Clone ID: uC-tsfl189013d09b1
cgaagcgaaaggtaatcccaatccccacagaaatccccatctcaaaaccctagccctcatccccgatcccggcgagcgagatggccaacccgagggtgttcttcgacatgaccgtcggcggcgcgccggccgggcgcatcgtgatggagctgtacaaggacgcggtgccgcggacggtggagaacttccgcgcgctgtgcaccggcgagaagggcgtcggcaagagcggcaagccgctgcactacaagggcagcgccttccaccgcgtgatccccgacttcatgtgccagggcggcgacttcacccggggcaacggcaccggcggcgagtccatctacggcgagaagttcgccgacgagaagttcgttcacaagcacaccaagcccgggat

SEQ ID NO: 586 - DNA, 337 bp, Triticum aestivum
  Clone ID: uC-tsfl189013d10b1
aggagaattccaaggtttgttggtcctagttggagttgaatttgcatcgagggttgacttgactggtggtatacccggcgccggagatgggcaagggcggcggctgcgtccccagcaagaagcgccagctgccgaccaccaccgttgccgccgcgccctcgtcgtcgtcagccaccgcggtcccgcgggacgcgcccgaggaggccctggacgcatccaccggggagtcgaggcggacgctgcggctgtacatcgtgttctactcgatgtacgggcacgtggaggcgctggcgcgtcacgcggcagcgggagcgggtgcggtgcaaggggtggaggt

SEQ ID NO: 587 - DNA, 212 bp, Triticum aestivum
  Clone ID: uC-tsfl189013d11b1
gacccgagcaagccacactctccagcaccagcaggccggcggcaagcagcgcaagcacagcagcaaatggctaccatcagcgccgccgcggcgaccaccgtcgtcgcccgtgccgccatcgccaggccgcaggccctaggtctgccccagctgaggacgaggagcgagagggtgaggtgcagctactccaaggacgccaaggaggcgacccc

SEQ ID NO: 588 - DNA, 189 bp, Triticum aestivum
  Clone ID: uC-tsfl189013d12b1
cttcaatttagtcttccaactttattgtatgtccggataagcccttgcatttcttccgttgggacctctggcttgatgtgtcttgcggattaatccatagattattctgtacgatgcaaatcagcctacggcttactgtaagttgcagtttaggctttctctctactgcaaattttactttgaaagatc

SEQ ID NO: 589 - DNA, 399 bp, Triticum aestivum
  Clone ID: uC-tsfl189013e01b1
caagctatatacctacatagtacagccatggcccccaccgtgatggcctcgtcggccacctccgtcgctcctttccaggggctcaagtccaccgccggcctccccgtcagccgccgctccaacggcgctagcctcggcagcgtcagcaacggtggaaggatcaggtgcatgcaggtgtggcccatcgagggcatcaagaagttcgagaccctgtcctacttgccaccgctcagcacggaggccctccttaagcaggtcgactacctgatccgctccaagtgggtgccttgcctcgagttcagcaaggttgggttcatcttccgtgagcacaacgcatcccctgggtactacgatggccggtactggacaatgtggaagctgcctatgttcggatgcacc

SEQ ID NO: 590 - DNA, 318 bp, Triticum aestivum
  Clone ID: uC-tsfl189013e02b1
cggacgcgtgggaccgccgccgccgccactgcgccgctgccgccgccgagatgggtcgcgtgatccgcgctcagcgtaagggtgcgggctccgtcttcaagtcccacacccaccaccgtaagggccccgcccggttcaggtcgctcgacttcggcgagcgcaacgggtacctcaagggcgtcgtcaccgatgtcatccacgacccggggcgtggtgcgccgctggccaaggtgacctttcgccacccgttcaggtacaagcaccagaaggagctcttcgtcgccgccgagggtatgtacaccggccagttcgtctact

SEQ ID NO: 591 - DNA, 278 bp, Triticum aestivum
  Clone ID: uC-tsfl189013e03b1
cccacgcgtccgcggacgcgtgggcgcgagagatatttcgtcccggacgcgtccgccccgacgaccgaccgacgaacagcgcaaaagtaggagggagaggatgagcaccatggcgatgtcggcgctgaacccggacgcgcccatgttcatcccggcggcgttcaagaaggtggaggactactcgcccgagtggtgggagctcgtcaagaccaccgcctggttccgcgaccactggttccgccagcaccaactctacgaggacctcgccgacaacgtgg

SEQ ID NO: 592 - DNA, 296 bp, Triticum aestivum
  Clone ID: uC-tsfl189013e04b1
aaattaggcacgtttagcctcattttcccatctttttcctgtccaataactggagcaagaggggctcccagacggtagaattttgtacccaagtcggacaatctgtcaaacttggcatgaaagattaggacacaatgcttgggctttgtgtcgctcggcaacgtttttgtactttatgttgctcgagttttgaaccacaccagttacggaatacggcagaataatctgacatttctacagaggtgtttgtatttgcgagttatactatgcaattacgttttgtgtgctgtgtgtaa

SEQ ID NO: 593 - DNA, 367 bp, Triticum aestivum
  Clone ID: uC-tsfl189013e06b1
tcggccctctccgttgttggccaggtggtttgtgcctctcaagatccattggagacatggatgttggggagtacattgtgcccgttccacatgtcaagcaagtgaagctctcaagtgtcggaggaaggctgataatggcatctgatggcatatgggatgcgctatccaatgaggcagcggccaagtcatgccgaggattgcccgcagaactcgctgcaaagcttgtggttaagcaagctctgaaaaaatgtgggctgaaagatgataccacctgtgtggtggttgacatcatcccatctgatcatcatttgacatcgccacagttatccccaaagagaaatcagaacaagctcaagtctcttctttt

SEQ ID NO: 594 - DNA, 445 bp, Triticum aestivum
  Clone ID: uC-tsfl189013e07b1
tcgcccacgcgtccgcggacgcgtgggattgccgctgaaattgccaagcagctacagaaatttcatcaagtagatataccgggatcaaaagaaccacagttgtggaatgacgtattcaagtttttgaaaaaagcttctgtattgaagtttgaagataatgagaagcagaagaggtatgagatgatctcttttagagaaatacaagatgaagttaaagaacttaaggatctctccgatcttttgcatgctcctgttgtgtttgcacacaatgacttgctatcgggtaatctgatgctgaatgatttggaagagaagctatatttcattgattttgagtatgggtcatatagctaccgtggctttgacatcgcgaatcatttcaatgagtacgcaggctttgagtgtgactacaacttgtacccagataaagatgtacaataccatt

SEQ ID NO: 595 - DNA, 351 bp, Triticum aestivum
  Clone ID: uC-tsfl189013e08b1
ctcctcctagcaagctatatacctacatagtacagccatggcccccaccgtgatggcctcgtgggccacctccgtcgctcctttccaggggctcaagtgcaccgccggcctccccgtcagccgccgctccaacggcgctagcctcggcagcgtcagcaacggtggaaggatcaggtgcatgcaggtgtggcccatcgagggcattaagaagttcgagaccctgtcctacctgccaccgctcagcacggaggccctcctcaagcaggtcgactacctgatccgctccaagtgggtgccttgcctctagttcagcaaggttgggtttatcttccgtgagcacaacgcatcccc

SEQ ID NO: 596 - DNA, 402 bp, Triticum aestivum
  Clone ID: uC-tsfl189013e11b1
caagcacatcagtagatcggcatggcgcacttccaggaggtggactactgctcggaggaggtgagggcggtgggctacccggcccgccgcggctgcggcggcgtgcaggagcacatcgtcaaggagacgttcgtgcaggagttcgacaccgccggccgccgccatggtcaccacggtcaccacggccgtggctccggccacttcgaggtgcgcgagagcaggctggaggaggacatcaacacccgcaccggcgagttccacgagcgcaaggagaacttcgtcgtcagggccgatgactaagcttacacgttacggagcacactacgatgtgtgtatatgtcggcatcatatatatgtatgtgtgatgttgcgcacagtcgtatagcgtatgcaggcgtgcgt

SEQ ID NO: 597 - DNA, 444 bp, Triticum aestivum
  Clone ID: uC-tsfl189013f05b1
ctccgtcgccgcggagcgatggcagcccgctccccttacttcgcccccgaggaaggcgcccggtgcatccgcccaggggagtcacctgccgcggcgctccgccggatcctggcgacgccaggcgcccaccaggcgccctgctgcttcgacgcgctcggcgcccgccttgtcgagcgcgcggggttcccgatctgcttcatgggcggtttctgtgtttctgcctcacgacttggattgccagatgttggattaatctcctatggagaaatggttgatcaagggcgtctaatcaccgaagcagtttcggttcccgtgattggtgatggagacaatggttaccgaaattctatgaacatcaagagaactgtaaaaggatatattaatgctgggttggctggaatcatgcttgaagatcaggtggcaccaaaagcatgtggacacact

SEQ ID NO: 598 - DNA, 377 bp, Triticum aestivum
  Clone ID: uC-tsfl189013f06b1
cccacgcgtccgcccacgcgtccgcccacgcgtccggagaccggcgtcttcgtactcgcctctctcgcgcgcttccgagctttggcctccgtcctcccctcctcccccgatctctccaccagcgcagcgtagcgccggcttccgccgctccgacccgccgccatgagggagtgcatctcgatccacatcggccaggccggtatccaggtcgggaacgcgtgctgggagctctactgcctcgagcatggcattcagcctgatggacagatgcccggtgacaagaccgttgggggaggtgatgatgctttcaacaccttcttcagtgagactggtgctgggaagcatgtcccccgcgcggtctttggtgatcttgagcc

SEQ ID NO: 599 - DNA, 379 bp, Triticum aestivum
  Clone ID: uC-tsfl189013f07b1
cccacgcgtccggtccgtggcagcggccgtgtgcaggtcgttggccctgacggcaagcgcgtgctggagacccgcattgagggtggcagcctcttcattgttccccgcttccacgtcgtgtccaagatcgctgatgcctctggcatggagtggttctccatcatcaccacccccaacccgatcttcagccaccttgctgggaagacctcggtgtggaaggccatctcgccggaggtgctggaggcgtcgttcaacaccacgccggagatggagaagctcttccggtccaagaggctggactccgagattttcttcgcccccaactagagccattcgtcgcgcatcggccggtcgccttaggcaggaataaataaattta

SEQ ID NO: 600 - DNA, 394 bp, Triticum aestivum
  Clone ID: uC-tsfl189013f08b1
cagacttcaagcacaagagcaccggcgaagcgctgtgggttgaggggaggaacaaccccaactgggtcgtctcccagctggcgatcttggactcgaggatgggttccctgcaggacaaacagaggaaaccagtctcctacatgtacgccgacgacttcatgacatctgacgccagcgactaagccctgctctaggagggaggaagcttctgaattctgacccccaagtatccagctccagtatcgtatcatgtagtactagaaaggtgcgttagttgcgccaagtcatctgcgcgtctcggtttttgttgtacataggtaggctccggaagctttattattagtccatgtgttccacgtcggtggtagtgacaaattgtgaacatgaccatgta

SEQ ID NO: 601 - DNA, 144 bp, Triticum aestivum
  Clone ID: uC-tsfl189013f10b1
aaaaaaaaaaaaaaaaaaaaaaaaaaaaaaaaaaaaaaaaaaaaaaaaaaaaaaaaaaaataaaaaaaaaaaaaaaaaaaaaaaaaaaaaaaaaaaaaaaaaaaaaaaaaaatataatataggaaattatttttttttgggggg

SEQ ID NO: 602 - DNA, 391 bp, Triticum aestivum
  Clone ID: uC-tsfl189013f11b1
cccacgcgtccgcaggaaatgagcttgcacagctgtccggccgcggccggggacgcgccgaccgggacggcggaggacctgctcgagcgggcgcggggcctggtgccggcggcgctggacgcggcgcgcgcggcgacggggtttggcgcgcggtggaaggccatcgcggcgaggctcgagagggtgccgccgtgcctgtccgacctgtccagccacccctgcttctccaagaacgcgctctgccgggagctgttgcagtccgttgctgccaccctcgccgaggccgccgagctcggcgtgctctgccgcgagccgcccaaggctggcaagctgcagatgcagagcgacctggacgctctcgccgggaagctggaccttaacctccgggact

SEQ ID NO: 603 - DNA, 331 bp, Triticum aestivum
  Clone ID: uC-tsfl189013f12b1
tcggtgaagctggtgccgttcaacccggcgtacgaggacgcgtcggtgctgtggacggagagcaaggacgtgggcaagggcttccgctgcatccgcatggtcaacaacacccgcctcaacttcgacgccctcaacggcgacaaggaccacggcggcgtgcacgacggcaccaccgtcgtgctctgggagtggtgcaagggggacaaccagtgctggaagatctggccctgggccgaggcgcacgccgccgtcgagtccggcgccaccatgggcaacaacgcccacgccatgggcggcggcccccccgtgcatgccgtgcgcgtcttctgca

SEQ ID NO: 604 - DNA, 318 bp, Triticum aestivum
  Clone ID: uC-tsfl189013g01b1
tcgggcatatgccagctctgaccgaaatctttggggacgattctgtattacaatttggtggaggaactttaggacatccttggggaaatgcacctggtgcagcagctaatcgagtggctttagaagcctgtgtacaagctcgtaacgaagggcgcgatcttgctcgcgaaggtaatgaaattatccgagcagcttgcaaatggagtcctgaactagccgcagcttgtgaagtatggaaggcgatcaaattcgagttcgagccggtagatactattgataagtagataaaactaaagataaagaagagaaggtataaat

SEQ ID NO: 605 - DNA, 333 bp, Triticum aestivum
  Clone ID: uC-tsfl189013g03b1
tcgcccacgcgtccgccttcctgcactggtacacgggcgagggcatggacgagatggagttcaccgaggccgagagcaacatgaacgacctggtcgccgagtaccagcagtaccaggacgccaccgccgacgaggaggaggagctgtacgaggacgaggacgacgccgacctccaggagtaggggccagcgaggtctgttccgtggatcttccttgatcgttgcccggggctatttctgatggctccatgttgctactagtagtgtgtgtgtttcgcgcttgctggcccccgtcgtcttcggggtgtcgtggactggttgcttgtgtagtttg

SEQ ID NO: 606 - DNA, 401 bp, Triticum aestivum
  Clone ID: uC-tsfl189013g04b1
cccacgcgtccgctggaggagtgaagaagcctcaccgttaccgccctggaactgttgctcttcgtgagatccgcaagtaccaaaagagcacggagctgctcatcaggaagcttccattccagaggcttgttagggagattgcccaggacttcaagactgacctccgcttccagagccatgcggtgctggcccttcaggaggctgcagaggcctacctggtcggtctcttcgaggacaccaacctgtgcgccatccatgccaagcgggtgaccatcatgcccaaggacattcagctggctaggaggatccgtggcgagagggcttaaggtgctgtgcttgccttgcctgtgggaatcgctctggtgggcatctgtgtctgcttttgctgctgaacacttatc

SEQ ID NO: 607 - DNA, 359 bp, Triticum aestivum
  Clone ID: uC-tsfl189013g05b1
gatcggtggccgccctgctcttgctactcgccatcgtcgtgccgtttactcagacccggacgcagagcgcacgggacaaggctgccatggcggaagacgcggggccgttggtgggaggcatcaaggactcgccgatgggccaggagaacgacctcgacgtcatcgcgctcgcccgcttcgccgtctccgagcacaacaacaaggccaatgccctgctggagttcgagaatgtggtgaagctgaagaagcaaactgttgctggcacgatgcactacattacaattcgggtcactgaaggtggggccaagaagctctatgaagctaaggtgtgggagaaaccatgggagaactttaagcag

SEQ ID NO: 608 - DNA, 407 bp, Triticum aestivum
  Clone ID: uC-tsfl189013g06b1
agagaatcagatcttggcggactcgaatccaatccaatccaatccaaggcggaggtcgagatcaaacctaccggagatgaagttcttctcggcgttcgacccgtggccggtgttcttccgccgggagtggggccgcacctggcccttcctcgccggcttcgccgtcacgggggccctcatcaccaagatgaccgccggcttcaccgaggaggacctcaagaactccaagttcatccaggcgcacaagaagaagtagtcgccgcccgcccggcccgtccgccgccaggtcacaggggcagcagctgagtaaccagcatgtgtccttgatgcggggagccagtcctcaccctcactattgtgattgagcttttatgttttttttttcaaatccaactgcatgcattttt

SEQ ID NO: 609 - DNA, 376 bp, Triticum aestivum
  Clone ID: uC-tsfl189013g08b1
gacacaagaagctcataggcaatcaaagcctcttaatgtgcgaagctccaaccgaaccgcggatgtcttgctgcggaggaaactgcggaggcagcaccggctgcacgtgcggcaacggctgcggtggatgcaacatgtacccggaggccgaggccggcggggccaccctccttgtctgcgccaccgacacccacaaggcgagctcccgcgggatggagatggcggacgaaaacggcggatgcggctgcaaccagtgcaagtgcggcaccagctgcggctgctcctgctgcagctgctagatcatcgatcatcgaccatgcatgcaccgtgccgggcgtgcatcatcgagcatatcgatctactactaccataccat

SEQ ID NO: 610 - DNA, 325 bp, Triticum aestivum
  Clone ID: uC-tsfl189013g09b1
actggatccgcatgcggaccgacaacaccatcaggtacaacgcgaagcgcaggcactggcgccgcaccaagctcgggttctagatccggcccggccgaccgccgcgtgggggagccatggctcaagagttatctgcattttgttttatggacgtttcagtgtttgttatgcaagctaggaagtgatcccaggatgtctctgttatcaatttcttcgtgttatgaggattgcttgtaccctggtgtactgatgttaccgtgctgtgccaagtaaagaacctttgctataatgtcacccttgtttaaaaaaaaaaaaaaaaataaaa

SEQ ID NO: 611 - DNA, 201 bp, Triticum aestivum
  Clone ID: uC-tsfl189013g10b1
cctaatcaaaagtaatcattctcttctagaaagtagaaataaaaggttcggggttcgttaatgggtacgtttgtaggttttgtcccgtctctcaaccgttcccagatgcaatggtttcgagagaagtgagaatatttcaaccccgaacacatgtcctgtttaatttacagccccctcacttgatctaaaggtggttgtggc

SEQ ID NO: 612 - DNA, 373 bp, Triticum aestivum
  Clone ID: uC-tsfl189013g12b1
gttagcaggagcgagtgggagtccggccatggcgccgtcgcagcccaagtcagggctcttcgtgggcatcaacaagggccacgtcgtcaccaagcgcgagctgccgccacgcccgtccgaccgcaaggggaaaggtaccaagagggtgcattttgtcaggaacttgattagggaggttgctggattcgctccctatgagaaacgtatcactgagcttcttaaggttggaaaggacaagcgcgcactcaaggtcgccaagagaaagcttggtactcacaagagagctaagaagaagagagaggagatgtcaagtgtccttaggaagatgaggtctgctggtggtggtggtgctggtgacaagaagaaatagagc

SEQ ID NO: 613 - DNA, 347 bp, Triticum aestivum
  Clone ID: uC-tsfl189013h01b1
cgcacactggctcgcctcctctcacccatggccggcgccgccacgctcgtcctctccctcacggccgccggcgccgttcctcttcgcgcccagcttctcacctggacggcccccgaccccgcggccggccccgccgtctggacgtcgctgtcggacgccgtcatgggcgacggcgccgaccagccaccccgccgctggatcctccttccccggccggcgccggccatggcgaccaccacgcgtacaagtacaaaagccctcatgctccaatgagatccagcgagacaggttcgtccccatctagcccggtcagcgctcgtaccctgcatcgaccagatccactcgac

SEQ ID NO: 614 - DNA, 278 bp, Triticum aestivum
  Clone ID: uC-tsfl189013h05b1
gtgtgtttagaccaagtttccaatggctcctcttggtgacgctgttgcccccgcgtgcgccgccgccccaggcctcgtcgtctctttcggcgagatgttgatcgacttcgtgcctgacgttgccggggtctccctcgccgagtccggcggcttcgtcaaggcgcctggaggcgcgcccgccaacgttggttgcgccatctacaagctcggaggctcctctgccttcatcggaaagtttggcgatgacgagttcggccacatgctggtggagatcctga

SEQ ID NO: 615 - DNA, 425 bp, Triticum aestivum
  Clone ID: uC-tsfl189013h07b1
agggcatcaagaagttcgagaccctgtcttacttgccacccctctccacggaggccctcctaaagcaggtcgactacctgatccgctccaagtgggtgccctgcctcgagttcagcaaggttggcttcgtcttccgtgagcacaacagctcccccggctactacgacggtcgatactggacaatgtggaagctgcctatgttcgggtgcaccgacgcaacgcaggtgctcaacgaggtggaggaggtcaagaaggagtaccctgacgcctatgtccgtgtcatcggcttcgacaacatgcgccaggtgcagtgcgtcagcttcattgccttcaggccaccaggctgcgaggaatctggcaaggcctaaagtgcaagttgaagtaacacatatacatgccatgttagttcacatttgtcggcagct

SEQ ID NO: 616 - DNA, 412 bp, Triticum aestivum
  Clone ID: uC-tsfl189013h08b1
cacgcacgcgcacagccagcgagcgcaccggtgcagcaacgatggcgctggtctcctcctcctccgccgccaccgccgtcgcggcgctccccagtaatgggctgggcggcgcccgagaggcccatctggttccccgggagcacccctcccccgtggctcgacggcagccttcccggagacttcggctttgacccctggggtcttggatccgacccggagagcttgcggtggaacgtgcaggcggagctggtgcactgccggtgggcgatgctgggcgcggcgggcatcttcatcccggagctgctgaccaagatcggcatcctcaacacaccgtcgtggtacaccgccggggagcaggagtacttcaccgacaccaccaccctcttcatcgtggagctcatcctcatcggct

SEQ ID NO: 617 - DNA, 267 bp, Triticum aestivum
  unsure (1)..(267): unsure at all n locations
  Clone ID: uC-tsfl189013h09b1
cggacgcgtgggcgcggctcaagaaccgcaccgggccggccaagttcccctacatgctgctctaccccaacacctccgaccacacgggccaggccgaggggctcacggccaggggcatccccaacagcatctccatctgaggacctccatctctgcttgcttgcttgcttgcaccggatactagctactagctactgtgggtgttctgccggtgcatatgcttgccatgatctcaataataataaggcaataatgcgtgcgtgcncg

SEQ ID NO: 618 - DNA, 367 bp, Triticum aestivum
  Clone ID: uC-tsfl189013h10b1
gttcggcaaggcgaagaagaacacggacttcgtggcgtacagcggcgaggggttcaaactgatgatcccggccaagtggaaccccagcaaggagcgtgagttccctgggcaggtgctccgctacgaggacaacttcgacgccaccagcaacctctccgttataatcaaccccactaccaagaagaccatcaccgactacggttcccctgaggagttcctctcccaggtcggcttcctcctcggccagcagtcctacggtggcaagaccgactccgagggtgggttcgagtcagacgctgtggcgacggcgaacgtgctggagagctcggcgccggtggtggacggtaagcagtactacagcataacg

SEQ ID NO: 619 - DNA, 268 bp, Triticum aestivum
  Clone ID: uC-tsfl189013h11b1
gaagtaccagaggaaagctggtcacagacagccaaatacgaggttaagaattaccggcataagtggatatgaggaattccctgctgatccaatacttcaagttccagcttaagtgtaattgtaagttgtttagttacaaatgcttggtattacattagagtgcaagagcattttccccactgttccccaagtgaggctcttccccaagttaatgtactcgaaatgctgccattcgttgagtggttggttccatccttttgtttattcc

SEQ ID NO: 620 - DNA, 353 bp, Triticum aestivum
  Clone ID: uC-tsfl189013h12b1
cgcgaagaggaggtctcgctctcgcagattccaccccaccccgccgcgcatgctcgcccatcatccgatcccaaatccgcaacccacaccgtcccaatcgtccgcgccgacccccgtgatccctaagatcaagacaatccccggcccggccagcccccgccgccgccccctcctcgcccggcgaagatgcacctgtggccgtcgctccggatccgggactcgttcaagcacgcctacctggagaagcttgagttcaacctcgcccacaagaagcgcgcgcaggggcaggggcaagggcggcagggccaggacggggacgaggcgcctctgctcgagggccgctcgtcgtcgat

SEQ ID NO: 621 - DNA, 130 bp, Triticum aestivum
  Clone ID: uC-tsflw189001a03b1
ttcgtcgccgaaacccttactcgcccccgcccccgcctcccgccgccaaacacccatcgccatgcgaccaccgagaggcggcggaggtttccgcggacgcggcggcgaccgaggtggccgcttcggtgga

SEQ ID NO: 622 - DNA, 410 bp, Triticum aestivum
  Clone ID: uC-tsflw189001a04b1
cccacgcgtccggtttgagaccctgtcttacttgccacccctctctacggaggccctcctaaagcaggtcgactacttgatccgctccaagtgggtaccctgcctcgagttcagcaaggttggctttgtcttccgtgagcacaacagctcccccgggtactacgacggtcgatactggacaatgtggaagctgcctatgttcgggtgcaccgacgccacacaggtgctcaacgaggtggaggaggttaagaaggagtaccctgacgcctatgtccgcgtcatcggcttcgacaacatgcgccaagtgcaatgcgtcagcttcattgccttcaggccaccaggttgcgaggaatctggcaaggcctaaagtgcaagttgaaataactgatatacatgtcatgttagttcac

SEQ ID NO: 623 - DNA, 252 bp, Triticum aestivum
  Clone ID: uC-tsflw189001a06b1
atctgatcctagctgtattaatgtaaagaaaaaaaaacacatgtgcagtacccattgctaattcaaaccccaactgtctggccgtcctgcctcacgccttgcataatctgtagcaggattgggaagtgtatagtggagcaagttgggtgtcgacgtgtgtgtgaaggtgagagactttttatgtgaagaaatgtaatgcttgccagatgttgtaaaacttcaaacactgaaatgaaggggttgaatttagca

SEQ ID NO: 624 - DNA, 500 bp, Triticum aestivum
  Clone ID: uC-tsflw189001a07b1
gtcgccggcgccgtggagcagggcgacggctgcgactccccgtccgcgggcgggggcatggtggccgccgcatgcccgcgctgcttcctctacgtgctcatcgcccggagcgacccccgctgcccgcgctgcgagtcgcacgtgccgccacccccggccccggcgcccaagaagaagccgcggatcgacctcaacgtcggcttcctcggaacctagccatgccaagccaagaagaagtaggtcaagatggttgtcgtccgtcctcgtcctcgtcctcgtcctcggcgcgttaggtaggcagcaggcctccggtgctcggattggccacgacgacgccattgtttttctgatgccaccgacggattccggtacataggggaggcgctccagatttttgcttgtccatttccaagtatggccggccgtccgtccgtccgtccccgattctgtcatgtcagatcaatcaaacactcgacagaacatgaatgaatgaaactact

SEQ ID NO: 625 - DNA, 200 bp, Triticum aestivum
  Clone ID: uC-tsflw189001a09b1
gtggtggacaaaatgcctgactgctggttcttcttctgtctcgcatatcaagttgctgcgtttttctgtttcctcttattatggctgtgattgattaatggacaagtaatgttcagttgtcacagagtactagcttatacgggagcaacgtttgccctagttttgtaataatggtatatatcaactcttgacgttctgtc

SEQ ID NO: 626 - DNA, 319 bp, Triticum aestivum
  Clone ID: uC-tsflw189001a10b1
ggactttgcattttcagccctttttctgttgagttttaacattccagaaaatatgtggttattatatatggcatgttcaatgcgtttgctttttagcaatccctataacatgtcttattagtccaacaatattgttttgcgattgagattaaatttttctcgcataacaatattgatttgcgattgagaaaaaataatgttttcctctcaaaaaaaaaaaaaaaaaaaaaaaaaaaaaaaaaaaaaaaaaaaaaaaaaaaaaaaaaaaaaaaaaaaaaaaaaaaaaaaaaaaaaaaaaaaaaaaaaaaacaaaaagggg

SEQ ID NO: 627 - DNA, 417 bp, Triticum aestivum
  Clone ID: uC-tsflw189001a11b1
tccacgctcgctcgctcgcccgacgcgatggctcccaccaagaaggcgaagaagagcggggagaacatcaacaacaagctgcagctggtgatgaagagcggcaagtacacgctcggctacaagaccgtcctcaagacgctccgcagctccaaggggaagctgataatcctcgcaaacaactgccctccccttaggaagtcagagattgagtactacgctatgttggcgaaaattagcgtgcaccatttccatggaaacaatgttgatcttggaactgcctgcggcaagtactaccgggtgtgctgcctcagcatcctcgaccctggtgactcggacatcatcagcaccaccaccaccacccagtgaagagaagagaagagagctctccacctattttatttagtcgagttgtagggt

SEQ ID NO: 628 - DNA, 487 bp, Triticum aestivum
  Clone ID: uC-tsflw189001a12b1
tggacgcgtgggcggacgcgtggggaaaactcacacggggactctttgaaggtatcagaattctatgatcccaagtctgagtcagacgtggacatggactataacagcttgtactcgaggcaggactttctagagggcgaggatggtgagctttcatggtttaatgctggcgtgcgggttggagtcgggattggcctcggcatatgcgtgggcgtcgggttgggtgtcggcctgctggtccggacataccaaggcaccagcaggaacttcaggcggcgactgccctgatggccaacgcttcccacaagtatataggaaactgactgcccatcttcctgcccatgctagtgatagatgagcgaggccttgtgttctcccctcctgcagcttgtgtgcactgcgaaccatttttgtccctttgaggtatgtaaatgcgagtatgtatatgtatagtaaaaaaataaataaagagtcgagtcgggtcgag

SEQ ID NO: 629 - DNA, 189 bp, Triticum aestivum
  Clone ID: uC-tsflw189001b02b1
cttgagcgtcggccgcacctcccgtggcatgcaggcgatcatggccatcggcgtggacgaggagccggacaagaagacgctcgagaagattggggcgatcccggccgtcgaggagtttgtgttcctcgagctatgatggacagacagcgggcgctcgctccactcatcgctagaataagtgatcatccc

SEQ ID NO: 630 - DNA, 88 bp, Triticum aestivum
  Clone ID: uC-tsflw189001b03b1
gtacattgtacctgcccttggttttgagtaccatgctggagttctggatcatcttacattatacaaggtgctggcattttgacgttgc

SEQ ID NO: 631 - DNA, 503 bp, Triticum aestivum
  Clone ID: uC-tsflw189001b05b1
gtcaaccactcccacttgctagctagcagcagccatggccgccctctcctctgcagcggtgaccgtcccttccttcgccgctaaggccgccacccccatgcgcggcagcaggatggtggtgcgcgcgtccctgggcaagaaggccgccagcgcggccgtggccatggcggccagcgcgatgctgctgggagtgggcgggtcggcgatggcgcaggacgtgctcctgggcgccaacggcggcgtgctggtgttcgagcccaacgacttcagcgtcaaggccggggagaccatcaccttcaagaacaacgccgggttcccgcacaacgtggtgttcgacgaggacgcggtgccctccggcgtggacgtctccaagatctcccaggaggagtacctcaacgcccccggcgagaccttctccgtcaccctcaccgtccccggcacctacggcttctactgcgagccccacgccggggccggcatggtcggcaaggtcaccgtcaact

SEQ ID NO: 632 - DNA, 436 bp, Triticum aestivum
  Clone ID: uC-tsflw189001b07b1
ctttgtttctcccatccccacattctggaggatcgtgaggagcaggtcgacggaggacttcgaggcggcgccgtacgtcctcacgttgctcaacacattgctatggctatactacggcttcaccaagcctgacggcctgctcatcgccacagtcaatggcttcggcgctgtcatggagaccatctacatcgtcctcttccttgtctacgcggccgatcatgccaaaagggttaaaaccacaaagttggtggcagctttggacattggattttttggggtcgtgttcgcgaccacaacattcgccattcgtgggcttgacatgaaaatcgtggtcattggattgatatgtgcttgccttagcgtgttcatgtatgggtccccactcgctgccgtgagaagggtgatcgcctcgaggagcgtggagtacatgcccttc

SEQ ID NO: 633 - DNA, 334 bp, Triticum aestivum
  Clone ID: uC-tsflw189001b08b1
ggtctcggcccgtgagctagctcgaagaccaggtctttgccttctagaacttggattctagcagcggtctggggtctatgggcgtaggcccgggcaaagtaaccgtctctccagccaagtgaccatgacggcatgtactcgcatgaaacgcaaaggggcgtcgcatgcctcgacgggaataatatgtagctcaaggacggtccgatatatacaaaccctcccgtgccctcccttcctcaagacctataagaagcggggaaccttgccgcaatggggcacgtgaaatggggtagaaacgacatatgtatgtgtagatatttatgcatatacccac

SEQ ID NO: 634 - DNA, 236 bp, Triticum aestivum
  Clone ID: uC-tsflw189001b09b1
cttacgcgtccgcccactcgtccgggtgggtgtggtgtttcatcagatcagaccagacagtccctcccttctcccttgtgcaaattaacagacgctttctgagctgtgttaaaaaaaaaaaaaaaaaaaaaaaaaaaaaaaaaaaaaaaaaaaaaaaaaaaaaaaaaaaaaaaaaaaaaaaaaaaaaaaaaaaaaaaaaaaaaaaaaaaaaaaaaaaaagggggggccgttttaaa

SEQ ID NO: 635 - DNA, 281 bp, Triticum aestivum
  Clone ID: uC-tsflw189001b10b1
ttttgcattaatcttagtgaaggtgatttggtcgaccttgcctaggggcttttccgccatgtgtgatgggctggctcgtgattaacttggagtgtaataatcaaaactatcctagcaattctttgctaagtgtaataatcaaaacgacaagtctttgcttaaaaaaaaaaaaaaaaaaaaaaaaaaaaaaaaaaaaaaaaaaaaaaaaaaaaaaaaaaaaaaaaaaaaaaaaaaaaaaaaaaaaaaaaaaaaaaaaaaaaaaaaaaaaaaaaggggggggc

SEQ ID NO: 636 - DNA, 384 bp, Triticum aestivum
  Clone ID: uC-tsflw189001b11b1
tccacgcgtccgcccacgcgtccgggcatttccatgcaatcaatttggttttcaagaacctggatcaaatacacagataaagcaatttgcttgtacaaggtttaaagctgaatttcctatttttgataaggttgatgtcaatggaccatttacagcccctatttataagtttctcaagtcgagtgctggaggatttttgggtgatatagtgatagtggaactttgagaagttcctagtggacaaaaatggcaaagttgtggagagatatccaccaacaacttcaccattccaaattgagaaggacatccagaaactcactgcggcataagtgcttttgagtccggcttcagttaagcactcctgtatatattgccttttttttt

SEQ ID NO: 637 - DNA, 357 bp, Triticum aestivum
  Clone ID: uC-tsflw189001c02b1
tcgatcggtaatccggtaacgttgcgtttgtgaggatccgttcgactacatccatttgtcttcttcatggactcggtcctcttccttgcgggatctcagcttgcaggtgccgttgaaccgtgcaggtgatgcaaccaagatcaaggaggagctcgatgaagattgttttctctatgctgtttcgtttccagctgatcagtagtggtgcccagttgggacgatcggggatctgtgtagcatttggggtagtcttcttttattttaggtttcgtagtcggacctttattgtatctggatgatgcaatgctctattcatgtattgtctgaagcggcgattgtaagccaactatgtatctc

SEQ ID NO: 638 - DNA, 295 bp, Triticum aestivum
  Clone ID: uC-tsflw189001c03b1
ctcacgcgtgcgctttttacatgcatgcaatggagacagcacattgcaaggagcttaattactacgatgatggagtgctcatacaaatgatgagctactaaaaaataaaatgaagttgcctgtgtgtgttatttcagtaagtgtgtctatgtctgtaccttgcacacacactgtgtgtgcatatatatttatgcgacatgtatgcacgcgtccgtatgcgtgagtgaactggcaactccttgctgtactccagtcctagccgatgcgcacgtctgacgtgcctgacctacttgtt

SEQ ID NO: 639 - DNA, 475 bp, Triticum aestivum
  Clone ID: uC-tsflw189001c05b1
ttttggttgaccttggagtatttttgtttgaggagccttcatgcatataatgtgctataggcccccccatgttgtctgattgtttcctggcttcctgcactcttattcactatgatatttctttcctgcaggttccgatgttcactgcttctggcttacgtgttcggttcctcaaggtatgtggagcaagtacaatatgaaacattgaaaatgtttggtactaaaaccatctcttgatgcattttcaggtgtgggagaagagtggctacaacaccgttgagtgggttcgctacatcacaagggctggatcatatgaaatcaggtgttagtgaccaagaaaaatggcgtgggctcattatttcgtggatttgcagagctctttttgtactcatcatgattgatcagatggcacgtaaattatgacccaattcgttgcaagtttgaacttcagcagagggcagatcagagcaggcag

SEQ ID NO: 640 - DNA, 182 bp, Triticum aestivum
  Clone ID: uC-tsflw189001c07b1
gtatcgtcctcgacctacgttggtaggtgcttacatacatatgagaattacaacactggctatacatacacacatatattatatgcaaaaaaaaaaaaaaaaaaaaaaaaaaaaaaaaaaaaaaaaaaaaaaaaaaaaaaaaaaaaaaaaaaaaaaaaaaaaaaaaaaaaaagggggggccg

SEQ ID NO: 641 - DNA, 386 bp, Triticum aestivum
  Clone ID: uC-tsflw189001c09b1
gtcgtcttatgaggacttccatgagtagcgaagcaatgcaggcaggccatagtatctattcaacaggcagcacaatgacttgcggattgtcgcgaaccccttcaccgggtgaacacaagaagcaactattccgccggcgatgtacagttctacttctacctgctgtgaggtgcatagtctttggggtagttctgggaaaaaaactcccccttgtacatagtagggtggtgaagacagcggaggaaaatatgtattgttgtagtcaggtgtatcggtaaagaattccagatgtagccgtcattatattttggccttgtaagttaaataagaggccttctcacaaattctgtaacagtatcatgagaacaaaagtccttgtctcattg

SEQ ID NO: 642 - DNA, 440 bp, Triticum aestivum
  Clone ID: uC-tsflw189001c10b1
tccacgcgtccgagcgactccaaatctctcgtggtagacagcttccatctcatctccggcgatgtctgggcgtggcaagggcggcaaggggctcggcaagggcggcgccaagcgccaccggaaggtgctccgggacaacatccagggcatcaccaagccggcgatccggaggctggccaggaggggcggtgtgaagcgcatctcggggctcatctacgaggagacccgcggcgtcctcaagatcttcctcgagaacgtcatccgcgacgccgtcacctacaccgagcacgcccgccgcaagaccgtcaccgccatggacgtcgtgtacgccctcaagcgccagggccgcaccctctacggcttcggcggctgagcgccatcagcgcgctgccgctggctgacactgctgtttcctgctttgctctgtagtcttactcccc

SEQ ID NO: 643 - DNA, 483 bp, Triticum aestivum
  Clone ID: uC-tsflw189001c11b1
ttggacgcgtggtcggacgcgtgggtggtactacaactactacgacgacaggcgcgtcggggggcagcgtgacgaccaccagcaaggggctcaagaagaaggcgctcaaggcgctgccgaagctggcgtacgcggacgcggtggccgcggctgcggcggcgaggggcgccgccgtcgcgcggtgcgcgcgctcccgccgcaacgccaacgcccacgccaaccaatcctcgccgtccggcagcccggcccacgccctggcggccttcggcgggggcggcggtgggcataaccatggtactacaactactaccgcagtgaagtttttcttctcaagaaatggaaaggagaataattagagctgtgaatgtgactcttttctgcaacctttttcgccctgcacttgcgctactgctccagtacgtgtggatgtggggaacatgacatcagatttgtaaagagcgtgcgtggtctcgtgtaaaaata

SEQ ID NO: 644 - DNA, 177 bp, Triticum aestivum
  Clone ID: uC-tsflw189001c12b1
ctttctcggtgtgagtcacaacagagcgagagaaagaaaaaaaagatggagatggccatcgacacgccatcgccgtcgccgtccgtctcgccggcgccgtcggcggtggcgggccggcagacgcgcgcggccgagtcggtgcgggttgagcaccagctggcgcgtgcgcccctggag

SEQ ID NO: 645 - DNA, 325 bp, Triticum aestivum
  Clone ID: uC-tsflw189001d04b1
gtgaagctgacagactaggaggtggatgagatgatccgtgaggctgatgtcgatggtgatggccagatcaattacgaagagtttgtgaaggtgatgatggccaagtgagctgccatactaagctagttctatctcgatgttagcagctagtttagccttgaaaactgacagcacttggtactactgttaagtccagtgaatgaacatattgctcgctcttcctttcttctcagggatgttgagaatttcgtttggattttcctgcagttgtattacctttgtacaatgtagctttctttccaaattgagatcatgaatttgctgt

SEQ ID NO: 646 - DNA, 72 bp, Triticum aestivum
  Clone ID: uC-tsflw189001d05b1
atcaaattcgagttcgagccggtagatactattgataagtagataaaactaaagataaagaagagaaggtat

SEQ ID NO: 647 - DNA, 399 bp, Triticum aestivum
  Clone ID: uC-tsflw189001d06b1
gttgtcggcggaggcttaggccgtcggccgccgcgcggtccttgggctcatggccagcggagtcgtcgggagcgcgttcgctcaggtggtgcacgccggcaccgtcgcggccatcaaggttggccccccgccgccgctctccggtggactccctggaacggacaactcggacgaggcaagggacttcgacctgcccctgaagaaccggttctacctgcagccgctgccaccggcggaggcggtggtgcgggccaaggagtcggtccaggacatgctcaacctcaagccgctcatggacaagaagcaatggccgtacgttatgaacgacctccgtctcagggcctcctacctgcgctacgacctcaagaccgtcatctcctgcaagaccaccaaggagga

SEQ ID NO: 648 - DNA, 479 bp, Triticum aestivum
  Clone ID: uC-tsflw189001d07b1
ttcacgcgtccgccctcgcgtccgcccacgcgtccgctctgctggctagtcagttaggtgttgggttttttgatgacaagctgggggcactttgcatgcaatggttggaagataaggttttctcgatcagagaagctgccgcaaacaacttgaagcgcctggcggaggagtttggtccagagtgggcaatgcaacatataattcctcaggtgttggagaagataaacaacccacattatctgtatcgcatgaccatcctgcaagctatctcattgctagcccctgtcatgggtgcagaaataacatgccaaaagctgctccctgttgtcattaattcctcgaaggacagagtgccgaacatcaaattcaatgttgcgaaagttctgcagtcgcttgtaccaatccttgatcaatctgtcgctgagaagactgtgaagccatgccttgtcgagctgagcgaggaccctgatgtggatgta

SEQ ID NO: 649 - DNA, 455 bp, Triticum aestivum
  Clone ID: uC-tsflw189001d08b1
gttgacgtcgacaactccaatgtgctcgtcatggacaaatacatggactcgctgctgccggaccggagaagcctcccgtacgccagctcctccgtgagaagcgattcggtaagaaggaagcccgccgcctcctcccccgactacagccgccgtcctccgcagcccaccccgcccgtgtcgctgtcgaagaaggaatcatgggatctcattcaggattcggagtttgagatactcgacagctagcaataataagagatcgtggttgatctccatggcttcgttaattttcttcattgccctactacccttcacctggtttgtaaatggcggccttacaggtggtgccagtgatggttggaaaagatcttgtcagtcagtcagtaataatatcgtgtgcatatatatgtcctctcatcccacttgctgtaacataaggaatttgtcatggatctggc

SEQ ID NO: 650 - DNA, 303 bp, Triticum aestivum
  Clone ID: uC-tsflw189001d09b1
ttcattgtaacgtcaagattcatttcaactttataggtatactttgaaaaaaaaaaaaaaaaaaaaaaaaaaaaaaaaaaaaaaaaaaaaaaaaaaaaaaaaaaaaaaaaaaaaaaaaaaaaaaaaaaaaaaaaaaaaaaaaaaaaaaaaaaaaaaaaaaaaaaaaaaaaaaaagggggggggcccttttaggggaccaaagtttcctccccggggctgggaaggtaaaattttttttttggggcccccaaaataaaataaaggggccgggttttaaaaacggggggaggggaaaaccccggg

SEQ ID NO: 651 - DNA, 413 bp, Triticum aestivum
  Clone ID: uC-tsflw189001d11b1
tggctccgacatctggttgcatcaaccagaaagaagaagaaagggggaaatgggaattaaagcaaccgcgagtactcatccaaagtactcgcaagcacggatctatactacatatgcatcggtatcaatgaaaagggttgtatctgtggactggactgcagaatgccacatgagaaggggaaagcctagcctatcgaagactagcatcttctggaaaccaccatcttgcaccaacaggagggagtcgcgtagcataaagtaaagtagtagaagtgttatcaacctcgggcagagatcctttctcgactccctacaagacagcaatcccagagccatactatccaggtctcatctccatttctcatatgcatttcacatctcaggtatccagttctagttgtatcgatcgggat

SEQ ID NO: 652 - DNA, 54 bp, Triticum aestivum
  Clone ID: uC-tsflw189001d12b1
gcaccaccaaatgtttcatttataaggcaaagatggaatgatgttggttgagga

SEQ ID NO: 653 - DNA, 411 bp, Triticum aestivum
  Clone ID: uC-tsflw189001e03b1
ttcacgcgtccggtcagccggaagtgcagccgccgatgcacggcggcaatggatttttccacccccttgatgctgctggtgaacccacacttcacatagggtaccctcctgagtccatgagtaactcatgcatgacaactttcatgcccccgtggttgccttgattgaagacggcgaagaaagtgcgaagaataagtatatacgtggcacccggccggccgcatatatgcatgtatactacttcgagtgatggattattccagtcaagatcctcaattattttgcgtgcaacttttgtgtgatgaaaacttcagaaccctgtatttgatgctcaacattattgtgttactgcatgtaaaagatcatacattgtattactagagtggctatgcgtgatgatattttcccctt

SEQ ID NO: 654 - DNA, 388 bp, Triticum aestivum
  Clone ID: uC-tsflw189001e05b1
tttgacgcgtgggctgacgcgtgggtggtactacaactactacgacgacaggcgcgtcggggggcagcgtgacgaccaccagcagggggctcaagaagaaggcgctcaaggcgctgccgaagctggcgtacgcggacgcggtggccgcgggtgcggcggtgaggggcgccgccggcgcgcggtgcgcgcgcttccgccacaacgccaacgcccacgccaaccaatcctcgacgtgcggcagcccggcccacgccctggcggccttcggcgggggcggaggagggcataaccatggtgctacaactactaccgcagtgaagtttttcttctcaagaaatggaaaggagaataattagagctgtgaatgtgactcttatgtgcaaccttt

SEQ ID NO: 655 - DNA, 351 bp, Triticum aestivum
  Clone ID: uC-tsflw189001e08b1
tttgccgcagcagctcagctacccgtacccgtgcccacccccgacaatggttcgtccgctgcgcgtcagcagccggtaaaagcgcggcgataccagaaagaaataaagcgcgcgcgcggtgcggcaaaccactcttgcagtggcatggcatggcaacctttgctctgttctgccccgctcatacagagaaatggtggcttggtgagtgggttagccactacccacttgtggagcgatgctgtgtaccaataaatctgaatgaaatgtatgttgtgcctgcacgtagaagtatccgcagcaactatttgtatgctgcgtactaactaataaatattaacagactatgttgta

SEQ ID NO: 656 - DNA, 418 bp, Triticum aestivum
  Clone ID: uC-tsflw189001e09b1
gctcttgcggccacgacgggcccttcggcgccaccggggtcaagcggctccaggacatcggcatgatccaggcggtgcccgggatgaaggcgctcgacatgaacacggccgaggatgccatcgtgcgcctcacccgggaggtggtccccggcatgattgtcaccggcatggaggtcgccgagatcgacggcgccccgagaatgggcccgaccttcggcgccatgatgatctccggccagaaggcggcgcacctggcgctcaaggccctcggccggccgaacggcatcgacgggacgctcaagaacgtgaccccggcgctgcacccggagatgatcctggcggcgaccaacaacggcgacatcgtggacgcctaagcaaagcaatgaaccacggacaccaaggcgtacgtacgctggtg

SEQ ID NO: 657 - DNA, 398 bp, Triticum aestivum
  Clone ID: uC-tsflw189001e10b1
tgagcaatgctgttcatgctgatgaagccctccgccgtgccaagttcaagttcccaggccgtcaaaagatcattcgcagcaggaagtggggctttaccaagttcaacaaggccgattacatcaagtacaagagtgagggaagaatcgtgcctgatggtgtcaatgctaagttgcttggtgtccatggccccattgctaaacgtgcccctgggcaggcgatcctggcttgaggcagttgaagcatgcacagaccatttccttcactagatggaactcatgagttctgtttttgctttagctagtataattccccatgcttgaacgagtgttaagtaaagctggctgctggctgcagtataatctacttctgtagttctttactgtagaccgtttctcat

SEQ ID NO: 658 - DNA, 75 bp, Triticum aestivum
  Clone ID: uC-tsflw189001e11b1
tgttgatttgcgaactcgtggttgctgctagatgtactgtggatgtttaccttattaagtgctatttcgggacct

SEQ ID NO: 659 - DNA, 72 bp, Triticum aestivum
  Clone ID: uC-tsflw189001e12b1
tccacgcgtccggccacgcgtccgcccacgcgtccgcccacgcgtccgcccacgcgtccgcccacgcgttcg

SEQ ID NO: 660 - DNA, 396 bp, Triticum aestivum
  Clone ID: uC-tsflw189001f04b1
ttgacgcgtgggcggacgcgtggggggtgagttttggagcaaacactttcatctcagtctgtaccacacaccacgcctgcctcatctctcggagcaggaggaggagcttgcaggaacaatggcagcccagggtcttctctctgggaggcagctgctggggaggcctctgcagtcctccatctccaggtcgtcttcctcccggaagtcccccttcgtcgtcagggcatcgtccagcccccctgccaagcaaaatgacaacaggcagctgtggttcgcgtccaagcagtccctcacctacctcgacggcacgctgcccggtgactttggtttcgaccccttggggctgtccgacccggagggcaccggcgggttcatcgagcccaggtggctggccta

SEQ ID NO: 661 - DNA, 69 bp, Triticum aestivum
  Clone ID: uC-tsflw189001f05b1
tttggcacccagcccccctgggcatatcgcgatgggtttctcgtaaaactctgacgtgtgtatgtatgg

SEQ ID NO: 662 - DNA, 262 bp, Triticum aestivum
  Clone ID: uC-tsflw189001f07b1
ttcacgcgtccgcccacgcgtccggcgcccgctccgaagccgccatgatcagcgacgggtgccagtggcgcaagtacgggcagaagatggccaagggcaacccgtgcccgcgcgcctactaccgctgcaccatggccgccggctgcccggtgcggaagcaggtgcagcgctgcgccgaggaccggacggtgctcatcaccacgtacgagggcaaccacaaccacccgctgccgccggcggccatggcgatggcgtccaccac

SEQ ID NO: 663 - DNA, 398 bp, Triticum aestivum
  Clone ID: uC-tsflw189001f08b1
ttaaccttgactggtacatgggcccaaccctggttgaggcgcttgaccagatcatcgagcccaagaggccctcagacaagcccttacgtattcccctccaggacgtttacaagatcggtggcattggaactgtgcctgttggccgtgttgagactggtgtcatcaagcctggtatggttgtcaccttgggtcccactggtctgacaactgaggtcacgtccgttgagatgcaccatgagtctctcctggaggcgcttcctggggacatcgctggcttcaacgtcaagaatgttgccgagaaggatctgaagcgtggttttgttgcatgcaactccaaggatgaccctgccaaggaggctgccaacttgacctcccaggtcatcatcatgaaccaccct

SEQ ID NO: 664 - DNA, 390 bp, Triticum aestivum
  Clone ID: uC-tsflw189001f09b1
gtcgtgatgctggacgccaaggggagctgcgcggtgccctccgaggaggcggccatgggcgcgggtggcaggtgcctgtcggtgccgtccgtcgtgccggcgccggaagggggagggatcgtcctccgtctccgcatcgacaaggaggtcaaggcgagcaggagcccccgtccccgtggctgattacttacttggtcaccttgggctccttattatctactactcgccttaacctggagtactatatatatttaccatggttggacattggtgatttggtagtgaactggtggtagtgatcgaaggttgaaccatggttgggctttgattgattctgtccatggcaatgttggccaatgtatcgcgcaggctatatatgcagctgatcac

SEQ ID NO: 665 - DNA, 245 bp, Triticum aestivum
  Clone ID: uC-tsflw189001f10b1
tccacgcgtccgccagcaacaatatgcacaattaactctaaagcgtaggtatctagcaggatttgtttctaaaaaaaaaaaaaaaaaaaaaaaaaaaaaaaaaaaaaaaaaaaaaaaaaaaaaaaaaaaaaaaaaaaaaaaaaaaaaaaaaaaaaaaaaaaaaaaaaaaaaaaaaaaaaaaaaaaaaaaaaaaaaaaaaaaaaaaagggggggccgtttaaaagaaacaaacttaattgcccggg

SEQ ID NO: 666 - DNA, 167 bp, Triticum aestivum
  Clone ID: uC-tsflw189001f11b1
ggaggaactttaggacatacttggggaaatgcacctggtgcaccagctaatcgagtggctttagaagcttgtggacaagctagacacaaagggcgcgatcttgttcgcgaaggtaatgaaattatgcgagcagcttgcaaatggagtcctgaactagcctgagcttg

SEQ ID NO: 667 - DNA, 170 bp, Triticum aestivum
  Clone ID: uC-tsflw189001f12b1
gttggttgttcttaggtgtgtttgatatggtagatgtacatatatgtatactatcacagatggggaatggtagcgagactggtgttgatattcgtcgtcctgtaataaccttcagaatgcttgctgctcctgacggccttcttcaatgtcactgtgcttgtttttgcttg

SEQ ID NO: 668 - DNA, 194 bp, Triticum aestivum
  Clone ID: uC-tsflw189001g03b1
cgatcgaccccgtctcacccacgctgccgtcggtgatccgggaggcagtcgaggggacagcgcgcgaccggaggggatgcggcagcagcggggcgtcggcaggggcgggggccggctggatcccggtctgctgaccagggtggtggacaaggtcttccgcttcgttcgcctcgccgagttcgagatcctctttg

SEQ ID NO: 669 - DNA, 411 bp, Triticum aestivum
  Clone ID: uC-tsflw189001g05b1
ttcacgcgtccgacttggataccctgatgtcgtcatggcatgcgccaagattgggcgcctaatgaacgaccttgctgcttcatccaaaccccgggacaacagggacgtggccaactgcgtggagtgctacgccaatgagcacaaggtcacggaggaggtcgcatttgctgccatcgactcgatgatagaagatgagtggaagaccatcaaccaagctcgattcaaacatggtcgtgagctgctgcctgcggtgcaacggttcatcaacttcactctcagcgggccggtgtactacggtgataggaaagatgctttcaccttcagctcgtatcttgaagacatcatcaagagcctctttgtcaatcccatccccatctagcaactactctgtgtacctcatgcaggcatgca

SEQ ID NO: 670 - DNA, 449 bp, Triticum aestivum
  Clone ID: uC-tsflw189001g06b1
tccacgcgtccgtgcctctccagggtactacgacggtcgatactggacaatgtggaagctacccatgtttgggtgcaccgacgccacccaggtgataaacgaggtggaggaggtcaagaaggagtaccctgacgcctatgtccgcatcatcggattcgacaacatgcgtcaggtgcaatgcgtcagcttcatcgccttcaagccaccaggctgtgaggagtccggcaaggcctaaacaagctaactacccttcatcatacaacatggtttcgtgtcaggttgattttatttcccttttttacttttgttctgcttgtgtatgtgttctccccctgcaactcgagttaacattatatgagtactacaaatcataagagtactacaactatcgttgggtgagaaatatgtgaatgtaactacggctatgcataaagtaaatatatactccc

SEQ ID NO: 671 - DNA, 364 bp, Triticum aestivum
  Clone ID: uC-tsflw189001g07b1
ttctcgtcctcggcgtcctgctggctatcgccgtcgccaatgccgaggcagcgtccgtcgtggtcggccaggtcaagtgcaccgactgcaccaggaagaacttgaaggccgaggaagccttcaagggtggcgatcaagtgcaagaacgtccaccgcgactacgagagcatggcggtgggtgccctggacagcaccggcgccttcagcgtgcccctggccgccgacctccatggcgccgactgcgtctcgcagttccacagcgctgcctccaacgcgccgtgctccggtcaggagccatccaagatcgtgccggtgtccgagggcaccaccttcggcatcatggccggcgccaacactgccacgc

SEQ ID NO: 672 - DNA, 440 bp, Triticum aestivum
  Clone ID: uC-tsflw189001g09b1
tccggagagacgccagagagcgcgagcaaaccctagcctccgacgatggtgctgcagaacgacatcgacctcctcaacccgccggcggagctcgagaagctcaagcacaagaagaagcgcctcgtccagtcccccaactcgttcttcatggacgtcaagtgccagggctgcttcaacatcactactgtgttcagccactcccagactgtcgtggtgtgcccgggctgccaaacagtgctctgccagccaacgggtggcaaggccaggctaaccgagggttgctccttccgccgcaagggcgactaaacctctgaaggaagccaagacgttgttgaactttgagttattccagggtgttagtctgaagattttgcaatgtcggcaaattgaacccatctttggcaatatgatatctagcttgagtattattatgatgacca

SEQ ID NO: 673 - DNA, 266 bp, Triticum aestivum
  Clone ID: uC-tsflw189001g11b1
tttcgcgcgaggaggagggaggtcgcgcgccggtccatggcggcggcggcaacctccgtgcgggggtgcggcccggcgttggcgtcgacggtggggctctcgctgcgttgggcgctgcagcggtcgttctttttgccgcccttgacggggagggcgtagttcgtgcgcgcgctgcgggccgtggtcgcggacgcgccccaccgggggctggagctctggccggaggggaggcaggcggtgctgctggaggccgtgatcgggggaga

SEQ ID NO: 674 - DNA, 119 bp, Triticum aestivum
  Clone ID: uC-tsflw189001g12b1
agatctggtctgtatgagactgtcagtagggggcatccagagaacactcctctctcgtatcagagcacccttcggacgcacggcggcgatggccgaggcggtgcaggtcggcgggctgc

SEQ ID NO: 675 - DNA, 408 bp, Triticum aestivum
  Clone ID: uC-tsflw189001h03b1
cctgaaatcacatatgaggaagtcattattgacaattgctgcactgacactcgtgaagaatcctggtacatttgatgtattagtgatgccaaatctgtatggtgacattattagtgatctatgtgctggtttgatcggaggattgggcttaactcccagctgcaacattggtgaaggtggcatttgtctggcagaggctgttcatggttctgcacctgatatctctggcaagaaccttgcaaacccaactgctcttatgttgagtgctgttatgatgttgcgccacttgcaattcaatgaccaagcagaccggatccacaatgccattctccagacaattgccgaggggaagtacagaaccgctgatcttggtgggaagtcatcaacatcagactacacaaaagcagt

SEQ ID NO: 676 - DNA, 371 bp, Triticum aestivum
  Clone ID: uC-tsflw189001h06b1
tacgatttcacacattcgcggccgagggagcgagcagcgccggccgccccgcggcaccgccggttgctctcgcctcccgctccgcagcaccgccggtagctctcgcctcccgctccgaggcaccgccggtagctctcgcctcacgtcccgcggaaccgccggtagctctcgcctgccgctgatacaatggccaacgccgcggtcgaccccgagcgcaaaaggtcgcggttgacgtcgtccatgtcgtccatgtcgtccgtggacaccattgtccgtctcccgccctcgccgatgttgacgtccccgacgcgcgccccggtgggacacgcgctggaggagcctaccgcgcggcacaggccggcgcggagatc

SEQ ID NO: 677 - DNA, 396 bp, Triticum aestivum
  Clone ID: uC-tsflw189001h07b1
ttgtgaactcgagagaccgagcgaggaaagttgccgtgtgagacctgaaagttagggagatatggctgggattggtcctatcaggcaggactgggagccgatagtggtgcggaagaaggcgcagaacgccgccgacaagaaggacgaaaaggccgtcaacgctgcccgccgctccggcgccgagatcgacaccaccaagaagtacaacgctggaacgaacaaggctgcatctagcggaacttccctcaacaccaagcggctcgacgacgacacggagaacctttcccatgagcgtgtttcaagtgacctgaagaaaaaccttatgcaagcaagactggataagaagatgacccaggcacaacttgctcagatgatcaatgagaagccacaggtgat

SEQ ID NO: 678 - DNA, 228 bp, Triticum aestivum
  Clone ID: uC-tsflw189001h09b1
gtttgtcaactctgacattgctttgggttttccttctccatttatctttcttatttgttcctaagaatatgtgtatgtccatgttcatgtaccaacatggctcgagaaagcatgctcgtatgagaatgctgtcggtggctatgtatatgaacggacgcataatattatacaatatgtcgactatatacgttttaatggtcaccaatggataaaaaggaccaattttaa

SEQ ID NO: 679 - DNA, 388 bp, Triticum aestivum
  Clone ID: uC-tsflw189014a05b1
gctctcctcaaccccacacgcccacagatggaggagcccgcggcgctgaggcccgcggcgtgccgcgccaagggcggcgcgccggggttcaaggtggcggtggtgggcgcggccggggggatcggccagtcgctgtcgctgctcatgaagatgaacccgctcgtctccgtgctccacctctacgacgtcgtcaacacgcctggggtcaccgccgacgtcagccacatggacaccagcgccgtggtgcgcggcttcattggccaacaacagcttgaggcagcacttacaggaatggatcttgtcatcatccctgccggcctcccaagaaaaccaggaatgacaagggatgatctgttcaacaaaaatgctgggatcgttcgctcgattt

SEQ ID NO: 680 - DNA, 394 bp, Triticum aestivum
  Clone ID: uC-tsflw189014a08b1
taccgcttgtgtcaacgggctcggcatctccgcggcgaggctcgacatcgccatgggcggcgtcgtgccgctgcacacccacccggccgcctctgagctcctcttcgtcaccgagggcaccatcctggcgggcttcatcagctcctcctccaacaccgtgtacaccaagacgctctacaagggcgacatcatggtgttcccccagggcctgctccactaccagtacaacggcggcagctcgccggcggtggcgctcgttgcgttcagcggccccaaccccggcctgcagatcaccgactacgcgctcttcgccaacaacctgccgtccgccgtcgttgagaaggtcaccttcttggacgacgcgcaggtgaagaagctcaagtccgtgctcggc

SEQ ID NO: 681 - DNA, 443 bp, Triticum aestivum
  Clone ID: uC-tsflw189014a10b1
tttccgcctattcgtccgcggacgcgtggggtcgacgctgccccgcgccggcgccccgctgcagacgtacaccgtccgctccgtgcggccggtggagggggggcctgtcttcgtggcgtgccacgacgaggcctacccgtacaccgtgtaccggtgccacaccactggcccgtccagggcgtacatggtggacatggagggcgcgcgcggcggcgacgcggtgaccatcgccaccgtgtgccacaccgacacgttcctgtggaacccggagcacgtctccttcaagctcctgggcaccaagcctggcggcacgccggtctgccacctcatgccgtacgggcacataatctgggccaagaacgtgaatcgctcgccggcgtgagcggcccgggcagctctgtggtctcgccggaactaagatcgatgtactactactactatct

SEQ ID NO: 682 - DNA, 357 bp, Triticum aestivum
  Clone ID: uC-tsflw189014b01b1
ccgggtcgacgtgtgacgaggccgacgccaacccccaccgcattcccgacgacgagaccccgccgtcggcgactgcgaccacctccttctcggtggtccggcgcgtgccgtcggccatctcgacggacggccgcctccgtcggacggcgctgacgcaggaggagccgcccaactacgagatcgggtggaagcgcaccaagaatctccccctggagaagcccaaggggtgggccatcgccgactttctggagaagctggaggggctgatggagcgcgggcggtacgggtcgggcgcgctgctgggcacggtggcgggcgtggtgactgagcgcgcccgggaggaggcggagatcctga

SEQ ID NO: 683 - DNA, 396 bp, Triticum aestivum
  Clone ID: uC-tsflw189014b03b1
ctttcatttataatctccggcgatccaccacaccctgcattggcgtccgcgctcaccaacgtgagcctgtctaccttcgcgcccacggccaggggcgacgtcctcgcgaggccgcaggtggccgccgcccgcgtcaccttcccgacggcgcaccgcggcagcggcgccctctcctgcagggcgggcgggccggccacgccgccgggcatctccgacaagatgtcggacagcatcaaggaggcccaggagacgtgctcggaggacgccgccagcggggagtgcgcggcggcgtgggacgaggtggaggagctcagcgccgccgccagccacgcccgggacaagctcaaggactccgacccgctggagaactactgcaaggagaaccccgagaccgac

SEQ ID NO: 684 - DNA, 454 bp, Triticum aestivum
  unsure (1)..(454): unsure at all n locations
  Clone ID: uC-tsflw189014b04b1
gttgtgcttaattgcatcaaggncgcaggacctttggcgtcaactttagtgtccaccaatgccaaatttgaaattagaagccccaaacgtgtacagatcaaattcgaagaaggcatcattggcactccgcagctgaccgattccatcgtactgccagagaagtttgaattatttggacagaacattgacctgagcccgttgagcggcatatttacttcgatcgagaatgcagcgtcctccgtcgccaagaccatcttcggtcagcccccactgaagatacctttcaggagcgagagcgctgggtcctggctgctcacaacctaccttgatgctgagcttagaatctccagaggagatggcagcagcatctttgtgctgttcaaggaaggaagcgcactctcgatataggccaagcgtatctattctctgagtagaatttgacatggagaaaggg

SEQ ID NO: 685 - DNA, 424 bp, Triticum aestivum
  unsure (1)..(424): unsure at all n locations
  Clone ID: uC-tsflw189014b05b1
gttaggctatgcgaggggtcggggaagggaagaggatgtctctgggggcggtgttccacggcgcgcagctgatgctggatctggcggtggccgggatgtccctcatgttcgcgctcggcctcttcgccgtcgtcaccaccgtgctctgctccgccgccttcctccaccactccaaacccgtcgcgtcgtagccgcgagctgcctcccaccaggcccacgaccccctcggcgcatcctaatcgagtgagattgctgttgggaggtaataccttcatttgcatcatttgcccagcagaaggtgctccatatgctactgctgctagtactgttgggagggaactactgtagacgcaaagagtaggaattgcacatatcangtgatagctggaggctcttgtaccttgtattacttgtcatgtctact

SEQ ID NO: 686 - DNA, 510 bp, Triticum aestivum
  unsure (1)..(510): unsure at all n locations
  Clone ID: uC-tsflw189014b07b1
cgtatgatttccaagacagagagngncaaagaaagtgttgtcgccagcaagggtcgcatgaggatttgccggatgcccacctggttcgagacctgggataggtctgacacctacaccacgcttgctgttgttgcagctgctgcaacggtgttcgtcgctttcagggcctacaagaccatgaactgaagcctgcgaagcaatcctcaaaacaattccaggttttgtgcaccaaggagagtctacctcaagtaatatactacttgtccatagtggtaatgctagaacttaaaaagtagctgatctggagatggcgacgaaaatctgttatgcgtaatgtcctcatgcgaaactcctaggttttgaagtttttgacgccttggctatatgtgttgtagcaaggctatagccctggtgttctacatgacgatgttatgctcggttggttggaattgggatgttctggagcatgctggttttaaagatgtgcatttgaaaatcgtgcatttctgt

SEQ ID NO: 687 - DNA, 124 bp, Triticum aestivum
  Clone ID: uC-tsflw189014b08b1
gctttgtatgtcgaacaagaacagaatatgcacacacaaaattgtattctgtccagaaatcttgtgttctattgcaaaaaaattgcacttgaggaatgaggagacgagtgccccgtttattctg

SEQ ID NO: 688 - DNA, 308 bp, Triticum aestivum
  Clone ID: uC-tsflw189014b09b1
attaacaatagtgttctgcatgattttgccgaaaagtttctgtaggaatgtttcagcagcctgctgacagcagcgattcattgttcacttggtcacggtgattcatcacatcgtttatagatagcatcaatcatctgtcggtttggggtttttctccgtccgtttgctgtacccatgtttatctcttctgggcttgctgtactcatgttctatcctgttctgggcttgctggacatgtagtgaagttgtaagatgtaacttttggttgattcaattgtgaaaaatatatagaagcattcttattcaca

SEQ ID NO: 689 - DNA, 259 bp, Triticum aestivum
  Clone ID: uC-tsflw189014c02b1
agtccaggtataggctcatcgccaaggaggctgcgcagaggatgaactaagcctagccttatatgtgagagcatatgccatgtagtttccctttcagtgtgtcctgattttgacgaggaactcgaacccttttagcagcactgtggaatcgtattgtggttttctgattctctgttcccttctccagacttatgcaaagatcagatgaggtttacccatgtttggattctatatagttttatgtcctttgtcgagtcca

SEQ ID NO: 690 - DNA, 438 bp, Triticum aestivum
  Clone ID: uC-tsflw189014c05b1
cttctggttcgcgaggagttcgcggagttcatccggaagctgaccgccgagtcactctgcgcgatcagcctcaagctgatcatcacgctggtcgccgcccctgcgctggcgctggcgaccaagagggcaaccgagggcgtccccggcgtcggcaaggtagtgcacaaggtgcccaatgccatctatgccgccgccatcaccatggctgccgtgctcatccagagatccgccgagggcgtcgagtagaagcggcatcgcgccgtgaactgtagatgcaccaggcaaccagggagggtgtaaatgtgctgtgatttgccgtgtgaagggtgatgccctgtgggacttatagttttctgtaatatcttcctgtctgtgcttcttggtgttgctagcctggtgtgattcaaaaagacagtattcgctgcttggtgacatgat

SEQ ID NO: 691 - DNA, 187 bp, Triticum aestivum
  Clone ID: uC-tsflw189014c08b1
gatgtttagtctatggatatgacgatgcagcggtgacaaataaagtgtcacacaatgtcgtgtgtgacccgcccatactagttgtttaaattctgaaataaaataaaataaagttgtatcaagacaatgttcatattggcattgtgtggatgtcgatctgattgccatgcttgcaagttcataagtt

SEQ ID NO: 692 - DNA, 75 bp, Triticum aestivum
  Clone ID: uC-tsflw189014c09b1
attaaaattaaaaaaaaaaaaaaaaaaaaaaaaaaaaaaaaaaaaaaaaaaaaaagaaaaaaacaaaaggcggcc

SEQ ID NO: 693 - DNA, 234 bp, Triticum aestivum
  Clone ID: uC-tsflw189014d01b1
aatagtggtcttaagccaaccgcaaggcaaacggggatcaacgaaaagctacgcgaaaataatacatgcatccggtctctctcaaaaaaaaaaaaaaaaaaaaaaaagacaaaaaaaaaaaaaaaaaaaaaaaaaaaaaaaaaaaaaaaaaaaaaaaaaaaaaaaaaaaaaaaaaaaaaaaaaaaaaaaaaaaaaaaaaaaaaaaaaaaaaaaaaaaaaaaaaggggggggccc

SEQ ID NO: 694 - DNA, 340 bp, Triticum aestivum
  Clone ID: uC-tsflw189014d02b1
ggtacaacttttccgccttggagctcggcccgcctccggccggccacctctccatcggcctcgtgctcctccgcctcgatccgtccgccccatcgccatatccgcgccggagcagccggatccgctacccagaccaccaaccaagagccgcctcttgcctgtcctacggtcgagaggaggacgaccgagaggagcgcccattgatccgccgcctgggccgccttggagcacgccctgcctccggccgccacctctccgtcagcctcgcgctactccgacatgatccgtctgccccaccgccggatccgccgcccagaccaccaaccaagcatcggccctt

SEQ ID NO: 695 - DNA, 328 bp, Triticum aestivum
  Clone ID: uC-tsflw189014d03b1
cattgcctgtttcaccacaacctcgtattctagatttccagatagacagggtcagattaaccagacgatgatgcaggctgccgttgcttcgtcggccgtgctgcctgtcgccgtaaggggtaggccggcggcgaggaggaggagcgccaccgttgccggtggcagaaggattgtgggtgccggcgtccgggcatcggccgcggcggcgccggaggcggactacagctccaacgtctcggtgttccccatggaggcctgcgacctggtcggcggcgaggcgtgcgacgcgcagatgtacccggagacgaagctcggcgccggcaccggc

SEQ ID NO: 696 - DNA, 418 bp, Triticum aestivum
  Clone ID: uC-tsflw189014d04b1
ggtctccatttcaaccgacatggccgcctccgccgacgaggaggcgtgcatgtacgctctccagctcgtctcgtcgtcgatcctcccgatgacgctcaagaacgccatcgagctgggcctcctggagaccctggtggccgccggcggcaagctgctgacccccgccgaggtggccgccaagctcccgtccacggcgaaccccgccgtggcggacatggtggaccgcatgctccggctgctggcctcgtacaacgtggtgtcgtgcacgatggaggagggcaaggatgggcgcctgtcccggcggtacggcgccgcgcccgtgtgcaagttcctcacccccaacgaggacggcgtctccatggcggcgctcgcgctcatgaaccaggacaaggtcctcatggagagctggtactacctg

SEQ ID NO: 697 - DNA, 358 bp, Triticum aestivum
  Clone ID: uC-tsflw189014d05b1
cttactgttttgtcaccgccttcctgccctgaacgcagatatcgacccacccagctggtgcacgccggaggcggtttgccaggacccggttacgccgggaaacagggaaacgtgcaaaagcatctgcaaaagttttggctacaacccggaacaagcctactgcaatcccgatcccactccgaggtgctgctgcatctattaagcgcaggaaataacaatgccactggagtggcagatgatggatgacaaagctagcaaactcacttttatgtgtccatttcgacttatgtaaaaatcggaacagatcatggtccaggcctgtccgtcaattaataaagattagaaaaagtttcttttt

SEQ ID NO: 698 - DNA, 414 bp, Triticum aestivum
  Clone ID: uC-tsflw189014d06b1
gctcccggttcgctcgtcatgctcagcccgctggtcgccggcacgctgttcggcaccgagacgctggccgggctcctcgccggcgcgctggtgtcgggggtccaggtggcgatctcggcgtccaacagcggcggcgcgtgggacaacgccaagaagtacatcgaggccggcgcgtcggcggaggcgcgggcgctggggcccaaggggtcggacgcgcacaaggcggcggtcatcggcgacaccatcggcgacccgctcaaggacacgtccggcccgtcgctcaacatcctcatcaagctcatggccgtcgaggcgctcgtcttcgcgccattcttcgccgcgcacggcggcctcatcttcaagcacctctgagtttgaattccgggttcgcgcgccttgttgcctgggcttgga

SEQ ID NO: 699 - DNA, 450 bp, Triticum aestivum
  unsure (1)..(450): unsure at all n locations
  Clone ID: uC-tsflw189014d08b1
catgatgttgttatctagctgcaatnncggcatccagttactcctttgtttctttacttaagcacttccttcctatcatgaatccaggtggtgctagtatctcgctaacatacattgcatctgaaaggacaatccctggatatggcggtggcatgagctcagctaaagcagctcttgagagtgatacaaaagtacttgcttttgaagctggacgcaaaggcaaaatccgagttaacaccatatctgcaggtcctctgggaagcagagcagccaaggcaattggattcattgagaagatgatcgagtactcttatgtcaatgcaccattgcagaaggagcttctggcagatgaagtcgggaacacggcagcattcctggtgtctcctttggcttctgccatcactggatcgactgtttacgtcgacaacggactgaacaccatgggtcttg

SEQ ID NO: 700 - DNA, 449 bp, Triticum aestivum
  Clone ID: uC-tsflw189014d09b1
cttcgcgttcgcccggaggagttcaaaccggagcggttcgagaactccaaggtcgacctcaaggggacggatttcgagttcataccgtttggggctgggcgcaggctctgccctggcttggcgttcgggctggccagcattgagatcgtgctggccgtgctgctctaccacttcgactgggagctcccggacggggtggccccgagcgagctggacatgactgaggagatgggcatcaccatccgaaggaagaatgatctgtacctgcgtccaactgttcgtataaaggtgtaggttcttttttcgaaaaggagggtttactccgatctcggcctcttgcataataaacatgtgccgcatagttgccttgcaccgtcaatggtgacgggtttgcccgttgtactacctgtttatcatgacttgaataaaataagcatgaggtttgttcc

SEQ ID NO: 701 - DNA, 363 bp, Triticum aestivum
  Clone ID: uC-tsflw189014e01b1
cctcgcgtttgcccacgcgtccgcccacgcgtccgaccaattttcccgacgcgagagcgagagacctactttcccctcgtctcaggccatggctcttagggtttccaccctgcccgtcgccgccgtcggccgcgccggcaactacaccgtgcacggcatcacggagagcccggggggcatctgggacggcctcaccatcgtcggcatcgtcgtcaccggagtactcctccgccgtcgccttcgcagctggagcaggcacctgttctctggttcccggccccatgacccccagcaccgagacctaagggtgagggccgaccgggctgaaaacaagggcaaacgtgagcagtgggcggagacaaa

SEQ ID NO: 702 - DNA, 353 bp, Triticum aestivum
  Clone ID: uC-tsflw189014e02b1
cttcgcgttcgctgcaagatagcctgccagccatgggaagcaagggcctcaagggtgtgatggtgtgtttactcatactggggttggttctggaacaggtgcaagtagaaggcaagagttgctgcaagagcaccctaggaagaaactgctacaacctttgccgcgcccgtggtgctcagaagttatgcgcaaacgtttgcaggtgtaaactcacaagtggcctaagctgccctaaggacttccctaaattggtccttgagtccaactcagatgaaccagacaccatggagtactgcaacttgggatgtaggtcttccctatgtgactacatggtcaacgcagctgctgacgat

SEQ ID NO: 703 - DNA, 174 bp, Triticum aestivum
  Clone ID: uC-tsflw189014e03b1
gctccctgtttgcgccgctgccggcggggtgcccttgtgttggagggtgtatgctcccagcgccggggtgcccctgcttgtacctagatggttactctttccgtccaccattgtcaccggctaacattgtgataatatcagtctgggtaatgttagattaagctgttgtcgccc

SEQ ID NO: 704 - DNA, 245 bp, Triticum aestivum
  Clone ID: uC-tsflw189014e04b1
ctacgcgttcgcgcgttttcagttttatgtttggggtcctttctataagatgcagggatttgcttttattttcagcttctttagtgtccttggtggaagctataatgtcttttcgtcataatcaatgaagtgctgggtccttctgggcccttgtagtggtccaaaaaaaaaaaaaaaaaaaaaaaaaaaaaaaaaaaaaaaaaccaggagtaaaaaaaaaaaaaaaaaaaaaaaaaaaggggggc

SEQ ID NO: 705 - DNA, 307 bp, Triticum aestivum
  Clone ID: uC-tsflw189014e05b1
ctacgcgttcggttgttatgcatggtgtgtgcgtgtgtgtttcctttttaattgccaccgagaataagacgagatcgatcgtaccgtgctagttaatggcttatgtgtgccccttgtggcctgtaccgtgtggtgtgtaaggcgtcgtcttgtgttgtgatgcgccttttcctactgttctagttcccgtcctgatgtgccttcctcgtcttatctagaattagaatctcaaattttctgtctatgtatttgtatctgtatcactctatgtgtggtgccagctcttgatattttctgtttgttcttc

SEQ ID NO: 706 - DNA, 430 bp, Triticum aestivum
  Clone ID: uC-tsflw189014e06b1
cctacgcgtttgcttgagaacattctcaaagttggagaaactgataagaatttgggtgcttctggggaggggaatgtctatgcgcagatgattgatgaagcagagggcctggaaaagattgagaacctgcagagccatgataacaatgaaatctatgagaaggctgtgaagattctcgaggcttactggatggaggaggaagatgatgcgatgggggcaactatggaagctcccacaggtgttgcctttgactttggccaaggtggcaaccctgatctgaacttgggctgaatacagatttgaccaatggtggtaattcccttgtcgctgcagttgtcaccatttggtctagtcggtgtgtggggtaaggtcatggttgtggtgggtccaataagctgaagattttcaaggaagcaactggtcctgggta

SEQ ID NO: 707 - DNA, 382 bp, Triticum aestivum
  Clone ID: uC-tsflw189014e07b1
gtcgccctgcaggcaaaccatggcgctctccgtctcctccctcgcatcggccttctcccacctctccctcccctccacctccgctccccacccgccccctctcctgcgcctccccaccacccgccgcgccgctcgcctcgtcctcttcgcctccggggccgacgccgccgagccggtcctcgaggcggaggcgcctgccgccgacgacggccccgaggaggtgctcgcggctgaggccgaggaggacgcgctctccgggctggcgctgcgcaagtacgtgaagcagcggctgcccgggggattcgccgcgcagcggatcaccgccacgggccgccggaagatggcgtccgcccgcgtcgtgctccaggagggcaccgggaag

SEQ ID NO: 708 - DNA, 391 bp, Triticum aestivum
  Clone ID: uC-tsflw189014e09b1
cgtacgcgtttggaaatccccgtccctacaccagcatgatttgccttcagtgatgtggcttcatccaaagcgatctgcttgtttagtcagtctcgcgctttacttatcgttggtgagcattttgttgtaggtgtacaaattagtcggtatgcaacagagcatgtgctgggcttggtcagatatggtgctgagctgcttggttgcccaggttggcaggttattgccttccttgcggcagttcgtagcccgccaacgtatgatcatcatggagtaggagaagaattaaagagacagtatttgtggtagtctagccattgttgcttgctgctggatgttttttcttttcagttctaactgcctgatactttgatatgcatcggataattatctg

SEQ ID NO: 709 - DNA, 348 bp, Triticum aestivum
  unsure (1)..(348): unsure at all n locations
  Clone ID: uC-tsflw189014f03b1
ttcgcgactacgcgtccgcccacgcgnccgcccacgcgtgcgatcagcgcccctccgtccctccctcctcctggcgcgtcgtgatccatccagcccaggggcgagaagctagttagcgggtgattaaggtcgccatgtcggactccgaggaccaccacttcgagtccaaggccgatgcgggggcgtccaagaccttccctatgcaggccggcgccatccggaagggcggctacctcgtcatcaagaaccgcccctgcaaggtggtggaggtttctacctcgaagactggaaagcacggtcatgctaaatgccactttgttgccttagatatattcaatggtaaaaagc

SEQ ID NO: 710 - DNA, 339 bp, Triticum aestivum
  unsure (1)..(339): unsure at all n locations
  Clone ID: uC-tsflw189014f04b1
gatgatccccagcaangnngagctcgacagctggaaggtttctggcgatgtctcctttggctctggagccgcgctcaagggcaacgtgaccatcgcagccaaggctggagtcaagttggagatcccagacggagctgtgctcgagaacaaggacatcaacggccccgaggatctttgagtgacgcctgctgcatcgccagtcgcgttcccagaaaccttcctgtcctccttcgctgagttaacagtcatgtaattttcgcgtgcattctgctggggtgttgtcctgggatagcccctttacataataaattgaatcccctctgtgctgttcatctacac

SEQ ID NO: 711 - DNA, 354 bp, Triticum aestivum
  Clone ID: uC-tsflw189014f06b1
ttctcgttatatgaaaacgaaggcgggccatataaaaagatgatgaaatgccgagccgcggcgggtgactggaccaatggatggtcctgtgttgttaagctgatggtactaacccgctcatcaaaggataatgacgaatatgcatgcatgcatagcagcttgcggaccggcgtcggctggaaatgctgccatgttgtctcccatacatgtctctctctttttggttgtcgggtaaggctgcatgctgaattgtgtctagtagtatgtgtaaattcctggtgccgtctgagccttgtacaaaaacgctcttgatagtgagtgttgtgcgattctttttgtactccagtgggtgat

SEQ ID NO: 712 - DNA, 380 bp, Triticum aestivum
  Clone ID: uC-tsflw189014f07b1
taccggttattgctccgaccgataccgggagcatttcttcagaactctaccacgcgcgaatcgccgcggaattttactgaattaccagcaccagagcagagatctcggtcggctcggcgccaggggcaacttccgccatgagcgccacgaggtcgtccttcttcgggtccaacggcaagaagaagcccgccgcatgcgcccggaaccccttcgactccgactcggacgacgacggcgggatggtccagcagaggccgccgatgcgggcctactccgtcccgacccccgccgccgcgccggtccccgccgacgagcggaactccctcttcgtcggcgccgccgcggcgggccccgggccgtccgggttcgcgttctcgtcg

SEQ ID NO: 713 - DNA, 449 bp, Triticum aestivum
  unsure (1)..(449): unsure at all n locations
  Clone ID: uC-tsflw189014f08b1
nttttacctagcgcacatccatggcgcgcttccttgtcgctctcctcgccaccaccctggtcgcggttcaggctggagggcagctgggccacgcggcgccggcgacggcggaggtgttctggcgcgccgtgctgccacactcgccattgcccgacgccgttctccgccttctcaaacaacccgcagcaggtgttgaactgctcacagaagccaccagcttcgtgagggatgccgaggacaggccccccttcgactaccgtgattacagccgctcgccgcccgatgatgaaccgagcaagagcaccggcgccgcctccggggcgcgggacttcgactacgacgactacagcgggggcgacaagctccgtggcgccgcctccggggcgcgggactttgactacgacgactacagcggggccgacaagctccgtggcgccaccgatgaatac

SEQ ID NO: 714 - DNA, 320 bp, Triticum aestivum
  unsure (1)..(320): unsure at all n locations
  Clone ID: uC-tsflw189014f09b1
cgtactcgtgggccgnggccaccgncatcgggtacaagcaccaggcagaccccgccggtcccaacgccgccgacgcggtctgcagcggcgtgggaatcctcggcatcgcctgggcgttcggcggcatgatcttcgtgctcgtctactgcaccgccggtgtgtccgggggacacatcaacccggcggtgaccttcgggctgttcctggcgcgcaaggtgtccctggtgcgcgcgctgctctacatcatcgcgcagtgcctgggcgccatctgcggcgtggggctcgtcaaggggttccagagcgccttctacgtgcgctac

SEQ ID NO: 715 - DNA, 400 bp, Triticum aestivum
  unsure (1)..(400): unsure at all n locations
  Clone ID: uC-tsflw189014g01b1
cgttttaccaccttcnttncagcaggagggcacttttaagtgtttatgcagacatgtctttagcgtgcaaggagtactatgatccaaaccgttcgatgctggagttggtttttgctccagcagaggaatggatcggacggagtgacaccgaaatcatcgaagcaactatgctagagctagccaagttgtttcctgatgaaatcgctgctgaccagagtaaagcaaagattcttaaataccatgttgtgaagacaccgaggtccgtttacaagaccgtcccgaattgcgaaccttgccgacctctgcaacgatcaccgatcgaagggttttatctggccggcgattacacaaagcagaaatacttggcttccatggagggtgcggttttgtcaggaaagtt

SEQ ID NO: 716 - DNA, 286 bp, Triticum aestivum
  Clone ID: uC-tsflw189014g02b1
agtaaatgcaaaaacgaagaggcgaacagcgcctatgaggatctcaaccagggcaagatcgttggccgagctgtagttgaaatcatgtagtgctgactgctgacgagatgatcatgtggttgaaaatctgggtcaaacaaataagaatatgccgcggcaactccgcgaactcggtttgtgttgcagcatggtctcgctccctgatttgtgttggatgcaaaaaaatttgttgattgaaagattattgtgctccaaaaaaaaaaaaaaaataaaactcgccctctat

SEQ ID NO: 717 - DNA, 329 bp, Triticum aestivum
  Clone ID: uC-tsflw189014g03b1
cgtacgcgtgggcggacgcgtgggcggacgcgtgggattgggttgactacatggagtcctctcgcttcaggggttctcactgggaagtatagcaaagggaatatacccgctgaaagccggtttgccctagataactacaagaacctggcaaacaggtctctggttgacgacacgcttagaaaagtgaacgggctcaagccaatcgcttcggagcttggcgtctcgatggcgcagctgggtatcgcctggtgcgcgtcgaaccccaacgtgtcgtctgtgatcactggagccaccaaagagagccagatcgtcgagaacatgaaggccct

SEQ ID NO: 718 - DNA, 426 bp, Triticum aestivum
  Clone ID: uC-tsflw189014g06b1
taccgcttacacgtcgacgggctacccgggccggacgtaccggttctacacgggcgacacggtgttcgccttcggggacgggctgagctacaccaagatgtcccaccagctcgtgtccgcgccgccgtcgtacgtgtgcatgcagctggccgaggaccacccgtgccgcgccgaggagtgcgcgtccgtggaggccgcgggcgaccactgcgaggacctggccttcgacgtgaagctccgggtgcggaacgccggcgaggtggccggcgcgcactcggtgctgctgttctcgtcgccgccgtcggtgcacaacgcgccggcgaagcacctgctcgggttcgagaaggtgtcgctggcgcccggggaggccggcacggtggcgttcagggtggacgtgtgcagggacctgagcgtggcggacgagct

SEQ ID NO: 719 - DNA, 303 bp, Triticum aestivum
  unsure (1)..(303): unsure at all n locations
  Clone ID: uC-tsflw189014g08b1
ttcncgataaataacataaaaggggcagagaaggctctagagtagtctaatacaaaagccatagccatggcgaaactcatgtgcttatgtttcatcatcctcactattgcggtagtcgtgtcggctgacgaatgtgagggtgaccgacaggaaatgatcaagcagtgtgcaaagtatcaacaatggccagcaaatccaaaggtaaatccgtcggacgcatgctgcgccgtgtggcaaaaggcaaacatcccatgcctttgcgctggtgtcaccaaggagaaagagaagatatggtgtatggag

SEQ ID NO: 720 - DNA, 175 bp, Triticum aestivum
  unsure (1)..(175): unsure at all n locations
  Clone ID: uC-tsflw189014g09b1
cctacgcgaccgcgacaaacaaagacaggcgcatttgaagtttgaanccaaaaaaaaaaaaaaaaaaaaaaaaaaaaaaaaaaaaaaaaaaaaaaaaaaaaaaaaaaaaaaaaaaaaaaaaaaaaaaacaaaaaaaaaaaaaaaaaaaaaaaaaaaaaaaaaaaaaagggggggg

SEQ ID NO: 721 - DNA, 143 bp, Triticum aestivum
  Clone ID: uC-tsflw189014h01b1
cgtggccaagcccgccaagagcaaggcaagcagggagaggaagagggccaggagggaggcgagaacggcacagggcccgagggatcaggcaccaacaccagcggctgcagcccccgagcaggcggcaccggcgccaaagaagg

SEQ ID NO: 722 - DNA, 330 bp, Triticum aestivum
  Clone ID: uC-tsflw189014h03b1
agtattcgtgggcggacgcgtgggcggacgcgtgggcggacgcgtgggcggacgcgtgggcggacgcgtggggctcgatcctacctacgctagcacacactctgtctcacgctcgcgagcgaactagtccaggaacaatggcgccgcccaagaaggtgctgatgctgtgcggcgactacatggaggactacgaggcggccgtgcccttctacgcgctggccggcctgggcgtcgccgtccactgcgccgccccgggcaaggcccccggcgacccctgcctcaccgccgtgcacgacttcctcggctacgagctctacacggagctccccg

SEQ ID NO: 723 - DNA, 130 bp, Triticum aestivum
  Clone ID: uC-tsflw189014h05b1
cttcgcgtccgcccacgcgaccgaatcgttgtagtgatgacaaataaagtggtgtgcaccatcatgtgtgaccccgaccagtgctagttcaagcttgggaataaaagacaaacaaagttcttgtttgctt

SEQ ID NO: 724 - DNA, 316 bp, Triticum aestivum
  Clone ID: uC-tsflw189014h07b1
taccggctagtaccagttcgatgacaagtacggcgccaacgtcgacggctacagcccaatctacacgccagaggaatggtctgaatctggtgaccgctacgccggcggaacgaccgggcttcttatctgggccgtcaccctcgccggcctcctcggcggcggcgtcctcctcgtctacaacaccagcgctctcgccggctaagagagcatctacgtgtaacacagggccgggtctctgcttgcatgcacgtctctgtaatctacatagctacctcctgtgaatgtatgcaatcaacgatgcaaagtaattgatccg

SEQ ID NO: 725 - DNA, 385 bp, Triticum aestivum
  Clone ID: uC-tsflw189014h08b1
gttcatgctacccgaggcaatcgcaataggtatggtacctaccgacacaagaaaaaaacacggtatatttcatctaacggatccgggtggtattggtgtgatccatgattgcccggagagaggattccatccacataaagcccctctggatggctcaccaatctacgagcattgctcccacgtgtacatgaatgctgatacaaagtttgatatgattgacctccgagaacagtgagaggtatcagtttcattctgtcatagtttggcggctgtacttgcggcagttgagcaaattgtctgccttgatttctctagtgcgctgaagaaatgcagatactgatttaagtgattgtacatagctattgtgtctatagagatatgattg

SEQ ID NO: 726 - DNA, 464 bp, Triticum aestivum
  Clone ID: uC-tsflw189014h09b1
gataataaagcagaggagaggaagcggaggcgacgatgtcggcgatgacggcggcggtgcccttctggcgcgcggcggggatgacctacatcggctactccaacgtctgcgcggcgctggtgcggagctgcctcaaggagcccttcaagaccgaggtctcctcccgcgagaaggtccacttctccctctccaagtgggccgacgagaagcagcagaagcccactgtgcgcacagatgatgaatgaagatcgggtgccatggtgattgatgttttgagaagttgttgagtcagggcttaagaacttgagaataaattcttgcggtgacaatggatctattccgatactatgttgttatatttactaattgctccttttctacttgatgaacctgaaccatgtgaaactcgtgtcttgtggggctcgagtgagcgtgtttttatgcgttatatcttccgatgcttt

SEQ ID NO: 727 - DNA, 297 bp, Triticum aestivum
  Clone ID: uC-tsflw189016a05b1
gtccgtcatcctcggcgccctcaccggcgagtggctcaccggggtcacctggcaggacgccggcaaggaggagctggtggacgggccgtcgtacctggggcagccgctggcgttcacgctcaccacgctgatctggatcgaggtgctggtgatcgggtacatcaagttccaccgcaacgcggagctggacccggagaggaggctctaccccgggggctcctacttcgacccgctggggctcgcggtggacccggagaagaaggagactctgcaggtggcggagatcaagcacgcccg

SEQ ID NO: 728 - DNA, 383 bp, Triticum aestivum
  Clone ID: uC-tsflw189016a07b1
tttcgctgtactctcactctcctgccgcggtgcgccgtacctgctctctagacaagatgtcgtcagtcagtgcccgcgctcccgtggccgctctccggccagcggcgtcagcgtcgagcccccggttcctgggcgactccggccgcgtcggcctcgccaagtccacacgccgcgacgtcgccgtccaggccaaggggtcgtggctccccggcctcccctcccctgcctacctcgacggcagcttggcgggtgacaatggtttcgacccgctggcgctggcggaggacccggaggacctgcggtggttcgtgcaggcggagctggtgaacgggcggtgggcgatgctgggggtggcggagatgctgatcccggaggtgctgacc

SEQ ID NO: 729 - DNA, 308 bp, Triticum aestivum
  Clone ID: uC-tsflw189016a08b1
tttcgcctactcgtacgcgcgaggcggcggagcggcggaccagaatgctggtccggagtttatcgatgctgggcacgatatgattctggcagcagatcattcggcttcagatctgatccgcggcatcgcgacggagtggggggttgactttgatgaggacccggaagcaatggttattgaccacatcaattatgcctccagcgaggttgaaggtgaccacaccttgattgctggcgatgaccttattcagtcagatgtgatattgggatccaaaaagactgaggcttctgttctgttccgagggattg

SEQ ID NO: 730 - DNA, 335 bp, Triticum aestivum
  Clone ID: uC-tsflw189016a09b1
tatcgattggtcaaccatgtcaaggcccgatccaggcacacttattattgaacccactgaaagtgaaagcaaggctgaactagacaggttctgtgatgcccttatctccatcagagaggaaattgcagaggtagaaaatggcaaagcagatgcacacaacaatgtcctgaagggcgctcctcacccaccccaactcctgatgggtgacgcatggactaagccatactctagggagtatgctgcgttccccgccgcgtggcttcgtggtgccaagttctggccaacaacatgtcgtgtggacaacgtgtacggggatcgcaacctgatctgcactc

SEQ ID NO: 731 - DNA, 303 bp, Triticum aestivum
  Clone ID: uC-tsflw189016a10b1
gtcgattgagcaccacaacctcgtattcagatttctagatagacaggatcagattaaccagaagatgatgcaggccaccgttgccttgtcggccgtgctgactgtcgccgtaaggggcaggccggcggcgaggaggaggagcgccaccgtggccgccggcggcagaaggatgccgggcggtgccgttcgtgcatcggccgccgcggcgccggaggcggattacagctccagcgtctcggtgttccccatggaggcctgcgacctggtcggcggcgaggcctgcgacgcgcagatgtacccgga

SEQ ID NO: 732 - DNA, 122 bp, Triticum aestivum
  Clone ID: uC-tsflw189016a11b1
cctacgcggccgaaaaaaaaaaaaaagggaaaaaaaaaaaaaaaaaaaccaaaaaaaaaaaaaaaaaaaaaaaaaaaaaaaaaaaagaaaacaaaaaaccaaaaaaaaaaaaacaaaggggg

SEQ ID NO: 733 - DNA, 350 bp, Triticum aestivum
  unsure (1)..(350): unsure at all n locations
  Clone ID: uC-tsflw189016b05b1
atttgaagtttggaactttgatcctaaaattgctaccttctggatcgactctgatagtcgattgaagggtgttttccttgagagtggaaccccagaggaattctcgcttcttccaaagctcgcgagatcacagcccattgtcgacaaagctaagctcaagagtgcgacttcagtcgaagatgcattagagatcgcgagaagctctctttagtctggctctttgtttaactagttgtcaacacatatggcctcttctgtttgggactgcagcttattttgaaaagtcaggactacgatgacaataatgcggccatagtatccgttctatgcggngtttgtaattttcctag

SEQ ID NO: 734 - DNA, 178 bp, Triticum aestivum
  Clone ID: uC-tsflw189016b06b1
cgtactcttttgtggacacgcgccaggacgccacaaagcgatcagacgcatactcgatcacccgcaggagcgtgcacaaaggcagcaccatgtatcgatcacaagggaggcccagctgggggcatgaatggcaaggacgcagagctgaccactgatgcagggtacccctacagaaacc

SEQ ID NO: 735 - DNA, 285 bp, Triticum aestivum
  Clone ID: uC-tsflw189016b07b1
cgtacgcttttgtaaaaactccgacgatccaccacaccctgcaatggcgtgcgctcaccaacgtgagcctgtctaccttcgcgcccacggccaggggcgacgtcctcgcgaggccgcaggtggccgccgcccgcgtcaccttcccgacggcgcaccgcggcagcggcgccctctcctgcagggcgggcgggccggccacgcctgcgggcatctccgacaagatgtcggacagcatcaaggaggcccaggagacgtgctcggaggacgccgccagcggggagtgcg

SEQ ID NO: 736 - DNA, 297 bp, Triticum aestivum
  Clone ID: uC-tsflw189016b09b1
ggtagtggtctatgttatgagccacatctcaactggtggtggcgccagcttggagttgttggaaggaaaggagcttcctggagtcgttgcacttgatgaaggtgtcatgacgaggtcggtgaccgtatgaggctaagcttcatttgttgcatcttaattcctttcatgtaccgttccaaacctgccatgttgtcctccctcttttgctcgtcttcgaccactcgaaatgtaagagaccaatgttttatagagaaatactgggaactgtttgaataacacccccagcaatttgtgctc

SEQ ID NO: 737 - DNA, 274 bp, Triticum aestivum
  Clone ID: uC-tsflw189016b10b1
gcgcgtgccctttacgccctgcatccagctgctctacggcctgcgcgccggcctcgacctcctcttcgaggagggcctcgacaacgtcatcaagaggcacacacgcctcggcaccgcaacaaggctggcggtggcggcgtggggactcaagaactgcaccgcgaaggaggagaacttcagcgacacggtcaccgccgtcgtggtgccgccgtacatcgacagctccgagatcgtcaagcacgcgtggaagcggtacaacctcagcctcgggctc

SEQ ID NO: 738 - DNA, 312 bp, Triticum aestivum
  Clone ID: uC-tsflw189016b11b1
gcgcctacgcgttcgtccacgcgagcgagagcaccgcggcgtctcgccccaagagagcaagccggccgccttatcgccctccgccgcgacgcttcatcccgtcaaggccagctccggaggccggcgccgacgaactcgtgccgcggcaagcgtgccggcggcgcctgcccgtctgtggaggccggcagtggataagtgcccgtggtggccgtggtggcagggttctttttgcaaaatacgaaacgttatctcaccaggacaaactttaaattggactgcgggttgaatattaagaaatagagggacttttct

SEQ ID NO: 739 - DNA, 63 bp, Triticum aestivum
  Clone ID: uC-tsflw189016b12b1
acacgccgacgccaaacacgccgaccaattaaaggctcgggaggagcgacgaaggcccgccgc

SEQ ID NO: 740 - DNA, 320 bp, Triticum aestivum
  Clone ID: uC-tsflw189016c04b1
gcgaatctattttcctacatagtacagccatggcccccaccgtgatggcctcgtcggccacctccgtcgctcctttccaggggctcaagtccaccgccggcctccccgtcagccgccgctccaacggcgctagcctcggcagcgtcagcaacggtggaaggatcaggtgcatgcaggtgtggcccatcgagggcatcaagaagttcgagaccctgtcttacctgccaccgctcagcacggaggccctcctcaagcaggtggactacctgatccgctccaagtgggtgccttgccttgagttcagcaaggtcgggttcatc

SEQ ID NO: 741 - DNA, 188 bp, Triticum aestivum
  Clone ID: uC-tsflw189016c05b1
ggtagatttagttgcactgccctccaaactgcgcgtgcaacgccagtgccaagtgtgttccttttgggtgtgagtgcacaatatgcatatacgctaataagcagagtacacccctccaacaaacagatggatctagctgatgatgtacaaggacatgttccctgaaataaatgtgattgagacatatg

SEQ ID NO: 742 - DNA, 232 bp, Triticum aestivum
  Clone ID: uC-tsflw189016c09b1
cgtagttctctgctttgacattaaaaaatttaaattacaagatgagccatatatattcaggaaatggagctgcagaataacaacttcttcttgagggaaaaagtagctgagactgaaagggggcaacagcagacgttgaacatgatgggggcggcttcgacatcgaatgagtacgagcaaaatatgatccattgtgatccgagaaccttcctgcagttcaacttcatgcagc

SEQ ID NO: 743 - DNA, 51 bp, Triticum aestivum
  Clone ID: uC-tsflw189016c11b1
cctgatatttctaaacgaccacacactcctattggagatgatgtggaatgc

SEQ ID NO: 744 - DNA, 343 bp, Triticum aestivum
  Clone ID: uC-tsflw189016c12b1
gcgcttattttttccctcacgccactactccctcctctcctcaatggcagatctgcctccgtccctcgccaccggcccctcctccccgcctccgaccccacccccgtacgggccgtcgaccgcgacgccggctgctagggggaaggactggaataaggttcccgcggagcagctcgtgatcgacttctgtgacccggagttgcgtgaggacgccctacgccagctctacaagaagcgagagatttttcaagaccttgctccactgctgtggcactcctttggcaccgttgctgcactgctccaggagattgtgtcaatctacccttcactttcacctcctact

SEQ ID NO: 745 - DNA, 319 bp, Triticum aestivum
  Clone ID: uC-tsflw189016d04b1
gcgcataatcttttctactccggccatctctccatcgaccaccgtagtaccacccctgcaccccactccaacgatggcgacagcggcagccggcggcgggaggggcaagccgaagggcagcaagtcggtgtcgcggtcggtgaaggcgggcctgcagttccccgtcggccgcgtcgcccggcacctgaaggtcggccgctacgcgaagcgcgtgggcgccggcgcccccgtctacctgtgcgccgtcctcgagtacctcgccagcgaggccctggagctggccggcaacgcggcgcgcgacaacaagaagacccggatc

SEQ ID NO: 746 - DNA, 327 bp, Triticum aestivum
  Clone ID: uC-tsflw189016d05b1
cgtacgcgtttgcggacgcgtggggtgatgaacgcaggcgagctcgggctgggcgcgctcggcgcgctcctgcaggccgccgtcccggcgctggagtccttcgcggggcccgacggcgcgctgggccccgacgagctcgccagggtgctggggctcatgggcaccgccagcgccgaggactgcgcggagatcatcgcgtgcatggacggggacggcgacggcgccgtcagcgtcgaggagttcaagctcatggctgacctgctctaggctcgagctacgtacgtagtattgagctagctagagggcgtgcatatatgcagttatgta

SEQ ID NO: 747 - DNA, 416 bp, Triticum aestivum
  Clone ID: uC-tsflw189016d06b1
gataagacttctaggaccggaaacaagaccgtgccgaattgcgaaccttgccgaccactgcaacgatcaccgatcgaagggttctatctggccggcgattacacaaagcagaaatacttggcttccatggagggtgcggttttgtcaggaaagttttgtgctcagtccatagtgcaggattctaagatgctgtcccgcaggagccaggagagcctgcaatccgaagcccccgtggcttcccagttgtagctagctagcgcgattcaattgtttagcattttctatgtgtcattgtcacattgttgtagagtccaccagtgaattgagctgacaaccatactggaacaaaaaggagatttgtaaaacaaagaagaactttgcagaagggcaaaagtgataaagggatcttagatatc

SEQ ID NO: 748 - DNA, 221 bp, Triticum aestivum
  Clone ID: uC-tsflw189016d08b1
gcgcttatctttttcacaaaaccaatcctgctctgccccccgatccccaagagcatcacctgcaagcaatggacgtttcgggcaccggagctggcgccaagggcaagaagggcgcggccgggcgcaaggccggcggccccaggaagaagtcggtgacgcggtccgtcaaggccgggctccagttccccgtcggccgcatcgggcgctacctcaagaagggc

SEQ ID NO: 749 - DNA, 370 bp, Triticum aestivum
  Clone ID: uC-tsflw189016d09b1
tttcgcttgtgcggacgcgagggcgcgcctgtggctgctcccgctcacccacccatggcgacggctatgatggctgcagccaccacctcctgctccccgccccgagcgctcctcaagcccgcggcctcctccagccccgcgccgccgcccaggccgcagccacggtccttcctcaagcagctcccggggctcgccgcgacggcggcggcggcggccgtcgcctacgtgcctctcccggcgctggccgtggagatggagaaggctgcgctgttcgacttcaacctgacgctcccggcgatcacgatcgagttcctgctgctgatggtggcgctggacaagctctacttctcgccgctgggcaagttcatgg

SEQ ID NO: 750 - DNA, 141 bp, Triticum aestivum
  Clone ID: uC-tsflw189016d10b1
cctcgtctttaaaaaaaaaaaaaaaaaaaaaaaaaaaaaaaaaaaaaaaaaaaaaaaaaaaaaaaaaaaaaaaaaaaaaaaaaaaaaaaaaaaaaaaaaaaaaaaaaaaaaaaaaaaaaaaaaaaaaaaaaaaaagggggg

SEQ ID NO: 751 - DNA, 175 bp, Triticum aestivum
  Clone ID: uC-tsflw189016e04b1
ggtctgcgttattacttcgtgaaaaaaaaaaaaaaaaaaaaaaaaaaaaaaaaaaaaaaaaaaaaaaaaaaaaaaaaaaaaaaaaaaaaaaaaaaaaaaaaaaaaaaaaaaaaaaaaaaaaaaaaaaaaaaaaaaaaaaaaaaaaaaaaaaaaaaaaaaaaaagggggggggccc

SEQ ID NO: 752 - DNA, 358 bp, Triticum aestivum
  Clone ID: uC-tsflw189016e05b1
tgtggtttttaggtgctctgaatgttgatgtgaacgaattccagaccaacctggtgccctacccaaggatccacttcatgctttcctcctacgccccagtcatctcagctgagaaggcttaccatgagcagctctctgtcgctgagatcaccaacagcgccttcgagccatcctccatgatggccaagtgtgacccccgccacggcaagtacatggcctgctgtctcatgtaccgtggtgatgttgtgcccaaggatgtcaacgccgctgtggccaccatcaagacgaagcgcaccatccagtttgtggactggtgccccactggtttcaagtgtggtatcaactaccagccacccag

SEQ ID NO: 753 - DNA, 280 bp, Triticum aestivum
  Clone ID: uC-tsflw189016e07b1
gcgcctacgctttctcccacgcgtgcgactgaccacgcgccaccacgagcaacacccatggcgcgcaccggcgccgccgctgccctcttcgtgctcgtctgctgcctcctcgtcggctctgtcccggcgcgcctccccgtcgagcttccgacgcaggtggtacccgaagccgttgacctcctggccaccgccgagccgcttctggccaagcagttggcggctgccgaggcggccaacccgaccaaagtccactccatgataacagaggaagaggagatgg

SEQ ID NO: 754 - DNA, 422 bp, Triticum aestivum
  Clone ID: uC-tsflw189016e08b1
ggcgagtcaccttctcaaccgaagcagactccggagagcaggcaaggcggagaccgagatggcgcgcggcgtgccggcggctaccaagggcggcgcgggcgccgggaagaagaaggggtcggtcaccttcgtgatcgactgcaccaagcccgtcgacgacaagatcatggagatcgcgtcgctcgagaagttcctgcaggagcgcatcaaggtcgccggcggcaaggccggcaacctcggggactccgtcaccgtcgcccgcgacaagagcaaggtcaccgtcacctccgatggggccttctccaagaggtacttgaagtacttgacaaagaagtacctgaagaagcacaatgtgcgtgactggctccgggtgatttcatccaacaaggagcgcagtgtctatgagctccggtacttcaaca

SEQ ID NO: 755 - DNA, 138 bp, Triticum aestivum
  Clone ID: uC-tsflw189016e09b1
cttagtttgatcatatcagtagaggaagtagcagcagtagcatcggattctaataaccgagtgagtctgtatcgtggtgtcgaagatggtagtaattagtttgattaacctgtctaatggatgtaccatttgcgaaaa

SEQ ID NO: 756 - DNA, 280 bp, Triticum aestivum
  unsure (1)..(280): unsure at all n locations
  Clone ID: uC-tsflw189016e10b1
cctcnatattatctggtggaggcgctagcttggagctgatgtaaggaaaggagctgcctggagtcgttgcacttgatgaaggtgtcatgacgaggtcggtgaccgtatgaggctaagcttcattttgtcgcgtctcaattcctttcatgtaccgttctaaacctgccatgttgtcctccctcctttgctcgtcttcaaccactcgaaatgtaagagaccaatgttttatagagaaatactgggagctgtttgaataacaccccccagcaatttgtgctca

SEQ ID NO: 757 - DNA, 382 bp, Triticum aestivum
  Clone ID: uC-tsflw189016e11b1
ggtcatttttttggggttcacatgccaggacaataccagaatggatgttacaatcagctggcgtatactgcaggccaaggatcacaccagaactggcgtggggcgcaatacacacccggccatcaggcgaggtattataggaatggggtgactacaaggtacgagcctgttgctggaggactccagaatggaccggcacgggcacgggactcgcggtcgcaaggctcctcaagccgtacggaatggcgaggaagcagccaacatcagacctgaccagaactgttagtcgcagcaaagatagcaatttgctgtttccattggctgacaaaatgtatcgatttcgatttcatgatgtatgtcatccttcatactttagcttgtc

SEQ ID NO: 758 - DNA, 366 bp, Triticum aestivum
  Clone ID: uC-tsflw189016e12b1
agcgggtaacttttcttcggacaagattagtcagctgactgatattgtctacgtctgccgctctggatctgcagctgacacgcaagttatttcggattacgtgcgttattttctccaccagcacacaatccagcttgggcaaccagctaccgtgaaagttgcatccaacttagttaggttattggcctatcagaacaagagcatgttgcaagctggaatgatagttggtggatgggataaatacgagggaggccagatttactcggtccctcttggtggaacgattctgaggcaaccattcgcaattggaggatccggttccagttacctgtatggattgatggatcatgaatggaaagagggtat

SEQ ID NO: 759 - DNA, 142 bp, Triticum aestivum
  Clone ID: uC-tsflw189016f04b1
cgtttgcgccaccgacgagcgcttcgacgacgactacatcgaggccatgatcgccgccgccgacgccgacctggacggcttcgtgcagtaccacgagttcgagggcctccttggccgcgcagctaaggcggtggcggacagc

SEQ ID NO: 760 - DNA, 137 bp, Triticum aestivum
  Clone ID: uC-tsflw189016f05b1
cttgaccaaagcccatcttcttctccttgaaatctttttgggttcacagatttggaggatgtcttgcaactgtggatccggttgcagctgcggctcagactgcaagtgcgggaagatgtaccctgatctgacagagc

SEQ ID NO: 761 - DNA, 246 bp, Triticum aestivum
  Clone ID: uC-tsflw189016f08b1
ggtgctggcccggctcgttgctcttggacgccgttttctttctggcggcggcggccgtgtcggaggccaacatcggcgagttcgacgagtactggcagcggcgccagctggaggccagagcccgcgcggaggccacctaccatcccaaccccatcgaggtcgccaacagcttgaaccgcgccgtccacaggaccgttcgggaggagagcggctcgaggaggaagttgctgggactgcacaagaagt

SEQ ID NO: 762 - DNA, 95 bp, Triticum aestivum
  Clone ID: uC-tsflw189016f10b1
gctgaaaaaaaaaaaaaaaaaaaaaaagaaaaaaaaaaaaaaaaaaaaacaaaaaaaaaaaaaaaaaaaaaaaaaaaaaaaaaaaaaacggggcg

SEQ ID NO: 763 - DNA, 232 bp, Triticum aestivum
  Clone ID: uC-tsflw189016f12b1
ttcgcgctactcgtccgatcagagcagattaaggcagagacacagagcagagcggataaactcgagggagattcgatcatcaccacaccaaccatgtcgtgctgcggaggcaactgcgggtgcggatccggctgcaagtgcggcaacggctgcggagggtgcaagatgtaccctgagatggacgagggggtgaacaccacctgcgagaccctcatcatgggcgtcgccccct

SEQ ID NO: 764 - DNA, 262 bp, Triticum aestivum
  Clone ID: uC-tsflw189016g04b1
tcggttgtagcccgcgcgcccaagacagcgccggggtggccgttcccgcccccttcgccgcgccgcgtgcggccggccaggtgcgcggggttcgtgggcccggcggtggagtcggcgtccccgggcgcgagggcggcgacgctcgcgagcagccgcggcgggaccgactcgtcactggccatctgccgggtgctcaacggcatgtggcagaccagcggcgggtggggcctgatcgaccgcgccgacgccgtcgacgccatgc

SEQ ID NO: 765 - DNA, 321 bp, Triticum aestivum
  Clone ID: uC-tsflw189016g07b1
gtcgattgcacgcgcgcgctcgccttccccactacaggcacagccagcgagcgcactggtggtacaacgatggcgctggtctcctcctcctccgccaccgccgtcgcggcgctccccagcaatgggctggccggcgcccggagctccttccttggcgctgccggcaaggcggcggggtcgcgcgcgtcgttcgccgtgcgcgccgcggcgcccgagaggcccatctggttccccgggagcacccctccgccgtggctcgacggcagccttcccggagacttcggctttgacccctggggtcttggatccgacccggagagc

SEQ ID NO: 766 - DNA, 289 bp, Triticum aestivum
  Clone ID: uC-tsflw189016g08b1
ttttcggcttgagcaaggtatccagatgcttaagatattcaaagagcatgtcagcaagacctctattctggaagactttgccttctatgagaaccgccagaagttgatgcaggagaagagaataaaacaacagcagatccaaaagcaggtgtgggacagcagggctccgaaccctgttgctggagagaaacaacaggaagtcgccaacgggaagccaaaggtatctgtaccgaacggtgtcaatggagagaaacagcaggatgccgtcaatgggaagccaaagtcgcct

SEQ ID NO: 767 - DNA, 300 bp, Triticum aestivum
  Clone ID: uC-tsflw189016g09b1
gatcctcggggcgatgcaggggataatccgcctaatggacttacaaggtgcacattatgaggtcaaagcttatgaagattacaaatttctaaactcctcctatgttcctgtgctccgacaactggagtcagcaaacctccaaaaattctatttcgagaataagcttgagaatgccaccaaagatgctagcaatatgaagttcaggaatcccaagtatctttctatgcttaatcacttgcgattctacttgcctgagatgtacccgaagctgcagaaagattcttttcttggatgatgatg

SEQ ID NO: 768 - DNA, 228 bp, Triticum aestivum
  Clone ID: uC-tsflw189016g10b1
ggtaattagggcgtccctatgtgactacatggtcaacgcatctgctgacgatgaagagatgaaactctatgtggaacagtgtggtgatgcttgtgtcaatttctgtaacgctgatgctggcctcacatcccttgatgcgtaatgatgcgtatccatggtctgagatttcacagggcaaggtcgtgtctcacctttgcgttcaataaaattggatcccatcgagagtat

SEQ ID NO: 769 - DNA, 295 bp, Triticum aestivum
  Clone ID: uC-tsflw189016g12b1
acgagtaatctttggggacgactctgtattacaatttggtggaggaactttaggacatccttggggaaatgcacctggtgcagcagctaatcgagtggctttagaagcctgtgtacaagctcgtaacgaagggcgcgatcttgctcgcgaaggtaatgaaattatccgagcagcttgcaaatggagtcctgaactagccgcagcttgtgaagtatggaaggcgatcaaattcgagttcgagccggtagatactattgataagtagataaaactaaagataaagaagagaaggtat

SEQ ID NO: 770 - DNA, 393 bp, Triticum aestivum
  Clone ID: uC-tsflw189016h04b1
tcgcgtacgcgtgggcggatctctccccttccagcagtgccagcacaagatcgacaccgtcgactgccagccctcggggccccagggcggcgtcctcgtcttcgtctccggcaccatcaccaccggccccggcgagcaccccctcaagttctcacagatgttccatttgctgccagctggagggagcttctacgtgcagaatgacatgttccgcctgaactatggttaaggaagggcgaccgctctggcagcaaagaacttgttcagggatttatgttgaaacaatgaacatcaaatgatgatgctgcagactctttgtttgttcgccaacttgtgcaatttatcgcaaaaaattgccagacttgataggcatccaccagatcatcttttgtt

SEQ ID NO: 771 - DNA, 422 bp, Triticum aestivum
  Clone ID: uC-tsflw189016h07b1
gttgtaacacctggatagtaaatctgaagatctcgctcacagtatttagatgatcaagatctctttattgataatttcagctgccacaatttggacattgtgatgatgctgaaagatggttcttccctgtcaagtgcgtatgggtgcaatacctgtcactgatctctgaaagcaacggtgatgtagagcgggtttgtctacatatgtgttgaaatgtgcatcctttctcagattcatatattaacaaagaatgtctgtcaataccatctggtaaagattgctactccctctgatccatattacttgtgatgacttctcattatggctctgaaaagaaggattagtatgcgccatctggggcttgctctgcagcttttcatcctggacagaaattgtggatggatgattagtatgcaccatct

SEQ ID NO: 772 - DNA, 380 bp, Triticum aestivum
  Clone ID: uC-tsflw189016h08b1
tttccgaatacttgacagacaggagccgacatgatcaagggcaagaccccggaggagatccgcaagaccttcaacatcaagaacgactttacgcccgaggaggaggaggagatccgcagggagaaccagtgggcctttgagtagaggagcatctaggcgatgccaccgccgcgctgaaagaactacgcgtagtattcgtcatgtctgtatttcagcgctcttctttatgtctgtcgtaatgggttgtaattatcctcgagtctatgaggtggtgtcggtgaacatcttcggtcagtggttatgtttgcgagaacaagaaaaacctatcgtggtctgtggccatcgcttgtcaaactgaatcttaatcgtcaagtggatgc

SEQ ID NO: 773 - DNA, 276 bp, Triticum aestivum
  Clone ID: uC-tsflw189016h09b1
ttttcgattacacacactccacgctcgcccaggaaaaccagcggcaagaagcaagttcagttgaggttggaggtcgagtgggatcggatggcgtcggcgccggtggagttcctgggcgcgcgggagggcggggtcggcggggacgcgctctactgcgccatcatcctgtggctgtccgtcatgtcgtggatcatcttcacctgcgtcggcggcgacgacggcggcaggcgccggaggggccgccgggacaccaaggtcttcgtcggcgccgagcgc

SEQ ID NO: 774 - DNA, 309 bp, Triticum aestivum
  Clone ID: uC-tsflw189016h10b1
tcggttgaggagagcgggcctgcgtacgtggaccgctaccctgacctggggccgtgcggcgcgcccacccgtacgtggccggggatcggatggacgatcatctggcggtgctggcgcgcggcgaggggtggacggaggagcggcacgcggcgttcctcgacggcgtggagcgctccttcgtgcaggaggtgctcgtgggcgccgccggcgtcagcgaggagcggcgagcgtcgcgcaggctctgccaccgggggccgccgcccgccggcgggcgtggccagctcccgctggatcgccccctccctgaca

SEQ ID NO: 775 - DNA, 67 bp, Triticum aestivum
  Clone ID: uC-tsflw189016h11b1
gcgactacgcgtgcgcccacgcgtgcgaccacgcgtgcggccacgcgtgcgcccacgcgtccggcga

SEQ ID NO: 776 - DNA, 265 bp, Triticum aestivum
  Clone ID: uC-tsflw189042a01b1
ctgacgtgtgggctcggaagctcgcattgcagcgctggcttgaagttatcgacccgtgacaccggtacgggcacaaccttcactactactacgactgctggctgaggtgcgaaagcagggagcctttcttctactggctcgacatcggagagggcaaggagatcaacctcgaggaccgatgcccgcggtcgaagcttctcagccagtgcatcaagtatcttggtccgaaagagagagaggaatatgaggttgtgatcgaggatgg

SEQ ID NO: 777 - DNA, 259 bp, Triticum aestivum
  Clone ID: uC-tsflw189042a02b1
ctcacgctgccggggttggtgcaagcagaagctgggtgcttatgtatatcctggctgtgtcactagctgcttgcaaagctggagccagcgtcaagaagattccgctgtaccagcacattgccaaccttgctggcaacaagcaattggttttgcctgttcctgcattcaatgtcatcaatggtggatcccatgctggaaacaagcttgctatgcaggagttcatgatccttcctactggagctgcctcattcaaggaggc

SEQ ID NO: 778 - DNA, 183 bp, Triticum aestivum
  Clone ID: uC-tsflw189042a04b1
ctcacttgtccgcccacgcgtccgccaagctccgactcctacgcccgtctcccccgagatcaggaggagcacgccgcaccggagcgccgagacctcgaagccttcgtctccacctcggagcagagatggggctcacgttcaccaagctgttcagccgcctctttgccaagaaggagatgagga

SEQ ID NO: 779 - DNA, 260 bp, Triticum aestivum
  Clone ID: uC-tsflw189042a09b1
tcgttacgcgtccgatcaatccatctttccatccggattcatttcctttgagcagctcctctcctctccattgtttctctgctcgaagatgaagctctccatgcagtcgctggcccggaagctctccatcccgtcgcccaagcggggcaagaagcagcagcagcagcaggacggcggcaagcgcggcatctcccggagcgaggcgccgtcgttcgcgtctgcgtcctcctcctccaccacctcgttcttctccgaggacg

SEQ ID NO: 780 - DNA, 240 bp, Triticum aestivum
  Clone ID: uC-tsflw189042b01b1
cttacttgtgggcgcctacgctcttcgcttcctgcgccgccgccttcccccggtcttctcgcttcagatcagttaacgtaaatggctgacgcagaggacattcagccccttgtctgcgacaatggaactggaatggtcaaggctggtttcgccggagacgatgctccacgtgcagttttccctagtattgttggccgtccacgccacactggtgttatggtagggatggggcagaaggat

SEQ ID NO: 781 - DNA, 128 bp, Triticum aestivum
  Clone ID: uC-tsflw189042b02b1
gttggttcgaagcctcgcccaagtccaagcgccgcccacgtttgcctcctcgccatggcctcccctgcttcgtctgcttcgcggacagagctccgtcttcgtcaacgtgttctcccgccgtctctgtt

SEQ ID NO: 782 - DNA, 186 bp, Triticum aestivum
  Clone ID: uC-tsflw189042b04b1
ctcacgtgtccgttctactcctccacacaagtgaagtgagagctttgcgctgaaagttcatcagcaactatgaagggcaccaagctcgcggcgatcctgatcctccaggccgtcctggtcatgggagtcctctcgcacgtcaacgccgacttcttccccaagtgctgcaacaactgcaggttcttc

SEQ ID NO: 783 - DNA, 247 bp, Triticum aestivum
  Clone ID: uC-tsflw189042b05b1
tagagtgtggcggctacaacaacggctacggcggcggtggctcgtacagcaacggcaacggcggtatcacgccctacaacggcggcggcggtggctacaacagcaactctttctacggaaacggcggcggtgggtacaacaactcttcttacggcaacggcaacggcggtgacgggtacaacaacgctcccagttgggcatctcaggacaccggcggccggacgccgattgtcataaacaccaggga

SEQ ID NO: 784 - DNA, 266 bp, Triticum aestivum
  Clone ID: uC-tsflw189042b06b1
ttagatcgtggcggctacaacaacggctacggcggcggtggctcgtacagcaacggcaacggcggtatcacgccctacaacggcggcggcggtggctacaacagcaactcttcctacggaaacggcggcggtgggtacaacaactcttcttacggcaacggcaacggcggcgacgggtacaacaacgctcccagctgggcatcccaggacaccggcggccggacgccgatgtacataaacaccagggaggtccacgtttatggggc

SEQ ID NO: 785 - DNA, 113 bp, Triticum aestivum
  Clone ID: uC-tsflw189042b08b1
tcgctgcgatctccgtcgtgccatagcctgtgttgtgccggattcggccaccggggccactagatccatggcaagtggatcccgtgcgtgctagattcggctgtgttgcgccc

SEQ ID NO: 786 - DNA, 109 bp, Triticum aestivum
  Clone ID: uC-tsflw189042b09b1
tcggtcctgtacccggagctggagtgggactgccggctgtcgttggtgaagagcatcaacgtgagcgggcacaagtacggtctcgtgtacgccgggatcgggtggtgca

SEQ ID NO: 787 - DNA, 315 bp, Triticum aestivum
  Clone ID: uC-tsflw189042b10b1
tttcgtctttcctcccctctcccgccaggaggttcctgatgcaagaataggttcctgttttcaagaagctccatcccctcccatatcagggcaatcagggtatacaccatttgccagtcggagctcacggactgctgcacgcgcaatggatttggaattcccttctttatcaagcagtaataacagaactgctgcgtcaacagagcagggggtacgaaaggtagctgagaacactcatgcatttgggcttcgacaacaaagcaacggaattgtgaatacacaccattctgctcagcattggtcccttaaaaatac

SEQ ID NO: 788 - DNA, 129 bp, Triticum aestivum
  Clone ID: uC-tsflw189042b12b1
tcgttctcgccacaacctctctctctcctgtgctccactctacagaacagaacaaacagtaggaggagcgctctccttcggccgcgcgcgtctgcgtccgttccgcaatggaggcgtgactcgcgagcg

SEQ ID NO: 789 - DNA, 231 bp, Triticum aestivum
  Clone ID: uC-tsflw189042c01b1
ctcacgtgtccgcggacgcgtggctaggttttccaactgccctgctaccgccgccgccacctcccctccccccaccacaccctcagccatggcggtcgcggagccggtgcccgggggcgacgtgaagctcttcaaccgctggaccttcgaggatgttcaggtgaccgacatctcgctgaacgactacctcgcggtgacgtctatgaagtactacacttttctgccgcactt

SEQ ID NO: 790 - DNA, 185 bp, Triticum aestivum
  Clone ID: uC-tsflw189042c02b1
ttagatagaagagccagtggcagccctctgctcgcgcctccagaaggctattgaaatgctccggtcgcaagcaacaccttcagaggcagcctctgcacttcaaacactcttcaaaattatcaagaatgtgatagagaatccaaacgatattcggtatagaagactgcgtaagaccaatcctcatt

SEQ ID NO: 791 - DNA, 305 bp, Triticum aestivum
  Clone ID: uC-tsflw189042c03b1
ttttgatattcttgtcatatgtatatgactcatattgttgaaatctcacctctaaatcgagtttagtgctctttttttggaaatacaggtacttctgaattcctgcaatttctgtactaattttgtattttgtgaggagccacagatgtttacaaatactagaatgatgcatgataggtcgcacacaaactcttgaccaggtgcctctcacatattctcatgtttgtactatattcttcttaaactgttaacacaatgagcatgtacttggttcatccaagaacacaatgagcatgttcttggtt

SEQ ID NO: 792 - DNA, 165 bp, Triticum aestivum
  Clone ID: uC-tsflw189042c04b1
gtcgactaaagtaagcaacgccgccgacccctcgaggggtgaaacaaggcaaagggagagtaatgtggcgtcgctgcatttgctgtcaagccactgagtttgatgagaatgaaaatgggcgtgccaaggccaaggccccaacaaataacgttgatggaatgaaaa

SEQ ID NO: 793 - DNA, 213 bp, Triticum aestivum
  Clone ID: uC-tsflw189042c05b1
ttcacgtgttcgaaatttcaactggagatgctttggtctcacgtgctcctgatattgcaaaatttcaactggaaatagatagttcatctggcaactttggtgcaacatcttctctccatagatgtgcatctgatgacttccatttctcgttttggttaggagctcccacgatgggatggttacaaacttaaagtccaagtgactataaaagaa

SEQ ID NO: 794 - DNA, 217 bp, Triticum aestivum
  Clone ID: uC-tsflw189042c06b1
tcacgtttacgaaatttcaactggagatgctttggtctcacgtgctcctgatattgcaaaatttcaactggaaatagatagttcatctggcaactttggtgcaacatcttctctccatagatgtgcatctgatgacttccatttctcgttttggttaggagttcccacgatgggatggttacaaacttaaagtccaagtgactttaaaagaaacaac

SEQ ID NO: 795 - DNA, 179 bp, Triticum aestivum
  Clone ID: uC-tsflw189042c07b1
tcgtttacgcttcccacccttctcttctccatcacgactcacgagcgccggcggcggctggtagagaggcgagccgagaggtgcggctacgagcggaagaggcgaggagatcgagcgagcgatggggcggaggatcctcaacgacgcgctgcgcacgatggtgaacgcggagcggtggg

SEQ ID NO: 796 - DNA, 215 bp, Triticum aestivum
  Clone ID: uC-tsflw189042c08b1
ctccagggttcgtttcccctcggagccgaaaccctagccgtcgccgccgacgaccgcgagcaggctcagatgggaggcaagtgcccgcaccgcaaggtcaaaaagcgccgtctcaactgcaagcaggtgcgccgcggcaagttcctcgtcaaagccgacgacgccgtctacgacgagctcgttaagctggccgaccagggtatggattccgaggg

SEQ ID NO: 797 - DNA, 166 bp, Triticum aestivum
  Clone ID: uC-tsflw189042c09b1
ctcacgcgtccgcacactttggagcttgatagtgagtgtgctccagcgagtgacgccgccacagcaaactctctcggcatacaaaactagtaccagtagtaaacaacagagcagagaaagaatataagttctttgaagggccggagaggtaactgtaggggaaatg

SEQ ID NO: 798 - DNA, 92 bp, Triticum aestivum
  Clone ID: uC-tsflw189042c10b1
tttcgtcgaaggccgaagaggagaaaggttccatgtgaacggtttttgcacatgggtaagccgatcctaagggacggggtaaccccggcaga

SEQ ID NO: 799 - DNA, 129 bp, Triticum aestivum
  Clone ID: uC-tsflw189042c11b1
tttcgtcgtcaactttcactgattgtgtgaactgtcttattgcgttcaccaacagtaggtttaacaaggatataggccttaatgcaattggttttcttcgattctgtgcggcaaagctggcagaaggtg

SEQ ID NO: 800 - DNA, 120 bp, Triticum aestivum
  Clone ID: uC-tsflw189042c12b1
ttaaagtctgtaaaactacctaaatgggcaggtttatgacagtagaggacacaaaaaaacatactatgacactggcattgagaccaactgttagagacatatgtacatgtgcccattcaa

SEQ ID NO: 801 - DNA, 133 bp, Triticum aestivum
  Clone ID: uC-tsflw189042d01b1
ttgacttgtgggtgggcgccaacatctccggcgggcacgtgaacccggccgtgaccttcggcgccttcgtgggcggcaacatcaccattttccgcggcctgctctactggatcggccagctcctgggctccac

SEQ ID NO: 802 - DNA, 299 bp, Triticum aestivum
  Clone ID: uC-tsflw189042d02b1
taatctcaacaggtttttgtttccacgtcatcgaacacaccatccatccgtcccaatcgtgcacatttccttgcccttttgtccgtccctgagctctcttggattttagcctttgagccttccatggccgcacttcactagccgcccctcgggtattaagatttgtaaaaatcggcgagatctgggtacccgtccgtcttattcatcctgctatagcgtaagtatacttggcttgcacttgtgcttcctgcccggtctgcattacgtttcgtctgttggcagtccttttgttcgtgtct

SEQ ID NO: 803 - DNA, 184 bp, Triticum aestivum
  Clone ID: uC-tsflw189042d03b1
tttacctttctgaattagctgttaacagtatgggaatgaacatggggccaccagttgtgagaagagacgaatttcagctcaggaaaccagatgggaggagacatgaaatggatcgattaaacggaagggaccgggaccgggatcgggatcgggagcgtgaacattcccgcgagagggaaaggga

SEQ ID NO: 804 - DNA, 127 bp, Triticum aestivum
  Clone ID: uC-tsflw189042d04b1
ttcactgtccggtgaactatttgcagtttcgaactcctgacattggaggctgcttagcttgagttcttcggtgttaaagatgttcctagacatagttaccgctgtctggttgtctgttgttgtgtgt

SEQ ID NO: 805 - DNA, 175 bp, Triticum aestivum
  Clone ID: uC-tsflw189042d05b1
ttttattagatataacatgggttaagcatgatggctcctcatggtggccagcccaggtcattgatgaagcatgtgccagtagcaaggccaagaagaagaccagccatgatgctctggttcgactgtatggcacatgcctagacttgtatgttgacccatggaagtctaacatgga

SEQ ID NO: 806 - DNA, 161 bp, Triticum aestivum
  Clone ID: uC-tsflw189042d06b1
gtttattagatataacatgggttaagcatgatggctcctcatggtggccagcccaggtcattgatgaagcatgtgccagtagcaaggccaagaagaagaccagccatgatgctctggttcgactgtatggcacatgcctagacttgtatgttgacccatgg

SEQ ID NO: 807 - DNA, 151 bp, Triticum aestivum
  Clone ID: uC-tsflw189042d07b1
tcggtatcatcatccctgataccaaagctcatcttcttctccttgaaatctttttgggtccacagatttggaggatgtcttgcaactgcggatcaggctgcagctgcggctcagactgcaagtgcgggaagatgtaccctgatctgacgga

SEQ ID NO: 808 - DNA, 251 bp, Triticum aestivum
  Clone ID: uC-tsflw189042d08b1
tcgcttttgccccctgaccaagccggcgtcgccgccatcttcggtcaccccgcctgtccgccctgtccctccccggcctaggcgacgccgacccataccggaacaggaggaccgacaccgccgtaaagcctccgagccagctgcctccccgtcggccacgctgcaaccagagcaagatcccgcccctggtcgcatctcagaatggcgaccctgaggaacctgaagatcaagacgttgacgtgcaagaggat

SEQ ID NO: 809 - DNA, 153 bp, Triticum aestivum
  Clone ID: uC-tsflw189042d09b1
ctgaaaccccacgcagacacagctccgctccgggctcacgcacctcaccccggccacctcctcccacccaccgccgccggcggagccatggaggtcggcggcgaggagttcgcggtcggcgtggtgatctcggcgaagaccacccttggggag

SEQ ID NO: 810 - DNA, 88 bp, Triticum aestivum
  Clone ID: uC-tsflw189042d12b1
tatgaggtgatttgggcatggaaattcctgtagagaagatcttttatgcacagaaggtgatgattttcaagtgcaacatttagggcat

SEQ ID NO: 811 - DNA, 160 bp, Triticum aestivum
  Clone ID: uC-tsflw189042e01b1
ttttcttgatcccggtcgtatttatacaggcccattcaaaatccacgccgcaaaatattatccacaaatccatccggggttaggctgctgctctgcttcactgctctcccgtggtgacttccggtctcggctctcgcgtggtaggtatgggggcgggaga

SEQ ID NO: 812 - DNA, 245 bp, Triticum aestivum
  Clone ID: uC-tsflw189042e04b1
ctgatcgtgtggcaaacccaatcagaaatctcaagcttagcacagcatcaatggcgtcggagcagaccttcatcatgatcaagcctgatggcgtccagaggggcctcatcggtgaggtcatcagccgcttcgagaagaagggcttctacctcaaaggtctgaagctccagaacgtggagaagtcgttcgccgagcagcactacgccgatctgtcctccaagcccttcttcgctgggctcgtggag

SEQ ID NO: 813 - DNA, 335 bp, Triticum aestivum
  Clone ID: uC-tsflw189042e05b1
tttacgtgtccgcccacccgtccggggccccttggtacggcggcaagagcgggtgcatcaaggacctcaacacgctgtcgtgggtgcacaacgtggcgctgcagcgcaagatcgtggagcttcggaagaagcacgccgacgtgcgcatcatgtacgccgactactacacgcccaccatccagttcgtcctccacgccgagaaatgggggatgctaaggcagaagccgagggcgtgctgcggggcggcgggcgtgggggtgtacaacttcaacctgacgtccaagtgcggagagcccggtgcgtacgcgtgcgacgaccccttcaaccactggagc

SEQ ID NO: 814 - DNA, 339 bp, Triticum aestivum
  Clone ID: uC-tsflw189042e06b1
tttcgtgtccgcccacccgtccggggccccttggtacggcggcaagagcgggtgcatcaaggacctcaacacgctgtcgtgggtgcacaacgtggcgctgcagcgcaagatcgtggagctccggaagaagcacgccgacgtgcgcatcatgtacgccgactactacacgcccaccatccagttcgtcctccacgccgagaaatgggggatgctaaggcagaagccgagggcgtgctgcggggcggcgggcgtgggggtgtacaacttcaacctgacgtccaagtgcggagagcccggcgcgtacgcgtgcgacgacccctccaaccactggagctggga

SEQ ID NO: 815 - DNA, 103 bp, Triticum aestivum
  Clone ID: uC-tsflw189042e07b1
tgtcacgcgtccgcagacatagacggcacgaagcactgcaagtctagagtgctcgaataaccggatgcccgcttgcccagcgaggcggccagatgtgtggatg

SEQ ID NO: 816 - DNA, 362 bp, Triticum aestivum
  Clone ID: uC-tsflw189042e09b1
tggaaaagaaaaactaaaatcttagtctcccccagcacgcgtctttcaaaatttagactgactgggtctttcaaaatctagatacagctagcaagcgtatgcgcggtcagtccagacgaccaccagatctggatctcttcattcccctttgggctttggtcaacgcttttgcttggtgagcatcgtcgaccggctgcaggttgctcatggtctagctacctagaagacgagcagcagcagcaggccttggcgagtctccgtgtccccttccctcctttccccagcaagtcaagggaggaagaagggaaggaaggaagttaggagaagctgctagcggccgaagccttatcgctttgctgaca

SEQ ID NO: 817 - DNA, 132 bp, Triticum aestivum
  Clone ID: uC-tsflw189042e10b1
ctcacgcgtccgcccacgcgtccgcaagtctcaaagacagtgtagctagtaagtgagactgtaagtgttaagacatgaagaactctcactgcagcagtttgctcctggtgtgctcagttcttgtgctctgcc

SEQ ID NO: 818 - DNA, 183 bp, Triticum aestivum
  Clone ID: uC-tsflw189042e11b1
gtagtctctattttctaaggaaggttgcttgataaacatatccagcgactcaaaaaatcttgaaaaatctggtcaacatattgccaaatttcttgatgcactgccaagtgccccatccctgggaagtgacccatggctctctcgactgccttctgtttatgaagccattgttatccctacaca

SEQ ID NO: 819 - DNA, 199 bp, Triticum aestivum
  Clone ID: uC-tsflw189042e12b1
tttcgatatgcctctgacgtttgcctccccctcgtcggccacgaccttcggttcgatctgctccttgtgctcgtcctgaggattgtctggttgtgagggctaggtgctacatctctgccttttgcgtttgcgcgagtttggtgtctgtgtctgtgttcgatcaccaggttcgatccagagcgatttggcctgttggagg

SEQ ID NO: 820 - DNA, 309 bp, Triticum aestivum
  Clone ID: uC-tsflw189042f01b1
tttactcgtgggcacgcctccgtctccgccagcgagctcctctccgcttcctcctccggtccccgccgccgccccgctccccaagaccaatggctgacggcgaggacatccagccacttgtgtgtgacaatggcactggaatggtcaaggctggttttgctggtgatgatgccccaagagcagttttccctagtatagttggccgccctcggcacacaggtgtcatggttggaatgggccaaaaagaagcctatgtgggtgatgaagcgcagtcaaaaaggggtttcctgaccttgaaataccctattg

SEQ ID NO: 821 - DNA, 215 bp, Triticum aestivum
  Clone ID: uC-tsflw189042f02b1
ttctctacccatctcagccaaaaaaaagctagcacagatccacacaccatggcagccatggccaccaccgcttccagcctcctcaagacctccttctccggcgttcgcctcccggcggcggcccgcaccccgtcctgcgtcgccaccccgcgcgccggcgccatctgcaactccatcttctcctccaccccttcctacgacctcaacgccttcaa

SEQ ID NO: 822 - DNA, 172 bp, Triticum aestivum
  Clone ID: uC-tsflw189042f03b1
tacgttgtgccaaaaatggtctcctctcctccccattctcctactcgccggcatggttggcatctcccaagccggcaacatcgccgtctactggggccagaacggtaacgagggcacgctcgtcgacgcctgcaacttcggcctctacgcatacgtcatggtctccttcctc

SEQ ID NO: 823 - DNA, 118 bp, Triticum aestivum
  Clone ID: uC-tsflw189042f04b1
tttgatcaatcccggagatggagatctgtgactttgatttcgtgccatgtggctactccatgaacgccatccatggctctgctttctccaccattcatgttactcctgaggacggctt

SEQ ID NO: 824 - DNA, 171 bp, Triticum aestivum
  Clone ID: uC-tsflw189042f05b1
ttaagcttactcaactacctactagttttagtttctcgtttatttacctttagttacccggcgccatcggcatccttcatacagtactgccaggcagatttccaagccaagaaacggaccaacagcttgctaatcggtgccgttactggtcatggtcgccgtgagttttat

SEQ ID NO: 825 - DNA, 126 bp, Triticum aestivum
  Clone ID: uC-tsflw189042f07b1
cttgcgcgaagagaagagaagagtgcagaggagcatacagagtaagcaacagcaatggtgagggctccttgctgcgagaagatggggctcaagaggggcccgtggacagcggacgaggacatgacc

SEQ ID NO: 826 - DNA, 110 bp, Triticum aestivum
  Clone ID: uC-tsflw189042f08b1
gtcgtggaaggaggaggtttcttctcatcgacagcttcaggatacagccatggccttgctcttttgctgctgggacggacagaagaagacaagcctgtcaaggcatggag

SEQ ID NO: 827 - DNA, 153 bp, Triticum aestivum
  Clone ID: uC-tsflw189042f09b1
tcggcggcgcgttgcacaggagaaggagcaggcggcggtggtgcccgaagaggagaagcacggcgacctagcccgagctcgcaaccatggctaggggtttgaagaagcatctgaagaggctcaatgccccgtctcattggatgcttgacaagc

SEQ ID NO: 828 - DNA, 112 bp, Triticum aestivum
  Clone ID: uC-tsflw189042g01b1
ttaaatttaaaaaaaaaaaaaaaaaaaaaaaaaaaaaagaaaaaaaaaaaaaaaccacaaagaaaaaaaaaaaggaaaaaaaaaaaaaaaaaaaaaaaaaaaaaaggggggg

SEQ ID NO: 829 - DNA, 375 bp, Triticum aestivum
  Clone ID: uC-tsflw189042g02b1
gttatttccgtcatgaaacttcctgtcttcttcaagcagagggatcttcttttctttcctgcatgggcctacaccataccatcgtggattcttcagatccctatcacgtttgttgaagttggagtttatgttttcaccacatattacgtcattggatttgatcccagtgtaagcaggttctttaagcagtatctgctgctccttgcgatcaatcagatgtcatcttcgctgttccgcttcattgctggaattggaagagacatggttgtgtcccacacctttggacctttatcactgttggcttttgcagcattgggtggctttatccttgcaagacctgatatcaaaaagtggtggatttggggttactggata

SEQ ID NO: 830 - DNA, 156 bp, Triticum aestivum
  Clone ID: uC-tsflw189042g03b1
tttagttggcgctggccatgcaggcgcacccggacagggtcgccgtcgccgtcttcgcctccgccgccatgccggccgccgggaagcccctcaagttcgtctccgaacagtttgcgcaagaaaggggcccgggtttcttcatggacagcgtgatcg

SEQ ID NO: 831 - DNA, 146 bp, Triticum aestivum
  Clone ID: uC-tsflw189042g04b1
cttgatccaaagctcatcttcttctccttgaaatctgtttgggtccacagatttggaggatgtcttgcaactgcggatcaggctgcagctgcggctcagactgcaagtgcgggaagatgtaccctgatctgacggagcagggcagc

SEQ ID NO: 832 - DNA, 120 bp, Triticum aestivum
  Clone ID: uC-tsflw189042g05b1
ttactttcacaccacgcggccgacgcccaatccgcgaccacgaagcgcaacccgccgagatggcctccgaggcggcgaaggaggcggagcccgacaaggggatcctacagaggaggaggg

SEQ ID NO: 833 - DNA, 198 bp, Triticum aestivum
  Clone ID: uC-tsflw189042g07b1
tcgctggcctccatgacaagcgcgccaccagcgagtcccggagatccaagcgccctgagcggtccaggccggaggcgaaggtggcggagcctccggcacgccgggccaagcgcgccgagggccatgttcctctgcgcaagcgcgagtctgcgagggtcgggcgaccaccccaccccctggactcggagggtgtgactg

SEQ ID NO: 834 - DNA, 321 bp, Triticum aestivum
  Clone ID: uC-tsflw189042g09b1
tcggtgcgacggctgagattatgtgtaatctcctttcatttgaagctgacagaagagctgtaaacattaccataaacagtattggtactgagctgactagagatgaccgccggaagctgtactccaactttggtctattgtttccgtatggtcatgaagagttggctgtctgtgaagatgttgaccaggtgcgtggtgtaatggaaaagtaccccccataccagtctatttttgccaagatatcatatggcgaaagccagatgttggacaaggccttttatgaggaggaagtaaagaggctgtgccagtcatttgaacagc

SEQ ID NO: 835 - DNA, 182 bp, Triticum aestivum
  Clone ID: uC-tsflw189042g11b1
tcgctagagcatgggcggagagctggtcccgtgctcatccgccggcgagggccagttcgccttccagggcttcgcggcggcgaaccttacgctggatggtctcgccgacgtcatgcccaacggactgctcgcgctcaccaacttcactctccagacaaaaggccatgccttcaaccccaccc

SEQ ID NO: 836 - DNA, 137 bp, Triticum aestivum
  Clone ID: uC-tsflw189042g12b1
gcctccgctcccacgccgccgaatccaggacctgttctcggattcaccgcgattgacccgaccaaaccctcaggcgatccccggcacctcctccccgacgctttagccatggcaggaatggcaccggaaggttccca

SEQ ID NO: 837 - DNA, 256 bp, Triticum aestivum
  Clone ID: uC-tsflw189042h01b1
ttcactcgtccggcccggccgcccgactttgaccgcctccacgtctccgctcccacgcccgcgggagagaggcgaccggcggcggcgcgcgaggagggcctacccatcccacccaccaccccgccggccaagatgttcggccgcgcccccaagaagagcgacaacaccaagtactacgaggtgctcggggtgcccaagaacgccgtccaggacgaccttaagaaggcctaccgcaaggccgtcatcaagaaccacc

SEQ ID NO: 838 - DNA, 156 bp, Triticum aestivum
  Clone ID: uC-tsflw189042h02b1
tttcgttatcgacccccacgatttatggccgcgtccctaccctgctatgctgccccgtcccttgtctcccccaagcacacaccggcaccgcagtaagccaccaacgcgccaagagaaacactcgagggagagagggagagcacgcgtgcgcgcgcc

SEQ ID NO: 839 - DNA, 203 bp, Triticum aestivum
  Clone ID: uC-tsflw189042h03b1
tgacttgtggggatgttgatgattctaaagatgtcaagtcaggttactccatcactcttaacttctctgagaatccgtactttgaagacagaaagcttaccaagtcatatgcctttgctgatgatggaacaaccacaataaatgccacttccattaagtggaaggagggaatggaaattaatgggaatgccattatgaagaaa

SEQ ID NO: 840 - DNA, 286 bp, Triticum aestivum
  Clone ID: uC-tsflw189042h04b1
gtacctcttctgttctcacctcgcagcgccgcaccacggaatcactccggccggcgagcaccaccggcatccaggcggcggctaacggcaagcggcgaacgtaggcagtttcatgatgggtactgaggactctaaagatatgctgaagaatgcggactggaaaacagtgagtggtccagtgattactgagtcaagccagccaattgttaagaagcgtcttccaaagaaaatcagacaagtccccgagtgttactttctgccccggcgatctctaccttctgcattg

SEQ ID NO: 841 - DNA, 201 bp, Triticum aestivum
  Clone ID: uC-tsflw189042h05b1
gtcatcttgtaccagcgccttatgcggaatgggggccattctacctatcaaacagctagcaggcgaggggacccgttcccacctagagccgatgcgcgactccgtacagggcggtggcgctgcagcagcaccagcgtctggtctcctcctccggcggcctggcggcgacgggggcccacaggtgcggcgagcacgacggga

SEQ ID NO: 842 - DNA, 205 bp, Triticum aestivum
  Clone ID: uC-tsflw189042h06b1
gtcataatgaaccagcgccgcagcccgcagcgcacccatcctaccaaacaaacagctagcaggcgaggcgacccgctccgacctcgagccgatgccgacgccgtacagcgcggcggcgctgcagcagcaccagcgtctggtctcctcctccggcggcctggcggcgacgggggcccacaggtgcggcgagcacgacgggacggtg

SEQ ID NO: 843 - DNA, 220 bp, Triticum aestivum
  Clone ID: uC-tsflw189042h07b1
tcgtaacagatgcttactcagagcaatagtcccgtccctccagaacttgctaggcatgaggcgtcgaagtttaagccaggatcggttcctgatagacctccaagaagaaatgacaccgtctatgcatctcactgaagcaatctgttgcagaagaggcggagatccttcttgggttcaatttagggccaccttctactgtgtcgagatttagtacttatga

SEQ ID NO: 844 - DNA, 110 bp, Triticum aestivum
  Clone ID: uC-tsflw189042h08b1
tttcgtcgcagtacgtacattcgatacatagatccagtgccggtgatctatcaaaccgggacgcacatacggtgacagtgcttcagagacatattatcagaaatggagcc

SEQ ID NO: 845 - DNA, 225 bp, Triticum aestivum
  Clone ID: uC-tsflw189042h09b1
tttcgtcattcgcatcgccaccttcctccctcctcccctcgccatctccgacccgacttgcggccaatggcggaccagctcaccgacgaccagatcgccgaattcaaggaggctttcagcctcttcgacaaggatggggacggttgtattaccaccaaggagctgggaactgtcatgcgttccctggggcagaatcccactgaggcagagcttaaagacatgatc

SEQ ID NO: 846 - DNA, 98 bp, Triticum aestivum
  Clone ID: uC-tsfl189005a10b1
gaaacgggacgcaccctgtaattaagcactaagcgcggggggtgtactggctacgcgcacggtgaactttacacttgccaagggcctagtgcccgctc

SEQ ID NO: 847 - DNA, 176 bp, Triticum aestivum
  unsure (1)..(176): unsure at all n locations
  Clone ID: uC-tsfl189005a11b1
cggattcgtgggtggacgcgtgggcggacgcgtgggcggacgcgtgggcggacgcgtgggcggacgcgtgggcggacgcgtggccgaagctctaaaccctgaactgttttgcatttgcaatccaagttgttcatttgctaattctgaattcaatattgtgaactggtcatatnctg

SEQ ID NO: 848 - DNA, 401 bp, Triticum aestivum
  Clone ID: uC-tsfl189005a12b1
cggtctcgtggttttaaaaaaaaaaaaaaaaaaaaaaaaaataataaaaaaaaaaaaaaaaaaaaaaaataaataaaagtgagaagatattataagttacatgattcgttatgcatgatttctagggcttttttttttttttgttggttttaattttttttgattggccgatattttataacattttaattgggtggctcctgttttttttaaatttatttttttttgaccactttctcactttgtcattttgtttatattggacaaggttcctattttatcgccttttcttttataatggtactctgatttggatactgggccgtctcccttttttactctttttttcctcattttttttgtttaggttatatataccgttaacttgcctgcgcccgacc

SEQ ID NO: 849 - DNA, 487 bp, Triticum aestivum
  unsure (1)..(487): unsure at all n locations
  Clone ID: uC-tsfl189005b10b1
atttcacgccgcaggagatcacccaggccatctcagccacagagctcaaccgctgcttagcatccattctcatcgccttcattgtggttgtttctaactgggggctggacgttggtggcaccatcaccagagtattggtttgcacgaggccgctcctgttcctcatcataacgaacgtaaccatcgtcatgtcgttgctgatggagaacagggaccccaatgcgaggggcagacaggccggcatcagccttggttctgatggcttagggctgatgctggagctcgggatgctgctacagaaggcgtctgaagctatgctgatggacttcagcatttgcgctgtcatcatgatctgttttctttgattctgaacaccctggtcatgttttcttggattctgaagagaatttagatagttcgcggaagcgcatgtagaatttctttttcttttggtgctatatcgnactcttatgtctatntatccgat

SEQ ID NO: 850 - DNA, 258 bp, Triticum aestivum
  Clone ID: uC-tsfl189005b11b1
cccactcgtccgctgactgctttactttcctcgcacaacctgcagataaaatttgcctgttaacacaaaaaaaaaaaaaaaaaaaaaaaaaaaaaaaaaaaaaaaaaaaaaaaaaaaaaaaaaaaaaaaaaaaaaaaaaaaaaagggggggccgaataaaaaaaaaaaaaatacaaaacacatgaaaaaaaagaaataatttttaaataagagaacaaaaaaaaaggtgggcgggcctgttaaaaaacaaaaaattaa

SEQ ID NO: 851 - DNA, 351 bp, Triticum aestivum
  Clone ID: uC-tsfl189005b12b1
gcggttgtcagtttcggcggcgactccaccaccagcaccagctccagcaccaggcgggcgaaccaacccagaccatggcgcccccgacccgcgcgtgcgcatagcagacgtatgcggtgaggacacaggggcgtatgggcatgtcgcgcgcggaggcagtggaatgtttcaagctcggggaaaggcccctagggggagatcgtcagtgccgcccgtggtccgagcgcgcgaagcccgctttcaaggtggtggcgcactagcgattcatccacatcgcgattgttgtgggcctgataaagtccgacccaaagcccatactgtttcagtttctcgaaccgatcggatcgattt

SEQ ID NO: 852 - DNA, 304 bp, Triticum aestivum
  Clone ID: uC-tsfl189005c11b1
cccactcgtccgtccacgcgtccgagcctactactagcaagatatatacctacatagtacaggcatggcccccaccgtgatgggctcgaaggacacctacgacgctcctttccaggggctcaagagcaccgacggtctccccgtcaggcgtcggtccaacggcgctagccttggcagcgtcagcaacggaggaaggatcaggtgcatgcaagtgtggcccatggagggcatcaagaagttcgagaccttgtcttacctgacaccgctcagcacggaggcccttctcaagcaggtagaatacctg

SEQ ID NO: 853 - DNA, 89 bp, Triticum aestivum
  Clone ID: uC-tsfl189005c12b1
cccacttcgtccgtccacgcgtccgaagctactatgtttgagattgctgggattctgttgactgtattgccggattaatttgttgggtc

SEQ ID NO: 854 - DNA, 497 bp, Triticum aestivum
  Clone ID: uC-tsfl189005d10b1
ggcgctccagtggaccacgctgtcgggcagtggcgccgaggacgttagggtcatgaccaggaagagcgtcgacgaccccgggaggccgccgggcatcgtcctcaatgctgcaacctccttctggctaccggtcccgcctaagcgcgtcttcgacttcctacgcgacgagacctctcgcagcgagtgggacatcctctccaatggcggcatcgtccaggaaatggctcacatcgccaatggccgcgaccatggcaactgcgtctcactcctccgtgtcaatagcaccaactcgaaccaaagcaacatgctgatcctgcaagagagctgcacggacgcatcgggctcctacgtcatctacgcgccggtggatgtggtagccatgaacgtggtgctcaacggcggcgacccagactacgtcgctctcctgccatcaggcttcgccatcctgcccgacggtcctgcagggacaatgcacgccgcggcaggggcaacccggc

SEQ ID NO: 855 - DNA, 507 bp, Triticum aestivum
  Clone ID: uC-tsfl189005d11b1
ggcagttcgacctttgcatggcagcagtggctagctccaaggggcgggtgatcgctgggagcctcgtcgcgcgcgtcctcgccggcaaggccaacgcctccccgaggagggcggtgcacgcgtcggcctacgacaagaacgtggacgagcaggtgcgcccggccttcgtgccggacgatgtgatcggcggcgccgggagcccagacaagtactggggccctcacccgaccaccggcgtcttcggcccggccgcggtcgaccccaagctggccgccagcctcgcgccggctgctggcgccgcgaatggtggcgcctccgtgctggaccagaaggtgtggttccgcccgctcgaggacgtcgagaagccccccgtcgcctgatcgccgacgacgacgaccatagcccagctctacatctctatcactccgcttagctgggctcgacttcctacttataattacatataatctgtagtggtgtgctcgtgctatagtacagacatggcag

SEQ ID NO: 856 - DNA, 315 bp, Triticum aestivum
  Clone ID: uC-tsfl189005d12b1
gcatgtttggaatgaaggttctcttgcggtggtgaacctgatgtttgctgttcctgtagacaggatccttgggttccttttgctgctcttgcttttgatgtaatggttatcagtgtaatggtaatcaaggcagattgtactttgtggtagctggtgaatttagggctacgttgggtggccggcctgtgttgaccgtttgggatgctttatggtcgtgttggcttcgttttgatcttttcttttctgtttgaactcgtttgtagaactcggtggttttcagtaatgaaaattggaaggggcaagcccttttttgat

SEQ ID NO: 857 - DNA, 374 bp, Triticum aestivum
  Clone ID: uC-tsfl189005e10b1
cggacgcgtgggggagctcgtcatccacaacccgggcgtcgaggaggaccccgcctgcggcccgctcatcgacgccgtcgccatccgcacgctctacccgcccacgctctccaagggcaacatgctcaagaacggcggcttcgaggagggcccctacttcctccccaacgcctcctggggcgtgctcgtgccgcccaacatcgaggacgaccactccccgctccccgcctggatgatcatgtcctccaaggccgtcaagtacgtcgacgccgcgcacttcaaggtgcccgagggcgcgcgcgccgtcgagctcgttggcggcaaggagagcgcgctcgtccaggaggtgcgcaccgtgcccggctgggcatacc

SEQ ID NO: 858 - DNA, 412 bp, Triticum aestivum
  Clone ID: uC-tsfl189005e11b1
tcgctcgtggtatctttttcactcaggactgggtatccatgccaggtgttataccggtagcttcaggtggtattcatgtttggcatatgccagctctgaccgaaatctttggggacgattctgtattacaatttggtggaggaactttaggacatccttggggaaatgcacctggtgcagcagctaatcgagtggctttagaagcctgtgtacaagctcgtaacgaagggcgcgatcttgctcgcgaaggtaatgaaattatccgagcagcttgcaaatggagtcctgaactagccgcagcttgtgaagtatggaaggcgatcaaattcgagttcgagccggtagatactattgataagtagataaaactaaagataaagaagagaaggtataaataaaaaagaaacgaaat

SEQ ID NO: 859 - DNA, 501 bp, Triticum aestivum
  unsure (1)..(501): unsure at all n locations
  Clone ID: uC-tsfl189005f10b1
ggcctaaaaactgcacgattcaatccgttccaaaacaagggtagccgtcaccatggcgagggcaacgacactggtgctcgtggccgcgctcgccgtcctcctcctcctcgcctccggccccgcgggcgccacggccgcccggacctcgcccaaggacgtggcaacggcatctcccgacgagaaggtcgctgtggcggcggcggaagaccacgagtgcgagatgatggccggcgagaagcagcgggatgagtgcatggcgaggaggacgctcgccgcgcacaccgactacatctacacccaggagaagcacaactagtagccttcatatctgcgtccatgtaatgatgttattgttagtcggcactgcgtctgcgtgttcgatctctatcctatagcttcctccatgaacaagggatcgatcccaccgtgcatgcatgcatgcatggcgcaattatgtattgcctaaaataatttagtaattcgataatcaaactggnnttt

SEQ ID NO: 860 - DNA, 297 bp, Triticum aestivum
  Clone ID: uC-tsfl189005f11b1
tcgccctttcgtgcgggcttatcctccccttccggttcgggttctggttcggctctggtccgagagtagctagcctagtctagggtttccgtagagaggaagggagagggagatccattcatggcggagacggagtaccgctgctttatgggcggcctcgcctgggccaccgaccacaacaacctacagtaggccttcagccagtacggcgagatccttgacgccaagatcatcaaccaccgctagacggcgaggtcccgcggcttcgggttcttcacgttgggcatagaggagaca

SEQ ID NO: 861 - DNA, 474 bp, Triticum aestivum
  Clone ID: uC-tsfl189005g10b1
tcgcccactcgtccgggaatccgaggccaagtgccacgcaactgtggtgtccgggtggttcacaggaacccgctcacgctctggtaaaccaagcaaagcgcagtacttcaacaatccaatgtggcctggggaggctcattcgttgaaagtagagaagattttgtaccaggggaaatcgccataccaagaagttttagtattcgagtcttcaacctatgggaatgtccttgtgctcgatggaattgttcagctgactgacaaggatgaatgtgcataccaggaaatggttactcaccttgcactgtgctcaattccatctcctaaaaatgttttggttgtcgggggtggtgatggtggtgtactacgagaaatagccaagcatgactcagtggagactatagacatatgcgagattgatcagctagttattgatgtttgtaaagattttttcccacgtctgtatgttggatataa

SEQ ID NO: 862 - DNA, 419 bp, Triticum aestivum
  Clone ID: uC-tsfl189005g11b1
caccgcgtcatcttcgtaaccctctgctcgtcctcctcttcctcgcagcagcagcagcagcccccgtcgcccagatcgccatggcggccgagccggagcaggcgccggcggcgcaggaggcggccgtgcacatcgtgtacgtggaccgccccgaggacgccgaccccgaggagttccacatccgcaccctcgcccccgtcctcggcagcgaggagaaggccaggggcgcggtcctctaccactacaagcacgccgccagcggattctccgcaaagctcaccaccgagcaggtcgaggacctcaagaagcaaccaggtgtccttcaggttgtgccgagccagaccgtccagctccatggaaatgagggaggacatgccaagacaacgcgcaccatgggccttatgtgaaagccctgagta

SEQ ID NO: 863 - DNA, 329 bp, Triticum aestivum
  Clone ID: uC-tsfl189005g12b1
tcggatgattgcgacctaaaatacattcgatcattcggttcaccatacgtgctgagcatatctgcattggagacggtatcgttgaagataaccatatgacctatcggatgcaagcgttccactctcgtgctgctctttggtgccgctcccagaactacagcagcttaatttctctgtaaagtttttctgcgaatcttgtatctgcaggcttctagtgaggctgtatcatagcacaggtgtcatgatctgctggctaccacgcttggatatctagagatttggatttctcaatagagcttctcatgggtaaaagaaaaaaaaataaacag

SEQ ID NO: 864 - DNA, 323 bp, Triticum aestivum
  Clone ID: uC-tsfl189005h10b1
atcaccatcctcaccggcatcttctattgggttgcccagctcctcggtgccatcgtcggcgccttcctcgtccagttctgcaccggcgtggcgacccctacacacgggctttccggcgtgggcgcctttgagggcgtcgggatggaaataatcgtacactttggggtctggttacacggtgtacgccaccgccgccgaccccaagaggggttcctctgggcaccatcgcccatatcgccatgggttatatggtgggcgccaacatcctgggtgccggccctttctccggggggtccatgaaccctgcacgctccttcggcccc

SEQ ID NO: 865 - DNA, 220 bp, Triticum aestivum
  Clone ID: uC-tsfl189006a02b1
agcttttcgacttttgtatgcatagcgagctcaagcggaacatcgtcgtagtccaaggagctacacgcgaacttgccacaaacgtaaataatattggacggcaatttcgacaattggtggtcccggaccatcaggggcgaagactgggtgactcctatcgaaacgcaaaagaatagcgccaccgggatcgaggatttaagcttctgggccgatgactgcg

SEQ ID NO: 866 - DNA, 158 bp, Triticum aestivum
  Clone ID: uC-tsfl189006a03b1
aagtggaagatctgtgatgtgctagctagatcgatcaccgtttagctgatcgatgaagagctacaaaataaatgggccatacatcatcatgtgtggccagcactattgcaccttggaaataacagacctatgtttctgaataaagcttttgtccgaat

SEQ ID NO: 867 - DNA, 517 bp, Triticum aestivum
  unsure (1)..(517): unsure at all n locations
  Clone ID: uC-tsfl189006a04b1
accagccagccagcccatctcatcccatctcactcgatcaccgcactctttgtgctgagccgtttctgcacaagagatcatggcgaagatgtcgtcgacggccaccgtcacccgcgcccacctcgagaacaagctcgccctcgccaaacgctgctccagagaggcgacgctcgccggagcaaaggcggcggccatcgccaccgtcgcgtctgcggtcccaacgctggcgagcgtgaggatgctgccgtgggccaaggcgcacctgaaccccaccggccaggccctcgtcgtctgcaccgtcgccgggatggcatacttcgtcgcggcagacaaggccatcctgtcgctggcgaggaggcactcgtacgagagcgcccccgaccacctcaaggacacctccttcgctggcgccgncgccgccgctcgtncccgtccgccggcattcttcaggccttgatctagcgtcctgctaatgtatgatacgcacgctngtgcccttggcgtattctagagacat

SEQ ID NO: 868 - DNA, 262 bp, Triticum aestivum
  Clone ID: uC-tsfl189006a05b1
ctcattgaaagaagcaacatcttgttgaatcgtccctctaccactttccttgtcaaccagagtaatggccccagccaagaacattggggcggcatgaatccttgtcattgtcatggtggcaactgcattattaccgtcgtcaagcgccaccctcaccaagtccggcgagaacctgttcaagtttgccttcgtcgcgctcatcgatacggtcctcgacgatgtcatcgccaccaccccaccagccaaaatacccgaagtacaa

SEQ ID NO: 869 - DNA, 486 bp, Triticum aestivum
  unsure (1)..(486): unsure at all n locations
  Clone ID: uC-tsfl189006a06b1
gttcaacagtcctaccatacatacatttcgccgccaagaatatccaagggatccaaccaagagagctagtagttaacaatggcgtctgtggggttcggcagcagcgtggcggccgtggcgccggcggggaggacgagccttcgcccgcagcggacgcggctggcggtgccggcggccacgaggggcacgccggctccggccaagaaggagaagagcatcctggacttcatcgtcagcgccatcgtcaaggacgagcaggagttcatcgagaccaacccgctgctcaacaaggtggacggcccggcgccctccgccggtggcaccgcctccaggaaggccggcggcaccacctccggcaagaagcccgcggccggcagcgagggcggcggcgggttcaacctcggcggcctcttcgccaagaaaggctaggctgaaccagcccgcctaatacgtaagcgcgcgcttgggtgcgtgcttncatctcat

SEQ ID NO: 870 - DNA, 460 bp, Triticum aestivum
  unsure (1)..(460): unsure at all n locations
  Clone ID: uC-tsfl189006a09b1
cagcatcattacaactgcaaccagatttaggattcatgaaacggatacaacaaatattaggtcggaaacaccagcgaaaccttcatgggatttatatactccacccaaccttggggttgagaacagctattctggggatgcagcttttgattgatggagaggtatggaagaaagttgtgtatgttgacaggctggtgcaattgttcagatatgtaccacgcgaacaattaactatcccagattttgtatttcagcatgatttggaggtgaatggtggtaggggcatgattgtggacccaagaacaaaacatatctatcagagaccatctggctgattcatgtcatttatgcagtccaaagctcatacttgttgcttgtgcaagtctttgtataattactcctttggtgatatttctcgntttcctttgtatcgaatttaggggttctattcctttcattc

SEQ ID NO: 871 - DNA, 448 bp, Triticum aestivum
  Clone ID: uC-tsfl189006a11b1
ggctaactggtgctacgcaaccgtcgcgccccgtgcccgctcctccaccatcgtcgccagcctcggcacccccgcgccctccaactcctcctccttccgccccaagctcatcaggaacacccccgtccaggccgcgcccgtcgcacccgcattgatggacgccgccgtggagcgcctcaagaccgggttcgagaagttcaagaccgaggtctacgacaagaagcccgatttcttcgagcccctcaaggccggccaggcgcccaagtacatggtgttcgcgtgcgccgactcgcgtgtgtgcccatcggtcaccctgggcctggagcccggcgaggccttcaccatccgcaacatcgccaacatggtcccctcctactgcaagaacaagtacgccggtgttggatcggccatcgaatacgccgtctgtgctctcaaggttgaggtcatc

SEQ ID NO: 872 - DNA, 486 bp, Triticum aestivum
  Clone ID: uC-tsfl189006a12b1
gcgacgacgaggagggcttcttcctcccctccggccaggcctccgcgccgcccccttccgcggccggcgacaccctggaggcactcaagagtttggtgcagagcgccagcgtcgcggagcggaaccttctcgccgacgcttccaggatcgccgagcggtgcggcaggacctgcaagggcaaggcggagtgccgccgcgccgtcgccgacggcctcagggccctcggctatgacgccgccgtctgcaagtcgcggtgggagaagaccccgtcctaccccgctggggagcacgagtacatcgacgccgtggttggggacggggcgaggctgatcgtggaggtgcacttcaggtccgagttcgaggtggcccggtcgaccaaggcgtaccgcgcggcgctccaggcgctgccgccgctgttcgtgggcacgtccgaccggctcgggaagatcgtgtccgtggtggcggaggcggcgccgcagagcatga

SEQ ID NO: 873 - DNA, 487 bp, Triticum aestivum
  Clone ID: uC-tsfl189006b01b1
ccccaccttccgtcctccccccgtcgtcgcggctccagctagggtttctcgcccccgccctacgggcccaccgacgaacccgtccgccatgttgaagcaaggaggaaaggccaagccgctcaagcacgccaaggtcgccgagaaggactacgacgagaatgacctggcatacctccataagaagaaggacgagcaaaaggccctgaacgagctgaaggccaaggcaggccataagggtgcgctgggaggatctgttctcaagaagagcggtaagaaatgaggcatgccacccatctcgaatacccagaaaatgataatctatctatctacctatctgtgacgcgcttcactatctgtggctgtgacagactaccttcagttgtgttgagcattgtgcaatcgaccactatgtcgcttaaacctatggcatgtcagcagcctcttatggtatctatgatacagaaggaccgagctaaaatgacatgac

SEQ ID NO: 874 - DNA, 456 bp, Triticum aestivum
  Clone ID: uC-tsfl189006b02b1
atagttctcagctcctcacattctaccatacaatcctcttcatccttcacaaggaaccgccatgggtctgtccgcgaaggtcttcgtggtcctcctgctgctgctcgtcgccacggaggagcaggggggatcggtgcaggtggctctggcgagggattgcaagtcggatagccacaagttccatggggcgtgcttcagcgacaccaactgcgcgaacgtctgccagaccgagggcttcacccgcggcaagtgcgacggcatccactgccactgcatcaaggactgctagatgcctagatagccctggctagtttgttctcgcgtactagatgcatgattccatgtgatattagctgaacgatggtagatctattatatgtctatgtgcgtatgcgtgcgttgatctgcgagtgctggtcctcggagattgcatgaatgaataaggggaattgcatc

SEQ ID NO: 875 - DNA, 471 bp, Triticum aestivum
  unsure (1)..(471): unsure at all n locations
  Clone ID: uC-tsfl189006b04b1
gccccaaccaatggcgtccaccaacggctacggcagcgtcaccggcggcggcctccccacgcacacggccacctccaagccgcccgtcgacgacccgcgccaccagaagcagcgcctgcgccggcgccgcggctgcctctgctgcgcgtgcctggccgtcaccctcgtcctcatcgccgtcgtgctcctgatcctcttcctcaccgtgctccgcgtgcgggacccgacgacgcggctcgtctccacgcgcctcatcggcgtggccccgcgcctcaccttcccggcgctcagcatccagctcaacgtcaccctcctcatcacggtgtccgtgcacaaccccaacccggcctccttctccttccccacgggcggccacacggacctcacctaccgcggcgcccacgtcggcgacgccgagatcgaccccggccgcgtccncagtaagggggacgcggacgtgaagctggcgct

SEQ ID NO: 876 - DNA, 417 bp, Triticum aestivum
  Clone ID: uC-tsfl189006b05b1
ccgaggttcgagtgggagctcttctagaggtcgggacgggcccgcccacccgccacatgcgtgtggccacacgttcattggctcgatcagcctcgtctcggtcatggcgcgcgtcaactgtcacattgttcccttcttctctctccattctttccttccatctttgttttttctctttcgagtgtatattgatctcctcaaaaaaggcaacagctccagtgatatgattgtgcccagcgactcccaaatccccacgaagaagatacacacactcatgatctctatgcatgcatcgggtgtgctatgctgcaaataagtggtggccttatgttgatgaaggttcggaatttccacggcgaatttgtgtatagtattgtacggtgtacatcaaatcatcaatttaccattatatgtgcc

SEQ ID NO: 877 - DNA, 438 bp, Triticum aestivum
  Clone ID: uC-tsfl189006b07b1
cccacgtttccggcttgagagagcgcgcgcgagatggcagcctccatgatcacctcgccgattgtggcgccgacgagcctgccgtccctctcccgccggggctcctccttcgccgtcgtctgcagcggtggcaagaagatcaaggtcgacaagcccctcggactcggaggcggcttgacagtcgacatcgacgccaacggcaggaaggtcggcaagaagggcgtgtaccagtttgttgacaagtacggcgccaacgtcgacggctacagcccaatctacacgccggaggaatggtctgaatatggtgaccgctacgccggcggaacgaccgggcttcttatctgggccgacaccctcgtcggactgctcggcggcggcgttctgctcgtctacaacaccagcgctctcgccggctaagagagcatctacgtgtaacac

SEQ ID NO: 878 - DNA, 88 bp, Triticum aestivum
  Clone ID: uC-tsfl189006b08b1
cggacgcgtgggcgttcgcgtgggaatcaagctattacacatttgatcatgttcatgtatggtatcaaatcaagatgttttactgcac

SEQ ID NO: 879 - DNA, 413 bp, Triticum aestivum
  Clone ID: uC-tsfl189006b09b1
ctctgtatcagtcacttcaggctctggtcgatcacggtagcactagcttcagctagccactccaggcattttcttgcatccacgacggcaatggccaccgctgatgtgcaaaacccatcggccgcgctgacggaggaggcgcccgcggtggagacgcccgtcgccgctgaggaggtcgcgaagacggaggaggtccccgcgccggcggagaccgaggtcgaggcgcctgctgcccccgtcgaggtcgtggagaccaaggaggaggcaccggccgccgccgagacggaggatgccaaggaggccgagccagcagctgcggccgagccggaggccgaggcgcccaaagagacagaggcgccagccgtggtcgagacagagaccaaagaggccgtggctgaggcaaagccggcggc

SEQ ID NO: 880 - DNA, 484 bp, Triticum aestivum
  unsure (1)..(484): unsure at all n locations
  Clone ID: uC-tsfl189006b11b1
cctcaccttctcccttctcttcgtcgtgtacgcgaccatcatcgaccctcggaccacggtgcccggctacggtccgatgctcaccggcctcattgtcggcgccaacaccattgccggtggcaacttctccggcgcttccatgaaccccgctaggtccttcggtcccgcgttggccatgggagtgtggaccaaccactgggtctactgggtcggcccactggtcggcggccccctcgccgggttcgtctatgagacagtgttcatggtgacgaagacgcatgagcctctgcttggttgggacttttagaaaagcatgttgctcgcatacttgcatttatattttgcgatgtataccagtgtgtgtaaggcaatagatgttgctcgtagatttttcaggacaagtgattctagctagggtgtcaaaatggtttgtagggaggtactacaatggctggttttttttttggtggnggggngggggggg

SEQ ID NO: 881 - DNA, 155 bp, Triticum aestivum
  Clone ID: uC-tsfl189006b12b1
agcagggcagcgccgtcgcccaggtcgccgccgtggtcgtcctcggcgtggcgcctgagaacaaggcggggcagttcgaggtggccgccgggcagtccggcgagggctgcagctgcggcgacaactgcaagtgcaacccctgcaactgttaagct

SEQ ID NO: 882 - DNA, 368 bp, Triticum aestivum
  Clone ID: uC-tsfl189006c01b1
gcacgcccgccttgtcatggtcgccttcctcggattcgccgtgcaggccgccgccaccggcaaggggccgctcaacaactgggccacccacctcagcgacccgctgcacaccaccatcttcgacaccttgggctcctcttaagcggtcggtgggcgagcaatttctgtcagctcggctgcaaaatggacgaacgcgcgtccgagtaacgaacgtgcttttcgatttgtatatgaccagtgatggatgagagggtatcacaaagatcctttgatgagtaatgcaggtctgatcacataggagagctgctgggacttggtgatttgtaaaatatgaaccaatggtgacttaatgcatgcacttgtacatc

SEQ ID NO: 883 - DNA, 86 bp, Triticum aestivum
  Clone ID: uC-tsfl189006c03b1
cccattcgtccgcccacgcgtccgcccacgcgtccgcccacgcgtccgcccacgcgtccgcccacgcgtccggttctagatcgcga

SEQ ID NO: 884 - DNA, 454 bp, Triticum aestivum
  Clone ID: uC-tsfl189006c04b1
caacatctcccccgggtactacgatggtcgatactggacaatgtggaagctgcctatgttcgggtgcaccgacgccacacaggtgctcaacgaggtggaggaggtcaagaaggagtaccctgacgcctatgtccgcgtcatcggcttcgacaacctgcgccaggtgcagtgcgtcagcttcatcgccttcaggccaccgggttgcgaggagtctggcaaggcctaaactacgagttgaaacaatggcctatgtatgaaggtcttttgtgaacttaacttttgtccaccactctgctggacgaccagagcatatttttcattctatatggtctgtgtgtgtatgtacgaacataggttctcgagcatgcatatgtaaattctagaaccggctacacatatacaaaacctgtgtgatatttattatatacaaacacgcggaccattgtcttgctgt

SEQ ID NO: 885 - DNA, 433 bp, Triticum aestivum
  Clone ID: uC-tsfl189006c05b1
ggaagaagggcgctccccgtcgattgccaataggattctgtgggtttgctgtcaacagcacaatgctccgggatcctcaaaggtaggaaccgcccaactatggattctgctatagtgcaatctggtggcagaggtggtctgtagcgagtcacgatttgacctgatgtttggtaaaaacgagcgtaaaataaaaagccttacagacaactgatgacggatcatggtctggaacttccccctggaacctccccagctgaaatacccctgtccgatggccactgaggcaccaccttgtacatgaaaagacctgcgacatagagatcctgccaccggaagtcctgtgttccatgcaagacgtttctcttggcgagccatacggaaagatgattaaccttgcggtgacacagaagttactgatataaacttggcgatg

SEQ ID NO: 886 - DNA, 180 bp, Triticum aestivum
  Clone ID: uC-tsfl189006c06b1
gaagggtctagggtacctagggtttatgatgtctcgttgtttttgcatgctagcaagtgactccgggatgccagttttaagatttcgcttgtgttgaaagatattattattattactgcttgtagcctacctgggataccgtcatattttgctgattatggaaccccttttatcctgctt

SEQ ID NO: 887 - DNA, 137 bp, Triticum aestivum
  Clone ID: uC-tsfl189006c07b1
aaatttttatgtttttcaaatgaggagtgctaccggggaataaatccaggaagaggtggcggcttgacagggagtttaggacctttttgcttgcattctcgtgtcttttggcaaggagaaaattatcatttggaggg

SEQ ID NO: 888 - DNA, 329 bp, Triticum aestivum
  Clone ID: uC-tsfl189006c08b1
catacttccccctaatctccaccccacccacagactgactcgcagcacacctaccacgcgcagcgcgcagagcgagatcgagatggcgacggagctgacggtggtgcagctgcgggcgtacgacggcaccgacgcgttcaagccgatctacgtcgccatccgcggcaaggtctttgacgtataggccgggcgcggcttctacgggcccggcggcgactacgcgctcttcgccgggcgcgaggccgtccgcgcgctcgccaagatgtccaaggacgccgtcgacgtctccggtgaccttatccggccctttcgacaaggagctcggcgtt

SEQ ID NO: 889 - DNA, 361 bp, Triticum aestivum
  Clone ID: uC-tsfl189006c09b1
aaaaatttaaaaaattttaaaaacaaaaaataaaaataaaaaaaataaaaaaaaaaaaatgcggggggtttattgaattcagccaccgtcctgcgaggagaacggaaagggctaaactgttctgtcaccacggtccatttatatagtgccattgcggttttgtcaactctgacattgctttgggttttccttcttcatttatctgtgttgcatgctcctatttttatgcgtatgtccatgttgatgtaacgacatgtatcgagaaagcctgctcgaatgctaatgcaatgggtgggtatgtctatgcgcatgcgcatcatatatttatacaatgtgtggggtatgtattcgggtaactaat

SEQ ID NO: 890 - DNA, 329 bp, Triticum aestivum
  Clone ID: uC-tsfl189006c11b1
cggggctgtgcaccgtgcaggtgaaccacggcgtcaccgtggtgggctacggcgagaccagcgccgccggcgacgaggggtccgggaagtactggatcatcaagaactcgtggggggcggggtggggcgaggccggctacatgcgtctgcagcgcgacgccggcatgcccaccgggctgtgcggagtctctctgctcgcgagctacccggtcatgtgattcattctgccaggtcatgtacgtagtaataagtagactcatgcatggagcatttgtgaagtgtaagaagatagcgagtataaaaatacgaatatctatacatcagtgtgt

SEQ ID NO: 891 - DNA, 159 bp, Triticum aestivum
  Clone ID: uC-tsfl189006d01b1
cccattcgtccgggggctgcaagctgcagttgacaggagttgttgtatgcgtcgattaattgtcacttagtcaatcttttcaattatctgtgttttgagattgtactgagtcgaggaggataaggagtaactcttgacattagtgtgaagtattttggc

SEQ ID NO: 892 - DNA, 443 bp, Triticum aestivum
  Clone ID: uC-tsfl189006d06b1
gcagttcgaggcttagcaaccaaagctacaatcctgacgatgaagtggctgtcccaccatttggtgagcggtatgaggcgaacgctgaatcaggcgaaaagtatacgggtatctttaacagggtgagggatgataaactatcgcccgactcttctgccaggcagcattcatctggcaatcgcaaagacgaaaataaggtgcaacagacatgtccttgctgcatactttgacaagatggggatacaatcacagagagttctgataaacgtcctgggatacttgtggaacaaattgtcgttcttgtgaagaatttggcaccaaactatatattcatgtatacttttcaatgctcattagacattactattggcgtgggtgtggacctatgattgcatcgatctacaatttatgctatatgcttatttggaacatatatatgatgc

SEQ ID NO: 893 - DNA, 475 bp, Triticum aestivum
  unsure (1)..(475): unsure at all n locations
  Clone ID: uC-tsfl189006d07b1
acggacgggtcgtacggattccacctccacggacggaacgctggtcgtcagccagccagaccgtcttgtggtcaccagtacatctctgtacgaacgtcgcttgttcttggacgcccttgcgaggcactcgcacatttgctctctgccgacgtgccatgggacatgcggtaatttgagcctgaagtaaatcaaaagcaagcgtccggggcggaacacagcgcaaaaggtcgaggatgacgacgaacatgtcgaacatgtcgtacgtggacaccattctccgtctaccgccctcgccgctgttgacgtacccgacgcgcgccccggcgggacacgcgctggaggagcctcccgcgcggcacgggccggcgcggagatccaagcccgtgaggattttccagagcatgttccggtctctgtcggacgtgacggagccacgctgcggngggattttgacaccagccccgaccggcgcaaa

SEQ ID NO: 894 - DNA, 384 bp, Triticum aestivum
  Clone ID: uC-tsfl189006d08b1
acggagctgtacccgcggttttcggggccgacaccttggcgtgcgacgaggggatgcgccaggcgatcgaggtcatgaacggccaggacctggacgggcgcaacatcaccaggaacgaggcccacacccaccgctcccgaggtagcggtggccgtttcagcggtggaagcggtggcagttacagcggtcatcgctctgagggcagcggcgggggctactgtggcagtagttgtagctacaggggtggccgcctacgtggctgaggagggtacggcagccatgaaggccgctgcggctacggcggatacgcacgccgctacagtggaagacgcgaggcgccggcggtggaaactggagggagagaatggtgggccccctcgctgg

SEQ ID NO: 895 - DNA, 389 bp, Triticum aestivum
  Clone ID: uC-tsfl189006d09b1
gcgccttctacgcggtctcctacaagcctttcttcgacggcgccgtccaggccaaggggcccaacgacgacaccaccaccgaagccacctggtgctgcaccggccgccgctctctcaacctgaggagctacaccccctgcttctaggcattggaggacaacgagggcccggccccggccccgggcaagaccgacgaggcggacgtggagctgcacaggaagaaacggctgctggactacaaggtgtacgacgtggagggcaaggtgaaggggtcggtgcggcgcagagtcaagcggatcaacggaaagtgctcccgacgcacgtctacgggtggtgacgagccggcgatccgtccatgcaggatggtctgcctacgtgtgctgccggta

SEQ ID NO: 896 - DNA, 340 bp, Triticum aestivum
  Clone ID: uC-tsfl189006d10b1
ggaccatacatccctgtgtctggcatgaattggtagatgtgataaagtggacgtttcaattggatacacgcctgctacaaatcagatcgttatttgttaaggcatatgatgagctcttgtaatcctaatctactacccacatgttacagctgatgttattatagaattagtactgtgcctaagagatagtactctggtgagaagcaggcaacacgtaatatgtgtgtcatttgagaaaaatgaaacttccaactttccaactgttcattgtatatgtacattggaaacacactatcttagacaaatagatgattcagcaggatcaatgaacgctcgcttt

SEQ ID NO: 897 - DNA, 224 bp, Triticum aestivum
  Clone ID: uC-tsfl189006d11b1
ggcggttacggacgtcctaggggcggagcctggcggagggaggagtcgcgcggaggaagaccacactgacgctgaatcggtattttcaaatttggggtagtttggtcatttcatcaagtttcacctggtcggaaataataccccaacgacaaataaataggaacggagggagtacatccgtatgtttttcgtattaaacaaaaataaacattgctgaaaataca

SEQ ID NO: 898 - DNA, 439 bp, Triticum aestivum
  Clone ID: uC-tsfl189006e01b1
cccattcgtccgggacaatgtggaagctgcctatgttcgggtgcaccgacgccacacaggtgctcaacgaggtggaggaggtcaagaaggagtaccctgacgcctatgtccgcgtcatcggcttcgacaacctgcgccaggtgcagtgcgtcagcttcatcgccttcaggccaccgggttgcgaggagtctggcaaggcctaaactacgagttgaaacaatggcctatgtatgaaggtcttttgtgaacttaacttttgtccaccactctgctggacgaccagagcatatttttcattctatatggtctgtgtgtgtatgtacgaacataggttctcgagcatgcatatgtaaattctagaaccggctacacatatacaaaacctgtgtgatatttattatatacaaacacgcggaccattgtcttgctgttattaatt

SEQ ID NO: 899 - DNA, 475 bp, Triticum aestivum
  unsure (1)..(475): unsure at all n locations
  Clone ID: uC-tsfl189006e03b1
cccacgcgtccggctactagcgcctaccactgaggagtgaggctgccacgcccattcgctagctagctacagacccatagtacaaacaataatagagcaactgagcacaccaggacacagtcggttaagtactgtgacagggagctaggttcagttcaccacaaacgcctcatctccaagccgagcacctcgccatgagcacggacgcggacgccgtgccggtggccgtggcgccggcgaagcgccctcccatcaacaagtacgccttcgcctgcgccctcctcgcctccatgaactccgtcctcctcggatacgacatctcggtgatgagcggcgcgcagctgttcatgaaggaggacctgaagatcacggacacgcagatcgagatcctggccggcatcatcagcatctactccctcctgggctcgctcatggcggngctcacgtncgactggctggggcggcgctacaccat

SEQ ID NO: 900 - DNA, 431 bp, Triticum aestivum
  Clone ID: uC-tsfl189006e04b1
tcggtgatgcgcatctcggggctcatctacgaggagacccgcggcgtgctcaagatcttcctggagaacgtcatccgcgacgccgtcacctacaccgagcacgcccgccgcaagaccgtcaccgccatggacgtcgtctacgcgctcaagcgtcaggggcgcaccctctacggattcggcggctgacctgcgcccgctgctccaatctccaatctccatcgactctgactctgctagctgctgttctggtgctatggtttcgtttctgagtgcgtgcgttgttggtccatcggtctgtgtagttagtggaaggcgatggatctgaatgcagtcagttcgtcagagtgcgtctgttgatctatcggtctctgtagtcagttcctcagtggaaggcgatgaatatgaatgcaatggggtcgttggttctttct

SEQ ID NO: 901 - DNA, 137 bp, Triticum aestivum
  Clone ID: uC-tsfl189006e05b1
tcgcacatacagagaaaaagtgaccttgcctcggccgcccgacgatccttgcctgacgcaacagccatccatctatccgttgatctgttcatctcacaagagcatgcccccatggtgcgcctgttctacctgtgtgt

SEQ ID NO: 902 - DNA, 413 bp, Triticum aestivum
  Clone ID: uC-tsfl189006e06b1
tcgcaaaaccccgattcctgttcgtgtctcctgtcctccccggccgaccccagtagctagcttcgacaatgaacatcttgaaccagcccatcagccccggcggcgcccacgcggccttcccggccgccgccgccgccaaggacggcggcatgccggcgtcgctccgcttcgacgtcggccccagcaccgcccaccgcgccccgaggcggcagacgcagacgctgcttcgggccagcagcagtagctacgtcggcgccgggcacgccgacgaggccgccgtcatcaagagcgcggagcagcagaagggggccgtggtgccgccgttccagccggtgacgctcaacttcctgcgctcgctgctggacagggacagcatgacgtccatcgccgaggagggcggcgagggcgcgggc

SEQ ID NO: 903 - DNA, 192 bp, Triticum aestivum
  Clone ID: uC-tsfl189006e07b1
tcggccatgtttaaacggctggggaaacggctgtggtagactgttttgatgactgatatgaggcgtgatacttgtcttgaaactactgtttgagttactatctgagtcataacctcatggatgatgtaatggatagatgcatcgggcggtggaatagactgtttaatgaattgtgtcgtgaatcatggaatc

SEQ ID NO: 904 - DNA, 454 bp, Triticum aestivum
  Clone ID: uC-tsfl189006e08b1
tcgctcctttttctctcgccgccgccgccgccgccatgtcagggaggaagaagacccgcgagcccaaggaggagaacgtgacgctcggccccgccgtccgcgagggggagcacgtcttcggcgtcgcgcacatcttcgcctccttcaacgacaccttcatccatgtcacggatctgtccgggagggagacgctcgtccgcatcaccggtggcatgaaggtcaaagctgatcgtgatgaatcatccccttatgcagctatgcttgcatctcaagatgttgctgtaagatgtaaggagcttggaattactgctctgcacattaagctccgtgctactggtggaaacaagacaaaaactccaggtcctggtgctcaagctgcgcttagagctcttgcacgttctggcatgaagattggacgcattgaggatgttaccccggtccccactgacagcac

SEQ ID NO: 905 - DNA, 456 bp, Triticum aestivum
  Clone ID: uC-tsfl189006e10b1
tcgcccactcgtccgcccacgcgtccggccagcctcggcacccccgcgccctccaactcctcctccttccgccccaagctcatcaggaacacccccgtccaggccgcgcccgtcgcacccgcattgatggacgccgccgtggagcgcctcaagaccgggttcgagaagttcaagaccgaggtctacgacaagaagcccgatttcttcgagcccctcaaggccggccaggcgcccaagtacatggtgttcgcgtgcgccgactcgcgtgtgtgcccatcggtcaccctgggcctggagcccggcgaggccttcaccatccgcaacatcgccaacatggtcccctcctactgcaagaacaagtacgccggtgttggatcggccatcgaatacgccgtctgtgctctcaaggttgaggtcatcgtggtgattggccacagccgctgcggtggaatcaag

SEQ ID NO: 906 - DNA, 514 bp, Triticum aestivum
  Clone ID: uC-tsfl189006e11b1
cccacgcgtccgcccacgcgtccggccgctactcccctgcctcccccagagctcgttagggttttctcctttttcgggggagaaatctcaagaggcggcaccatgctcgtgtaccaggacaagctttccggcgacgagcttctgtcggattcgttcccgtacagggagctggagaacggcgtgctctgggaagtcgacggccattgggtcgttcaaggagcagttgatgtggacattggagccaatccctctgctgagggtggtggtgatgatgagggtgtcgatgaccaggccgtgaaggtggttgacattgttgacaccttccgtcttcaggagcaacctgcttttgacaagaagcagtttatctctcacatgaagcgctacatcaagaacctctctgccaagcttgaaggggatgacctagatgttttcaagaagaaatgtgagtctgccacaaagtatcttcttagcaagctcaaggaccttcagtttttttgtggcgagagcatgcatg

SEQ ID NO: 907 - DNA, 452 bp, Triticum aestivum
  Clone ID: uC-tsfl189006f02b1
tcggtcctcgtctcctctctcctttccccaacccaaaccaggagcgccctccctcccccagccgtccgccccctccccacccaggaaaccagccatgaagggggccaaatccaagggcgccgtcaaggccgacaccaagttggcggtgaagagcaagggggcggagaagccggccgccaaggggaagaagggcaaggccggcaaggaccccaacaagcccaagagggcgccctccgccttcttcgtcttcatgggcgagctccgcgaggagttcaagcagaagaaccccaagaacaagtccgtcgccgccgtcggcaaagcggacggtgagaggtggaagagcttgagcgaatcggagaaggccccctacgtggccaaggccaacaagctcaagggcgagtacaacaaggccattgccgcctacaacaagggcgagagtgctgctgctgctg

SEQ ID NO: 908 - DNA, 520 bp, Triticum aestivum
  Clone ID: uC-tsfl189006f03b1
acggtggagatcgtcgtcatccgccaaaccagatcggctgcttcttcttcttcttcttcttcaacttcgcagaatcgtcggcggtcgtctcttcctctagttagatccttcgagagcaatgggaggaggcaatgatggtcatgggtacccacccggtggccaggggggataccctccggcagggtacccgccgcagcagggaggttaccctccacagcaaggaggttaccctccacagcaaggatacccgcctgcacctggagcttacccacctgcacctggggcataccctcctgcacctggggcgtaccctcctgcacctggagcgggaggccctgacggggagaaggggctcctctccaacatcatgcatggtgttgccggtgctcatggtggtggtcatggctacccatctggtggccacgggtaccccccgcagcagcatggataccctcagcagggctaccctcctcagcatggctacccaccgcagcagcatggctaccctccacagcagcat

SEQ ID NO: 909 - DNA, 340 bp, Triticum aestivum
  Clone ID: uC-tsfl189006f04b1
gcgagaagaaggctctggtgcccggggtggacctccctctccctgggctccctgggctgcctgggctccctgggctccctggcctgccggggctccctgggctccctcccgttcccaaatccaccgccaccaataagtctccatgatcgtctatggtgtactacgtgctggctaacatgcatggctgaagctcaactacttgtgggtttagacttgcagctagcacgcaccggccggaagaaaatcaccggcgtttcgctcaagcgtctgtaccaactatcctggcgtgtgtacttcctttcagttaaaactatcgtatgtatttcctttcggtccacgt

SEQ ID NO: 910 - DNA, 366 bp, Triticum aestivum
  Clone ID: uC-tsfl189006f05b1
tcgggaattttgaataaattagccaatcaataaatatagttgatttcaaaaaaaaaaaaaaaaaaaaaaaaaaaaaaaaaaaaaaaaaaaaaaaaaaaaaaaaaaaaaaaaaaaaaaaaaaaaaaaaaaaaaaaaaaaaaaaaataaaaaaaaaaaaaaaaaaaaaaaaaaaaaaaaaaaaaaaaattgggggggcccttttaaggaaaaaaaattttccctccctgggtggccaaagaaaaccttttttttagggggaacaaaaaaaaaataacggggcctatttaaaaaaacgggggagcggaaaaaaacctggggtccccaaataaattgcttttggaaaaaaaccttttttcccaagttggg

SEQ ID NO: 911 - DNA, 513 bp, Triticum aestivum
  unsure (1)..(513): unsure at all n locations
  Clone ID: uC-tsfl189006f06b1
cccacgcgtccgcacacacacacacacacagagccgaaacccactcttcgctcaaccgtctcggagcagaggctctcccttcaccttcgtcttcctccctctcggcagttcgacctttgcatggcagcagtggctagctccaaggggcgggtgatcgctgggagcctcgtggcgcgcgtcctcgccggcaaggccaacgcctccccgaggagggcggtgcacgcgtcggcctacgacaagaacgtggacgagcaggtgcgcccggccttcgtgccggacgatgtgatcggcggcgccgggagcccagacaagtactggggccctcacccaaccaccggcgtcttcggccccgccgcggtcgaccccaagctggccgncagcctcgcgccggccagcgccgccaagggcggcccctccgtgctggaccagaaggtgtggttccgcccgctcgaggacgtcgagaagccccccgtccgctgatcgccggcgacgaccagtcgaccatagcccagc

SEQ ID NO: 912 - DNA, 477 bp, Triticum aestivum
  Clone ID: uC-tsfl189006f07b1
tcgagctttttgaaatagatcctgactacacggtgcttgcatttgctgacatgatgaggaagaagatctcgatgcctgcccatctcatgtacgatggtgaggacaacaacctattcgagcacttcagctcggtcgcgcagcggcttggggtctacacggcgaaagactacgccgacatccttgagttcttggtccagaggtggaaagttgcagatctcactggactgtccggtgaaggaagacggtcgcaggactatgtttgcactttggcaacgagattcaggcggctggatgaaagagcgcaggcaagggcgaaacaggggcctgtggttccattcagctgggtctacgaccgtaaagtgcagctctaataaagaggaaggaacacaaggttaatgagactgcatccatcctattatttcgtgtttcgggtcagtgtaggttttcctaatagcagggtagaatgttttatgtgct

SEQ ID NO: 913 - DNA, 461 bp, Triticum aestivum
  Clone ID: uC-tsfl189006f08b1
gctagttggcttcatcgagcgacaatggcctccgaccgcctcagcgccctccgggccttcgacgacaccaaggccggcgtcaagggcctcgtggacgccggcgccaccgccatcccggccattttccaccacccacccgacgccttcgccccgtccactgtcgccaccgacgtcgccgttccaatcgtcgacctctcctgcgagcgctcggccgtggtcggcgcggtgagggccgcggcggagacggtgggcttcttcctgctggcgaaccacggcgtgccggaggcggccatgtcggggatgctggcggcggtgcggcgcttcaacgaggagccggcggaggccaaggcgccgtactacacgcggggcgcggccaggcgcgtgcgctacagctgcaacgcggacctcttccagacgctggtgggcaagtggcgcgacaccgtgtacatggacgacgcgga

SEQ ID NO: 914 - DNA, 463 bp, Triticum aestivum
  Clone ID: uC-tsfl189006f09b1
caaggtgctgtcgccgcaggacgccgcgctgctcatccagatgaactacagggcgcacctcgcccaccgctcccaggtgctccgctgcctgcgcgacctcgccgtcgccaaggccaagctcaaggagctcaggtccctcttctacaacctctcctacaggcgccgcctctcgcacgaccacgaggagcgccagaggttctccgagaagatcattgtcctgctcctcactgtcgatgcgctcgagggacctgacttcatggtgaggacggcgaagaaatctatgctggaggaactggagagcatgctggagattgtggacccgcagccaccagggaagcagaggtcgtttagccgccgcaagttcgatcttccagagggcggagcgattccgaacgagaaaactgcaggcgtgaacaatgctgtcagggtcatcaacactggcaagggcaagcagtaggcacta

SEQ ID NO: 915 - DNA, 484 bp, Triticum aestivum
  Clone ID: uC-tsfl189006f10b1
gcgaactcaagcctcagagaacaccacgcacagcagcaccaccaccgccaccgccaccaccaggaagcgcagtagtcgacgcagctgagccaatggcccgccgcacggccctcatcctcgccgcgctcctcctcgtcgccctggccgtcgcgccgttggccaatgccaagaaggccgccaaggaggagaaggccttcgacgccccctcggccgacgcgccggccgtcgactcacccgcggaggggccctccgatggaccggcggctgcccccgggcctgagggcatcgtcggcctctcgcccgacaacgacgacaacgacgacaagtgaacccgagtgcatgccctttggaaggatccgttcgatgctgatcagatcgtccgcatggattttagtttcgagacaataataatactactacgtataggcctgttgccctgctaggaggatgccgtcgtaattcaaatttttggttttccgtcttt

SEQ ID NO: 916 - DNA, 177 bp, Triticum aestivum
  Clone ID: uC-tsfl189006f11b1
cccactcgtccggtcaccatggttgtgaactctcctccctcccctcttctgctgttgagacagcctgccatttctgttgttgagacagcgtggtgttttggttctacagtatgatattagcaatgagtcgctgtacatattattgtgagttggaagatcatatcatgtggtttctcc

SEQ ID NO: 917 - DNA, 505 bp, Triticum aestivum
  Clone ID: uC-tsfl189006g01b1
tcgcagtttagatgcagatcttcgtcaagaccctgacgggcaagaccatcacgctcgaggtcgagagcagcgacaccatcgacaatgtcaaggccaagatccaggacaaggaggggatcccgccggaccagcagcggctgatcttcgccgggaagcagctggaggacgggcgcacgctggccgactacaacatccagaaggagtcgacgctgcacctcgtgctccgcctccgcgggggcatcatcgagccctcgctccaggccctcgcccgcaagtacaaccaggagaagatgatctgccgcaagtgctacgccaggctgcatccaagggctgtcaactgccgcaagaagaagtgtggccacagcaaccagctgaggcccaagaagaagatcaagaactagagctcgtaaaaccgttattgccgctttcattgtctggataaatctgtagacataaaatgtttctgggtatcaatttgctgctcatgtcaggatgatgaaccttg

SEQ ID NO: 918 - DNA, 260 bp, Triticum aestivum
  Clone ID: uC-tsfl189006g02b1
tcggcgtgtctacccgctgagtttaagcataaaatatcagtgggtgtataatataaatataataaaaaaataacaagttaagctaaaaagattaaaaaatgaaccaacaacatatgcgactgaatggagaccttctttgcccatgaaaatgaaaatttttgcttgctgtaccaaggtgatcggggggtgtggtttataatagtaccatataaactcattgtgctacaacaagaatattgtgtagtgatggtgtaatacac

SEQ ID NO: 919 - DNA, 296 bp, Triticum aestivum
  Clone ID: uC-tsfl189006g04b1
tcgctgctactgaaagtctcacacatcatcacccgcaggccgcaccgccctttagccatgaccgctctcgacttcatgcccgccgagaaggccccccaagccggcaccgtcgccatcgataacaatgccgccggtgccgccgtgccggtgcagcagcagcacaggagactggaggggaaggtggccatcgtcacgggcggggcgcgcgggatcggggaggcgatcgtgcgcgcgttcgtccggcacggcgcgcgcgtggtgatcgccgacatcgacgacgcggccggggaggcgct

SEQ ID NO: 920 - DNA, 237 bp, Triticum aestivum
  Clone ID: uC-tsfl189006g05b1
tcggctgtgggttttccttctccatttatctttcttatttggtcctaagaatatgtgtatgtccatgttcatgtacgaacatggctcgagaaagcatgctcgtatgtgaatgctatcggtggctatgtatatgcacggacgcataatattatacaatatgttgactatatacgttctaatggtaaccagcataacaaacaaatgaaaaagaaccaagagatggaacttaaacatgaa

SEQ ID NO: 921 - DNA, 147 bp, Triticum aestivum
  Clone ID: uC-tsfl189006g06b1
tcgaatcccgtggcttatctttacatccatttcattttgcttgcaagttcatgaaactgtaaactcaattgatggtttgtagcgtgtatatcccctgctgctatggcagcttgaactgcattttgggaacatgacgattccaatatt

SEQ ID NO: 922 - DNA, 132 bp, Triticum aestivum
  Clone ID: uC-tsfl189006g07b1
tcgctggctggccgactgcggtgtgctaccggcgatgagatccaggaggaggtggcggcggacagggagtcgaggacctttttgcttgcattctcgtgtcttttggcaaggagaaaattatcatttggaggg

SEQ ID NO: 923 - DNA, 372 bp, Triticum aestivum
  Clone ID: uC-tsfl189006g08b1
tcggttcttacacattcttattcttatattttcattcttatcctttgcataggtgaagtgcgaatcaaagtccgaagctgtgaagcatatcaacaagtagtagcatattatgtgttgtaattgtaggcagtagtaggcatatctggcttgtagtatactgtaatgattataatagactaatgtattgttgttttggatcaaaaaaaaaaaaaaaaaaaaaaaaaaaaaaaaaaaaaaaaaaaaaaaaaaaaaaaaaaaaaaaaaaatggtcgtctatttaaggggggcgggttttaaaggacttcaaatttacgaacgcgtgcttgctaagggtaacttttttataatggcccgcaaatttatttcactggc

SEQ ID NO: 924 - DNA, 466 bp, Triticum aestivum
  Clone ID: uC-tsfl189006g10b1
tcgcgaacacgagcaccaaggcgatggcgactgctctcaaccgcggcctccgctccgggatccgcctcctcgccaccggcgccgaggcctccaagccagcttcacgtggattccatgctaccggtgtgaagaggatgtcagggcatggccatgatgagccatactacctccacgccaagcacatgtacaacttgcacaggatgaagcatcagaagctgactgcatggacttcggtgctgggagctgtaagcattggtgtcggtgtcccggtcttcgcggtcgtcttccagcaaaagaagacctcctcgggctgagcttacatgccccctccctgggcctacttgttggatctattttgaatttagcattttgtgaagccaaagctgtcacttcaccttactcttgttgtttcgtgttactccatttgctgttagcagatgatctgaatcttaagctcgtttcttta

SEQ ID NO: 925 - DNA, 272 bp, Triticum aestivum
  Clone ID: uC-tsfl189006g11b1
tcgccgctgtcgacctctgaaactgaaagcgccgtcgagaagatctgcgaggtgtgggtgctggtgagcggcgcccgggatgagctccagaggcaggaggagactgtcctgtacaagcgtccactttttttttttttgagataagtacaaacgtccacgtgagcatatgtgactgtctaaggctggtttaagaagtcttgtacatttgttgtatgttttttttaggatcaaacactccattttattcaaacaccacaagtcgttcaatacat

SEQ ID NO: 926 - DNA, 346 bp, Triticum aestivum
  Clone ID: uC-tsfl189006g12b1
tcgagtaaatatgccaccggagatgaagtccaaatggcagatgtgtttttggcgccccagatccacgctggtgtgacacgcttccaaatcgatatgtcaaagtaccctattttggcaaggcttcaagatgcttacaatgagcatcctgcatttcaagccgcacttcctgcgaaccaaccagatgctcctccatcccagtgaagtaatcaggaccttgatgactgtaagatttttcatgtttgatcgagattctatgatgtaacttcaaagtcagatgttcatgtaagcaaagacccctggatgagcttgacgatgttgctgtaaaagtgaataaatgcaatttatc

SEQ ID NO: 927 - DNA, 410 bp, Triticum aestivum
  Clone ID: uC-tsfl189006h01b1
tcggtcccagaaggctgtgtgatcatcagagaacacgtccctatctcgaacctcttcacatgtctttggttcaatgaagttgaccgtttcaccgccagggatcaaattagcttcagcaccgtccgggacaaaataagggctaaagtcggctggatgccccagatgttcctggactgcgaaaggcgcaactttgttgtccaggcataccacagggagctgctagagcagatgattgcgtccggcaggaacacgcctccgatcgcggtcgaaccatctcggaaaatcagaccaggtagcagcaggagagctcccccgtcgaagaagcctgtcgtgaggcggaaaaaggagaagaaatcgagctcgcggaggcgggccgcgaagccggttacctgggcgatggatgctgggtg

SEQ ID NO: 928 - DNA, 263 bp, Triticum aestivum
  Clone ID: uC-tsfl189006h02b1
tcgggctattgtgcggagatcgtggggcggctgggctagatcgctgcgcggtacgaggcgatggaccggcgggcgccgtgggaggcactaatgagaaagccgcacgcgggtagctgagaccacgcagcgtacgcggcggcaagggaagcaagactaacgggcgcagggctcgcggagagcgaagtgcgccaatggaggcggtcgttaccgacgcacttaacggactgtcatcactgcagtggccaacggcaccgagactactc

SEQ ID NO: 929 - DNA, 245 bp, Triticum aestivum
  Clone ID: uC-tsfl189006h04b1
tcgaaatttataaaaaaaaaaaaaaaaaaaaaaaaaaaaaaaaaaaaaaaaaaaaaaaaaaaaataaaaaataatttaagagagaaaaaaataaataaaagtttgttgtcacgtaaaattatttttattgaggtgtctttagtgttgcaacttattaactggtttgtcctgtgtttatgcaaaattatttgggtggcgtcttttattactttttttatttaatttggtttatataacatttttaa

SEQ ID NO: 930 - DNA, 374 bp, Triticum aestivum
  Clone ID: uC-tsfl189006h05b1
tcgagacatctctgaaggaatcagagaggatagagaaggagattgctgaattgaaagagatgaagaaaaagatcagcacaatgacagcagacgagtactttgcgaagcaccctgaactcaagaagaagtttgatgatgagatccgtaacgattactggggatactagataacggcgaaagtccaagttcttttactagaacattcaataatacttatttgtccctctggaatctcatcatccatacttgggtgaattccataacatgtggactgggcttgttgaaattccaacataactcttatctttgtgctttctgttggacctcatcattttaagggttgccagcttatttcaatgaaattttgtctcttt

SEQ ID NO: 931 - DNA, 275 bp, Triticum aestivum
  Clone ID: uC-tsfl189006h06b1
gagatcttctccactcctattctaatcaacccctcgccgccgccgccgccgcagatcgcaccaccgaccgaccgaagcgatggccgcctccaccgtcgcgtacagggccgtggccgtcctcgccgtcctgtcggtcgccgccctctccgtcgtctccgcgcaggaggccccggcgccgagccccgtgtcggccgccggcgcagcggcgccgtccctcgccgcagcgctcgtcgcctccggcgccggcttcctcttcgccgccgtccgccactgaa

SEQ ID NO: 932 - DNA, 460 bp, Triticum aestivum
  unsure (1)..(460): unsure at all n locations
  Clone ID: uC-tsfl189006h07b1
tcgcacacattcgcggccgagggagcgagcagcgccggccgccccgcggcaccgccggttgctctcgcctcccgctccgcagcaccgccggtagctctcgcctcccgctccgaggcaccgccggtagctctcgcctcacgtcccgcggaaccgccggtagctctcgcctcccgctgatacaatggccaacgccgcggtcgaccccgagcgcaaaaggtcgcggttgacgtcgtccatgtcgtccatgtcgtccgtggacaccattctccgtctcccgccctcgccgctgttgacgtccccgacgcgcgccccggcgggacacgcgctggaggagcctcccgcgcggcacaggccggcgcggagatccaagcccgtgaggattttccagagcatgttccggtctctgccggtcgtgacggtgccgcgctgcggngggattctgacgccagccccgaccggc

SEQ ID NO: 933 - DNA, 374 bp, Triticum aestivum
  Clone ID: uC-tsfl189006h08b1
tcgtgacgcgtacgtccgcatcatcggattcgacaacatgcgccaggtgcagtgcgtcagcttcatcgccttcaagccaccgggctgcgaggagtccggcaaggcctaaacagctcactcaccacgggccacatataaagtgccattgcggttttgtcaactctgacattgctttgggttttccttctccatttatctttcttgtttgttcctaagaatatgtgtatgtccatgttcatgtaccaacatgtctcgagaaagcatgctcgtatgtgaatgcaatcggtggctatgtatatgcacatgcacataatatatttatacaatctgtcgactatgtattcgggtaattaataatgagaaacatctttggc

SEQ ID NO: 934 - DNA, 479 bp, Triticum aestivum
  unsure (1)..(479): unsure at all n locations
  Clone ID: uC-tsfl189006h09b1
agcaaagccagaagcaccacaacctcgtattctagatttccagatagacagggtcagattaaccagacgatgatgcaggctgccgttgcttcgtcggccgtgctgcctgtcgccgtaaggggtaggccggcggcgaggaggaggagcgccaccgttgccggtggcagaaggattgtgggtgccggcgtccgggcatcggccgcggcggcgccggaggcggactacagctccaacgtctcggtgttccccatggaggcctgcgacctggtcggcggcgaggcgtgcgacgcgcagatgtacccggagacgaagctcggcgccggcaccggcggccccgctgccgctgtcgcaagggcgccggaggtggagagggagtacctagcctacgacgagccaaaaacggtgttcccagacgaggcgtgcgacgatcttgggggcgagttctgcgaggcaccctaccaaaccagcangtaactaac

SEQ ID NO: 935 - DNA, 342 bp, Triticum aestivum
  unsure (1)..(342): unsure at all n locations
  Clone ID: uC-tsfl189006h10b1
tcgctcccttctccacggataaattgcttgatgtgttcaatggtccggttgaattggatacaagcatgctacaaatcaaatagttatttgataaggcatttgatgagctcctgtaattctaatctacttcccacattttacagctgatgttatttagtaatctgtagtgagcctaagaaatagtactatggggagaagcaggcaacacgtaatatgtgtgtcatttgagaaaaatgaaacttccaactttccaactgttcattgcatattacatgtaaaagacactatcttagacaaatagatgattcaccaggttcaatgaaagttagcttnnntnnnnna

SEQ ID NO: 936 - DNA, 61 bp, Triticum aestivum
  Clone ID: uC-tsfl189006h11b1
tcgcggacgcgtgggcggacgcgtgggcggacgcgtgggcggacgcgtgggcggacgcgtg

SEQ ID NO: 937 - DNA, 405 bp, Triticum aestivum
  Clone ID: uC-tsfl189006h12b1
cacccattcactcgcggcggcggcggcggttgttgaccatgtcggcagggagcgagcgctcgaacgccgcctacgcgaccccggcggccgtcctggcggacttctcgcgcggatccggcccgtccgtctccggcggcgccgcgggtaccggcaccggcagcgggaggagccaggcggagggcggggcgaggaagaagccccctctccgcctcgcggcggacgacaccaagcccgtgctccgcgacccgatctcgcggtccgaccccatggagaccgagcaggccgtgctgcggctgccgcccttcccctgacgccttgacgatgacgcaccagcggctctttggggggaggaagctgctggaggttgatcttgacttgatcgtagccaagatggtggagctgggg

SEQ ID NO: 938 - DNA, 500 bp, Triticum aestivum
  Clone ID: uC-tsfl189007a01b1
agaagatgcagcatgtcgatccatcaatagcagctagctattactaactagcaaaacaaatttacaaaggtcgatcaatgaccaagatgcacggccattacgtcgccgtcgccgccaccacctgttccaccacaaggagggcgaggacttccagcccgccgctgacggcggcgtcgacacgtacgggtactcgaccgagacggtggtgaccgccaccggcaacgacggcgagtacgagcggatcaccaaggaggagaagcaccacaagcacaaggagcacctcggcgagatgggcgcagccgcggccggagccttcgccctctacgagaagcacgaggcgaagaaggacccggagcacgcgcacaagcacaagatcgaggaggagggggctgccgccgcagccgtcggcgccggcggcttcgtcttccacgagcaccacgagaagaagcaggaccactaggaggccaaggaggccagcggcgagaagaagcaccaccact

SEQ ID NO: 939 - DNA, 524 bp, Triticum aestivum
  unsure (1)..(524): unsure at all n locations
  Clone ID: uC-tsfl189007a03b1
cccacgcgtccgcccacgcgtccgcccacgcgtccggctgggcgccgcggacgcgcactacgcgagcagcttcagggggagctgcgacgaaaaggtggcggctgtgcggccggtgccgttctccgaggacgcggtggtcttcgaactgcgcgacggccggttggcggagctgcggcgtgcggcggagggtcgcggcgggtgggagtgggcgcggatcatcggcacgcccgccagcgcctgcatgacaagctactggacggccgtcgccacgtagccggcggcgccggtgggaaggaagcgggcggaagcgcggagctggaactctatttcaacggcatacgcgcaagatacgagttgaatgctcaactactttacctacctgattagtcgtggctaacgtacaccttgttataaaaaaaacagaggctacctatgtagtacaaagcacaatagtacgtgatcaagttttcttgtacatctctagcggatcccgtanaccgggccatccgacaaaataactagga

SEQ ID NO: 940 - DNA, 539 bp, Triticum aestivum
  Clone ID: uC-tsfl189007b01b1
ccaaccacttacttagctagctagcagccatggccgccctctcctctgcagcggtgtccgtcccttccttcgccgccaaggctgccacccccatgcgcagcagcaggatggtggtgcgcgcctccctgggcaagaaggcggcgagcgccgcggtcgccgtggcggccagcgcgatgctgctgggcgggtcggcgatggcgcaggacgtgctcctgggcgccaacggcggcgtgctggtgttcgagcccaacgaattcagcgtcaagtccggcgagaccatcaccttcaagaacaacgccgggttcccgcacaacgtggtgttcgacgaggacgccgtgccgtccggcgtggacgtctccaagatctcccaggaggagtacctcaacgccccaggcgagaccttctcagtcacgctcaccgtccccggcacctacggcttctactgcgagccgcaccgccgggccggcatggtcggaaaggtcaccgtcaactaagctatcttctagtagctccctgtcctgtccttgagaaattgggtc

SEQ ID NO: 941 - DNA, 450 bp, Triticum aestivum
  Clone ID: uC-tsfl189007b02b1
gcggccacgtgtccgtcgggcacgggcgtgtgggcaagcaccgcaagcatcccggaggccgcggtaacgccggaggcatgcaccaccaccgcatcctcttcgacaagtaccatcccggctacttcggcaaggtcggtatgcgctacttccacaagctcagcaacaggttctacacaccgacggtcaacgtcgagaggctctggtccatggttccgtccgacaaggcggcggaggccggcggcgacaaggcccccgtggtcgacgtctcgcagttcggctacttcaaggtgctcggcaaggggatgctgccggagaagcccatcgtcgtcaaggccaagctcatctccaagatcgccgaaaagaagatcaaggccgccggcggcgcagtcgtgctcgttgcctagggttctgttcccgaccgtgccccgagatctatatctgaactattag

SEQ ID NO: 942 - DNA, 436 bp, Triticum aestivum
  Clone ID: uC-tsfl189007c02b1
caggtgtatcaagattgccgcttatggccactttggccgtgaggatgctgacttcacctgggaggttgtgaagcccctcaagtttgacaaggcctctgcttgagaggtgggtatgaaggagtctaatcattcctgctgctgccgctggtggttgtatcttggataattgaattccttctctttagaaggaagcagggtttcaacatcgccgtggacacgctgaattggcatctagtgattggtattttggtatggcatacaaaaatatgtgctgagttaatactagtcgggtcttttgatgtcttctgtgctttctttttgctttttgagtctactgaaaccgcagtacttgtgcggtttcctctatcggtcgtccagctattttttagtactgcatctgtaaaaccatatgtgatcctagtaccctgttcattcc

SEQ ID NO: 943 - DNA, 516 bp, Triticum aestivum
  Clone ID: uC-tsfl189007c03b1
cccactcgtccgggttctagagtagcaaatacaaaagccatagccatggcgaaactcatgtgcttatgtttcatcatcctcactattgcggtagtcgtgtcggctgacgaatgtgagggtgaccgacaggaaatgatcaagcagtgtgcaaagtatcaacaatggccagcaaatccaaaggtaaatccgtcggacgcatgttgcgccctgtggcaaaaggcaaacatgccatgcctttgcgctggtgtcaccaaggagaaagagaagatatggcgtatggacacggttgcctacgttgccaatttctgcaagaagccgttcccacatggctacaagtgcggaagttacacattccctcctctggcgtagtgactctagtttacccgcgggaggagaagtgttggctattaaattccatgtgcctagcctcaaaatacctttcctttcagatctgtagtgaagctgtgctcagaacagattatgtctagcactttgtatgagaacgtttatgaaact

SEQ ID NO: 944 - DNA, 384 bp, Triticum aestivum
  unsure (1)..(384): unsure at all n locations
  Clone ID: uC-tsfl189007d01b1
cccacttgtcncgttttaaaaaaagaaaaaaaataactagagaaaaattagaggagataaaatctaaaatacctgaaaaaagggcaggggttggtttccgagctgaccgtctgaattgttcgtctaggcatgatccgtgtcgtatgtttgggtgattgagaatgcaggctcatatgcttcgcttcggggggtgtgtgtgccacattttaatctgtcatttgcgctcctgggacacgatgtgtgttttggggacttccccaatatgagacatgtggcaggtgcaatcgcctgacttgctaggcaaactctgctcttgccgggagcgcttccctgggcgggcttttctctttttttttaagtgtcgaagttcaaaagggccccccc

SEQ ID NO: 945 - DNA, 502 bp, Triticum aestivum
  Clone ID: uC-tsfl189007e01b1
tcggccggttgtcgtgggctcgcgcatcggcggcctcctgagccggggcgtcaacgggtacgacatcaactacgtcgtcgacggcaggggcctgcgcccggtagcggtcgtccgggacggcgcgtccggcagggcgatggagctgtgggcggaccagcccggggtgcagttctacacggccaacgggctcagcggggtgagggggaagggtggcaaggtctacggccactacggcgcgctctgcctggagacgcaggggttccccgacgccgtgaaccgcccgagcttcccgtcgcagatcgttcggccggggaaggtgtacaagcatgacatggtgttcaagttctccttctagtaactactagctggtggtatccaaggtcccgtggttggtcgtttgtcaggcaacacagccactcttgtgtttggtgtactggtgtgaattgatcggctgagcttcaaggggaggaataaaagcatgttgctggttcaaggttttttc

SEQ ID NO: 946 - DNA, 529 bp, Triticum aestivum
  unsure (1)..(529): unsure at all n locations
  Clone ID: uC-tsfl189007e03b1
tcgcccactttttcggctggcggcgctgttcgccggcgcgatggccgtgaaagtgaagttgacggtgcagaaggggtccgacaaaaagaagctggcgctgaagatcgactacacaaggccaaacgacagcctgtcagaggtggagctccggcagcacggctcagaggagtggcagcccttgaccaagaagggcgacgtgtgggaggtctcgtgctccaagccgctggttggccccttcaacttccgcttcttgtccaagaatggcatgaagaacgtcttcgacgaggtcttctccaccgatttcaagatcggcaaaacctaccaaccggaatattgatccacaccggcactgcacaccggccaagtttcagttgatcaaaatcgtcctaattaattaacacccatgtatgagtcgcgtaggaaatatgtgcctgcatgagtggatagctagtgaataaatttaatttttgatgcacatagatatggtaggagaagcaacaacnggatgtgttgctcttccatgcatgca

SEQ ID NO: 947 - DNA, 417 bp, Triticum aestivum
  Clone ID: uC-tsfl189007f01b1
tcgcagagttatagcacatctcctcgtgaggaattaggagggaagatggcgtcgccaatccaagctcgtctgcgcctgggcagcatctccacgccatgggacggatgatggccgtcgccaacgccggccgccgtgccgtcgagctgcatcaggagaagcgacgtctgagccgccgtcgtgccaatggtgtggcggagagaactgcgctccgcatgcgcgttggccgaatatgatgccggcctgcgtggcggaccgtggtgctcctacggagggaggagcgatgctgacgctatgtggtcgtcgtcgttgtacacagccgtgcctgcggaagccgtgggtgccgcctcaacacatccgcatgcagggagaaaaggtatgaggagatgggacaaacggacgatgtacaggatccaagct

SEQ ID NO: 948 - DNA, 478 bp, Triticum aestivum
  Clone ID: uC-tsfl189007f02b1
tcgcagctttttgcgctaaagactgacgaagaaagaaaggaatttattgcttctcttcacaagaggaaaacagaattgtttatggccctaattgagaagaagttgcttcctctccgtccaggtgttcaaaggttaattgatgaagctctaggaaaaggggtgaaagttgcagtatgcagtacttcaaacgagaaagctgtttcagcaatagtatcgtgcttactggggcccgaccgagcagaaaagattaccatatttgctggggatgtggttcctcgcaaaaaacctgatccggcaatctacttgctagcagcaactacattggaagttgatccatctagctgtgttgttgttgaagacagtaacatagggctttcagcggccaaagctgctggtatgaagtgcattgtaacaaaaagcgggtacaccgccgacgaggacttcgtgatagcggacgccgtgttcgattgcatcggcg

SEQ ID NO: 949 - DNA, 100 bp, Triticum aestivum
  Clone ID: uC-tsfl189007f03b1
tcggcagaattcaaaatgtgtactcccactattgccaaatgcagtacatgtaagaacattacgatgtattttcagacgaacacggttttgttccactctc

SEQ ID NO: 950 - DNA, 56 bp, Triticum aestivum
  Clone ID: uC-tsfl189007g01b1
tcgatttgtatatgtttgtgcgggagtaaattaaaattacttgttcatttcctggc

SEQ ID NO: 951 - DNA, 428 bp, Triticum aestivum
  Clone ID: uC-tsfl189007g02b1
tcggatggttcaaaccatggcgtccatgaccggcctgtcgcagggcgtgcgtctcccaggcccggccggcaggcgcgccagcaggttcaccgtgagggcgtcgtcggcggaggccgaggccgccggccgccgcgcggtccttggcctcatggccagcggagtcgtcgggagcgcgttcgctcaggtggtgcacgccggcaccgtcgcggccatcaaggttggccccccgccgccgctctccggtggactccccggaacggacaactcggacgaggcaagggacttcgacctgcccctgaagaaccggttctacctgcagccgctgccaccggcggaggcggcggtgcgggccaaggagtcggcccaggacatcctcaacctcaagccgctcatcgacaagaagcaatggccgtacgtcatgaacgacc

SEQ ID NO: 952 - DNA, 504 bp, Triticum aestivum
  unsure (1)..(504): unsure at all n locations
  Clone ID: uC-tsfl189007g03b1
tcgcccactcgtccgactagccactagaagcactaaagaagcagagggtgtcaagcatggcgtccaagggtcttcttgtgtttgctctcctgcttgctgcatctatcctcgtcgcctcaactgaacaaactcaggccaagaaggaggagaagaaagccggcgtagagggctaccctggaggcggcgggggaggctacccagaccacgctggaggaggaggaggcggcggctaccctggacacggtggaggaggaggaggcggcggctaccctggacacggtggaggaggtggcggcggctaccctggacacggtggaggaggaggcggtgggtacccgggtcacggtggaggaggcggcggcggctacccgggccacggtggtggcggcggtggcggctacccaggcggtggcggcggcggctaccccggacatggcggtggcggcggcggtggctaccccggacaccgctgangcggaggccgcagtggatgtcactggggct

SEQ ID NO: 953 - DNA, 317 bp, Triticum aestivum
  Clone ID: uC-tsfl189007h01b1
tcggattgagcagaggaggcaatttcttcctctgcgacatcaacggcgtggagatctttatcagctggtagatgtccaggggtcgggttccaagtagactgcctgaattgctcgggtaggcatgatccatgaagcaagaatcgctgattgagaaggcaggctcatatgctttgattcgtgagatgtatgtgccacatcttcatctgtaatttgcactcctggcacatgatgtgtgaaaaggggacaaaaccaataagagacatgtaacatgtacaattgcctgagttgcgaaataatcaaaccccttggcgggaaca

SEQ ID NO: 954 - DNA, 547 bp, Triticum aestivum
  unsure (1)..(547): unsure at all n locations
  Clone ID: uC-tsfl189007h02b1
tcgcccacgcgtccgcccacgcgtccgcccacgcgtccgtacggccggaggagggctacggctccggatacgggtccaagccgcaggtggagcagacctacggcggatccgagtatggctctgggtacggaaggaagccgcaggtggaggagagctatgggtcggggtacggaagcaggccccagggagggggagaggagtacggtagcgctgggtatggcgggaggaagactgaggaggagggctatggtggttctgggtatggatctggcaggaaggtgcaaggcgaggatgaaggtgcctatgggtctggtgggtaccagaagcccaagccgtatggagaggagacccagggttcatatggtggtgggtatggccagnggaactatggccgcatgaagcaggatgacgactctgatgatgagaagaagaaccgttacgcgaagcgcgatgactctgatgatgagaagaaggaacgtacgagaagcccaccaccattcgcggcacactacgatgactaagcatcagcatggtcttgacctgtgca

SEQ ID NO: 955 - DNA, 271 bp, Triticum aestivum
  Clone ID: uC-tsfl189008a10b1
cttttcctcctttttagacctcggttcccggcccggttcggttaagtagggtatagaactggggaacaggaggaagaatggcggacgaagagtaccgctgattactcggttagcttgcatgcattagtcagtcatgttgattgcagaacggcgctccctttgacgccgctggtttttaatggcggaatttgctatgtttgtgggcaatgcaagctcctgattgcactgtgtcttatacttgttcagccctaatgatgctctggaccgaggg

SEQ ID NO: 956 - DNA, 491 bp, Triticum aestivum
  Clone ID: uC-tsfl189008a12b1
ctttgagatcttctccgaggccgtggacatcgagagggagttcgtctgcgacgcgctgccctgcgcgctcgtcggcatgaacggcgacctgatgagccagtacatcgagttcgtcgccgaccgcctgctcatggcgctgggctgcaagaagctgtacaacgccaccaacccgttcgactggatggagctcatctccctgcagggcaagaccaacttcttcgagaagcgcgtgggcgagtaccagaaggcgtccgtcatgtccaacctcaacggcggcgccgcgacccagcacgtcttcagcatcgacgaggacttctgatcagtccgatgataatatgcaatctccattaccaatggctcgctcgctcgctcgccccccgcgtttggttgctccttagtactagtagtagtagcggtgatacatgtgtgctgggtgctccacaatgtttttatttactggtatttcgctggctcttattggtgatgtactg

SEQ ID NO: 957 - DNA, 514 bp, Triticum aestivum
  unsure (1)..(514): unsure at all n locations
  Clone ID: uC-tsfl189008b11b1
caacgcgcgatcacacacaaacccaagcacatagtaacatcacagatcggcatggcgcacttccaggaggtggactactgctcggaggaggtgagggcggtgggcaacccggcccgccgcggctgcggcggcgtgcaggagcacatcgtcagggagacgttcgtgcaggagttcgacaccgccggccgccgccacggccaccacggccgcggctccggccacttcgaggtgcgcgagagcaggctcgaggaggacgtcaacacccgcaccggcgagttccacgagcgcaaggagaacttcgtcgtcagggccgatgactgagcttacacgtaacggagcacactaccatgtgtgtatatgtcagcagcatatgtatgtgtgatgttgcgcacagtcgtatagcgtatgcatgcgtgcgtgcttggcggncatcagcccctatcgcgcgcgcgtgcagcgcttaaataagcgctctaatcgtgaaccagaataaagcttctcgtgatattattnc

SEQ ID NO: 958 - DNA, 372 bp, Triticum aestivum
  Clone ID: uC-tsfl189008b12b1
cttaaactcctaactgatgacgctatcctgacccagctcaaggacggatttgctgaggggaaggatctggcgctgacggtcatgtcggccatgggggaggagcagatctgcgcagtcaaggacgtgggccccaggtaacttcctcggagcgagggccaagataaacggagggatccattatctgtcaaatttaagctaaagaaagacaaaagtattaaagaaggaatgctatcgagtgagacattcacctaagccggagtcaagtgcagtgattgctgggtgtagcatatctgcttacctctacctatcatccgtgacatttgggacccttgtaatatttcctatggttttatatatgtgcttggtgtcaat

SEQ ID NO: 959 - DNA, 476 bp, Triticum aestivum
  Clone ID: uC-tsfl189008c10b1
gctttcatggcgtgcgccttctccgcctccaccgtgtccacggccgccgcgctcgtcgcgtccccgaagccagccggggcgccgcagtgcctatcgtttccccgcgccgccgccaggccctcccgcctcgccgccgccggctcgaggacggccagggcccgcagcttcgtcgcccgcgccgcagccgagtacgacctgccgctggtggggaacaaggcgccggacttcgcggcggaggccgtgttcgaccaggagttcatccacgtcaagctatctgattacattgggaagaagtatgtgattcttttcttctaccctctggacttcaccttcgtctgcccaactgagattacggctttcagcgacagacatgaggagtttgagaagataaacactgaaattcttggtgtttcagttgatagtgtgttttcccatcttgcatgggtgcagacagagaggaaatctggtggacttgg

SEQ ID NO: 960 - DNA, 298 bp, Triticum aestivum
  Clone ID: uC-tsfl189008d10b1
tttttataaacaaaaaaaaaaaaaaaaaaaaaaaggaaaatattataaagaaaaaataaaaaggaacgacccgaaaaaagggggccgggtttcttgcggggtcaccgaaccttagcgcgctggcgcttgggttaccaaccttttgtcggggggccccctgacttacaccgcggtcactgggaacaccctgattcccctaatttcggggtttccacacttatctggttgggacccatggcccttttcccaggggcgcgttctgaccgccgttccgtacgccccccttttctgaacgtta

SEQ ID NO: 961 - DNA, 466 bp, Triticum aestivum
  Clone ID: uC-tsfl189008d11b1
cggtgagttccccggcgactacgggtgggacaccgcggggctgtcggccgaccccgagaccttcgccaagaaccgggagctggaggtgatccactgccggtgggccatgctgggcgcgctcggctgcgtcttccccgagctgctcgcccgcaacggcgtcaagttcggcgaggccgtgtggttcaaggccggctcccagatcttcagcgagggcggcctcgactacctcggcaaccccagcctggtccacgcgcagagcatcctcgccatctgggcctgccaggtcgtgctcatgggcgccgtcgaggggtaccgcgtcgccggcggcccgctcggcgagatcgtcgacccgctctaccccggcggcagcttcgaccccctgggccttgccgacgaccctgaggcgttcgcggagctcaaggtgaaggagatcaagaacggccgcctcgccatgttcttcatgttc

SEQ ID NO: 962 - DNA, 478 bp, Triticum aestivum
  Clone ID: uC-tsfl189008d12b1
ccttaactcaatgacatactagtagcactcaagacagcaggagttaatctttattgtgggcctgttgcgcataaagtattgggctacccaaaagcagattcattacatctggagtacagttctatggcttgcacagttgagatagttgatgatgtacaatcagcaattgaccatatacatcgctatggaagtgcacatacagactgtgtggtcactacagatgataaagtagcagagacctttctacgtcaagttgatagtgctgccgtattatacaacgcgagtacaagattctccgatggtgctcgttttggactcggtgctgaggttggcataagtacaggccgtatacatgcacgtggacctgtgggtgttgaaggtcttttaactacacgatggctcttacgagggaaagggcaagtggtgaatggtgacaaggatgttgagtacacccataagagcctttctttgcaatgag

SEQ ID NO: 963 - DNA, 315 bp, Triticum aestivum
  Clone ID: uC-tsfl189008e10b1
cttttgtttcagaggctgaaataagaacggccgagaaagctgaaaaggaagcaagggatctgaaaggcacaatgaggaagaggatggagttcctagacttcgattagcgtccatccattagtcagtcatgttgattgatagttggtgctccctttgtggccgctggtttttaatggcggcatttgctatgtttgtgggcaatggaagctcctgattgcactgtgtcttatacttgttcagccctaatgatgctctggaccgaggggctcttcctcagtagcaatgtaccagccctgtattcttatcttctgttgc

SEQ ID NO: 964 - DNA, 470 bp, Triticum aestivum
  Clone ID: uC-tsfl189008e12b1
cattgccacgaccagcgggagcacgccggcgggaggggggtggacatggacctgccggcgacgtatgtcaacatgggctccatcgccaccgcgggcgttctcgactggaggtaccagaaggcgacaggggagaagaggccggacaaggtgaccggattgatcagcgcggagcaggccaaggaggccgagcgcagggaggccgaggagcgcaaggcggaggaggaggagggcggggccgcctgggccaagaacaagcacgtgtatcagttctgatcgatcgccgccgggcgccgcgcccggccgtgcatctcgcggcagatggtgttctgaacggaaaaagttcgcgagagatgatggtgtgcatgtatccaccgctcaccgtcacttggagattcgtgctacgttttcttgttttgtaaaagcttgtcttgttcagagtgttgcatgatgtttctctttttaaaaatatc

SEQ ID NO: 965 - DNA, 513 bp, Triticum aestivum
  Clone ID: uC-tsfl189008f10b1
gttcaagaagttctcttccgaggacatatccgggcagaatcaggtcaaggcgtctgtgcagcggaggatccggcaaagcatcgccgaggagtaccctctcctcgaaccattgctggaggacatgcttccgaagaagtcgccgatgattgttgttaaatgccaaaatcatctcaatcttgtggtggtgaacaatgtcccactcttcttcaacatccgcgatggtccatacatgccaaccctgcgccttcttcatcagtatcctaacatcatgaagaagttccaagtggacagaggtgctatcaagtttgttctctctggtgccaacataatgtgccctggactcacatcgcctggtggtgtgttggacaatgaagtcgaggaggaaacgccagtggctataatggctgaaggcaagcaacacgcattggcgattggattcacaaagatgtcagcgaaagacataagcaccatcaacaaaggaattggagttgacaacatgcactatttgaatga

SEQ ID NO: 966 - DNA, 118 bp, Triticum aestivum
  Clone ID: uC-tsfl189008f11b1
tttttcggtttccaccgaccacccgcgccgggagagcatgatcgatcagtcagactcgctggcgcgcgcgggtgtcctgttctggataggggagggccagctgaaagaagaatccgcc

SEQ ID NO: 967 - DNA, 400 bp, Triticum aestivum
  Clone ID: uC-tsfl189008f12b1
cttacgcgtgggcggggaggtcccgcgggttcggcttcgtcacgttcggcagcgaggagtcgatgcgccaggccatcgaggagatgaacggcaaggagctcgacgggcgcaacatcaccgtcaacgaggcccagtcccgccgctcgggcggagggggcggcggcggcggcggctacagcggccagcgcgtcggtggcggaggctacggcggaggaggacgctacggtggccgcggcagctaccgatgcgagcggaggctactgatgtagtggcggctacggcggccagcccggcggcggccagcggccactccggcggtcagtggaggaactgagactagaatttcccagttatcgactatttacccgtgcgtcgctatcgacgcatggttcttcagcaa

SEQ ID NO: 968 - DNA, 373 bp, Triticum aestivum
  Clone ID: uC-tsfl189008g12b1
cccacgcgtccgcccacgcgtccgcccacgcgtccgcccacgcgtccggggaaggggccgttcgagaacctgcagcagcacctggccgacccatggcacaacaccatcatccagaccatctccggccaataaatccgtcgatttcaccgaccggggaggtttcaggcggtctgaattgttattttggggtgctgaggatgtacaaagtgtggaggagtaggtggacagtgcaaaaatgtgttgtaatcttaaagctccggtggtgaaactttgttcttgtggattcgcccatggcttctaatggaggctgtacttgtaatatcacccatgcgtgttattttaaacatggcaaaacatactactagtttgaagc

SEQ ID NO: 969 - DNA, 520 bp, Triticum aestivum
  Clone ID: uC-tsfl189008h10b1
ttttcggcatcccccaggcaccgccggggtcgggctcgtaccgtgcgccgtcggcggcacggccatccgggagtgggcccgcggggagcacctgtacgagcagatggtgcggcgcgcgcgcgccgcgaccgagtgcggcgagatcgaggccgtgttgtggtaccagggggagagcgatgcagagtccgatgccgaaacggcggcgtaccaggggaacgtggagaggctgatagcaaatatcagggcagatcttgggatgccgcatctaccattcattcaggttgctctcgcatctgggaataaaaggaacattgaaaaagtgagggaggctcagcttagcattaacttgctgaatgttgtaactgtggatgcaattggtctgcccttgaacgaagataatctgcatcttaccactgaagcacacgtaaagcttggagaaagttttgcacaaacctacatcagtaactttttacaagcaacccgctatgagacccggaaatgttatgatagggcttgtcca

SEQ ID NO: 970 - DNA, 495 bp, Triticum aestivum
  Clone ID: uC-tsfl189008h11b1
ttttacggggtttcactcgcattcattctcaacgttagcaggagcgagtgggagtacggccatggcgccgtatcatcccacgtcagggctcttcgtgggcatcaacaagggccacgtcgtcaccaagcgcgagctgccgtctcgaccgtacgaccgtaaggggaaaggtacaaagagggtgcattttgacaggaacttgatcagggagggtgctggatttgctccctatgagaagcgtatcactgagcttcttaaggctgggaaggacaagcgtgcactcaaggtcggcaagagaaagcttggttctcacaagagagctaagcagaagagagaggagatgtcaagtgtccttaggaagatgaggtctgctggtggcggcgctggtgacaagaagaaatagaactgggctagctggtgaattttatccggaagcaaagacctgtattaccagtccgtacctatagagctattgccattgagttgacactatcttta

SEQ ID NO: 971 - DNA, 133 bp, Triticum aestivum
  unsure (1)..(133): unsure at all n locations
  Clone ID: uC-tsfl189008h12b1
aatgacttgagaggtgtaggataagtaggagcctttggattgctaaaacttgtttaagtatatggttagggagcatttgcgtgattggagatgtgtgtttttcgatttgtctatttgtaccgcactgttngcg

SEQ ID NO: 972 - DNA, 490 bp, Triticum aestivum
  unsure (1)..(490): unsure at all n locations
  Clone ID: uC-tsfl189009a02b1
cccacgcgttttgttttttgctggaaccgggacacggatagctgctaccagcgatttttttgcttcaacggagatgagacccagagagtttttttgctggaatgaaatttcttcatgaggtgcggtggcgaggcatttttttttgtgctgtaatttgtgctttttgctggaaccatgttttgattttgctacaacgagcatttgattttgctggaaccgcctgaagcagatttgggaccagtttttttagtaactgatttttgctgcaaccatccaaccggcgagcgggcccggccggtgagctgctccggcgagcggcgacggcgagccggtgagcgggtccggcgagccggcgagcagcggccaccgagctgcaatcgtcgctacatggagctagaaccgcagggtcacgttgctggcgcgaaacgcaggaggcgacgtcggcgaccggtgacgacgacngcgacgggcggcgagggcagcgacaggg

SEQ ID NO: 973 - DNA, 230 bp, Triticum aestivum
  Clone ID: uC-tsfl189009a03b1
cccacgcgtcctcccacgcgtccggagaggctgacgcctcgttggtcgtgttgttccactctgtggttgtatttgcttgtctgtaacatgatggatgaactgggctctgcataagagaggagggtgcttgctgttgctgcctctgccctcccttattgaatcatgttgtatctgaacttcagattcagaagcctgtaataattgtcatgttgtaatgctgttgctgcctc

SEQ ID NO: 974 - DNA, 623 bp, Triticum aestivum
  Clone ID: uC-tsfl189009a04b1
gttttaaaaataataaaaaaaaaaaaaaaaaaaaaaaataaaaaaaaatataaaaaaaataattaaaaaaatatatattatattttatatatatatagaatttattttttttttttgttaaaattttttttctttttgtatttttttgttgtaattttatttttttgtttgtgtttttttatttttttttgcttttttggtgtttttatttatgtttgtttttttttttttcgtgttgttattctatttttttgttttgtgttgtatattttttagttttttttttttttctatttttgtgtttttcttttttatgtttttttttttttttattttttttgtgtctctttatttttttctttttttttattttttattttttttttttcccttttttttgtgatttttttttttcttgtttttcttttttttcgtttttttttttttttttgttatttttatttttctttgtgtgtttttttgttttttgtgttatttttatgtttgttttttgtattttttgattgtgttattatgttttattctatttaatttttatgtttgtttctctggttgttttttttctctttttttatatgattttatcttttgagttttatttt

SEQ ID NO: 975 - DNA, 456 bp, Triticum aestivum
  Clone ID: uC-tsfl189009b01b1
acccggtggccaggggggataccctccggcagggtacccgccgcagcagggaggttaccctccacagcaaggaggttaccctccacagcaaggatacccgcctgcacctggagcttacccacctgcacctggggcataccctgctgcacctggggcgtaccctcctgcacctggagcgggaggccctgacggggagaaggggctcctctacaacatcatgcatggtgttgccagcgctcatggaggtggtcatggctacccatctgggggccacgggtaccccccgcagcagcatggataccctcagcaaggctaccctcctcagcatggctacccaccgcagcagcatggctaccctacacagcagcatggctacccccctgctggctaccctggctcatctggtcacagtggtagccatggaagaggaggcatgggcatgggtggcatgctggc

SEQ ID NO: 976 - DNA, 183 bp, Triticum aestivum
  Clone ID: uC-tsfl189009b02b1
gggtttgcaaggaaggatcgatagagctgagacgaggtgaattgagcaatgtggctttggttgtatgaccttagaaataagctgcagctgtatgtaaagtgccgtggaaatgtcggcggcgcgtgtgttttctgaagtttgcaagttgtaacgaaagttgcagcaataaaaatgggttttcgt

SEQ ID NO: 977 - DNA, 499 bp, Triticum aestivum
  Clone ID: uC-tsfl189009b03b1
gtggggttcggcagcagcgtggcggccgtggcgccggcgtcgtcgacggcggggaggacgagccttcgcccgcagcggacgcggctggcggtgccggcggcgacgaggggcacgccggctccggccaagaaggagaagagcatcctggacttcatcgtcagcgccatcgtcaaggacgagcaggagttcatcgagaccaacccgctgctcaacaaggtggacggcccggcgccctccgccggcggcaccgcctccaggaaggccggcggcaccaccgccggcaagaagcccgcggccgacagcgagggcggcggcgggttcaacctcggcggcctcttcgccaagaaaggctaggctgaaccagcccgcctaatacgtaggcgcgcgcttgggtgcgtgcttcgatctcatagctcgatttattgctgtaactccatgaaaaacatcgcagagatctgcatatatgtacgtacacgcggtgtgactactcaaacgattc

SEQ ID NO: 978 - DNA, 485 bp, Triticum aestivum
  Clone ID: uC-tsfl189009b04b1
ctcccgtcccgtccccagccaacctcccatccccgtctcgcgtcgcagcggcagttccactccctcgccatgggcaagattaagatcggaatcaacggtttcggaaggatcgggaggctcgtcgccagggtcgccctccagagcgacgatgtcgagctcgtcgccgtcaacgacccctttatcaccaccgagtacatgacctacatgttcaagtacgacaccgttcacggccactggaagcacagtgacatcaagctcaaggacgacaagacgctgctctttggcgagaagccagttaccgtcttcggcgtcaggaaccctgaggagatcccgtggggtgaggctggtgccgattacgttgtggagtccaccggtgtcttcactgacaaggacaaggccgctgctcacttgaagggtggtgccaagaaggtggtcatctctgccccaagcaaagatgcccctatgtttgtggttggtgtcaatga

SEQ ID NO: 979 - DNA, 332 bp, Triticum aestivum
  unsure (1)..(332): unsure at all n locations
  Clone ID: uC-tsfl189009b06b1
ggtgctgacgcctgcccagtgccggaaggtcaaggaagttggtgcctactgataaggaaaggtctctagtaatatatagttggatcaccgttgtttagtcgatggatatgtcgatgcagcggtgacaaataaagtgtcacacaacgtcgtgtgtgacccgcccaaactagttgtttaaattctgaaataaaatacaaataaagttgtatcaagacaatgttcatattgncaaaaaaaaaaaaaaataaaaaataaaattaaaataaagattaaaattaaaaaaaatttaaaatttatgattctctcatataaaacccattcatcctaattac

SEQ ID NO: 980 - DNA, 326 bp, Triticum aestivum
  Clone ID: uC-tsfl189009c02b1
ccttcgcgtctttaaaaaaaaaaaaaaaaaaaaaaaaaaaagaaaaaaataaaaaaaaaaataatgctaataaaataatcataaaaaaaataaagaacgaacaaatgaaaaaaaaatggtcctttctagccattgtattatattaaaaaaaggggggggcgctttttaaaggaccaaggtttccttccctgggttggcgaactattgtttttttattggggcccctaaatttaattacctggggctggttttacaaacggctgaactggaaaaaccttgggattacccaaataaataggttgggaaagaatccccttttcacaacg

SEQ ID NO: 981 - DNA, 193 bp, Triticum aestivum
  Clone ID: uC-tsfl189009c03b1
ggttcccgagcccgcagctgcggccgagccggaggccgaggcgccagccgtggtcgagacagagaccaaggaggccgtggctgaggcagagccggcggtggtcgaggaggtgaaggaggaggcggcgcctgctgccgagccggaggttgcggccgtcgccgaggaagcaccggctgctgcggaggaggcaccc

SEQ ID NO: 982 - DNA, 419 bp, Triticum aestivum
  Clone ID: uC-tsfl189009c04b1
ggtagatcttcccgccctgctccacgtgctgctccagtgagaaacccaccagcgccagcccgtcaagctcctccacctgctactacccagagcagcggtggtggtatcatgagcggaattgggtccactattgctcagggcatggcttttggtactggcagtgctatggcgcacagggctgttgatgctgtgatgggtccccgtaccattcagcatgagactgttgtcggtgaggctgctgcatctatgactccaatggacaacgctgctgatgacaagtgtggcaacccttccaaggccttccaagattgcatcaaccactacggcagcgacatcagcaagtgccagttctacctcgacatgctgaacgagtgccggcgtggaggagcaggagctggtgcaactctttaagctactat

SEQ ID NO: 983 - DNA, 53 bp, Triticum aestivum
  Clone ID: uC-tsfl189009c05b1
ccttaaaccgacacaggtgaatatgtaagaatgaaagatttacctaattaact

SEQ ID NO: 984 - DNA, 283 bp, Triticum aestivum
  Clone ID: uC-tsfl189009c06b1
ccatatgctgctgcaccgcaacgatgcggcgtgccaggccaaggggttctacaactacggcgcctttgtagccgccgccaactcgttctcgggcttcgcgaccacgggtggcgccgacgtcaggaagcgcgaggtggccgcgttcctcgctcagacctcccacgagaccaccggcgggtggccaacggcgcccgacggcccctactcgtggggctactgcttcaaccaggagcgcggcgccgcctccgactactgctcgccgaactcacagtggccgtgcgcg

SEQ ID NO: 985 - DNA, 293 bp, Triticum aestivum
  Clone ID: uC-tsfl189009d03b1
gtgcagcgcctcatagtgtacccccaccaccaccaacgctacactcacaagctaacctcaccatttcaggaagcatatgagcagcgaaagcttgggcaagaactccaagatcatgggtggccgtgaaagaaaagaagttaatagcaccgcaaagcattttgttgatttcacagaagcagaggaagatcttgttttcagaatgcacaggcttgtcgggaacaggtgggaacttatagctggaagaatccccggaagaacagcagaagaagtagagatgttctgggcaaaaaggc

SEQ ID NO: 986 - DNA, 272 bp, Triticum aestivum
  Clone ID: uC-tsfl189009d05b1
agtttatcaacggcgacccgttcatcggcagcctggagacgcccgtcacctccagccccctcgtcgcgtggtacctctccaacctccccgcgtaccgcaccgccgtcagcccgctcctccgcggcatcgaggtcggcctcgcccacggctatctcctcgtcggccccttcgcgctcaccggcccgctccgcaacacgccaattcacggccaggcgggaaccctcggcgccatcggcctcgtctccatcctcagcgtctgcctcaccatgtac

SEQ ID NO: 987 - DNA, 252 bp, Triticum aestivum
  Clone ID: uC-tsfl189009d06b1
atatataaaactaacaaaaaaaaaaaaaaaaaaaaggaaaaattgttaaaaaattcttgttgtcttatccgcattagacaaaatgaagtaaaaaataattcaaaatttaagtatctttcagtatctaagtctaaatactaataaaaagaagaaagaaggattgatttgcagcaatagatgtctttcacatacaactagaaaaaagtaatttcctttttgaatggcagttccaaaaaaacgtacttcaatgtc

SEQ ID NO: 988 - DNA, 462 bp, Triticum aestivum
  Clone ID: uC-tsfl189009e02b1
gttctacagagaaaatgagaaaatgagctgtgtgcgtcctgattacatgtccagtcaagaagacataaatgaaaaaatgagaagcagtgggtcgactccggtaacactgatgaagaactgataaaaagagaggagaaaaggataagagaattctttgagttccttgatgatgctgaatttttggagaatatgcgctgcaaacgtcttaattatccacggaaacatgaaatacatctccagtcggatgaagaaattgcccctgattcagatgaagagtgaagatgtccctgcctattatcacctgttttcatttatcagtagattgaactcagtggagctttcgagtatttgaacttgttaccaagttaaacactcgacttaatcttagctattatgacgtttgtgtgtaatgtcatatgtgaacaaggctggaaggcttctccaatttcttttgtgttgctt

SEQ ID NO: 989 - DNA, 323 bp, Triticum aestivum
  Clone ID: uC-tsfl189009e03b1
gtgttagttgacagctagagaactttgcgctgtctctttatctagctagagaactttctactgtctctttatcactgcatgatgggttcaactatcctcctgttcctggttaattagctgcatattattgtaactattaatcggtgcacacgagttatcctacttgcttgcttggttagtttcaaaaaaaccaacccgatgctcaacaaggaggacagaccggcgcccttcgccggcgagaccgactccaagaaaagccggcggcaccacccccggcaagaaacccacatacaacagggcggccgttttaaagaaccaaactt

SEQ ID NO: 990 - DNA, 495 bp, Triticum aestivum
  Clone ID: uC-tsfl189009e05b1
cttattttggtctctcgcgactcttcggtcaagaacaaacacggatgaacacacaaaatgtggtggggtcatatggatatatagctcctgaatatctatacagaggtgaaatctccacaaagtcggacatatacagtttaggtgtactaatccttgagaccaccacaagagaggagaattgccgcgggagcgaaccatctgcaggacaatttattaaaaaggtacgtgaaaactggacagaggagaacatcgtatcagagtacccatcattaaaagcagattgcctccgacaagtaaaaaaatgcatcgaaattggactgcaatgtgttgagactgatcggcagaagagacctaccatagaggcaattatcgaccagctcaatggacgacatactaattgagctacaaggtcatactgatctccagtcttcatggagaataaaatttgggtcttcttcaggagacatgtgcaagagggaattgacatcttactta

SEQ ID NO: 991 - DNA, 415 bp, Triticum aestivum
  Clone ID: uC-tsfl189009f01b1
ccgggtttcaagtacaagagtgggatgtacctgtttgtgaaatgccccgacgtttcgcctttcgaatggtatcactccaatccttgctgcatatatgaacaaagatacagttcatccgaggttcttgcttacagttgatgatggtcttgcaggcatccgttctccattacttctgcacctggagatgattacctgagcgtgcatatccgcacgctaggtgactggacatctgaactcaagaacttgttcgggaagtgtttcgaggcacaagttacttccaagaaggccaccctttcgagacttgaaactacagttgtggcagactctgcgacagaagacaccaggtttcctaaggtcttcatcgatggcccttatggtgcaccggcgcaaaattacaagaaatacgacattcttt

SEQ ID NO: 992 - DNA, 322 bp, Triticum aestivum
  unsure (1)..(322): unsure at all n locations
  Clone ID: uC-tsfl189009f02b1
cctacgcgtccggcctggtccggcaagacggagaacgaggagaaggccagggcggcgttcctggtgaggtgcaaggccaactccgaggccaccctcggcacctacaagggcgacgccaccctcgctgagggcgcctccgagagcctccacgtcaaggactacaagtactgattgatctgccttcggtgctgtggcccgtttgggcgtcccgcttaccagtatcattgtcattgtttggtttcctgagtcctgatatatcctcggatatcgaacatcgtttttaataatatggaacttgtgttttcatannnnaaaaannnaa

SEQ ID NO: 993 - DNA, 424 bp, Triticum aestivum
  Clone ID: uC-tsfl189009f03b1
cggtacgcgtgggcgatggtgacgccgccgttcggcaagctcaaggacatcatcctggacaacgacgacggcgcggacgatccgtcgtgctcgaactcgtccttggccgacgagggggtcggcgtggccgcccggaggaaccacggctgcgggaacgggaggctcatcaacatctgcttcggcgcgcaggggctcacggtggaagactctgccagcgggcagcagacgagcaagatgttcaagcagcagtgcctccgggtgtcctgacctggcctgcgttcggctttgcggttcagcgatatatgtgtgtgtgtgttgaactcccccggcttggtttggtttggtttggtttggcgtgctgctccgcgtacaagagcaaatgtttggtgatttgctgagataaattccgtgtatgtatcatagt

SEQ ID NO: 994 - DNA, 469 bp, Triticum aestivum
  unsure (1)..(469): unsure at all n locations
  Clone ID: uC-tsfl189009f04b1
cacacccgcgcaacaagatgccaatggagaggtcggtgtcgctggccgagaggagcaccgccgccgccgccgcgccggccaacgacctccgctgccacagcgcctcctacgccgtctcctacgcgcccaccaaggtgcagcgcgccaggagcaccacctccctgtcgcgccccgcggcggcgaccgccgtgcagcggagcggcagcacgaggaccgtctccggcgccggccccggccccaccccggggctgaacctccggtgctacagcgcctcctacgccgcctcctacaagcctttctccgacggcgccgcccaggccaaggggcccaacgccgncaccaccaccgnagccacctggtcctccgccggccgccgctccctcaacctgaggagctacaccccgtccttctccgcattggtcgacaacgaggccccggccccggccccggccaagacggatgacgcgga

SEQ ID NO: 995 - DNA, 457 bp, Triticum aestivum
  Clone ID: uC-tsfl189009f06b1
cccacgcgtccggcttccctgaggtttgatggtgctctgaatgttgatgtcaatgaattccagaccaacttggtgccctacccgaggatccacttcatgctttcctcctatgccccagtgatctcagctgagaaggcctaccatgagcagctgtctgttgctgagatcaccaacagcgcctttgagccttcatctatgatggccaagtgtgacccccgccacggcaagtacatggcctgctgtctcatgtaccgtggtgatgttgttcccaaggatgtcaacgctgctgtggccaccatcaagaccaagcgcactatccagtttgttgactggtgccccactggcttcaagtgtggtatcaactaccagccaccaggtgttgtcccaggcggtgaccttgccaaggtccagagggctgtgtgcatgatcttcaactccaccagtgtcgtcgaggtct

SEQ ID NO: 996 - DNA, 376 bp, Triticum aestivum
  unsure (1)..(376): unsure at all n locations
  Clone ID: uC-tsfl189009g03b1
cccacgcgtccgcccacgcgtccgggaagcagaagctccagcttcaggttcagcttgttctccatagcaatggctggcactggcagcacctggctcctgctggagcagaagggagctgggccgggagcaaggagctcccacgccatcaccctcgtcggcggcacggcctactccttcggcggagagttcaccccgcgccttcccgtggacaacaccatgtacgccttcgacctcaaggcgcagtcctggtccgccctcacgcggccggcgaggtgcccccgccacgcgtcggcgtcaccatggcctccgtcggcgccacnggtgtcgtgttcgccggccgcgacaaggaccacacggagctcaacgagctcttact

SEQ ID NO: 997 - DNA, 419 bp, Triticum aestivum
  unsure (1)..(419): unsure at all n locations
  Clone ID: uC-tsfl189009g04b1
tgcttccgcccacgcgtccgtctcctcctgtcgcctccagagcaacagtcctcctctcctcctgtcgcctccagagcaacagcagctccagctcgagcaagaaacaagtgtagtactagtttgatctgtgaacatgttggccatcttccagaagcaggtggcgcacgcgccgcaggagctcaacagcccgcgcggcagcaccgccaagcccaagaaccccgacgagatcctccgcgacttccacgccgcccacccctccgacgccttctccacctccttcggcggcggcgccgccctcgcctgcgtcgccgcgcagccccgcaacctcgccgncgncggctaccagaggatgttctgcgggcttggacgacatctactgcgtcttcatgggcacgctggacaacctgagcgcgcttatg

SEQ ID NO: 998 - DNA, 379 bp, Triticum aestivum
  unsure (1)..(379): unsure at all n locations
  Clone ID: uC-tsfl189009g05b1
tttccgatcgcaaagaagaagtcagaggctgcagagtaccagaagctgcttgcacagaggctcaaggagcagagagaccgccgcagcgagagcatggccaagaggaggtcgaagctgtctgctgccaccaaggctcctgctgcctctgcctaagatgtttacagtcttccgttattagctgtaatagtggaagaatttctcgcactttgttggatgatatgaatctagctgctactttcagcgttgttgagttgtaattgatgcttgtttgcgtgaacatgggtaccttaatcgtcaggaagttgttactgaatgaacaaaattgcatgaacttggattattgatgcaagttttgtgtgaaaanaaaaannnntaannt

SEQ ID NO: 999 - DNA, 398 bp, Triticum aestivum
  Clone ID: uC-tsfl189009h03b1
tttacgcccacgcgtccggctgattaagatagtactaaattgaaacaatgtggatgaagaccgtgttctgggggctcctagtattcatgctcgtggcgacaacaatggcggtcgagtatggtgcaaggagccataacagtggtccttggagttggtgcgatccggcgacgggctacaaggtgagcgcactcacgggctgccgggcaatggtgaagctccagtgtgtgggcagtcaggtgcccgaggctgtcctaagagattgctgccagcagctcgccgacatcaacaacgagtggtgcaggtgcggggacctcagcagcatgttgcgcaatgtgtattacgaaactcgcgtgcgtgagggaaaggagtgctcccaggttgccgaaggaggtgatgaa

SEQ ID NO: 1000 - DNA, 52 bp, Triticum aestivum
  Clone ID: uC-tsfl189009h04b1
cccacgcgtccgcccacgcgtccgcccacgcgtccgtagttctagatcgcga

SEQ ID NO: 1001 - DNA, 299 bp, Triticum aestivum
  Clone ID: uC-tsfl189009h06b1
gcctacccacataaaatctccgtcgatccaccacaccctgcaatggcgtccgcgctcaccaacgtgagcctgtctaccttcgcgcccacggccaggggcgacgtcctcgcgaggccgcaggtggccgccgcccgcgtcaccttcccgacggcgcaccgcggcagcggcgccctctcctgcagggcgggcgggccggccacgccgccgggcatctccgacaagatgtcggacagcatcaaggaggcccaggagacgtgctcggaggacgccgccagcggggagtgcgcggcggcgtggga

SEQ ID NO: 1002 - DNA, 459 bp, Triticum aestivum
  Clone ID: uC-tsfl189117a01b1
tgattcactcataccaagcattaattgatgtcgagggaggcttcacgcaagctcctcttggcggcgctcctcctggtgctgctgctggcggccacgggggagatgggaggcccggtggcggtggctgaggcgcggacgtgcgaggcgaagagccacaggttcaggggcccctgcgtgcgccaccgcaactgcgccaacgtctgcaagaccgagggcttccccggcggcaagtgccgcggcttccgccaccgctgcttctgcaccacccactgccgccagtgaccaacctattgcctctacttcgtccgtacgtccgcctagctgcagcctgcctgcgtgcatgctggcttgctcgcacctctgtgcgtgtattgtagtactgtgtccatgaataaacctcggcctgtctgtcatggcatgctgcgattggtttaagaaacgcaggtcctcttttacttt

SEQ ID NO: 1003 - DNA, 399 bp, Triticum aestivum
  unsure (1)..(399): unsure at all n locations
  Clone ID: uC-tsfl189117a02b1
tttttatgaaaccgcacntttgntcctcattncngaggcncctccatcngcatctccatttccatctccatgggtgggttcacccaacaatccgactaacgacaacatcggcagcgacggcagggtcatgtcgcggtatgagcgccatgttcaggccaacaacgctcgctgtcctttcttggtgggggcctaatcccatccacgacggtgctcttgctcttgtggtctgagaagctgacgaggagcttcgccattgctatcccatctagtaccaaccatgtatctatcttatctatctatatttctaggtgatcctgtggacatatatatgtgggattgatccgcctaccctgatgctattgttgcgcaccgatgaagcaatgtcattgtgagactgat

SEQ ID NO: 1004 - DNA, 524 bp, Triticum aestivum
  unsure (1)..(524): unsure at all n locations
  Clone ID: uC-tsfl189117a03b1
ctcgttcttgcatcgancgcttcatcgcctcaacgtatcttgccgaggagagcagtttatcgacatgggtctcaaggaggagtttgaggagcacgcggagaaggccaagacgctgcccgacaccaccaccaacgagagcaagctctgcctctacggcctctacaagcaggccactgtcggccccgtcaacaccgcccgccctggcggcctctttgatatggccggcaaggccaaatgggatgcttggaaggccgtcgaagccaaattcaaggaggaggccatggctgactacatcaccaaggtgaagcagctgctggaggaggctgccgccgcatctgcttgatcccaggccacaaaaccgcaatcgctattgttatcctggtggtgcagccatatgtgccagcaaacacaaataagtttcaagtactagttgttgtcaagcttatcgccgtcgtgggtgtaattacgttgaacaagccctgtgatacatgaaagtgcaatctcagtttacaccatgattgatt

SEQ ID NO: 1005 - DNA, 487 bp, Triticum aestivum
  Clone ID: uC-tsfl189117a04b1
ccctttctgttccccccgggttttcaggtcgccgagcttcgccccgtcagccagccgtcgcgtccatggcggaggtagcgcccgtcgatcaggggaagaaggaggaggaggagttcagcacggggcccctctccattctcatgctcagcgtcaagaacaacactcaggtgcttatcaactgcaggaacaacaagaagttgcttggtcgcgtgagggcatttgatcgtcattgcaacatggttcttgagaacgtcagggagatgtggactgaggttccaaagactggtaaaggcaagaagaaggctctcccggtgaacaaggacaggttcataagcaagatgttcctccgtggggattcggtcatcatcgtcctcaggaacccgaaatgaggttgacgactcggcgtaaaccagaagagtctgttttcgctatgcctgctgtagtttgtatgccgaatgctctggatcagggagtgtgttagagacag

SEQ ID NO: 1006 - DNA, 62 bp, Triticum aestivum
  Clone ID: uC-tsfl189117a05b1
tgttgtgttgtatggggacgcttatttacctgtgaccacatgtatgttaaccactttgatct

SEQ ID NO: 1007 - DNA, 408 bp, Triticum aestivum
  unsure (1)..(408): unsure at all n locations
  Clone ID: uC-tsfl189117a07b1
atcccggcgagagggccaacccgagggtgttcttcgacatgaccgtcggcggcgcgccggccgggcgcatcgtgatggagctgtacaaggacgcggtgccgcggacggtggagaacttccgcgcgctctgcaccggcgagaagggcgtcggcaagagcggcaagccactgcactacaagggcagctcgttccaccgcgtgatccccgacttcatgtgccagggcggcgacttcaccaagggcaacggcaccggcggcgagtccatctacggcgagaagttcgccgacgagaagttcgtccacaagcacaccaagcccgggatcctctccatggccaacgcgggccccaacaccaacggntcccagttcttcatcttgaccgtcccctgcaattggctcgacggcaagc

SEQ ID NO: 1008 - DNA, 63 bp, Triticum aestivum
  Clone ID: uC-tsfl189117a11b1
ggctgctcttaaagggtgcatgctatgcaataacatgatttcgctgctttgtttttgtgattc

SEQ ID NO: 1009 - DNA, 432 bp, Triticum aestivum
  unsure (1)..(432): unsure at all n locations
  Clone ID: uC-tsfl189117b01b1
atgttactgaagaggnnngnatgatatcgcctacggagcnacatccaaangagncaacttgtggaggatttctaccagaagcaggggaaggttctcgagttcgatttacctggaggaatccctgaatcttggccaaagctgctcgatgttctgaatctcgaggaccagcaggagatgaagttggccgcggcgtaagtcctgcccgtgggacataccttacatagtccaaagcataccatacattttttcaataatggaaaagggataaaaaactcttgtttccatagatatgtgtgcctttgtgagcgtaattttttgaccactagcgagctgtttattcccgccggcgttttcgcgagccggtgctatgtaacgatcataacgatattttgatcttgacttttttgagtgagcggtttgtggtgcgtnnaa

SEQ ID NO: 1010 - DNA, 209 bp, Triticum aestivum
  unsure (1)..(209): unsure at all n locations
  Clone ID: uC-tsfl189117b02b1
cccatgcgtccgcccacgcgttcgtgctgnngnagagcngngttgangnccgggcttgttgattagcctcctctcctgtcaccttcccttctccagtgtagagtatccatccatccacttgtgttgttcctccgcgcantttcgtcgtccatgtactttgaactttgattaattaattaatcaatcaattgattggtggggaagttttc

SEQ ID NO: 1011 - DNA, 238 bp, Triticum aestivum
  unsure (1)..(238): unsure at all n locations
  Clone ID: uC-tsfl189117b03b1
ttgttggttgcgcccacaggttttgtgcctnngagggggncctccaatggtgcctgcgtttagtcgccctggtcgttctatcccctacccgagtgtgatgcatcgttatgttcggttgtttttgagaattgctgctgttgtgaacagctttggtgaacttgataaataagtgagccctgaattgtgtcaactaaaaaaacaaggtaaaaaaagcccataaacaacaagaaaggcaaaa

SEQ ID NO: 1012 - DNA, 221 bp, Triticum aestivum
  Clone ID: uC-tsfl189117b04b1
catgtataatttgccattggggtcttttcaactctgacacggctttgggacttccttctccatttatctttcttatttgttcctaagaatatgtgtatgtccatgttcatgtaccaacatggctcgagaaagcatgctcgtatgagaatgctatcggtggctatgtatatgaacggacgcataatattatacaatatgtcgactatatacgttctaatggt

SEQ ID NO: 1013 - DNA, 185 bp, Triticum aestivum
  Clone ID: uC-tsfl189117b05b1
aataacaaaaacggggaaaaaaaaaaaaaaaaaggaaccccaaaaaaaaaagaacacaaaaaaaaaaaaaaaacaaaaaaaaaaaaagggggggcctttttaaagaaccaaggttttcgcccgggggggggcaaaaataaggttctttttttggccccctaaattttaattcatgggggggggtt

SEQ ID NO: 1014 - DNA, 237 bp, Triticum aestivum
  Clone ID: uC-tsfl189117b06b1
tggggttctctttagggatgcttcttttatatcaataaaaccgcgggtgctagtgcccatggagtttcatttttgaggacgtgggcatagcccagtagttgggggcgcatgattgtaaacctaacgaccagagttcgatccacgtcggggacgaatttctggaattctcatgagggatgcttcttctatatcaataaaaccgtgggtgctagtgcccatggagtttcattttttttt

SEQ ID NO: 1015 - DNA, 510 bp, Triticum aestivum
  Clone ID: uC-tsfl189117b07b1
ctgcgcctgcgccttagccttcggagcgaatcgagccgacgtcgccccccacccacccggccgcgcccaccttcggagcaggacgcgatggcagacgacctttgggagaacaccaatcatctgcccagggagctcccgtgaagtccaagtttgccgaatccaagctcccaaagttcaagttcttgcctgagcacaggtctccaaaaccccaggtgaacaggctgatcagcaagtacatcgactacctcaacacgatccaggccaagagggaggacactttcaacaccctacaggaccagaacatgagcaaggagtcgctggcgaacgcgagcaagacgatgaacaagaagctgcacgccatggtcaagtcggcgaaagaagactcgagcgaaatcgtgaagctgggcggcaatgcgccggcggtcccttgccggttcgataccgatgtcaaggttcctccccgtggataggtagtctgcatgcaagtcctctcacagacagacagacagt

SEQ ID NO: 1016 - DNA, 503 bp, Triticum aestivum
  unsure (1)..(503): unsure at all n locations
  Clone ID: uC-tsfl189117b08b1
tcaaggaaatgttttggcttggaaatcttttgcttaaagatcctctggagcgggagccaatgcgccgtaaaggtttgtaccaatcaattaagattgccaatgggttcagcaacattcatttgggtctagcatgtcatggtttcgaggagtatgtattgaggactcgcctttatcgtctgtttgtggaaggtcttgaccgtgcctttcttgagatttggaagcgggtcaatgagggtcagacgtctttcacagatgctctgcaggaagcttacaatgagaatccggttccattgcgccaacatactttgaaggctgagctggagtgccccggcggttttttgcaactggagcgacaattccgccggtgcacataaggcattagtaaggaacttccagatcgaagagtccaagagttgattgcacaggaaattaattacaagcgtgcgttgccaaagacgtatgcacagttcgccaggaagaagctcangttgcagaagtcttgg

SEQ ID NO: 1017 - DNA, 235 bp, Triticum aestivum
  Clone ID: uC-tsfl189117b11b1
tgagttactaaaagataaaatgaagttgcctgcgcgtgttatttcagtagtgtgtctatgtctgtaccttgcacacacactgtgtgtgcatatatatttatgcgacatgtatgcacgcgtccgtatgcgtgagtgaactgtcaactccttgctgtactccagtcctagccgatgtgtacgtctgatgtgcctgacctacttgttcaggcaattaatgaatagtaattgttttcct

SEQ ID NO: 1018 - DNA, 205 bp, Triticum aestivum
  Clone ID: uC-tsfl189117c01b1
aaatgaaaaaaaaaaacacataaaaaaaaaaaaaaggaaaaaaaaaaaaagagaaacaaaaaaaaaaaaaaaccggaaaaaaaaaaaaaaaaaggggcccaccaagggaaaagcaaaagcaacaaagaaaaacgggggacaaaaaacaaaacaaaaaaaggaaagaaaaaaaaaaaaaaacaaccgaaaacggggggcgggcggc

SEQ ID NO: 1019 - DNA, 453 bp, Triticum aestivum
  unsure (1)..(453): unsure at all n locations
  Clone ID: uC-tsfl189117c02b1
gccgctggaccgacccgaatgcccgggcgacccacgcgccgggtgcgagggcnacggagtggcgcagccgggggaggcggcggggnacgggggcacgacaggggcgggcccggaccagagcggcgggaagacgaagaagaaggggatggggatggcgggcgggctggcggtgggcgcggcggcgggcgtgctgggcgggctggcgctggcgggcggggcgagctacgtggagcacaagatcgaggaccacgtgacggagcgcgtggaggaggacatgtaccgcggcggcggcggtgggtacgacgactacggcggcgacgacgactactagaccaaccatgggtccgtcgttccggtggccatgcacgaaagaatctttctttatgttttctgcgcgcggaagatgccgagggtgagggtgaaccaccggaccggagaggtgagaagaagaga

SEQ ID NO: 1020 - DNA, 314 bp, Triticum aestivum
  Clone ID: uC-tsfl189117c03b1
accgacccaatgccgggcacccacgcgcccgcatccccccccccccataaaaaaaaaagaaaaaaaaaaaagggaccgaaaaaaaaaaaccaaaaaaaaaaaaaaaaaaaaaaaaaaaaaaaaaaaaaccgggggggccgccaaaaggccaaagcaaccgacgcgggaggcaacgaaaaacccccaaaagggcaccaaaaaaaaacaacgggccgcgggaaaaaacgcgggacgggaaaaacccggggggaaccaaaacaaaaagccgagaaaaaaaacccccattggccagagggggaaaaaggaaaaaggcc

SEQ ID NO: 1021 - DNA, 361 bp, Triticum aestivum
  Clone ID: uC-tsfl189117c04b1
aaagtcagctgatgccaagaagggcgatgccaaggcccaggctgccaaggttgccaaggctgtgaagtccgggtcaatcaagaagaccgcaaagaagatccgcacgtctgtgacatttcaccgccccaagaccctgttcaaggccagggaccccaagtaccccaggatcagcacccctggcaggaacaagttagaccagtaccagatactcaagttcccgcttaccactgagtctgcgatgaagaagattgaagacaacaacacccttgtcttcatcgtcgacctgaaggcagacataaaaaagatcaaggctgtcgtgaaaaagatgtacgacatccatgccaagaaggttaacaccctg

SEQ ID NO: 1022 - DNA, 454 bp, Triticum aestivum
  Clone ID: uC-tsfl189117c05b1
ggggggaccactgttgatcggggacctttggcggcgcaccctgcagcagctgcccctcgtcgcgccgcacgtggagttgcttcgcccgcgtcgtacgcgcgagcaggagcaccaggagccgccccggacgcacttcgacgggcacctctccgtcgcggttgtctccgtcgcgccgcgcgtggaggtgctccgtcggcccgcataggccgcgcaagcaggagcaccttgccaggggccgcccgggccgtgcatcgatgggcagctcgtcgtcgtggctgccccgtcgcgtcgtgcgtggacggcgatccgtgtcgtcacacgagaaggagcaccaggcgccgtcccagccgcacacattgacgggcacctcgccgtcgcggctgttctcgtcgcgccgtgcgtggaggtcacccgttggcccgcatcagtcgcgcattcaggagcaccaggggtc

SEQ ID NO: 1023 - DNA, 445 bp, Triticum aestivum
  Clone ID: uC-tsfl189117c06b1
actagcttcagtttgtcagcctctgccactccgggcattttcttgcatccacgacggcaatggccaccgctgatgtccagaacccgacggccgcgctgacggaggaggcgcccacggtggagacgcccgtcgccgccgaggaggtcgcgaagacggaggaggcccccgcgcctgtcgaggccgaggtcaaggcgcctgctgcccccgtcgaggtcgaggagaccaaggaggtggcacctgccgccgctgagacggaggaggccaaggagcccgtgccagcatgctgcggtcgagccggaggccgatgcccccaaagagacagaggcgccagccgtggtcgagacagataccaaggaggccgtgtgctcctacgtggcacggcgtgatgctgagtcagccagtggagtggagtggaatgatacttcttactaggtgtggagtggga

SEQ ID NO: 1024 - DNA, 381 bp, Triticum aestivum
  Clone ID: uC-tsfl189117c07b1
tcaacgagacgccacaggcgaaccaggagtacgagtcgggcaaagcgattccgaacaatcagattattggaaagcttgagagggcacttggagctaagctgcgtagcaagaagtaatgccttgaagtagcccaaaagctcttgtaggctgttgctggtggttgatactgaataactatgccacagaacgactatatgtatcatcatatactcgtgctctaaaatgtgtttgtcatatgtcccagagtaagagctgcattgaacatgcagactgacatgataacctgcgtggtttatgcgcggtgtttggcactggcttttgcttatacaaggctctattgtgagcttctctacaaaccttcctcttcttcccccctttctt

SEQ ID NO: 1025 - DNA, 345 bp, Triticum aestivum
  Clone ID: uC-tsfl189117c08b1
agagcactatttccaagaaggccacgtctgacgctgacgaagaaggttctgacgttgaggatgatggcgaggaggacgaggagtaaatagtagatgagggaacagcagtggtgcaaatcagcgtttgctgcttagggtttagcttgccatgtcgatgtcctcattatgtaatgttatgtaaggagaatgtttagatgcgtactcctgggctgtggcatgctagagatgtctctgtttgactattagcgaagaaaagcttaaaacccttgactgcttttctttcttggacttccacagcatgtggaaacagtcattatgttggcttgcttacaaaataaacctaac

SEQ ID NO: 1026 - DNA, 263 bp, Triticum aestivum
  Clone ID: uC-tsfl189117c09b1
ccccccagccaggctgacccggcacagcttaacacctagcagagctgcgtagctgttcctcgggaggtgcacttgcttcgacgccggcgagctccgcatgccgcaggtgatgtctctcaagagcataagatggcagagcggggcgtcctcctgttcctcctcgaacacgctcagcatccgctgcagcagcacgggggccggcgccgtcacgcgcatcggaagacggctagctccgcctgggcggcgcggtcatcacagccacc

SEQ ID NO: 1027 - DNA, 486 bp, Triticum aestivum
  Clone ID: uC-tsfl189117c11b1
ggttttcacggtggagcagttctgcgacgactccggcgaagacccggcatgcagcaggtccctccctctctctccccgcaccaccatcccccctgaattgtaccactacgtgcctcatggtacccgctcttggttaacattgttcgccgccttctcaggtctgtgagcggcaacagcattcaagaccacataacctacctgggcgtgagcatgcacgctgaggcctggagcagctgcaggatcgtcatggactacgccgagctgcggtacaagatggacctccatggaaacgtcgtcttgtcgaagcagcaccagcagcccggtctgtcggacgagcgaagaagacacagcgcccagtgaaaccaatgtaaacaagttctgtatcatcatagtagcaccacgcacgcaacttgtcattcccctctctgcttcattggttctgcatccagagaggggataacacaaccacgctcgacaggaaaatgc

SEQ ID NO: 1028 - DNA, 113 bp, Triticum aestivum
  unsure (1)..(113): unsure at all n locations
  Clone ID: uC-tsfl189117c12b1
aaataagcacaganccggagattcccaaataggtcaaccttttaaactgcctgctgaatccatgagcaggcatgagacaacctggcgaactgaaacatcttagtagccagagg

SEQ ID NO: 1029 - DNA, 184 bp, Triticum aestivum
  unsure (1)..(184): unsure at all n locations
  Clone ID: uC-tsfl189117d01b1
ggcctacaaccgcgcacccctacgacacccgcacggaacaaagaaagcaggggaaccggtaaacccccgncccacggnncccanacnngncaaggcaacgaaggcccccgccgccgcggcgctccaccaccacgacgccgccgcccaacagcacgcccgcggcgccgaggccggggccggggag

SEQ ID NO: 1030 - DNA, 351 bp, Triticum aestivum
  Clone ID: uC-tsfl189117d04b1
gtgccctctccctttttccgccggggcttctccttcgccgtcgtctgcagcggtggttagaagaccaaggccgataagcccctcggactctgaggcggtttgacagtcgacattgacgccaacggtaggaaggtcggcaagaagggcgtgtaccagtttgttgcagtacggtgccaacgtcgacggctacagtccaatttacactccagaggaatggtctgagtctggtgaccgctactccggcggaacgaccgggctttttatctgggccgttacccttgccggccttcttggcggagggggtccttcttggttacaacaccagcgctttttccggcttagagagcattt

SEQ ID NO: 1031 - DNA, 417 bp, Triticum aestivum
  Clone ID: uC-tsfl189117d05b1
aggggggccctatttcccccgcccggccagaccggagcacgcgcagagcattctagtcattctgggcctgccaggtggtgctcatgggcgccgtggagggctaccgcgtcgccggcggtccgctcggcgagatcgtggacccgctctaccccggcggcagcttcgaccccctgggccttgccgtggaccccgaggcgttcgcggagctcaaggtgaaggagatcaagaacggtcgcctcgccacgttctccatgttcggctttttcgtgcaggccattttcaccggtaaggggcccctggagaaccttttcgttcacctcgtcgaccccagtaacaacaacgactgggcctttttcaccaactttttttcctggcaagtgagctgcggtcagttaaacctctaggccgacaacttca

SEQ ID NO: 1032 - DNA, 165 bp, Triticum aestivum
  Clone ID: uC-tsfl189117d06b1
gacgcgccctgttagcggtgcaatttagaccggggggttggggggtttcccccagcgtgacccctcctattgccaagtccctagagcccgacactttaggttttttcctttcctttttggcaagttcgccgggtttccccgtaaagttttaaattgggggcttcc

SEQ ID NO: 1033 - DNA, 353 bp, Triticum aestivum
  Clone ID: uC-tsfl189117d07b1
acgcactctttgatggaaagctgtatggcctgtgcgggtctggtcaccttttcatctttgaaattagacaaggatcttttcattgcatccatggagtgcgtaattcactctctgggtgaccttgggtggaacacctcaatccttgcctagagagggggcgcgcatggtaagggactatctagtcgaatgtggcggcagactgttgatggtgatacggtggttttgctctactgcccgtccaacaagtgatgactgtttagagcatgaccgtcctgtcgcacttggggtctttgaggccgacctgcatgccgtacccgttggatggagaacagtcagtgatttggatggccatg

SEQ ID NO: 1034 - DNA, 306 bp, Triticum aestivum
  Clone ID: uC-tsfl189117d11b1
ccgaaactgccagtggaggccgactgcccaaaggcgtgcggtccgaagctcatgcacgacatgtgcatggacacgcttccgcgggggattcgatcctagtccgtccgttcacattgaggtcaccgagtatgcgcttctcgtcgtgcaccgcgccctcgagttctacggtgccacggttgtcgccgtggtcgagctgatccgcagcaggtcgcttctgtggcgactagagggctgtctacaacacaatgcttgacggtatactcctacgctgtgcagtgcatggagcacggtaccggcgacatggta

SEQ ID NO: 1035 - DNA, 97 bp, Triticum aestivum
  Clone ID: uC-tsfl189117d12b1
accgggcaaaccctggcgacaccaaacttaattcgtttgggtgaccatactcctattgactggcggcggtttaacaacgaggggcctggggaaaccc

SEQ ID NO: 1036 - DNA, 230 bp, Triticum aestivum
  Clone ID: uC-tsfl189117e01b1
gcccgctttatcatccaaattattcctgaaatatgcataatttcccaaaaagggaggtacacgatatatcatgtactcatagtttcatgtgaaggcagcttcatgctgtatgaactgcactagccttccaagttaaggtatgagatggcagtataacacatggttattttgctacccgggatgcatgtttgatgataaaataagagggccgcttgtgtggccaatcgtct

SEQ ID NO: 1037 - DNA, 456 bp, Triticum aestivum
  Clone ID: uC-tsfl189117e02b1
cggtcgcgtggggtcggtgcgtgtgtgtgcgcgcgcgcattttgctcgttcatagacatggcttccaacgggagcgccggcgaggtcagggatgtccacagcagcgagaccaccaagaccctcctcaagagcaacgacctctacgattacatgttgaagacgatggtgtacccgcgggagaacgagttcatgcgcgagctccgacagatcaccaacgagcacatcttcgggttcatgtcgtcgccgccggacgaggggctggtgctgtcgctgctgctcaagctgatgggcgccaagaggaccatcgaggtcggggtctacaccggctgctccgtcctcgctaccgcgctcgccatcccggacgacggcaggatcgtcgccatcgacgtcagcagggagtacttcgacctcggcctccccgtcatcaagaaggccggcgtcgcgcacaaggtcgac

SEQ ID NO: 1038 - DNA, 505 bp, Triticum aestivum
  Clone ID: uC-tsfl189117e03b1
cttttctaaaccctcctgccgccgtcgccgccggcgccggtttcgtccgccaccgaacagcagccatgccgcccaagctagacccgtcgcaggtggtggaggtctacgtccgggtgaccggaggcgaggtcggcgcggcttcgtcgctcgcccccaagatcgggcccctcggcctctcccccaagaagatcggtgaggacatcgccaaggagacggccaaggactggaagggcctccgcgtcaccgtcaagctcaccgtccagaaccgtcaggccaaggtctccgtcgtcccttcggccgcggcgctcgtcatcaagtccctcaaggagcccgagagggacaggaagaaggtgaagaacatcaagcacaacggcaacatcagcctcgatgacgtcatcgagatcgccaagatcatgaagcccaggtccatggccaaggagatgggccggactgtcaaggagatcctcggcacctgcgtcagcgtcggctgcaccgtcgacgggaa

SEQ ID NO: 1039 - DNA, 471 bp, Triticum aestivum
  unsure (1)..(471): unsure at all n locations
  Clone ID: uC-tsfl189117e04b1
gagatgcatgttcaagtgcgcttcctgctgctacatatatgactgctagtacatgtatatttacaagggcatatctgattatttgctggttgaggaacttcaaatggaagtatgtaaaactacaattatgttcttattcctaatgcattagaacagatctgattgctttatcaatgagtgcataaattgtcatttcctaagattgctcaaacatacgagttcttttgcagggacaaaaggaggaaagtagcaagttcacaagttgatctaagatgttccggtgactgcttttggtcataacatggttgtcacattttgttcatatggaagttgatctcagcttgnggatagaagacttggtctcttccataatttcttctggtggtgatcgaacatttagtctcttaggacttggccatcatattttattagaggacatgactcgaatgtgacttatgtatttcctaatgc

SEQ ID NO: 1040 - DNA, 569 bp, Triticum aestivum
  Clone ID: uC-tsfl189117e05b1
ccggcgctgtttatggcggcgaagcagccgttggcggacgtggaggacgggctcctcgcccacctcaacgcgaacgccgagatccccgactcccgctacttcgcctcctccctcggcgtcccgcacaaggacgtggaggatgtcatcaagaggctctccgccttccgcatcgttgagagtgcggacatcaccaaggagacgtggatgctcaccgatgaggccaaggggtatgccgcgaggggctcccccgaggtgcagctcgtcgcggccatcccgcccgagggtgcctccaagggcgcgctcaaggagagattgggggacgcgttcgatattggaatgaaggcagcagccaagaacaagtggattggattcgagaagggaaacaaagacctcgtactgagaaaggttgaggataccaaggatgaattgcaagagcagcttaaaagactggagaactgggaggttttcgctgacaaagtatagatgatttgaagagaagaaagcttgtacaaaagagaatctatttgtttcactgagaaggggctgatttgtgcaagagaaaacattgc

SEQ ID NO: 1041 - DNA, 398 bp, Triticum aestivum
  Clone ID: uC-tsfl189117e06b1
acgttttggaggccaaggcctttgtgagctcttgcggccacgacgggcccttcggcgccaccggggtcaagcggctccaggacatcggcatgatccaggcggtgcccgggatgaaggcgctcgacatgaacacggccgaggatgccatcgtgcgcctcacccgggaggtggtccccggcatgattgtcaccggcatggaggtcgccgagatcgacggcgccccgagaatgggcccgaccttcggcgccatgatgatctccggccagaaggcggcgcacctggcgctcaaggccctcggccggtcgaacggtatcgacgggacgctcaagaacgtgaccccggcgctgcacccggagatgatcctggcggcgaccaacaacggcgacatcgtggacgcc

SEQ ID NO: 1042 - DNA, 291 bp, Triticum aestivum
  Clone ID: uC-tsfl189117e07b1
tggaggggagtggaatgatgcttttttttaggtgcggagtgggagtgctatgcgcggggtcgcgtgacgtgggctaaataaaagtgttgtcgggtcgggtcgacgcccagtgtctgtcagcagcgagcgacgcagtgccactctcgccggcctgcgtctgcgtctgcttagctggagccttgctacggtgtgtgtcacagtgtcagttccacctatgatcgatcggtatcctaaccggtttgcgttatccccgactacattaacacaatccaagccaaaaaggaagacacg

SEQ ID NO: 1043 - DNA, 382 bp, Triticum aestivum
  Clone ID: uC-tsfl189117e08b1
attggaaaagattttgctcggggtatctttttcactcaggactgggtatccatgccaggtgttataccggtagcttcaggtggtattcatgtttggcatatgccagctctgaccgaaatctttggggacgattctgtattacaatttggtggaggaactttaggacatccttggggaaatgcacctggtgcagcagctaatcgagtggctttagaagcctgtgtacaagctcgtaacgaagggcgcgatcttgctcgcgaaggtaatgaaattatccgagcagcttgcaaatggagtcctgaactagccgcagcttgtgaagtatggaaggcgatcaaattcgagttcgagccggtagatactattgataagtggataaaac

SEQ ID NO: 1044 - DNA, 455 bp, Triticum aestivum
  Clone ID: uC-tsfl189117e10b1
gaaggggggatcttgaggaggcaatcgttaacagaccaaccatgggcgtgaccaaggaggacgtggaggccgccgtcgccgctcgcgctcagccctacccacctcgtggtcaccgatacatccggcgggtgcggcgcgagctacgagatcgaggtggtgtcggacaagttcgaggggaagcggctgctggagcgccaccggatggtcaacaccgcgctggcgccgctcatggccgagatccacgccgtctccatcaaggcgctcacccccgcgcatgcccagcccaagtcggagccggccgccgccgacaaggcgcaggcctgactcgctctttaggattcactagtactgaattcacacatgcgccgctggatgtcgggagctcgcatcatacagtactctctgcttgaatgaataatgtagcaactagcaagatgcgtctgcggaatcgagac

SEQ ID NO: 1045 - DNA, 276 bp, Triticum aestivum
  Clone ID: uC-tsfl189117e11b1
acgaggtaacattctggaccggtgctgtgatgtccccccggctccagaattcgcaagcttgcctggttttatttatttatcccagtagtgttagtatcatgtaaaccaaatcgccagtctgaaggtgataaaattactgtattacctatcaaaaaaaaaaaaaaaaaaaaaaaaaaaaaaaaaaaaaaaaaaaaaaaaaaaaaaaaaaaaaaaacccaaaaaaaaaaaaaaaaaaaaaaaaaaaaaaaaggggcgcccttttgggggtcccctttt

SEQ ID NO: 1046 - DNA, 433 bp, Triticum aestivum
  Clone ID: uC-tsfl189117f01b1
ttctctacgcgtccgccattctacacacccacacgcgcactcgttagacattttccttcaccaccgccggagggagggagctccagccatggccgccaagtgctacccgacggtcagcgacgagtacctcgcggccgtcgccaaggccaggcgcaagctccgcggcctcatcgccgagaagaactgcgcgcccctcatgctccgcctcgcgtggcactcggccgggaccttcgacgtggccaccaagaccggcggccccttcggcaccatgaagtgccccgcggagctcgcgcacggcgccaacgccggcctcgacatcgccgtcaggctgctcgagcccatcaaggagcagttccccatcctctcctacgccgacttctaccagctcgctggagtcgtcgccgtcgaggtcaccggcgggcctgaggttccc

SEQ ID NO: 1047 - DNA, 130 bp, Triticum aestivum
  unsure (1)..(130): unsure at all n locations
  Clone ID: uC-tsfl189117f02b1
cagggactggaccggaatgcccgggttttccacgcgcccgcctttgcttccgcccacgcgaccggtccgggggagagcactttcacccccangcaccggaaggacagccagaaggggaacgcgaaaagac

SEQ ID NO: 1048 - DNA, 458 bp, Triticum aestivum
  unsure (1)..(458): unsure at all n locations
  Clone ID: uC-tsfl189117f03b1
acattttgggctttnagagagagatgttgaagaaggaaggtttaaggaggagagccggatgggcatcgcggacgtggtgtcggagtactgctcgctgccgcggggtcggcggcacatgaagaagcggaagcagttccagacggtggagatgaaggtccgcatcgactgcgagggctgcgagcgcaaggtcaagaaggcccttgacgacatgaaaggcgtgagctcggtggaggtgacgccgaagcagaacaaggtgacggtgacggggtacgtggatccggccaaggtgatgcgccgggtggcgtacaagaccggcaagcgggtggagccgtggccctacgtgccgtacgacgtggtggcgcacccctacgccccgggggcctacgacaagcgcgcgcctcgccgctacgttcgcaacgtcatgagcgaccccctcgccgtgccgttcgccagggcct

SEQ ID NO: 1049 - DNA, 425 bp, Triticum aestivum
  Clone ID: uC-tsfl189117f04b1
agggccgcattttataacagggattctctatgatcactggtgcggccaaggctgttggcaaggctcttcctgagctgaatggcaagcttaccggtatgtctttccgggttcccactgtggatgtgtcagttgttgatctcactgttagaaccgagaagggtggatcatacgatgacatcaagaaggctatcaaggctgcatctgagggaaaactcaaggggatcatgggttatgtcgaggaagatttggtctccactgactttgtcggtgacagcaggtcgagcatctttgatgccaaggctggaattgctctgaacgaccattttgtcaagctcgtctcgtggtacgacaacgagtggggttacagcaaccgcgttgtcgatctgatccgccacatggccaagactcagtagagcgttctgatt

SEQ ID NO: 1050 - DNA, 131 bp, Triticum aestivum
  Clone ID: uC-tsfl189117f05b1
ctgggggggcttttgtatcgtgagagtgtttatgaccattcgcggggagaccggccctcaatcagattcaggaatcatggaaaaaaaaaaacataaagaaaccaaacttacgaaccgtagcataacaaaaa

SEQ ID NO: 1051 - DNA, 396 bp, Triticum aestivum
  Clone ID: uC-tsfl189117f06b1
ccggaagcagctgtagacttatgtctacaacatgaagaacaccgtcggcgacaaggacaagctggcggacaagctggagagcgaggagaaggagaaggtggaggaggccctcaaggaggcgctcgagtggctggacgagaaccagacggccgagaaggaggactacgaggagaagctcaaggaggtggaggccgtgtgcaaccccatcgtgtcggccgtgtaccagaggtccggcggcgcgcccgggggcgagggcgccgacggcggcgtcgacgacgaggaccatgacgagctgtagatggttttaagggaaccaatttttgtaatggggttagtagggtgagagaggagacatggataattggaaccgctgttgcttactttgggtctgcggtt

SEQ ID NO: 1052 - DNA, 188 bp, Triticum aestivum
  Clone ID: uC-tsfl189117f07b1
gggggccaggtccaccagcggagccggctgccaaagcagtaacagctgcggcgaacgacagatggttcccaacggggctgccgccgccggcacgatcgccaagaggatgctcaccgactgccacatcgagagcgtgcgcagggttactgaccgcccggggagaccggcggatcagactgtacatcctg

SEQ ID NO: 1053 - DNA, 462 bp, Triticum aestivum
  Clone ID: uC-tsfl189117f08b1
cagtgagggaggtgttggcggcgtccgacggcccaccgcccgcgggcatggggtcatccgacagcgactccagcggggtgctgaacgacacggacgcgaccggtgccacgccaacagaggaggcgccagctccggagatggggacgctgctcggcgggcccggggcggccggcgcggcggcggcggggcacgggcagatgttcctgcacgggaatttcctgaaggtggaggaggacgagacggggttcctggacgacgaggagccgtgcggtggcttcttcgccgacgagccgccgctggcgtggtggaccgagccgacggatccctggaaatgaggcgcggcagagagagagactcggtgggagacgacacctcgcgcggggaataaaagattagtgaaagaagcaggggcttttctgaaattttggaaatctcgttttatctagtcctttctgtaaaccc

SEQ ID NO: 1054 - DNA, 466 bp, Triticum aestivum
  Clone ID: uC-tsfl189117f09b1
ccagaggagttcgggaagatgaaggcgaaggcgccggacaacttccgggtcgactacgccatcagcagggaggagaccaacgcggctggggagaagatgtacatccagaccaggatggcagagtacaaggatgagctgtgggagctcctgaagaaggacaacacctatgtgtacatgtgtgggctgaagggcatggagaagggtattgatgagatcatggtgccattggctgcaaaagaagggatcgactggatagagtacaggaagcaactgaagaagtccgagcaatggaacgtcgaagtctactgattcttgtctttctcactctcgacacttccttgtgcatatgtgccgacgcacccccgattcgtgcgatcgaagaagattgatgtacgtacataaaagtagataaagggtgtattatttccgatattttgtcaggttggtttatttaaagctcacatat

SEQ ID NO: 1055 - DNA, 405 bp, Triticum aestivum
  Clone ID: uC-tsfl189117f10b1
aggggctcctttagcagggggactgcgttatccactacacgtgggtgccccgcctggagttcagcaaggttggtttcgtcttccgtgagcacaatagctcccccggatactatgacggtcgatactggacaatgtggaagctgcctatgttcgggtgcaccgacgccacacaggtgctcaacgaggtggaggaggtcaagaaggagtaccctgacgcctatgtccgcgtgatcagattcgacaacctgcgccaggtgcagtgcgtcagcttcatcgccttcaggccaccgggttgcgaggagtctggcaaggcctaaactaccagttgaaacaatggcctatgtatgaaggtcttttgtgaacgtcacttatgtccacgactctgctggacgaccagagcatatt

SEQ ID NO: 1056 - DNA, 335 bp, Triticum aestivum
  Clone ID: uC-tsfl189117f11b1
ctcgggacgattttatcaagggaccggttttgaaagatgcccaattctacagcaatatgatgtctaagatgaccaatccttcaacagaagaaagcaaagcttgaactggagcagtacccaaaggaaggataggtgtcccggcgtgcgctcatggcagggccagattgcctgctcagctctatgggctggttagatcacacatgtgcttggagttgctaaaaactagagaaatttcagttttgaggttgccaggcgatattttttcttgtcaagaacaatgcatgtttagacctttgcatattatagtgtgtgctttccgggaaatagatggtcct

SEQ ID NO: 1057 - DNA, 263 bp, Triticum aestivum
  Clone ID: uC-tsfl189117f12b1
gaaatccagcggctcggccagcagcagcccgacggctcctacaaggtcaagtttggtgtcatcttcaatgacgacagatgcgcaaacatatttgaagcattagttggcaccttacgggccgccaagaagaggaaagttgtcacctacgatggtgaaatgcttctgcagggtgtttcatgacaatgtggagataaccctctttccttcctccacggttgctgtcacttgaagtttgcaacaccggccagtctttcacattattt

SEQ ID NO: 1058 - DNA, 496 bp, Triticum aestivum
  unsure (1)..(496): unsure at all n locations
  Clone ID: uC-tsfl189117g01b1
ctattcctagcaagctatatacctacatagnacagccatggtccccaccgtgatggcctcgtcggccacctccgtcgctcctttccaggggctcaagtccaccgccggcctccccgtcagccgccgctccaacggcgctagcctcggcagcgtcagcaacggtggaaggatcaggtgcatgcaggtgtggcccatcgagggcattaagaagttcgagaccctgtcctacctgccaccgctcagcacggaggccctcctcaagcaggtcgactacctgatccgctccaagtgggtgccttgcctcgagttcagcaaggttgggtttatcttccgtgagcacaacgcatcccctgggtactacgatggccggtactggacaatgtggaagctgcctatgttcgggtgcaccgacgccacgcaggtgatcaacgaggtggaggaggtcaagaaggagtaccctgacgcgtatgtccgcatcatcggattcgacaacatg

SEQ ID NO: 1059 - DNA, 357 bp, Triticum aestivum
  unsure (1)..(357): unsure at all n locations
  Clone ID: uC-tsfl189117g03b1
agatgccggncaagaggcncgncgagatcgggcgcgnggccctggtgaactacggcaaggactacggccgcctcgtcgtcatcgtcgacgtcgtcgaccagaaccgggcacttgtggatgctcctgatatggtcaggtgccagatgaacttcaagcgtctttcgctgaccgacatcaagattgacatcaagcgtatccctaagaaggcaactttgatcaaggccatggaggaagcagatgtgaaaaccaaatgggagaacagctcatggggttagaagcttgttgtccagaagagaagagcatcgctgaatgactttgacaggtttaaggtcatgttggctaagattaagaggggtg

SEQ ID NO: 1060 - DNA, 200 bp, Triticum aestivum
  Clone ID: uC-tsfl189117g05b1
ggcctgtctcagctggggtgccttctattggcgatcccttcgtcagccgcccgtcaaaccacgagcagaacacggtagcgccggcggctaaaccgggcttcttggccaaattctgtccatgcctcgccggggggggagccaccagcctgaccgacaagcccagccaccgtgggccgtgcgcgtgaccaccggaggatttg

SEQ ID NO: 1061 - DNA, 452 bp, Triticum aestivum
  Clone ID: uC-tsfl189117g06b1
ctggggcaagtgtgtggatcagtggccttcaggagatcatgaccgggtactcggactcgggcaaggacgccggccggctgtcggcggcgtggtatctctacaaggcccaggaggagatcgtggacgtggcggagcagcacggcgtgaagctcaccatcttccacggccggggcggcaccgtggggcgcggtggcgggccgagccacctcgccatcctgtcgcagccgcccaacaccgtcaacggctcgctccgggtgaccgtccagggcgaggtgatcgagatggtcttcgccaagggcgaccccggcatcgccgcgctctacgacaagcttctcgttccccaagacctctggcccttcggcgagcagctcagagccaactacgccgagacacagagccttctccttgaagttgctgggcacgaagacctgctggagagcgacccgtacctg

SEQ ID NO: 1062 - DNA, 305 bp, Triticum aestivum
  unsure (1)..(305): unsure at all n locations
  Clone ID: uC-tsfl189117g08b1
catggccgatccagccgaggagacncgcgccgcgcccccgccgaccccggcagtgcccgccgagggcgccccgccgctatcggcggagccgccggctagcaccgacgcctcgccggagaaggcggccccgcctgcgcctgcgccggacacgacggtcaggtcccgggggttcaggctgctcggcgaggacaccttcgtgcacaaggtgctcggtggcggtaaaactgctgatgtactgttatggaaggacaagaaaacaactgctgttgtgatcggtggcacaactgtaatatgggttctatttg

SEQ ID NO: 1063 - DNA, 419 bp, Triticum aestivum
  Clone ID: uC-tsfl189117g09b1
aaccctgcccggccgatcggcgccatggacccgtgcccgttcgtgcgggtgctggtcggcaacctcgccctcagaatgccggtggccccgcccgccgccggcgccggcgccggcgtccaccccttcacctcgccctgctacatcaagatccgcctcggcaagatggcctgccagaccgccgccgccccgttcgtgctctccgacgccgccgccgagcagcccccgtccggcgccctcgccgtggtctttcaccttttcaaggccgatctggagtggttcgcccgcaagccctcgctcttcttcccctcccgcggggccgccacgctcaaggtgttcgtttacgccggccgcaaggggactacatgtggcgtcagctccgggcggctgctcgggaaggccaccatctcgctggatctcaa

SEQ ID NO: 1064 - DNA, 404 bp, Triticum aestivum
  Clone ID: uC-tsfl189117g10b1
tttcgacgggaggcttatagctgcctcacggcccgtaccaagcagaccgcccgcaagttcaccggcggcaaggcgccccgcaagcagctcgccaccaaggcggcgaggaagtctgcgccgacgaccggcggagtgaagaagccccaccgctacaggcccgggaccgtggcgctccgggagatccgcaagtaccagaagagcacggagctgctgatccgcaagctgcctttccagcgcctggtccgcgagatcgcgcaggacttcaagacggacctcaggttccagagccacgccgtgctggccctccaggaggcggccgaggcgtacctggtggggctgttcgaggacaccaacctgtgcgccatccacgccaagcgcgtcaccatcatgcccaaggacattca

SEQ ID NO: 1065 - DNA, 258 bp, Triticum aestivum
  Clone ID: uC-tsfl189117g11b1
atctttccgggttcacagatttggaggatgtcttgcaactgtggatccggttgcagctgcggctcagactgcaagtgcgggaagatgtaccctgatctgacggagcagggcagcgccgtcgcccaggtcgccgccgtggtcgtcctcggcgtggcgcctgagaacaaggcggggcagttcgaggtggccgccgggcagtccggcgagggctgcagctgcggcgacaactgcaagtgcaacccctgcaactgttaagct

SEQ ID NO: 1066 - DNA, 258 bp, Triticum aestivum
  unsure (1)..(258): unsure at all n locations
  Clone ID: uC-tsfl189117h01b1
agaacganacgtttgagcgggattgcctccaggcaaggggctgcgaacggaggtgaagaagacatggtaatgctccttctgctgccgctggcatgtgttcttgtgtgtgcacagtgtattccaagtagctactaccaagttccaatctggttggttgtgtaataagcacccgtggcccggccctaggcaggcaggcgtacgtacgtgcatgtgtgcgttgtggaggcatggtaatggtacagtgagtctcgtttcagt

SEQ ID NO: 1067 - DNA, 286 bp, Triticum aestivum
  Clone ID: uC-tsfl189117h02b1
agaaagtttcgcaagagagagcaatgaaaaccaagggactcttctgttatataccccttgttgcaggatggcaagttgtaggatgtacgtgtaaacctgattgtactctcctgtctaaactacatccataatggtcttattgcatattccctctgctccttctatattcctgtgtaaggaaatgtattcctgagatgatttgttatgtaaacctgatgtgatgcgatggatgatttgaatttcatatgtagttttcttgattttaatatgaaataatgttggatgt

SEQ ID NO: 1068 - DNA, 295 bp, Triticum aestivum
  Clone ID: uC-tsfl189117h04b1
gccagtagtgatccctcctgttgttgatgctgttccatccaggacttccaagaagaaagagggatcagcatcaggttcaggatcaggttcagtgtccaaggatgtcgctagacggtgggcaagaagggctcagaagcgagaggctgcttacaaggcggctgcagagaagcacctcaagctccttgcagaggctgggccgtgggaaaactcccgaagcggcacctgaagcaccggaattacttgtggttgggcctccagagtcactcgaggttggtcctactgcgatcgagtgatc

SEQ ID NO: 1069 - DNA, 402 bp, Triticum aestivum
  Clone ID: uC-tsfl189117h05b1
cccggccgtttttgcggcggggaaactcaagtactcggggcgggccgcggcaacggcctagggccagggccatcagcccttcccaaccacgcctgcggatgccaagtccaagtcctcggccgcggcaggggccttgggccacggccacaactccttcccggtcacgccggcggccggcaagtccaaggtctcggcgcatgccgtggcaccgggccaggcgttcttcttcaaccaaccccacgccgtcggcggcgctgacgcatccgcatcgagccttaagcgcaagcgcggcgtctttcagaaggacctgcagcacatgatgtatgggtttggggacgatccaaatccactttcaaaaacagttgcacttgtagaggacattgttgtggaatatgttactga

SEQ ID NO: 1070 - DNA, 445 bp, Triticum aestivum
  unsure (1)..(445): unsure at all n locations
  Clone ID: uC-tsfl189117h06b1
ggacaaccggnaccggatcacggtgatggcggagaccatggaccagtcggccctgatcctgagcatgccgaggcgccggcctcgggacgagacgcatgagaccctgcggacgtcgcagttacccagcgcgcatgtcaaggacaagtgggccaagaacctctacctcgccgggatctgctactggcgaacggtggcctaggggtagcatagccatagccatggctgccggcggagcgagctggatgcaatgcatccttgctaataactagtaggttctatttatccagacctgatttttgttgttgacaccaacccaacccccaccccatgccatacatgtgtatttttttatggagccgagcattggtggtcagcagcaggaggatctgcttgcttaactttaaatttaggtttaattactgccgcattgactgtagcgcggtgt

SEQ ID NO: 1071 - DNA, 221 bp, Triticum aestivum
  unsure (1)..(221): unsure at all n locations
  Clone ID: uC-tsfl189117h08b1
ccctttttagctgggaagcctcttgttataataacctaactaacaagnnntatgatctcgcattgcatattgcttgatcaacacatgccatgacctggctattgtatttgttatattacaatggatagtcttggcttgcttttggactaaagcctttcggactatgtatagcttgattttggactgaaaaaaaaaaaaaaaaaagatgaagagaccataat

SEQ ID NO: 1072 - DNA, 471 bp, Triticum aestivum
  Clone ID: uC-tsfl189117h09b1
gagggggccgctgtctcaggggtcggctcattttgcttcgccgtgcacgagcaccacgagaagaagcaggaccacaaggaggccaaggaggccagcggcgagaagaagcaccaccacttcggctagatcgtcgttgacgtgcggtggccggcctcgccgccggccgtgcgtgtgcttacgttacgtgtgttccataaagtgagagaggctgggacgcgggcccggtctcgtgctcgcccgtgcgtgattttctctgcgtgctaagctttcgcgtgcctgaataagtggggttgctgctcatgcagtggctcccacacctcatgcgtcggtgtgtgtcgtgtgtcggtgtgtgttttaattttaccggggccctgtttttgtaatttcactttattttgcaagtcctcacgaaacctttgtggggccattcatctcaaattttggtcttattaaaaaaaaaaaaaggggggg

SEQ ID NO: 1073 - DNA, 91 bp, Triticum aestivum
  Clone ID: uC-tsfl189117h10b1
aaaacaaaacccgaaaaaaacaaaaaaaaaaaaaaaaaaaaaaaaaaaaaaaaaaaaaaaaaaaaaaaaaaaaaaaaaaaaaaaaaaaaaa

SEQ ID NO: 1074 - DNA, 56 bp, Triticum aestivum
  Clone ID: uC-tsfl189117h12b1
tataaaaattgtttgttgggggcatgcttcaggacgaacgctggttgcatcttttt

SEQ ID NO: 1075 - DNA, 208 bp, Triticum aestivum
  Clone ID: uC-tsfl189118a02b1
atcgcgagcggccgccctgggtcctgtcattgtcctgctataacggatagcgctccctgttggcgccgccgtcggcggggatgccctagtggtggagggtgtatgtcctcttccgcggggtgcccctgcttgtacctagatggttactctttccgtccattgtcaccggctaacattgtgataatatcagtctgggtaatgttagatt

SEQ ID NO: 1076 - DNA, 365 bp, Triticum aestivum
  Clone ID: uC-tsfl189118a03b1
ccttactctgccgcgaggggctcgttagagagtaagaaagaagctcgccggagtccgagaaggggagggagagggaggatgctaaactgggggccggtggcgatcacggtgccactggccgagctgctcgcgcccgggcctccggtgagactccccggttagcacgagtggggacaggtcgtcaaccagaacaccatggccacgcccttcctgagtcaacaccatccactacttggatgacacagggctctgcgatatcgtcatcgtggtgcacatcaccaccgactataaaccggttgagctccatcaacttcgtccgccagcttcaatcaaagtgctgtagcacttatacctttttctttttt

SEQ ID NO: 1077 - DNA, 423 bp, Triticum aestivum
  Clone ID: uC-tsfl189118b01b1
cgcgtccgacgagctctgggacggtcgtgaagtcatgatcggctacgccgcatcgatcttgggagaggccatcaccggcaagggcatcctgtcccagctgaaccttgagaccggcatcccgatctacgaggcggagcccctcctcctcttcttcatcctcttcaccctcctcggcgccatcggcgcgctcggagaccgcggcaggttcgtcgacgagcagcccaccggcctcgacaaggccgtcatcgcccccggcaaaggcttccgctccgccctcggcctcagcgagggagggccgctgttcgggtccaccaagtcgaacgagctgttcgtggggcggctggcgcaactggggatcgccttcttcatcatcggggagattatcacgggcaagggcgcgctggcgcagcttaacatcgagac

SEQ ID NO: 1078 - DNA, 308 bp, Triticum aestivum
  Clone ID: uC-tsfl189118b02b1
agtatcgactcaaatggaaatattgtgttggtcttacagttcattggttccatgcgacacaaagataccccctgcaggctggagcatctatgaactttctgtgaactgatgagaggaaggacatttttgtgttacttcggcccaaatagaaattgctccattattgagacaggcgctacaatgtaacagcagggttttcataacactatagcgaacatgtttacatactacatatgtttaaagatgcttgtagtttgtgattttttgaaacatctctgaaatctgtatacatttcagtttaatgctcc

SEQ ID NO: 1079 - DNA, 96 bp, Triticum aestivum
  Clone ID: uC-tsfl189118b03b1
tcggggcacctggaaaaaccttacgggcccccaatttacaacgcttggactggaaaaaccttggggtagccgaagttaatgccattgggcccatcc

SEQ ID NO: 1080 - DNA, 111 bp, Triticum aestivum
  Clone ID: uC-tsfl189118c01b1
attcctaatacaacaggtcaacgtggtatttcctccctgttgtttcaattgcctgaactgagctattgctgatattattgcaactcgtaaaagggattccattcctttgat

SEQ ID NO: 1081 - DNA, 381 bp, Triticum aestivum
  Clone ID: uC-tsfl189118c03b1
acccccgtccaggccgggcccgttgtacccttattgatggacgccgccgtggagcgcctcaagaccgggttcgagaagttcaagaccgaggtctacgacaagaagcccgatttcttcgagcccctcaaggccggccaggcgcccaagtacatggtgttcgcgtgcgccgactcccgtgtgtgcccctcggtcaccctgggcctggagcccggcgaggccttcaccatccgcaacatcgccaacatggtcccctcctactgcaagaacaagtacgccggtgttggatcggccatcgaatacgccgtctgtgctctcaaggttgaggtcatcgtggtgattggccacagccgctgcggtggaatcaaggctctgctctcactc

SEQ ID NO: 1082 - DNA, 394 bp, Triticum aestivum
  Clone ID: uC-tsfl189118e01b1
gatgataagagagaagcaaagcttgagatggtgcaaactttggcgtccatgaccggcctgtcgcagggcgtgcgtctcccaggcccggccggcaggcgcgccagcaggttcaccgtgagggcgtcgtcggcggaggccgaggccgccggccgccgcgcggtccttggcctcatggccagcggagtcgtcgggagcgcgttcgctcaggtggtgcacgccggcaccgtcgcggccatcaaggttggccccccgccgccgctctccggtggactccccggaacggacaactcggacgaggcaagggacttcgacctgcccctgaagaaccggttctacctgcagccgctgccaccggcggaggctgctgtgcgggccaaggagtcggcccaagaca

SEQ ID NO: 1083 - DNA, 430 bp, Triticum aestivum
  Clone ID: uC-tsfl189118e02b1
cattcccagcgcagatcggctcaacttctcattttttttcgtcccgacggcgtttctcaccatgatggcgtccctcttcgcggccgtggcggtcgaccggcgcgcggcagccccgcgccgcggcctcgtggtggcccgggccgccaaggtcgagggccagcaggagccggcggtcaagatggcagccgtggagcccgccaccgacggtcgtcgtgccgtggtgtttgctgccgccgctgcggccttgtcggccattggcggggtggcgttcgtcgagtcggacgtcaagaaggggagttccgaggccaagaagaagtacgcccccgtctgcattaccatgcccaccgtcaagatctgccacaactgattcgggggagggggcgaatatgatgcgggtgggcggtaaattttgtacttcctacgggtttat

SEQ ID NO: 1084 - DNA, 424 bp, Triticum aestivum
  Clone ID: uC-tsfl189118e03b1
tctccacgctacgctatccggaaccttccggaaggttgctttgccaccctcccttccgttccgtccaacggtgtcgtcgggacagatctgcgctgtcggcggcggcgacggcgccatgggcgagcaggccgcggccgtttcctcctgcgagacgcctgctccggcggaggtggggacaggggtcgggcagaggtcgctgcccacgccgttcttgaacaagacgtaccagctggtggatgacccggcggtcgacgatgtcatctcgtggagcgaggacgggtcggcgttcatcgtgtggcgccccgccgagttcgcgcgcgaccttctccccaagtacttcaagcacaataacttcttcagcttcgtgcgccagctcaacacctacggatttaggaagatggtgccggacaggtgggagttcgcc

SEQ ID NO: 1085 - DNA, 264 bp, Triticum aestivum
  Clone ID: uC-tsfl189118f01b1
gtacggcgaggggcggtacggcggtggcggctgttgcgagcgccttaacacggaggacccgccgctgcggaacacggtggtgttgttcccgcacgggtggacggcgatccggttcgtcgccgacaacgtgggcgcgtgggcgttccactgccacatcgagccgcacctccacatgggcatgggcgccgtctttgtcgaaggggcccacatgatacgcgagctcgacgtgccaagggagaccatgatgtgcggggtgatcaggac

SEQ ID NO: 1086 - DNA, 276 bp, Triticum aestivum
  Clone ID: uC-tsfl189118f02b1
ccgcttcatcgccttcaagccaccgggctgcgtggagtccggcaaggcctaaacagctcactcacgacaggccatatataaagtgccattgcagttttgtcaactctgacattgctttgggttttccttctccatttatctttcttatttgttcctaagaatatgtgtatgtccatgttcatgtaccaacatggctcgagaaagcatgctcgtatgtgaatgctatcggtggctatgtatatgcacggacgcataatattatacaatatgtcaact

SEQ ID NO: 1087 - DNA, 299 bp, Triticum aestivum
  Clone ID: uC-tsfl189118f03b1
gggcgagcgagcccgcctccgtgcgtggagggcaaaatgggcaatgcctgtgttacgattctttcatttatttttcattttttatactagcttcttggtggggtgtgtaccaggttcgttgtcaattgaatgtgtacatttctatctttttgagctatcgatgaataacttgttttcggatggcatatttcctttttcttttttggccaaggtcaaaaaaaaaaaatataaataaaaaaaaataaaataaataaaaaaaaatactataataataacctacaaatttattataatataac

SEQ ID NO: 1088 - DNA, 438 bp, Triticum aestivum
  Clone ID: uC-tsfl189118g01b1
tctctctctctccattatcctgttctctgtctcccgtcccccacgcctctccttgttcccagcctcttctctctctctctctcccttatcctcttctctctctcccgtcccccacgcctctccttgttcccagccaagatccacctccacctaccgccgttccccaagccgctgacgagcaccaggtcaagctccgccgcccctacctccttctccttcctccttcctgtcttcctcgttctctatctctcccccatacctcaccccttgccctctccctctgaggcagccaacgccatggacggctgcggagcttcgcgccacccgacgtcaaccgcatcgtcgccccaagggatccgtgcgcgtggccgcgttgagccgcacatgcgctagatccatccgccggtgtgtgccaccgtagcaacaagttcggcaatg

SEQ ID NO: 1089 - DNA, 437 bp, Triticum aestivum
  Clone ID: uC-tsfl189118g03b1
agatcgagcaggtaccggccatggactactaccgtgagacctacggcgggtacgggatggcgacgcccgggtacgcggcgccggtgccgtacggcatgtcgcaggtgaacatcgacggcaactacggcgggaggccgatgccgccgcagcccacggtgaagatctactgccgcgccaaccccaactacgccatgtccgtccgcaacggcaaggtggtgctggcgccggccaaccccaaggacgactaccagcactggatcaaggacatgaggtggagcaccagcatcaaggacgaggagggctaccccgccttcgccatggtgaacaaggccaccgggcaggccatcaagcactccctcggccagtcccaccctgtgcgtctggtgccgtacaacccagactaccttgacgagtccgtgctgtggacggagagcaag

SEQ ID NO: 1090 - DNA, 97 bp, Triticum aestivum
  Clone ID: uC-tsfl189118h01b1
tgtgtttcaggatacttcagttcgaagtggactgttcttgctttgtcgttgtattttctgactgcgatttcaatgaaacaataagttgctttcatcc

SEQ ID NO: 1091 - DNA, 438 bp, Triticum aestivum
  Clone ID: uC-tsfl189118h02b1
ccgagttgctgaatcagctagatggttttagctttgatgagaggataaaggtgatagctgcaaccaatcgtgcagatattcttgatcctgctttactccgttctggtcgcctggacaggaagatcgagttccctcatccgacggaagaagcaagagctcggattttgcaaattcactcaaggaagatgaacgtacatcctgatgtcaactttgaggagctggctcgttcaactgatgatttcaacggtgcacagctgaaggctgtttgtgtggaagctggcatgcttgctctacgcagggacgctacagaggtgatccatgaagatttcaacgaaggcattatccaagtgcaagcaaagaagaagtccagcttgaattattacgcttagttttccttgagtaatcagaacgcttggtccagtgatgacctctgtttgt

SEQ ID NO: 1092 - DNA, 235 bp, Triticum aestivum
  Clone ID: uC-tsfl189119a03b1
ggtcagacatggcaccctttaagctgaagagttgcaaaccgacagagattgcttctgaattttgtgtccaagcaagttgcatgtcctcaatatgaacctcttctcaaattacattatcgtgcaagttctattacgaatgatgatgtaatgtgtagaacagattagagtcaacactatgatgttacacttgtatctactgtgttatttagtccaatgtgatacattagtttgttcc

SEQ ID NO: 1093 - DNA, 420 bp, Triticum aestivum
  Clone ID: uC-tsfl189119a04b1
ccttctctgccggccgattttcaagagcattttctgcaagcaatggacgtttcgggcaccggagctggcgccaagggcaagaagggcgcggccgggcgcaaggccggcggccccaggaagaagtcggtgacgcggtccgtcaaggccgggctccagttccccgtcggccgcatcgggcgctacctcaagaagggccgctacgcccagcgcgtgggcaccggcgcccccgtctacctcgccgccgtcctcgagtaccttgccgccgagctgctggagctcgccggaaacgccgccaaggacaacaagaagagccgcattatcccgcgccacctgctgctcgccgtcaggaacgacgaggagctcggaaagctgctggcgggcgtcaccatcgcgcacggcggtgtgatccccaagatcaac

SEQ ID NO: 1094 - DNA, 339 bp, Triticum aestivum
  Clone ID: uC-tsfl189119a05b1
tcatgggagaaggtggtgtataggggaatccttgcgggagagctctggctagcctagccttttacaggcccatgagaagccaacaacacattctttcagtgacatactactccctcctaagcgtgctgctctttcgtgacgtgtacctacgaacaagcttcttcatctgcagaacattccgtgtgcctgttaaaacaggaataaaaatgaataacctggttgtggagcgaataaaatgatttccgagaaaaaaaaaaaatcacaagacctacctacacttataaaaaaaagcgaatgcgactagagagttatcaccaagagaagtgtttcacaattttt

SEQ ID NO: 1095 - DNA, 155 bp, Triticum aestivum
  Clone ID: uC-tsfl189119a06b1
tggttggtcgatggggtgttgtattgtgttgctttcgacgcctcgtgtcatcttgtgatgggcgttcttgtagtctgaactgctaagtgttatgtagttcctttccggttgaattgttattccctgtcgaggacgaaatgaaaatttggttgccc

SEQ ID NO: 1096 - DNA, 395 bp, Triticum aestivum
  Clone ID: uC-tsfl189119a08b1
cagctcaaaaacaactggcaacccttcgcgagcatgcgcgcgggggcacgcaatcaatggcgcttgcagcgatcgccctctccctcgtcctcgtcgccgcggcgccggccgttggcacgtctagtgaggagcttgccgcagtgctccagtgccacccggcgccggcgctcacggacgccaccgacggcacggctttccgggccagcctcctcctgctccttagcgctctcccctccgccgccgcgccgatgggcttcgcctccctgcactccgacggcgcgttcgcccggggggtctgctttggtgaccccaccacgctgtcttcaggctccgagtgcgcccggcgcctgtttgacgccgccaggaacctcacccgccgatgcggtgccaccagc

SEQ ID NO: 1097 - DNA, 247 bp, Triticum aestivum
  Clone ID: uC-tsfl189119a09b1
tctttaagaacaccaccgggccccattgtccttttcacacctctttttctctctctctctcaatatgtatctctctctcgccatccccattcaccagctagctcgagctagcttgctcttctctgctgcaagctgctgatcggttctttgatctttccgggagggaagcgccgggagttggctgttctgtcaggctggctcttgacatgttcagatcgaaggtccaggagatgatcctcaagaggag

SEQ ID NO: 1098 - DNA, 393 bp, Triticum aestivum
  Clone ID: uC-tsfl189119a12b1
cagcgagcgcggttcgagggcggctctggagagatgctcggcttgcttgcatcggagcatgctgatgcgccggacgaccagcctggcgtccatgccgtcggtgcccaagcaggtgcgccagggcagcggcggcggcggcggcgacgacgacgacaaggacaggcaggcgcgcgcgcggccgtcctcctccgtatcggccggcgcggtggggacgggcggcggtgcctgcggtggctacccctttcccgggcgggacgccttcgccgggctgatgatcaccgcggcgttcctgtccgcctgcggcttctgcgccaagccccttggccccggcgaggacacctacatctacaggtaccgccggcgtccctgctttcccattctttgctcggaaat

SEQ ID NO: 1099 - DNA, 514 bp, Triticum aestivum
  Clone ID: uC-tsfl189119b02b1
tacgtacccggggggatgtttgggaagtgaagtaggcttacctaacggtgtccttgctggttacccagttgtggatttacgagcagtgctggttgatggctcctaccacgatgttgattcaagtgtccttgcattccaaattgcagccaggggggccttccgggaaggattgaggaaagctggcccacgactcctggagcctataatgaaggttgaagtgattacccctgaggagcatttgggtgatgttattggtgatttgaactctagaagagggcaagttaacagcttcggagataagccaggtggactgaaggaggttgatgctttcgtgccacttgccgagatgttccagtatgtcagcactctgaggggaatgtccaaggggcgcgcgtcgtacacaatgcagcttgccaagttcgacgttgtcccacagcatatccagaaccagctctctgtggcaaaagaggaagctgctgccaaaatgttcattattccgagataatatatatga

SEQ ID NO: 1100 - DNA, 488 bp, Triticum aestivum
  Clone ID: uC-tsfl189119b04b1
cctatctccccggtgccgttcatgggctcctttccaatcccgtcgcctccggccgcgcgacccggcagcggcagagccctcgccgccgtcgcgccctgcaactcctcggcgtcgccgtcgccgtcgacgtcgacgtcttcggttgcgccggcgagcggcggcaggaggggcgtgctcgcgctgggcgcggggttcctggcctccgcggcgctgctgtgcccggccggggacgccggcgcgacgcgcatcgagtacttcgcgacggtcggggacaagctctgcgacatggacttcgccaagtccgggctcggctactgcgacgtcgaagtcggcaccggcgtgcagcccaagcgcggcgagctcatcaatatacactacacggcgaggttcccagacgggacggtgttcgacagcagctacaagcgcgggaggccgctgacgatgcgcatcggcgcaggcaagattctccgagggcttcaacaggggat

SEQ ID NO: 1101 - DNA, 70 bp, Triticum aestivum
  Clone ID: uC-tsfl189119b10b1
aaaaaaaaaaaaaaagggaaaatgtgaaaaatttaaaacggaaaaccgcgacaccaaacaaaaagggggg

SEQ ID NO: 1102 - DNA, 415 bp, Triticum aestivum
  Clone ID: uC-tsfl189119b11b1
gcagtaaagcatgagaagagccaggtagaagataaacttgaacaggaaaagctgcagagcttccacctgaagaaggaactagctgatgtagagaacaaaaatgcggagcttactaaggaactccagtcagtccgcgatcaactctccgacgaagcagcgagggcttccaaactcgaggatggagtttcagagattcaacaacggctgcagaagatggaaacccttgaaaaggagttcgaattgcttcggagtgaaaggggtggcgggtctgacaaatcaggttcaggcagcaacaagaggcccggcagcgtgggcttccggaggtggtatggagatgacgagcgctgaagcagggactcttctctagggtcgcattcttccatttttggtcggtttctgatcatatatatttttc

SEQ ID NO: 1103 - DNA, 244 bp, Triticum aestivum
  Clone ID: uC-tsfl189119b12b1
acaccatgccgttatacggacagtttatagagctatatacttgtgcataaagtgtatacatacgggctgcaaggtctataattgtagctgccgttgccacgccagtttttcatcaattaccgcttcaataagtttgccattctgtaataagagtcacacagccttggcacagcattcagaaattcaattcttgtaaagttgtaatactccctccgttcctcaatataaggtgtattatttttcc

SEQ ID NO: 1104 - DNA, 237 bp, Triticum aestivum
  Clone ID: uC-tsfl189119c01b1
ggatggaaagtttgggtcttgtcggggggaaaattgggaaaaaaaaaccggaaaaaaaaaaaaaaaaaaaaaaaaaaaaaaaaaaaaaaaaaaaaaaaaaaaaaaaaaaaaaaaaaaaataaaaaaaaaaaaaaaaaaaaaaaaaaagggggggggcccttttaaaggaccaaagtttacttccccgggcttgcaaggtaaaactttttttatggggccaccaaaaaaaaattaagg

SEQ ID NO: 1105 - DNA, 475 bp, Triticum aestivum
  Clone ID: uC-tsfl189119c03b1
gctggtgagaagcctgttcaagggaggatttcacctccgcaacatgattatcatgcctgagatgatcggaagcgtcgtgggcatctacaatggcaagtgcttcaaccaggtggagatcaagccggagatgattgggcactacctggcagagttctccctgtcgtacaagccggtgaagcacgggaggcctggtatcggtgccacccactcgtcgaggttcattcctctcaagtgagaatatggtcaggaaaattgtctgagatgtctggaatccagtgttcttatcctagtcaaatgtagcacctgatataccgtctgtcagtctagtggtggagcagctccctttgaaccttgaactaatccagttccagattttgaagttatcatgaggaggatcgaacatgtttctttccttaaagttgtcatctgttgcgatttgtgtgctcttctaaattttgatcagatttatcggttt

SEQ ID NO: 1106 - DNA, 53 bp, Triticum aestivum
  Clone ID: uC-tsfl189119c04b1
aaaaaccggaaaaaacccaaaaaaaaaaaaaaaaaagaaaaaataccactatg

SEQ ID NO: 1107 - DNA, 253 bp, Triticum aestivum
  Clone ID: uC-tsfl189119c05b1
aagagggacggtttttagggaacattcaaatgctcttgcgctggcaccgaagccaggaagaagtcgtgtactgggtattgtcacatctaagaccatttgaattgttagtggtcacgtgaggcatctgtgtttgatgcacttttacatccgagacatttgaatttgcatcggtgtgttgatgcaagttgtccttcaccatggtttgtatgtgccaccactatggcaggatggtttatccacgctattgtgcact

SEQ ID NO: 1108 - DNA, 376 bp, Triticum aestivum
  Clone ID: uC-tsfl189119c08b1
ccaccacaccggagaggggggaattttagcgtttatgtcggggcgcggcaagggaggcaagggtctgggcaagggcggcgccaagcgccaccggaaggtcctccgggacaacatccagggtatcaccaagccggcgatccgtcgtttggcgcgtcgtggcggcgtgaagcgcatctcggggctcatctacgaggagacccgcggtgtgctcaagatctttctcgagaacgttattcgtgacgccgttacctacaccgagcacgcccgccgcaagaccgttaccgccatggacgtcgtctacgcacttaagcgccagggacgcaccctctaccgattcggaggctaggtcaccaccaccagattagagtgtctgggg

SEQ ID NO: 1109 - DNA, 402 bp, Triticum aestivum
  unsure (1)..(402): unsure at all n locations
  Clone ID: uC-tsfl189119c09b1
ctcaccctcccgtgcttcacgaccccttgttatcatgttacaccaccgacccggccggtccggaccggtccggtcccggctccggaagtctccagaacccgcacaaccaccgncacgcgggcccgcatggcagggtcacgccccccacgcgcctatgccttcggcgagacctctttcctccccctcataaataccgcgcccaagcctcgccgnagatcgaccgggctcgccctctctggtttgctactcctggtgctgctaatcggactcccggccgtccccgccgtcgccgccaacatgaccgaggtctgcgtcaaggccgccgttggtcaccccgacacgctccgagactgttccttctcgcagagggtgctgctcacgctggaggagaagaaggtgccc

SEQ ID NO: 1110 - DNA, 386 bp, Triticum aestivum
  Clone ID: uC-tsfl189119c11b1
ctcaagcacgagcacccgggagggcgttcaccacccacgccgtcgtggctctcctggccgacgtcctcgcgctggcgtccggcgcggcgtcgcaggcgccggcggcggggcctgcggagccggcgggggactgcggctccgcgctgacgggccttaccggcttgcctcccctacattttgacaggggccactcatggcaagcctgccaaggagtgctgcgccagtttcaaggccgcgcttgccagccccgccagcgtcgtctgccatttgcaacgccttctgtaaggactaccggatcctcaagaaccttacccgcgccaagggccttcccgccgtatgcggtggcaacccggtcgtccttatcaactgcagcctgaaactgcccg

SEQ ID NO: 1111 - DNA, 392 bp, Triticum aestivum
  Clone ID: uC-tsfl189119c12b1
gcctcctcctagcaagctatgtaccttcatagttcagccatggcccccaccgggatggcctcgccggccacctccgtcgctcctttccaggggctcaagtccaccgccggcctccccgtcagccgccgctccaacggcgctagcctcggcagcgtcagcaacggtggaaggatcaggtgcatgcaggtgtggcccattgagggcatcaagaagttcgagaccctgttctacttgccaccgctcagtacggaggccctcctcaagcaggtcgactacctgatccgctccaagtgggtgccttgccttgagtttagcaaggttgggttcatcttccgtgagcacaacgcatcccctgggtactatgatggcccgttctggacaatgtggaagct

SEQ ID NO: 1112 - DNA, 441 bp, Triticum aestivum
  unsure (1)..(441): unsure at all n locations
  Clone ID: uC-tsfl189119d02b1
tttaacaactgagcagttttgtgccgatgttgttgctcaccatgatggcgtccctctccgcggccgtggcggtcgaccggtgcgcggcagtcccgcgccgtggcctcgtggtggcccgggccgtcaaggtcgagggccagcaggagccggtggccaagatggcagtcgtggagcccgtcaccgacggccgccgtgccgtggtgtttgctgccgccgctgcggccttgtcggccattggcggggtggcgttcgccgagtcggacgtcaagaaggggagtttccgaggccaagaagaagtacgcccccgtctgcatcaccatgcccaccgtcaagatctgtcacaactgatcgtggggagggggcgatgatgatgcgggtgggcggtaaatattgnactatcgtccggtttatcttttgttgaagttcgagctttgatgcata

SEQ ID NO: 1113 - DNA, 429 bp, Triticum aestivum
  Clone ID: uC-tsfl189119d03b1
ccttttggggtgggcttaaggcagatgtctttgccaagtaccaggcctacgagctcatccatgccaggtgggccatgctcggcgccgccggattcatcatccccgaggcgctcaacaagttcggcgcaaactgcggtcccgaggccgtttggttcaagactggcgcccttctccttgacggcaacaccctcaactacttcggcaacagcatccccatcaacctgatcctcgccgtcgtcgccgaggtcgtcctcgtcggaggcgccgagtactacaggatcaccaacggactggaatttgatgacaagctccaccccggtggcccattcgacccgctcggactcgccaccgaccccgaccaggcggcgctgctcaaggtgaaggagatcaagaacggacggctggtcatgttctccatgctgggctttt

SEQ ID NO: 1114 - DNA, 369 bp, Triticum aestivum
  Clone ID: uC-tsfl189119d04b1
ggggccgttctgattctccaccaggacgggacccccatcactgctgagaagatcgcgacggtggtgaaggctgccggaatcaatgtcgaggcctactggcccgcgctcttcgccaagctcctggagaagaggagcgtccatgacctcatcctttccgtcggatctggtggaggcggtgctccagctgctgctgctgctgccccggctgctggtggagctgctgccgctgcagagaagaaagaacagaaaaaggatgaggcttatgaagagagcgatgatgacatgggctctagcttgttcgactaagcagttcagattccgttctcctgtggaatcttctatgcttaggattactcatcttatgtgctt

SEQ ID NO: 1115 - DNA, 233 bp, Triticum aestivum
  Clone ID: uC-tsfl189119d06b1
gaccgatcatactagactgctattgagtttctactacttgccacctgcttgttattaaaatggttttgcatataggagtatagtagtactgtctatggacttgagtctaacagggatgcatatcgtccgacaaagtaaggcaatgcgattatgcactcggtaaggattcgagaaaccggcagccatttttcagttatgaaaagacggcgcacagagtcctcttccggttgaaa

SEQ ID NO: 1116 - DNA, 280 bp, Triticum aestivum
  unsure (1)..(280): unsure at all n locations
  Clone ID: uC-tsfl189119d07b1
ccacaacaattttcccagagcaagtgaaaattttaaagcgtttctttcaancacaagaaccttncccatacaaacaatatccacaacaacaaccatctgggagcgacgttataagtatcagtggcagatgaaatgaagagatgttatactagacgggtgaatcatcattgttagtaaatggagcataatgtaacgatgataaataaagtgatgtgcaccatcatgtgtaacctcgacctgtactagttcaaacatgggaataaaagacaaataagttctt

SEQ ID NO: 1117 - DNA, 402 bp, Triticum aestivum
  Clone ID: uC-tsfl189119d08b1
agccgaagcactagaggggcgattgctcgcatggcactgctcgtcgtgttcgccgtgctcgcggcactggctgtggcggagatggcgtctggggcggtgacctgcggcgacgtgacgtccgccatcgcgccgtgcatgtcctacgcgacggggaaggcgttggcaccgtctgcggggtgctgcagcggggtgaggaccctgaacggcaaggcgtccacctcggccgaccggctaggcggcgtgccgctgcctcaagaacctggcggggttgttcaagggcattagcatgggcaacgccggcaccattcccggtcccacgcgttcgctacgcgttccgtttaatatttaaatttttctgtttgttttttctcttcattccttttccttattattcctatattt

SEQ ID NO: 1118 - DNA, 315 bp, Triticum aestivum
  Clone ID: uC-tsfl189119d09b1
tcgacaacctgcgccaggggcagtttttcagctttatggcgttcaggccaccgggccgcgaggagtctggcaaggcctaaacttcgagttaaaacaatggcctatgtatgattgttctttgtgaacttcacttttgtccaggactctgctttccgaccagagcatatttttccttcggtatgatctgtgtttgtacgaacataggtttgtggagcatgcatatgtaaattctagcaccggctacacatattcaacaccagtgtgatatttattatattacaacaagcggaccattgtcctgctggtaattctcgg

SEQ ID NO: 1119 - DNA, 372 bp, Triticum aestivum
  Clone ID: uC-tsfl189119d11b1
ggggaaaggcgatggaaggggagattttaaagcttaggcgcggactgggagcagaaaactccaccccgacggaggccattccggttcgctgccggcccgttcctccttctccttgccggcgttcccaagaggtcccatggaggatgacggtcctagccggagcggcctgccgccggtcggggagtgcgaatggagggaggagctgtggcagcagcagtcccaggtcgaggcgctgcgcgacctgctcgtggtggtcaaggttcggatgcggcgcttctaggacgatttcagccgggagctctagcacctgtgtcgcatggtcaatgaccatcgccaccctgctggcgttccttaaattcaatgccaggatca

SEQ ID NO: 1120 - DNA, 406 bp, Triticum aestivum
  unsure (1)..(406): unsure at all n locations
  Clone ID: uC-tsfl189119d12b1
tcgaccgagaccaccggggcgtctatcaagattagatcgtgatgaacaagatcgcctgcgccgnccttgtcgccgcctccgccaccgtggccctcgccgtcgacgccccggtcatggccccggcccccggcgccgtcgtcgtcggctccgtcgccgccttcgttccggccgttggcgccgagctcggggccaccgtgctctccttcttcgcctactacctgcagtaagcgcgccccggcccgagtcagtttgcttcgaggaggaggaaggcaggaagaagaagatcactaaattcgctttgtatggctctacgctacgctgattcaaggcgcgcgcgtgcgttttgaacgatgcatgcgcgtgctttgatttatatgtcttgatttaatattgtttcttcttcctt

SEQ ID NO: 1121 - DNA, 173 bp, Triticum aestivum
  Clone ID: uC-tsfl189119e01b1
caggcacccggtggtgttttctggggtcctttcgaacgactgcgcggtcgaccaaacagacaagcacagtatctgcgaagactcattcgagtcggcaacctatgttagtatatcggatatggccatgaatggggctcgattgggctgctccaagcgacagctgtaggtcctgg

SEQ ID NO: 1122 - DNA, 115 bp, Triticum aestivum
  Clone ID: uC-tsfl189119e02b1
ggggcggcagggagcggttgacggactgttctgtgtcatgggatccaccacaatggggacttaagcccccctggcaagaaacttagccaccaccggggggtccccgctggggttg

SEQ ID NO: 1123 - DNA, 384 bp, Triticum aestivum
  Clone ID: uC-tsfl189119e03b1
tgacgtacgcgagcaccaactagaaggtcaagtggaccctggacggcatccagatcgagatgcaggccaccgaccccagcgaaatgagcctcgacgtgatcaaggagcgcgcgcactaaggcagatcatccaatgccctcgcaatatggatttatgtcaaatatagatttggcggtgtgactcttgaaactttcttgatgatttgtggctttgttaccgtgtcgaaaggccctcctcccgtggcccgtgtgaccacggagggcttgctctatcatgtaatctgttctttttcttgtgcccattgatatgccgggccttatgctgctgcactgcactgttcttccaagttacgggtataaataattaaatgttctgtttggattc

SEQ ID NO: 1124 - DNA, 73 bp, Triticum aestivum
  Clone ID: uC-tsfl189119e04b1
aaaaaaagggaaaaataaaagggaaaaatatataaaaaaaaacgaaaaaaaaaaaaaaaaaaaaaaaaaaaaa

SEQ ID NO: 1125 - DNA, 486 bp, Triticum aestivum
  Clone ID: uC-tsfl189119e05b1
ctgccctgcccagaccgccgttcaccggctcccttgagctcagaggcgccaccaagaaccgcacggaagagagcggatcgatggcgatggccggcggagccccgccggcgccgctgccggtggtggggcaccagttctgcgcgccctacgtggtgccgctgacggtgaccaagaaggcgctcagcctctccgacggcgacttcgccatcacggacgccaacggcgccgtcgtgctcaaggtcaagggcgccatcttcagcatccggagccgtcgcaccatcctcgacggcgccgggatgcccctcctcaccatgcaggaaaaggtgttcagcatgcaccaccgatgggaggttttcagaggggacagcaccaacgcaggtgacctgctcttcaccgtgaagacaacttcgctgatccaactcaagaccgagatggatgtcttcttggcagggaacaccgcgcagcaggtctgcgacttcagatcag

SEQ ID NO: 1126 - DNA, 255 bp, Triticum aestivum
  Clone ID: uC-tsfl189119e08b1
caaggggggttgtggcgcaagcattatggctggtgcttgtcttcgaggtgcgatccgcggatacgctgagcctggagcctgcagcaccgcgtcagtgccaccgggtgctggtattaacagacactgccaaccacgctggatttctgaacaaaaaaaaaaagctgggcagcggttttagatggatccacgctccgataggcttgcatcgccatgcactccgtctgctctagcgcccggtgggtctgttttagtgac

SEQ ID NO: 1127 - DNA, 398 bp, Triticum aestivum
  Clone ID: uC-tsfl189119e10b1
gccgaacctgaccggggagggtggggaaaataaaaatgctgagccgcgccgcccgccgcctcgcgtaccgcgccgacgttgtcggcagcggctccatgagccgcagggccctcgcgacggcgcaggcgcccgcggaggcgggcgaggaccccgccttcctggaggcgtggaagaaggtgaccacaatcattgagcccccccagacgcccatgtcggtcatgaagtcccgcccgcccacgccggcctacattccctccaagctcaccgtgaactttgtcctcccctacaagtacgagatcaccaacaaggaggttgacatggtaatggtaccggctacaactggactgatgggttttttgccaggccatggtttcacaattgcagagctcaagcctggt

SEQ ID NO: 1128 - DNA, 370 bp, Triticum aestivum
  Clone ID: uC-tsfl189119e11b1
ctggatgactattaaggggcacatttttgattttaacgctatcttctggaatcggctagctagctgtatgatagcttcaggatgtgatgatggcagtttctcaattcgcgatcttagattcataaaggatgatggcgccatggttgcgcatttcgagttccacaagcacccgattacatctgtggaatggagtccacatgaagcatcaactctggctgtatcatctgctgatcatcaactcacgtacctgtccctacgattaatttttttttcgattaagtgctgctatcctacgacatttcgaattctcttgctgtaacatgctggattgtttgtcttcagaatttgagatctttcattggaaaaagat

SEQ ID NO: 1129 - DNA, 472 bp, Triticum aestivum
  Clone ID: uC-tsfl189119f01b1
gacaactccctcgcgtcgtctctccggggcgacccgggggccccaaatgcctccaccgccggccggcaatctgcttctcccctgccgccgctgccgccggcccttgccgcggtggcggcgggccccgttcctcgaaggggagggggacctccggccgatgcgtggggcgcggcggcggatcttgggccccggggcggcggcctcggtcttggcgacgacggctgctgcggctgcttgggcggcgcggtggttgggcctggggcggtgctgctgcggccatgctgggtgctcgcggtggaggaagctcggtcctcctgctgcacgacgttcttcggcgcgacgactccggcgacttcgcgggcttgcgtcgccgaggtccttctccagctggcctaggcgggtgggcagccccctggtctgcctgtgcgagctcgtacccgtggcccgcttgtcgatggtgttgccggctcgt

SEQ ID NO: 1130 - DNA, 481 bp, Triticum aestivum
  unsure (1)..(481): unsure at all n locations
  Clone ID: uC-tsfl189119f02b1
tggggtaccccgcagctccagaaccaggacacgcccactgtatacgcacagctcgaccgcaatggcgtcgctcgtcgccgtccagccggtcgccgtgaggggcctggccggcagctccatctccggccgcaagctcgccgtgcggaccgcctccgccgccgtctcccgctccacgcgcagggctcgcggggcggcggtggtggccaagtacggggagaagagcgtctacttcgacctggacgacatggccaacacgacggggcagtgggacctgtactgcagcgacgcggcgtcgccctacaacggcctgcagagcaagttcttcaacaccttcgccgcgcccttcaccaagcgggggctgctgctcaaggtgctgctgctcggcggcggctcgctgatcgcctacgtcagcgccaccgnctcccccgacctgctccccatcaagaggggactcagctgccgtccaccccgggaccacgcg

SEQ ID NO: 1131 - DNA, 481 bp, Triticum aestivum
  Clone ID: uC-tsfl189119f03b1
tcagcataactggttctagtctcacgtcgaagtggtttggagacgctgagaagctcaccaaagcccttttctcgtttgcaagtcggctagctcctgttatcatatttgtggatgaggttgacagcttacttggtgcaaggggtggtgcaatggagcatgaagcaacgagaaggatgcgcaatgaatttatggcagcttgggatggtctaaggtccaaagacagtcaaaggatccttattcttggtgcaacaaaccgtccatttgatctagatgacgctgtaatacgtcgtttgcctaggaggatatacgtggaccttccggatgcgcagaataggatgaaaattctcaagatattacttgccaaagaaaacatagaatgtgaatttggatttgacgaactagccaatgcaacagaaggttactctgggagtgacttgaagaacctatgcgtagctgcagcatacaggccagttcatgaact

SEQ ID NO: 1132 - DNA, 435 bp, Triticum aestivum
  Clone ID: uC-tsfl189119f04b1
ctgccccaaaggttttcctgaattggtccttgagtccaactcagatgaaccagacaccattgagtattgcaacttgggatgtaggtcttccgtgtgtgactacatggtcaacgcagctgctgacgatgaagagatgaaactctatgtggaaaattgtggcgatgcttgtgtcaatttctgtaacggtgatgctggcctcacttcccttgatgcgtaatgatgcgtatccatggtctgagatttcacagggcaaggtcgtgtctcacctttgcgttcaataaaattggatcccatcgagagtatccaaaccagtgtgtcactctgttttatgtgtgtgtatttccattccttgttcgaaataaaagccatcatgatggatgccatgttgctgccctgatgtactaccatgactgagatataatggtatatgttgtc

SEQ ID NO: 1133 - DNA, 531 bp, Triticum aestivum
  Clone ID: uC-tsfl189119f05b1
ccaagtcacctgggggaacttccatgagccgttccacttttgcggaatctcaatgcacaccatcaagcgagatctctgtcaataccaacaagagcaagagcaagagcaaaaaatcgaagtctcatgcaagcagaaggtcgctgactagcccaggcagcaattcagtcggacgaagcagcaccgataatctgtcaaaggattataagcatgcgaagagagagagctcaggcaaggttgccaagtctgacaacgctgatcaagagcctcgcatgagcaacagcactccattgccaagttacatgcagttcacagaatctgcaagagcaaaggcggctgctctatccccaaagttaagcccagatgtgcaagacaacaacccgagaaagaggcattctttgcccatcacaaacggtaaaaacgaaacatctcctcgcatgcaacggtcatcttcccaagcccagcataatgtgaagagcagcgttgctgttcctcacaatccatctgataagaggtggaatatatgatggatgg

SEQ ID NO: 1134 - DNA, 338 bp, Triticum aestivum
  Clone ID: uC-tsfl189119f08b1
acgaagacaggcaacgagaggcgtgagcgtttataatggcattaagggtggtgtactccaacaggatcccgctggtgcgcgccatggagaacctcctggccgcgtcctccgggtctgctctcaggccggctgccgtcgccggcggcgttcgcgggtacaacgccggcgcgcccctccgtagctacgaccgggacgaggcggtcgagcgcagcccccgcggcggcgcgcgcgagcgcgacgtcggcgtgcccagcttcttcttagatgtgttccgtgatccgttcagcgcgccgcagagcctgggccggctgctgagcatgctggaccacgtgtcggcg

SEQ ID NO: 1135 - DNA, 76 bp, Triticum aestivum
  Clone ID: uC-tsfl189119f09b1
tcgtgagagagaagagagggggcgatgtagcttgttgggctcaagttggtggacggagctcacgaggactcgatct

SEQ ID NO: 1136 - DNA, 113 bp, Triticum aestivum
  Clone ID: uC-tsfl189119f10b1
agagaaacttgaaatccctctcttgcttgtcgtgacactcagagaatagtgaaaccatttgatatcctcattagtcagctttcattttcttgaattgcatgtttgtaatctac

SEQ ID NO: 1137 - DNA, 292 bp, Triticum aestivum
  Clone ID: uC-tsfl189119f12b1
ccggcgacagcccaatgggcacgcttgaggatttgtgtgcgtctggcgaccgctacgccggcggaacgaccgggcttcttatctgggccgtgaccctcgccggcctccttggtgggggcgtgctcctcgtatacaacaccagcgctttggccggctaagagagcatctacgtgtaacacagggccgggtctctgcttgcatgcacgtctctgtaatctacgtagctacctcctgtgaatgtatgtgatcaacgatgcacagtgattgattcgaacagatggcttatgtttgt

SEQ ID NO: 1138 - DNA, 158 bp, Triticum aestivum
  Clone ID: uC-tsfl189119g01b1
aaaaaaaaaaagaaaaattataaaggaaaaattaaaaaaaaaaaacagaaaaaaaaaaaaaaaaaaaaaaaaaaaaaaaaaaaaaaaaggggggggccttttaaagggaccaagtttacctccccgggctgggcacggcaaaacttttttttgggggt

SEQ ID NO: 1139 - DNA, 413 bp, Triticum aestivum
  Clone ID: uC-tsfl189119g02b1
atgtggcaaggttgcttttatactaagctttgacgagaacatggaccgcgacgtcaagttcttcacggagacagaggagaacaaccagatgcgtggcccaaggactgccgtcccgtattttctctgacttcagttgtacaattttagaagtcgctgttttaagctgtaagggttaaaagacgaaccggaggtggttattgttgtagggttcagatgatagtccaatctgatgcgttttatttctcgcgcttcttttaaccacatgtacaatagatccttgggagcatcattactcctgtattccttctatgacagtgtccaattttgcttctttttattgtttattattattattggtatacatgttgtacgggcgctatttatatgtcacatatatgcatttggcaacatac

SEQ ID NO: 1140 - DNA, 465 bp, Triticum aestivum
  Clone ID: uC-tsfl189119g03b1
tctccatggccttctccttggccagcaccgttacagccgtgcgcgcggcgggcgcattcacctcgggccgcgtctcgagctcgccgccgccgtcgctgtcgtcgccgttcctcccgcgggtggccggcgcgatcgtcgcgaggaggggaggacgcggggcccgtgcggcggcctcgcccgtgcgcgcgcaggccgccggagccgcgaagaagaacgtgctggtcgtcaacaccaacagcggaggccacgcggtcatcgggttctacttcgccaaggcgctgctcgcggcggggcatgccgtcaccgtgctcaccgtcggcgacgagggctccgacaagatgaagaagctcgcgttctcccgcttctcggagctgacgagcgccggggccaagacggtgtggggtgacccggcggacgtctgcgcggccgtcggcggagcgttcttcgacgtcgtgctggagaaca

SEQ ID NO: 1141 - DNA, 494 bp, Triticum aestivum
  Clone ID: uC-tsfl189119g04b1
tgggcggacgcgggggctattccaggggcgattccgtgacgccgccaggccgccgtccctgagcaatggagtcgaggaagccgcagcgctccgctctcggcgacagctatgtggtccccggcgacgtcatcctggacctcgccgacatgaccaaccagaccatcaagctcggcgccggtctgcgccaggattgtgacactatccaggcaactagtgctgggaggcttcgactgtccaagcccaacaagtactgggtggagaactcccagaagaggtatgtaccttctgtagaagatacggatcttggtattggagttgacaccaaaccagataacttcttggtggacataaaggggcctaatttggcctttttaccagttctttcatttgaaggtggtacaaggaggaacataccaaagtttgagatgggtacattaatatatgccagaatggtgaaagcaaatagcattatgaatgcagagctttcatgcatg

SEQ ID NO: 1142 - DNA, 123 bp, Triticum aestivum
  Clone ID: uC-tsfl189119g05b1
tgtacaagggcgaggctttcttgggcatctcggagtgccggccgcggcacataacgcacgaggagtggaaggacaagtgcacgccaaggtccatgagcgaggcggcggcgccggcgaccagcc

SEQ ID NO: 1143 - DNA, 246 bp, Triticum aestivum
  Clone ID: uC-tsfl189119g06b1
ttaggtcctatttggttcggttgtgtggatttttaaaagcagctgcgaaaaagttgctgcgaaaaacagctgtggaaaatctcatgtgaaaaagatgtaggtcatttggcaaactagctgatatagctttttcaaattttggcctgcagcggaatcattttagaaagcacgtcctgggttgcttccgcttttggttcagattttgacagcggatttctgaaatcggattctgttgggtttgacctt

SEQ ID NO: 1144 - DNA, 423 bp, Triticum aestivum
  Clone ID: uC-tsfl189119g07b1
ccgcccacgcgtccggaggaaccctttcgacgtgcatggggacagcagtgctgcccgtcgcccacaagctctcgctcgcctcccccttcctcccgcgccaccgccgggcctgccgcccccccgcccagcagcactgccggcgccggcgccatggggcggtggtggcgtacatggagccggacccgaactcgccggcggccatcctggggcgcatcgtcggggccctccccgtggtgggcctcgtggcgcgcatcctgagcgacgacggcggcgtcggcggcgacaccgtcgacttcgccgagttccgccgccgcgtcagcaagaagtgcaccgtcatggactcccaggccttctacgacttcaacgaccgccgcggcaaggtgggagaccccttctacgtgctgctctgctgctggctggccg

SEQ ID NO: 1145 - DNA, 428 bp, Triticum aestivum
  Clone ID: uC-tsfl189119g08b1
cccacctcacctcctccgtgccttttgccgacttttcgtcaaggttccggcggcgatggcggcgaggctcgcgcagctgcggaccaaggcggcgcaggcggcggaattcgcctcgaagcacggcggcgcctactacaaggaggcgatggagaagaacaagcagtacgtcgtgcagcctccctccgtggagaagtgccaggagctcttcaagcagctcttctacacgcgcctcgcgagtctaccaggccgctatgaagcattgtggaaagaggttgatggtgtcaagcagctttggaagaacaggaaggagctcaaggtggaggaccttggaattgcaacactgtttggggttgagctttatgcatggttctgcgtaggcgagattgcaggcagaggattcaccttaaccggctataaggtctgaatta

SEQ ID NO: 1146 - DNA, 414 bp, Triticum aestivum
  Clone ID: uC-tsfl189119g09b1
ccatcttcttcctccccggaactcgttgctccttccagaaccgaagctcagtcccgtggccacgcagaacaaaatgcagcgagcaattcaagctatcggatcacatggcagtgtgctcaaatctgctgtcctgcaacacatcagtgttgtgaagcctgctatgctgcctgctgtgttcccgcgcttcatgtcagtatcacctgctcaaatagaggagagtggatttgagagcagcactgttgcggacattttgaagtccaaagggaagagtgctgatggatcatggctctggtgcaccactgatgacagtgtctatgatgctgtcaaatcgatgacacaccacaatgtgggagctttggtggttgttaaacccggggaagataaattaattgctggcatcgtcacagagagaga

SEQ ID NO: 1147 - DNA, 425 bp, Triticum aestivum
  Clone ID: uC-tsfl189119g10b1
cacaacttagtttctgggacgcttttgatattatcatggactcgtggtgaagattgtgttttgcaatttgagtcattttgttaccttttagtcgaatatgtattctgcactttgacatttgaattctttcaggtgcttagataaggctgctgtagtcttaggggaccaagagataaagtgatgcggagcatccttccatcatccccatggactctacagcaacacatccaacccctcaaggacctatgactcgagcacgtgcaagagctcttgaaaccgaggtgacatcactcctctcacaattccctttcgattcacatgagacatggttactacctcaaatggaaacgctatgcatactcaggtaccaaggagttcaccgtgaagaagctaggaagcaaggagaaccggaagcggaagacatg

SEQ ID NO: 1148 - DNA, 430 bp, Triticum aestivum
  unsure (1)..(430): unsure at all n locations
  Clone ID: uC-tsfl189119g12b1
tgggcttcgacaagtccacctcctttctcctctttgcatccggccctgagggcaaggtgccgctcttctggggaatcaccgccgacggctgcgtcgccttctccgacgacatcgacctgctgaaaggatcttgcggcaagtcactggcgcctttcccgcaaggttgcttctactggaacgctcttggaggcctcaagtcgtacgagaatcccaagaacaaggtcaccgctgtgcctgcagatgaggaggaaatctgtggtgcaactttcatggtggaagggtctaccgttgtcgcggcacttcagtaggagattctctcgtctccgtcgctgggcaaagcaagcaaggccgntctcctgtatatggtggtggtgtaatataatgccacaaggcgcgtgtgctactctctttgtgaacttatgtgaactgt

SEQ ID NO: 1149 - DNA, 528 bp, Triticum aestivum
  unsure (1)..(528): unsure at all n locations
  Clone ID: uC-tsfl189119h01b1
gggatatatccatggcgctcttggctgcaaggatcgtcgtcgtcgtgagcggccttgtcatgatgatgatgatgatggcatgtctcctggcgccagcgggcgctgacgagtgcatggacttgtgccttcatgattgcgccgtcaaggggaagaacttgacccaggagcaatgccagtacgcatgcaattacggctgcccctttggcgccgcccagcacgctctatcgaatgcccccgccattgccaggaatggcgggaagaccgtccatgtcctcatccatgtcctcgcagcaacgatgtggctctagctagcagctgctccttcatcgcccgctccagcatcggcaccaatctggagctcctccatcggcgtcaaaggccatcaaagcagcaagcaagcgtcaagatgttatagcggataatacacgtatgctatgttgcatgtatgtatgtgcttatgtatctttatttatcaagcgtgaagatgctgttatatcggatatataatatacttatgctatnttttgc

SEQ ID NO: 1150 - DNA, 543 bp, Triticum aestivum
  Clone ID: uC-tsfl189119h02b1
ttttgttgttgacaggaatgttatggggcgtgtttttgaggctagagacgagctccacaggatgctgaatgaggatgagctgcgtgatgctgtgttgcttgtatttgcaaacaaacaagatcttcctaatgccatgaatgctgctgaaatcaccgacaagcttggtctgcactccctgcgccagcggtactggtacattcagagcacttgtgcgacgtctggcgaagggttgtacgagggacttgactggctcttcaacaacattgccaacaaggcttgaagcgccttgacaagtgcttcatcaagaaacaaacgtgctggatgtctcaacaactcactgctaccattttacatattgtgatatatatacactgtacaagagatagtatgtgtgcgtatgtgacaggccataatctcccttctttaagtgagctagtatttaggtagggtggctctttttgtatggaatttatcagttgccgttccgttgttttaccaggattaatgagttcacatgtgcgttcgacccctatctttttagtt

SEQ ID NO: 1151 - DNA, 314 bp, Triticum aestivum
  Clone ID: uC-tsfl189119h03b1
tctcttttggttggctaatctcgcagggggtactctgtcgtcctcggctgcatgtggtttgtcttgagcttcgtactactgtctactagtgcttgtaactttcttttcttatcccggtctgctcactgcatgctagcgagtgatgggtgtgtatgtgtgtactttgtgtacgctccatgtgtaaattctcgcgtgtgtggtgtggtgttcaccatgtttaaccactctactatggtaagacactcttcacctcagagtctgcttttccttttataacataagatttctgggtggtctttctattggattccagc

SEQ ID NO: 1152 - DNA, 428 bp, Triticum aestivum
  Clone ID: uC-tsfl189119h04b1
ttgggcggacgcggggggtctgtatgggcgctttcgcgactgtctccgatgacgtcgccgccatcgagcgcgcgaacgaggccgcacgcgggcagggagtgtggtgggagctgctgatcaacccgagccggcccgtgcgccgcatgctcgtcgccggccttgggctcatgttcatccagcaggccacgggcgtggactgcgtggtgatgtacagcccgcgggtgttcgagaaggccgggatgaagaacaggaccaactcgctgggggcgatcatggcgggggccgcgtgcaagaccttctttatcccgatcgcgacgcttctccttgaccgggtcggtaggaggccgctgctgctagccagcggcggcgggatggacatctttctgttcacgcttcgcacgtccctgcttatgctcgaccggcggccg

SEQ ID NO: 1153 - DNA, 404 bp, Triticum aestivum
  Clone ID: uC-tsfl189119h07b1
cattcgatggcccaatggggcttggggacttttttaggcgacttggcatgaaccggacctgctacagaatgtgaagagggtgagtccatggctggttgagctggtctcaaacatgccggccattcacctcgctccgttctcgccgcctcggaagaagctctgtgttccgttctaccccgacctcccggtcgacggccagtttccggccccgatgttccacggaaacccactcggacgcggcggcgtcggtccgatgtgctattttccggacggcactcctgcaggcatacagggagccaggcatgctcaatttggtatatctctatcagatctccaccttaacaaactgcagtcgagtctgtcaccgcacgggcttcaccaggtcgatcacggcgggcagccga

SEQ ID NO: 1154 - DNA, 279 bp, Triticum aestivum
  Clone ID: uC-tsfl189119h08b1
ggactgcatcctctccgggggcacttttacatatcacactgctcgtccttgcctccgaacaattacatctacagaccaccggatatgtgcgcgcgccgccggttaccgagcgccggccatgttggtgcatggcgggtacacggagcacttcgtgggcagggggtccagtcttgcccgacgcgttttaagcgccacccgccgccttctccgtcaccgacttcgctacggagtcagagccttctctctcctccttctcatcgggcaggaagacgcgccccg

SEQ ID NO: 1155 - DNA, 420 bp, Triticum aestivum
  Clone ID: uC-tsfl189119h09b1
caacctcaccgacttcggggtcgcctacgccgttcgccgcgtcgtcagggcagccgcggagggcatcgcgcggtgcccgggctgcaagaccagcctcatcaccttcctgcggacctactcgcccgaccacttcgagcagggctcgtggttcgacggcggctactgcaacaggacggcgccgctgcaggagcgggaggtgagcatggagagcatcgcgtgggagctgaggagggtgcagagggaggagatgaggcgggtgagggcgaccaagaggaggttcggggtgctggacgtgaccaaggccatgatgatgcgcgccgaccgccaccccgacaatcacttcgacagcaggtggaggaggaacggcagcgactgtttgcactggtgcctgccggggcccgtcgacatgtggaacggcgt

SEQ ID NO: 1156 - DNA, 425 bp, Triticum aestivum
  Clone ID: uC-tsfl189119h11b1
ctccctgatggtcttatgagggcctctgatgttatgatcgctggcacggttgctgaggtctgcggttatggtgatgttggcaagggctgtgccgctgcactcaagcaggctggtgcccgtgtgatcgtgacagagattgaccccatctgcgcccttcaggccctgatggagggcatccagatcctcactttggaggacgttgtctctgatgctgacatctttgtgaccaccactggaaacaaggacatcatcatggttgaccacatgaggaagatgaagaacaacgccattgtctgcaacattggtcactttgacaacgagatcgacatgaacgggctcgagacctaccctggtgtcaagcgcattaccatcaagcctcaaactgaccgctgggtcttccctgagaccaacacttgcatcattgt

SEQ ID NO: 1157 - DNA, 414 bp, Triticum aestivum
  Clone ID: uC-tsfl189120a01b1
ttaagtttaagagcagtgtttgccttttttgtgcttgtgtgtgatcgaacatactagactgctattgagtttctactacttgccacctggtagtattaaaaatggttctgcatataggagtatagtcgtactgcctatggacttgagtctaacagggatgcatatcgtccgacaaagtaaggcaatgcgattatgcactcggtaaggattcgagaaaccggcagccatttttcagttatgaaaagacggcgcacagagtcctcttccggttgagaaaaaaaaaaaataagaccagaatccatagacattatactgagccaagctgttatcttactgtttgaatgaaatgaactacttttccctttttccataaaaaaaaaaaaaaaatatggcttcttttttggggggcccttt

SEQ ID NO: 1158 - DNA, 95 bp, Triticum aestivum
  Clone ID: uC-tsfl189120a02b1
ttatcgccttggctatcgcagtcccgatttctgtatatcatcgcccgtgccatcgtctcgtgaatggtagcagaatttgcacacgtttgttctat

SEQ ID NO: 1159 - DNA, 482 bp, Triticum aestivum
  Clone ID: uC-tsfl189120a03b1
cggcccccagctcaaggccctgagggagtccaggaagttcgcgctcggcggggccctggccggcgccgcgcacctcggaggcgttggcttcaagtactccaagagcccgcacggtgtcgtgctggcgaccgggttcggagcgctcacaggcgccgggctcgggtcggaggtgggcgagcactggtacgagctctacaagatggacaagcagggggccaacctcaggttcatctactggtgggaggacaaggtgtcacgccagaagaactgaagaagacttctgcataagcttatgcctgtttcagcatactggtttgacaagacaatgatgtctccagtttgggatttctagtttttacttcctaggctctttccaataaggagcatattggccatcaactggacaatggattttattctctctactatgggctgctctcaggttctctatgatgttcatgtttgcacctatcgaaaactaa

SEQ ID NO: 1160 - DNA, 328 bp, Triticum aestivum
  Clone ID: uC-tsfl189120a04b1
ctaggatattggtcagcaattgatcttttttggatgttgatgaagctctttcagaagctcagaaatactgctgcgtagtttccttgtatcaatgggaaactggggcttctgtttttgtttttggtttcccaacgttggatgaataatgtgtacctaaagttaatcaaacaaaatatgttccccttgcaaattatttaccctttccctccttgattgtttgtgaacaatgtgtgatgtttgctgtatctattatggatttttatatggatatacttaaacaaaaatgaaaaactttcaataactgactttcaaggttgtcaacagatat

SEQ ID NO: 1161 - DNA, 443 bp, Triticum aestivum
  Clone ID: uC-tsfl189120a05b1
cacctcttcttcttcttccatagtaacccaacccaccctttgcgaagatgtataacgctccgtcggggcaggagatgtcctacacggagcacgtgcagaagcgccacgaggagaagggctgcatctacgcatgcgtgttcacagcgctgtgctgcttctgctgctacgagacatgcgagtgctgcctcgactgcctctgctgctgctgcaactaaaccggacatggccgccatggacggaggccgcaaggcgcagaggagatccaccggcctccgccgcctttcataataagcatatgtgtctagtgtcttagctcgatgagaactgtatcacaactttgctataatactatctgtccttgtaatcatccatcatggtttgtgttgttgctgctgctctaccattttaatttaattagcatcagattatggttctcaccaaat

SEQ ID NO: 1162 - DNA, 219 bp, Triticum aestivum
  Clone ID: uC-tsfl189120a06b1
aactcccaaaccgcaatggcaaaacgcctagccgaaaaagcatcctgctgctggtcctgctcgatgcggcgacccttttagagctccatgggaagcacggtgctggtagcgccgtaagagatatgaagggtgcgacgcaagaccactggttggcggcaccttttgaaagcgggggtactggcaaaacctggcgggaccccaacatagtgtattgggggg

SEQ ID NO: 1163 - DNA, 440 bp, Triticum aestivum
  Clone ID: uC-tsfl189120a09b1
gcttcgagccagggcggttggcggcagtttgcggggacgatggtcgggatcttctccaggttctcttccggcgccggccaccgccgcgccaagaagtgccgtggaggttgtggagacattggcgcccaacatggagaccggggagtctgacccggcagctgatcctggagatagcccgcacggcattgaggtcggcatcgagttcaagccggtggagcaccctgtggagcctgtcaaccttgaccaaccagtgaaatgcccgcttgctgagccatctatactgcatgatgggaggatatggcaagagaggatgtctacagcgggcgggaggccgaggacggacctgccggtcgtgaaggaaggattgcagctcgagcccgacagcagcaccacaaggtcgaggtctgcggtaccgaggcgcgccatactgccctccgtga

SEQ ID NO: 1164 - DNA, 143 bp, Triticum aestivum
  Clone ID: uC-tsfl189120a10b1
aaaaacggggaagacaaaaagaaaaaaaaacgcgtgcccacatggctggggcggcctacatggtggcacccccggggctttcccgggcggcgcaccaccgagggccttgatggggcaaccttgaacgagccgtacttaatctg

SEQ ID NO: 1165 - DNA, 77 bp, Triticum aestivum
  Clone ID: uC-tsfl189120a11b1
aggggccgtcttcgaggcgggttgtggggggaatgcagcccaaatcgggcggtagactccgtccaaggctaaataca

SEQ ID NO: 1166 - DNA, 157 bp, Triticum aestivum
  Clone ID: uC-tsfl189120a12b1
aatggaaacgcgggcgtctagagagaagtgtccattggtggcatggaacctgtgttgcaaagagataataacaaactagctttgcttagtgggaggggctgtcttccatgttatctgcctatatgatttgacaaaactactcgcaagtttatctgcc

SEQ ID NO: 1167 - DNA, 77 bp, Triticum aestivum
  Clone ID: uC-tsfl189120b01b1
gacaccccctggggcggttcatgaagcgcgtagggggactttgttacgcgctggatgtccgttccacttgccagggc

SEQ ID NO: 1168 - DNA, 211 bp, Triticum aestivum
  Clone ID: uC-tsfl189120b02b1
atgcgcggacgtgatgccacgtaatgggtctcctatagtgaaacctaaatcaattaatggacggctttacaacgaagcgactgcgaaaaccatggtgttacccaagtaaaacatcttgctgcacatacctgtttggtcagctggcggaatagctaagagggccgtaccgatcggccttccaaacagattggcaaactgaacggggaatggt

SEQ ID NO: 1169 - DNA, 442 bp, Triticum aestivum
  Clone ID: uC-tsfl189120b03b1
gctagctaccttgaggaaatggccgttgcgacggcaatggtcatcatgctggcggcgctggcgatcctcgcgccgtccgcgcgggggctcgaccggaccgagttcccgcccgggttcctcttcggcgccgccacgtcttcttaccagatcgagggcgcgtacctggaggacggcaagggcctcaacaactgggatgtcttcacccacacccagtctagggaaatcaacgatggacggaacggagacgtggcggatgaccactaccaccgttacatggaagacgtggcgatcatgcatgatctgggtgtaaactcctacagattctcgatctcatgggcgagactcctaccaagaggccggctaggaggcgttaacacgggtgcaatagctttctacgaccgcctgatcgccgcgctccttgagaaaaggatagagccgttcg

SEQ ID NO: 1170 - DNA, 496 bp, Triticum aestivum
  Clone ID: uC-tsfl189120b04b1
cccacaacatctgcgacacctttctctacgagctgcaattagatcatagctgaggaggcggcaatgaccactgaggttctctttgtggtttctgattttgcggaagctgaatgacaatagtaatgactggtggatccatgtttgcgtttgctgacgacaacgataatgagtttttacggctgcacttgagggtgatcgtatccatgctaccattctgcagtatcttgagatttctacagtggagtagtacacaactacctatcacaagtttgagcttagatgaacaacatgggcaccatcaaacggatagatcatgcgcctgatgggtctcatgatggagtagttgataatggttatatacaaaacatattttgacagaggtggcaccagacgtcacagagaggtaccgcgttcggtccaacgaggagctccgggcatggtgggcggtggccatggcattggcctcatgggtttactctgactgtcgccgccattc

SEQ ID NO: 1171 - DNA, 150 bp, Triticum aestivum
  Clone ID: uC-tsfl189120b05b1
gtgcagacctacggcatcagcagcgatttccatgaagcgctggatgtccgacacccggatgacgtcgtggtaggaggagcggcggatctggatggtgtggtggccgcggtgcgcgtgcgcgaggcacagcgagcagagcgccgacgcgcc

SEQ ID NO: 1172 - DNA, 320 bp, Triticum aestivum
  Clone ID: uC-tsfl189120b06b1
aaaaaaatgggaagggataaattataaaaaaaaaaacagcaatgacaaaacgacataaacaaagagctactgatgatggtcctgctcgcgttcaaagacgcctaagagctgaatgggaagcacggcgctggtagtgccgtcagcgagatgaaggctccgttgcccgaccccgggttgccggcaccggttgccgcgggggtactgccaccggttgtcgggacagcatcatcggttatcggggggacctgatccgtttcaaaagggtacactgcctcaagttcagcactgttaaattattgtcccctctgcacagcaaatgg

SEQ ID NO: 1173 - DNA, 484 bp, Triticum aestivum
  Clone ID: uC-tsfl189120b07b1
gtgggcttacaacagcggcaccttcgtttttctgctcgcgggcctggtgaccacctggtccatcgcaaagacattgacctagagctctttctcaggcaacaacaatggtggctttcatgaacccgggaagcatatacaactagaggaattttatttttttgctcgagtgacggtaatgcgcaacccagtgagacctgttgcagatttgttcattggccgtctcttattaggtgggtgattagcagtagtcgttagtgtcatactactctagcttgtaccatagtatatgctatttttcaccgtgtggtcaactcctatctggtttgctggtgtacgctgtgtagctatgggtattgtatttggagggcagatctcatttgttcattctcaagggtgttttggtagctgccatgattggtctgtgtaatggctttggcttgccaatggaaaatgcatacattcacttgtatacgcaagttctgtt

SEQ ID NO: 1174 - DNA, 378 bp, Triticum aestivum
  unsure (1)..(378): unsure at all n locations
  Clone ID: uC-tsfl189120b08b1
tgggacctcaccgcgcgcgtcttctctcgtttgccagaacgtgagcctcgacctgggcaggttcggcgacaccctccggaggctgcacttccgggggcggcgcacgttcgtacgtgacagggcgctggatcgatcgcaaccattttgttggactcttgttcgacagcacagaccacacaatgtgttttgtttatttgttttgttttgtttgtgcacaaaagaccatatataatccgtcgaatactctgatgacgnaaaaaaaaaaaaatataaaattaatataaaaagaataaatttaaagaatataaaaaggagaaattatctaacatttgcaatatttttttataataaaaaattggggggcggccgttttaaagg

SEQ ID NO: 1175 - DNA, 410 bp, Triticum aestivum
  unsure (1)..(410): unsure at all n locations
  Clone ID: uC-tsfl189120b09b1
ctgggaggtggcctgggcaaggtttagagttttaagaggcccctcgaggtttcccgccaggaaaccggaggcgggctcgtcggtcaccgccgttacaagcgcgagcggctgcatgtaaatctgtacatcattacatgagctctgactgcctctgctgttgttgctgcccgtgattctggagctagtaaatatggctagtttgcccgtggaatggtaggtttcgatgcgctgcctcgacaaaaaataggttcggtcgggcgcacctggaacatgaggaggatttgtggtgaacgcgagctgtttgcaatggtgtggaatgtcaacaccggaggcgtngtataagtgtaacccatacctcacatgacctcacatgagaacgaaaaataatggagcatgttctgcaagcctgg

SEQ ID NO: 1176 - DNA, 345 bp, Triticum aestivum
  unsure (1)..(345): unsure at all n locations
  Clone ID: uC-tsfl189120b10b1
ctatcgcagaggttcatgttcgaggagggttgatactaccactgctgttgctcgatccccttgcccgaggtggctcagacggagtgagctccgtgtgtttcaacataatgcagtattcagtcttgacgcagtatcttatgccctcgggatcagtacgtggtcttgtttgccctcatggaatttgtagttttggccggatgtctttgctcgtgttgctgtggacattgtgcacggtaatgagtggtagcatccctagccacgggttgtattggcttagtgcccctgttgatttctgaatctgaactgttggttgccactttgcttcatcttctctctatccgnttt

SEQ ID NO: 1177 - DNA, 274 bp, Triticum aestivum
  unsure (1)..(274): unsure at all n locations
  Clone ID: uC-tsfl189120b11b1
cttgttctgcagtgcccctcaagcgatggttcgaaagacagtacctgtagattcatgtatcaacattgtccctgtataaccaaagtaaacagctgtcaagatgatgatatgtatttcacaaaanacaaaaaatgagaccaaaaaagaaaaaaaaaaagctaaaaacataaataaaactggggggtccgctttcgaggatcccagtttccgtcctcgagcgtgccacgtcatatcttttcttttgtgtggcctacttagattttacttgccgggg

SEQ ID NO: 1178 - DNA, 485 bp, Triticum aestivum
  unsure (1)..(485): unsure at all n locations
  Clone ID: uC-tsfl189120b12b1
aactaccattgggccaacattcccaacaaccattctttcagcctcaggaaccccaacaaccatttccccagtcacaacaaccacaacaaccttttccccagccccaacaacaatttccgcagccccaacaaccacaacaatcattcccccaacaacaacaaccggcgattcagtcatttctacaacaacagatgaacccctgcaagaatttcctcttgcagcaatgcaaccatgtgtcattggtgtcatctctcgtgtcaataattttgccacgaagtgattgccaggtgatgcagcaacaatgttgccaacaactagcacaaattcctcaacagctccagtgcgcagccatccacagcgtcgcgcattccatcatcatgcaacaagaacaacaacaaggcgtgccgatcctgcggncactatttcagctcgcccagggtctgggtatcatccaacctcaacaaccagctcaattggaggggatc

SEQ ID NO: 1179 - DNA, 276 bp, Triticum aestivum
  Clone ID: uC-tsfl189120c02b1
gcaagatggccggaaggaagggcggcgacaggaagaaggcggtgacccgctccgtgaaggcccggcctccagttccccgtcggccgcatcgggcgtttccttaagaagggccgctacgcccagcgtgttcggctccggcgccccccgtctacctcgccggcgtccttgaggtacctcgctgccgaggtcctggagctcgccggcaacgcggccaaggacaacaagaagacccgcatcatcccgcgccacctgctgtttgccgtccgcaacgaccag

SEQ ID NO: 1180 - DNA, 461 bp, Triticum aestivum
  Clone ID: uC-tsfl189120c04b1
ctcatccctggcacaagctttttggtaatgtcgtatgccacctgaagcagttgatcttgtgtcaaggctacttcagtactcaccaaatctgcgcttcacagctgtcgatgcttgtgcccatccgttcttcgatgaactgcgggatcccaagacctgcttgccaaatggacggccattaccaccattattcaacttctcgggagctgagctagaaggcctccctgttgagctactccaccggatcattcctgaacatatgaggaagtgaagagagatggcggctggagaagcggtcgctatttctcggcgccactgtgcgggtggagaccggacaccgcgagcatatccatggctcgtcgtggatttgatctggagtagactccccggctggcctggactggcctggagctagagaagggcaaccgcgggcatgtgcccagggcccagacccacccacactg

SEQ ID NO: 1181 - DNA, 449 bp, Triticum aestivum
  Clone ID: uC-tsfl189120c06b1
ctgcggctactccatgaacgccttcaacttatctgccttctccaccatccatgtgacccccgaggacggcttcagttacgcgagctacgaaggcattgggcatggacgcttcggccctggcctatggcgacatcgtcaagagggtcctccggtgctttggcccttcagagttctcagtggcggtcaccatcttcggtggccgcggccatgccgccacctggggcaagaagctcgacgccgaggcatacgactgcaacaacgttgtggagcaggagctcccctgtggaggcgtcctcatctaccagagctttgccgcgaacgaagaggttgctgtctctgccgggtcgcccaggtccgtctttcactgcttcgaggccgagactgtggagagccacccgctggtcaaggaaggcaagctcgccaacctcctcgcatggcgagcggaggat

SEQ ID NO: 1182 - DNA, 361 bp, Triticum aestivum
  Clone ID: uC-tsfl189120c09b1
aaggacggcgggtgcgaccagttacttttccgacgggaagcttgtgaccgagttctccgcgcccaactactgcggcaagtgtggcaacgacgggagccgtcatgaccgtcgccggtgacctcgcctgctccttccgcgtcctccaccctgatgatactgccgctcctcctccggctcctatttatctgtagtccaacatatatatatattcattttagtttcagacgccttgccatggagtagtaatctccagctcgtcgtgtcttcggtttattaagagtgaatttcagtttttgaatgtattgcaggtttttgtcccatttagctaaagttttactaccagatttattttaccacattt

SEQ ID NO: 1183 - DNA, 514 bp, Triticum aestivum
  Clone ID: uC-tsfl189120c11b1
tgtgttatggtatcgccctctttataaggcgatgtgaactgagagtgctttgaagtttgggtggtttttcctattttacatgattcacataatcttctgcgtgtggtcagctgtgtctcccccattccctttcaaaggaaattctttgactgggattttgcctgccattgatgtcataaccaagagccttattgttgggatattttactttgttggatttggattgttctgccttgaatcactgctgagcataggtgtcattcagcaagtgtacatgtacttccgtggaagtggaaaatcccaggagttgaaacaacaggcagcacgtggtgccctgagctctgcgttctgatgaagaaaaccagcagccagagttgtagccagggtagtgagtggaaggagacaggatgtgtgccgattggaaatggtagtcttgcgcatcgctgcaccatgcggatttggatcgctgaaatcatacagctatatctttttgctcttctgttaatacaaatat

SEQ ID NO: 1184 - DNA, 144 bp, Triticum aestivum
  Clone ID: uC-tsfl189120c12b1
tcgccataagcaatagaaccttttttgttttaccattttctgacgaggaattgtactaccatgtgatgcataatttgatcgtcctgtgatcaaaagacatcatatataagtttaataatattttcatgaacagtttaccctttt

SEQ ID NO: 1185 - DNA, 393 bp, Triticum aestivum
  Clone ID: uC-tsfl189120d01b1
gcatcctctcagtccttagctttcttccctcgccgccacccaccaaggaaaggaggatgtcttgctgcggcggcaactgcgggtgcggcgcctgctgcaagtgcggcaacggctgcggcgggtgcaagatgttccccgacgtggaggccaccgccggcgccgccgccatggtcatgcccaccgcctcccacaaggggagctccggcgggttcgagacggccggggagaccggcggctgcgactgcaccacctgcaagtgcggcaccgcgtgcggctgctcctgctgcagctgcaactgagccggcgcccaggaggccggccggcagaggcgagcacgaggatgaggaggacaagcaagcaagcaccatcaccaccagtttaccaccacccagc

SEQ ID NO: 1186 - DNA, 386 bp, Triticum aestivum
  Clone ID: uC-tsfl189120d02b1
acgtgaggtgataagaatatcctgatgatattaggtcgcactcgcaccaccaccgatcagaagccaccacgccaacgctgtgccgccgccgaacttttggagaggagacgcggaggacggcaagatgggattcgagaaggagatcctgaaagccggcaccggccccaagcccgtcaagggccagaaggtcaccgtccactgcaccggctacgggaaggacggtgatctgtctaagaagttttggagtaccaaggaccctgggcagcagccattctctttcaacattggtctcggttcagtaatcaaaggatgggatgagggagtcatgggcatgcaattgggtgaagtcgcccgtcttacgtgcaccccagactacgcttatggat

SEQ ID NO: 1187 - DNA, 404 bp, Triticum aestivum
  Clone ID: uC-tsfl189120d03b1
caagatcaaaagcattatctttgtttttcgcattggtgtctccaaaactacgaacaacccaagtttcctttgaatcagcacttgaacaaattgtggagctagcgaattcaagatcaaccatgctctctagcttctcacagataaagcgcagatcatgaatcgattgcctgatttgaggttctgtacccttgcacaccatctattctctttgtggagtatcagttatatgcaatcgacagcgctcgtagaaaatatcataatcctatttgaaatgttgatgcacgtggagatgtatgagagttgtgttttgcgtttcattatcttgctgttgaggcaagcactatgtctgcatattgacggtttcctttggggaaatcaacggggaaacttgttcttctgaaaaa

SEQ ID NO: 1188 - DNA, 494 bp, Triticum aestivum
  unsure (1)..(494): unsure at all n locations
  Clone ID: uC-tsfl189120d04b1
gaaggacaaggaacacgccaaagaggcctaaccggcgaaggaaaagaaggacaagaaggagaagaaagaaaagagcaaggagaagaaagaagaaggtcggagaggtaactgacacggccaagctgagggcaaagctagagaagatcgatgtgaaaatcgatgacctgaaggcgaagaagcaggagattgtggctcgactcctcgagctcgagggtaaggcagcagaggctgcagcaccagcgagcggctgaggtttcgacaggttgttgccttgagaagaatgaaacagctttcaggcaatgcatgcagctagtgacatcttattattgttctttcgattggcatattattgtgctttaatcttcctggagctacatatttgcatccagcattgcatgatcatctagatttggtgcacacaagtgtccaccttgtatcgaatcccggggtaactgtggcatgaatgtacctcttaaagatccacntttaattaa

SEQ ID NO: 1189 - DNA, 565 bp, Triticum aestivum
  unsure (1)..(565): unsure at all n locations
  Clone ID: uC-tsfl189120d05b1
acacacggacacacgtgcaagttcgagttcgtgagccatggcgggcatggggaagcagcaggtggtggcggcgctgatgctggcgctggtggggctggcggcggcgccgggcggggcgcacgcggcgtgccaggcatcgcagctggcggtgtgcgcgtcggcgatcctgagcggggccaagccgagcggcgagtgctgcggcaacctgagggcgcagcaggggtgcttctgccagtacgccaaggaccccacctacgggcagtacatcctgagtccccacgcgcgcgacaccctccagtcctgcggcctcgccgtcccccactgctaggcgccggcaggcccctggcgcatatggcaagctagctgcctcagtgaccatgagagcgtcagactatagctagccctagctgagtgcgtgttgcgttcatgaacgcatcttcctgtcaaccatgtggttcgactttgatgatgctggaataaaaatataaaatgttgggtgatgatctaccgcggncatgttgcttctggctgctgctgctggtaataaaatataggtgcaactttg

SEQ ID NO: 1190 - DNA, 409 bp, Triticum aestivum
  Clone ID: uC-tsfl189120d06b1
aggccctcggccgggcgaacgttatctttctggacgctcaagaacgtgaccccggcgctgcacccggagatgatcctggcggcgaccaacaacggcgacatcgtggacgcctaagcaaagcaatgaaccacggacaccaaggcgtacgtacgctggtgtttcggggcgaaaaatcaataagatggttcggtgaaacagaggatgcttagggacgaggtcttgtctttgtgatttgtcagactcgtgtttaattccgatgtttatctttagttttcttgtgttagcgtattttgttcatgccacctgcccgccatgtgctctgctctgctctgcctcacggcagcttcatggatgatgaatccttatggaacaagaggagggaataaaaaggttgagttctttataaaaa

SEQ ID NO: 1191 - DNA, 548 bp, Triticum aestivum
  Clone ID: uC-tsfl189120d07b1
cccccaacccacaaccacctgcggttgcgcagcgcagctcgaggaaggaggcgaagatggtgaagttcctgaagcccggcaaggcggtgatcctgctgcagggcaggtacgccgggaagaaggcggcgatcgtgcgcgtgttcgaggagggcacccgcgaccgcccctacgggcactgcctcgtcgccggcctggccaagtacccgaagaaggtgatccgcaaggactcggccaagaagacggccaagaagtcgcgcgtcaaggtgttcctcaagctcgtcaacttcacccacctcatgcccacccgctacaccctcgacgtcgacctcaaggaggtggcctccggggcgcccgactccctcacctccaaggacaagaaggtgggcgccgccaaggccgccaaggccaagctcgaggagaggttcaagaccggcaagaacaggtggttctttaccaagctccgcttttaggcctgcaggccgaccgcgcagggcgtttctctgtcgtactaccttgacccgttacattttagctgcttgctcttggat

SEQ ID NO: 1192 - DNA, 542 bp, Triticum aestivum
  Clone ID: uC-tsfl189120d09b1
cgcttcctggtgacaatgtcggtttcaacttgaagaacgttgctgtcaaggatctgaagcgtgggtttgttgcatccaactctaaggatgaccctgccaaggaggcagccaacttcacctctcaggtcatcatcatgaaccaccctggtcagatcggcaacggctacgccccagtgctggactgccacacctcccacattgctgtcaagtttgctgagctggtgaccaagattgacaggcgatctggtaaggagattgaggctgcgcccaagttcctgaagaacggtgacgctggtattgtgaagatgattcccaccaagcccatggttgtggagaccttcgccacctacccacctcttggccgcttcgctgtgcgtgacatgagacaaacggttgctgttggtgtcatcaagggcgttgagaagaaggaccccaccggcgccaaggttaccaaggctgccatcaagaagaaatgagtgctctggtgtctgccatcgagttatctagcagaagttttagtgtcaagtcttttttggagaatc

SEQ ID NO: 1193 - DNA, 365 bp, Triticum aestivum
  unsure (1)..(365): unsure at all n locations
  Clone ID: uC-tsfl189120d12b1
cccgccggtctacggggtgttctactcgtcgtcggcgcctccaatgccgctggtctacggggtgtcgtacgggtcgccgccgccaccgacggggccgtagaaatagctgctagctaggtagcaccactagctagccgcgccgcaggctgatctatcggcccggccgccacctccacggccggatcgctcgtcgtcagccagccagccagtccgtccgtccgttcgtccgtccgtccgtggctcgtccgtcaccagtacatctctgcctgtagtttcttgctctcctcctctccttgaacgttattttttgttctctgttgtccatttgttatgtcgctatttgatccgaattaaattcttnccac

SEQ ID NO: 1194 - DNA, 373 bp, Triticum aestivum
  Clone ID: uC-tsfl189120e01b1
ggcaagcacgtggtcttcggggaggtcttcgagggcatggacgtcgtcaagaacatcgagaaggtgggctcccgcagcggcacctgctccaagcaagtcgtcatcgccgactgcggccagctctagatccgtccgcccgccggtcgcctgtcgtcgtcgccccgtgtcccgtgtcgtcgatctaaataagagagtcgtgtgtcgtgtcgtgtcttccccttgtccgtccgatgagatctccgtggttggtttaggagggttttaggtggactcttttggccgctggatctgtgtccggcggccatggttatcttcctgtgtctgctgctatcttactgtttgaatgagatgaactccgctatgaattatccat

SEQ ID NO: 1195 - DNA, 507 bp, Triticum aestivum
  Clone ID: uC-tsfl189120e02b1
tggatgagacgtgctggagcgactatgttttctgcaaggagactggcaacatgtactgctgctcgaagataatggcggagatcacggcgaaggaggaggcggccaacagggggctggacctggcagtggtggtgccgtcgatgacgatcggccccgcgctgcagcagaagctcaatctgggcatcgcctttatcaaccgctacctcacgggcgccaagaagacctgccccaacgccgtggccggctacaccgacgtccgcgacgtcgcccgcgcccacgtcgtcgtctacgagcgcccggacgcacgcggcaggtacctctgcatgggcgccgtgctgcaccgtgcccatttcctccagctgctccgagaccttttcccgcagtaccccatcaccgacaagcgtgaagatgacggcaagccgatggccaagccgtacaggttctccaccagaggctgagggacctcgggttggagttcactcccctcaagagagtttgtacgacatg

SEQ ID NO: 1196 - DNA, 397 bp, Triticum aestivum
  Clone ID: uC-tsfl189120e03b1
tagcttcagctagccaccctcttccacttcgggcattttcttgcatccacgacggcaatggccaccgctgatgtccagaacccgacggccgcgctgacggaggaggcgcccgcggtggagacgcccgtcgccgccgaggaggccacgaagacggaggaggtccccgcgccggcggaggccgaggtcgaggcgcttgtccccgtcgaggttgaggagaccaaggaggaggcgccggcagccgctgagacggaggagaccaaggagcccgagccagcagctgccgccgagccggaggccgaggcgcccaaagagccagaggcgccagccgtcgtcgaggcagagaccaaggaggccgtggctgaggcagagccggcagtcgtccaggaggtgaaagaag

SEQ ID NO: 1197 - DNA, 419 bp, Triticum aestivum
  Clone ID: uC-tsfl189120e05b1
gccagcgagaaagaggagagggttggccgtttgaagcacttcgccgataaaatcgaacaggttgatgttgagaatttcgtagaagacgtcgatggcggcgatgaagatggcaaagatgttaaactgaatgcaagtgctggtgtgaagagaggcaggccactgaaggagagccccaacatcgtcctggaagagaacagcaattccagcgttcgatcaagcagcgatgaatcggccaggaccaatggattcaggcagattgggaaccggaggaagagcacgccacggcgagcagcggaagcgggcctagaatgcaagtgatcgctgagcaatgccatgccaatccatacaatttttggcaccaggtagccttcataattttgtttaaatgtaaacatgacatgcactgagtgctgaaattc

SEQ ID NO: 1198 - DNA, 248 bp, Triticum aestivum
  Clone ID: uC-tsfl189120e06b1
acacaacatctcctgggtagggattttataagaactcccagttagcaatggcgaagcgcctcgccgtcgcgctcctgctgctggtcctgctcgcgtccagcgacgcgggagagctgaatgggaagcacggtgctggtagtgccgtcggcgagatgaaggctccgttgcccgaccccgggttgccggcaccggttgtcgcgggggtactgccaccggttgtcgggacagcatcatcggttatcgggggg

SEQ ID NO: 1199 - DNA, 407 bp, Triticum aestivum
  unsure (1)..(407): unsure at all n locations
  Clone ID: uC-tsfl189120e07b1
cccctcgcgccccagccgacgccgccgttttcgtcgccgccgccgactgcagcaatgtcgctgatcgcgggcgaggagttccagcacatcctgcgtgtgctcaacaccaacgtcgacggtaagcagaagatcatgttcgcgctcacctccatcaagggtgtgggccgccgcttctccaacatcgtctgcaagaaggccgacatcgacatgaacaagagggccggagagctttccgcggaggagatggaccgcctgatggcggtggtgcacaacccgcgccagttcaaggtgccggactggttcctcaacagaaagaaggactacaaggacgggaggttctcccaggtcgtgtccaacgccgtggacatgaagctcanggatgaccttgagaggctcaagaagatcag

SEQ ID NO: 1200 - DNA, 392 bp, Triticum aestivum
  unsure (1)..(392): unsure at all n locations
  Clone ID: uC-tsfl189120e08b1
ttttagtggcaagttctgtgcgaagcattcgagtacgcaaagaagcgagagtgcaaaccatttgttgaaaggctacatcccgcctgcatgccccatgnaacctttttgtgaagcaatatagcaaattgcagttcgatcgtgaagctgaggaaggattccaagagaagagaatgaggctgggcgggatagttctccgatacaattaccctttggaggagcatgcaagtaaagtctatacccggacaatgtacgagatgtttggccaggctttgtatcggtctggtaggtatgatgttgaggaagttgagcggggcataacctaccacgtgcgacatgttgaagctgaaaagcgagagaagtggtgccgtgaaatgcatgtggttagtgtgcat

SEQ ID NO: 1201 - DNA, 436 bp, Triticum aestivum
  unsure (1)..(436): unsure at all n locations
  Clone ID: uC-tsfl189120e09b1
tctgggaggtggcctgatcatgccaaggttcggcgaggcccctcgaggtttccggccaggaaaccggaggcgggctcgtcggtcaccgccgtaacaagcgcgagcggctgcatgtaaatctgtacatcattacatgagctctgactgcctctgctgttgttgctgcccgtgattctggagctagtaaatatggctagtttgcccgtggaatggtaggtttcgatgcgctgcctcgacaaaaaataggttcggtcgggcgcacctggaacatgaggaggatttgtggtgaacgcgagctgcttgcaatggtgtggaatgtcaacaccggaggcgtngtataagtgtaacccataccttacatgaccttacatgagacgaaaaataatggaccatgttctgaaagcctggaaaaaaaaaataaaaggggcggccgttt

SEQ ID NO: 1202 - DNA, 333 bp, Triticum aestivum
  Clone ID: uC-tsfl189120e10b1
ctcagcccggggaggatcccgggcctcctgcgccgtcccgccgcgtccgccggcggcgccgtcgcgggcgtccagctgactgtgtcggactccgagctgtcgtcccggggcttcgcggtgcggcgcaccgcggagggccttgacgtggcggcgctgaacgaggtgttcgcgcgcgtggggttccctcggcggcaggaggagcggctccggcgcgcgctggagcacaacgaggtggcgtggctggcgtctgaggcgacagggcgccccgtggcgttcgcgcgcgcggccggcgacggggtgttcaacgcggtggtgtgggacgtggtggtggag

SEQ ID NO: 1203 - DNA, 365 bp, Triticum aestivum
  Clone ID: uC-tsfl189120e11b1
gggtgattcagaccgttccggttatgggcgacgtgcatgttccaccatactgctacaccaccatatcatcatcgagtgacgtcactaccggaatgggcggctactgagaagatgagagctctagtatccgaaaaatggaccaccaatgtttagtcaatggtccgatccatatgtagcggtgaaaaataaagtgccatgcattatcatgtgtggactagactggcactagttcaaacttgggaataaaaggcaaactaagttattttctgctgaacgaattcatcgaccgggcgttccctcccaaccaaagccaaggcggtggtcccccgaaaacgacgctggcacctaggtgcccgacggcggtg

SEQ ID NO: 1204 - DNA, 132 bp, Triticum aestivum
  Clone ID: uC-tsfl189120e12b1
tgaaaaccaccactagtttgtgcccatggttaccttctccaacgaggagcttctgcaggcgcacaccgagctctaggacctcaccttccatgtatgacgcactgatgtttactaaataggctggaatttttt

SEQ ID NO: 1205 - DNA, 331 bp, Triticum aestivum
  Clone ID: uC-tsfl189120f01b1
atctctctctctctctctctctggtctcttctttatctttatcggtctctccatctccctgtggagggatggatcatactgctctgcgtttcagttggagattaaacggatatttggggcttctctctattgcatgcatgctgacgttctcgtgcatgggacatcttagctattatatcgaggcatctagagctgatatcctgtccgaacttttacaagcactgcgtgcttaataaccttgacgttacccaagtttataggggctggctacatccacttttatctggtgtcgtaatatatagggggcacgtaccagatcgcgttcccaaca

SEQ ID NO: 1206 - DNA, 473 bp, Triticum aestivum
  Clone ID: uC-tsfl189120f03b1
gaaagagacgatgcaactgctggaatgtttgtttaccaccgccaaattggtcctggaatgtatcaacaaatgaccgagcaggtctgcgaccagtgtccaaatgttaagtatgtacgagaaggtgactttttaactgttgatattgagaagggtatgcaagatggacaggaggtttcatttttcgaggaaggagagcctaagattgatggagaacctggagacttgaagttcaggattaggacagcaccacatgaccgcttcagaagagaaggcaatgacctgcatgcaacagttacaatctccctgctccaagctctggttggatttgagaagaacctcaagcatcttgacaaccatcttgtccaaatcggctcccaaggtgtcactaagcccaaggaggtaaggaaattcaaaggagagggcatgccattgcaccaaagcaacaagaaaggcgatctgtatgtgacgttcga

SEQ ID NO: 1207 - DNA, 408 bp, Triticum aestivum
  Clone ID: uC-tsfl189120f04b1
gtgtcaaagcttgaattcgatccactttatttccttccatgaacgtactgtatacacgtatacaatgcagccacacgtggtagcttttttttcaacagcatgggtcagtctcagtgctcactcgtagctagcccgcttctagctagccttttattcttatcatagcttgcttaccctttcatttcatctagtcgcggcagtcgaccaactggtagttgacgttgaggtggccctgctggtacccgaccccgatggtgtcgatcttggtgaagacggtgtcccattccaggttcagcccgccgttggcgcactggttcacgatcctcgtcgtcacctgcgcccccgttgccgggttctttacccggagggacttgccgcacgctccctgcccgtgggcgccggcggggc

SEQ ID NO: 1208 - DNA, 359 bp, Triticum aestivum
  Clone ID: uC-tsfl189120f05b1
caggaagctcttgagttatttggatgtgttctcttccgggaagcaactgtcgatctgacagccagcaacattacagtgaacagaggatccaagatccattgcattttagatacacccatccgattagatttgagaacaccgtgtaaccttctgcatcgcttgcagtcgattctacttgttttcgtgtaatttgtcatgtagaaacaaacactagttcttctgttccgtagagagagtgcattggagggcaaggagttgtttgtctgtactacctgatctggggggaaatctatattatcacaattttttgctgtttccaaaaaaaaaaaaaataaaaatatatttaatataaaaaatta

SEQ ID NO: 1209 - DNA, 438 bp, Triticum aestivum
  unsure (1)..(438): unsure at all n locations
  Clone ID: uC-tsfl189120f06b1
gataatacaaataccatgggccccgctttgatggcttcgtcggctaccaccgncgcacccttccaggggctcaagtccacagccggcctgcccgtcagcccgccgctccagcggcagcctcggcagcgtcagcaacggcggaaggatcaggtgcatgcaggtgtggccaattgagggcatcaagaagttcgagaccctgtcttacttgccacccctctccacggaagccctcctgaagcaggtcgactacctgatccgctccaagtgggtgccctgcctcgagttcagcaaggttggcttcgtcttccgtgagcacaacagctcccccgggtactacgacggtcgatactggacaatgtggaagctgcctatgttcgggtgcaccgacgccacacaggtgctcaacgaggtggaggaggtcaagaaggagtaccctga

SEQ ID NO: 1210 - DNA, 167 bp, Triticum aestivum
  unsure (1)..(167): unsure at all n locations
  Clone ID: uC-tsfl189120f09b1
aaggagcatctctagcttaaactggacattttatcagtcgtctgtgagataagtttatcgncgngtcgtttagcgtttagctgtgctccttccagatcgaagtcgttgtctgtctgtgtaatgtttacctggtactgattcagtcatttggacatggtgtttatgtt

SEQ ID NO: 1211 - DNA, 115 bp, Triticum aestivum
  Clone ID: uC-tsfl189120f10b1
ggatttggtaacgagaaatcgttgggattttaggtgcttaaataattgtcggattatagtgttcgtcgtattattatgctttgcaacaagccatctgatgattattatgctgttg

SEQ ID NO: 1212 - DNA, 386 bp, Triticum aestivum
  Clone ID: uC-tsfl189120f11b1
ttccggccgcggccgtgggctctacaggctccgcttctgccgggacatctagactgggaccgtcgaccgggggccgccgcttgcttgcttgcttgcggcttactgcttggtcttgtgtcctggttaatctagcttcttgatctgtattgaccttcccttcccttccatgggttctcgatctttttcctctgctaccgccgctgtatgtacgctgcttggggctctgaggtgtactccattcctccccgtgtatccggtcgatccgcatgtagatgggtgatacctctggggtatgtgaatgaacagagctgtttcgttcgaaaaaaaaaaaaattaaaaaaaaaaaaaaaaaaaaaaaataaaataaaaaaaataaaaaatttttt

SEQ ID NO: 1213 - DNA, 97 bp, Triticum aestivum
  Clone ID: uC-tsfl189120f12b1
aaaaaaaaaaggaaaaatttaaagggaaaaattaaaaaaaaaaaaaggaaaaaaaaaaaaaaaaaaaaaaaaaaaaaaaaaaaaataataaaataaa

SEQ ID NO: 1214 - DNA, 220 bp, Triticum aestivum
  Clone ID: uC-tsfl189120g02b1
cgttaattgtgaaacaatacagatatttatttacatgtggagtacttacctatcagcgcccttgctaaacagtaatatcctcccctctggctctggttccttcacttattacagacatccgtcttcgtgagctactgaattccaagacatttaggagctcatattttctgtaagaggatgctaaaggtcaaatttacgtaataaacaatatcctttaatg

SEQ ID NO: 1215 - DNA, 377 bp, Triticum aestivum
  Clone ID: uC-tsfl189120g03b1
ggaggactccttcgcctgggaggagcttttcccaggtatataccccccaacaatggcttgatgctagccactgccggcatgcagctcgtgctgcgctttacctctcaggttcaccggcggcgacggcggtgcgcggcggaggtatctagctagctaggcgggtgttaggccgtgtagggcaactatacatctttggcaatgtcttcttcttcctcctccatgggaggattgtaatggagtgtgtaaactgtgcgtgcatcccctgggctgggctctcgttcgtggaaactcaccgtcttgcatttctacgaccaatactggtgctctgttgcctcgttgaaaagaaatactatactagtgctcttgttgtggaggct

SEQ ID NO: 1216 - DNA, 534 bp, Triticum aestivum
  Clone ID: uC-tsfl189120g05b1
acctctgcgaccgcgatagctagagtggaagagtagatcgacgggcatggcgatatgaggaaggaggtcctcctggcggccatgatgctggcgctggtggtggcggcgccgggcggggcgcgtgccgcgtgcgtggtggggcagctgacggtgtgcatgccggcgatcaccaccggtgccaagccgagcggcgcgtgctgcgccaacctgcgcgcgcagcaggcgtgcttctgccagtacgccaaggacccctccctcggcgcctacatccgcagcccccacgcgcgcgagaccctcgtcacctgcggcctcgccgtcccgcacagctaggcgccaggccgcctagcgagtatgtatggctcagctatagctgcctccgccgtccatcagatgagagatgagactatagctagcctagctggtgagtgcgcgatgcgttcatgccgcatgcatccatgttcctgttcgatggatgatgatggaataaaataaaagatgttggggatgatgctggataaaatgaccgacttgtgt

SEQ ID NO: 1217 - DNA, 471 bp, Triticum aestivum
  unsure (1)..(471): unsure at all n locations
  Clone ID: uC-tsfl189120g07b1
cctccccatccccggccaagcgttagacttacaccgactccgaggtctctcccctcgacccacccgccaaggccgcccgccccggcgccgacgaggagggccgccgccgaggccaaggcccgggtcgcggacaaggggaaggggaagatggtggtcgatgaggaggaagaaggcgacgaggaaagcgacgaggaggaggatgacgaggaggtcgagggagatggcgacgagagtgacggcttatgcgaggatcccctctcggaggtcgacctcaacaacatcctgccctctcggacccgccgctgcgccccagcacagcctgtggcgtacctggtgccaccagaggaggcagcggaggatgacgaggacgatgaggacgcatacgtcgacatggctcccggggaggagagcggctacngggaggagagcgattagggtcgcaactggactaactcgctggcaatccttcgt

SEQ ID NO: 1218 - DNA, 330 bp, Triticum aestivum
  Clone ID: uC-tsfl189120g08b1
tcctctcaggtccaacgcgcgcaactcgtcagaaatggagacgacttccgataccccacgctccgtcgtccgagcagacggccacggcggcggcgggggccatgttctcctcctcgccttcccggcggcgcagggccacctcaaccccatgctgcagctcggccgtcgcctcgcctaccacggcctccgccccacgctagtcaccacgcgccacctcctcgccaccgtcccgccccctttgccccccttccgcgtcgccgccatctccgacggtttcgatgaaggcggcatggctgcgtgcccggacttccgggagtacgggcgccggct

SEQ ID NO: 1219 - DNA, 447 bp, Triticum aestivum
  unsure (1)..(447): unsure at all n locations
  Clone ID: uC-tsfl189120g09b1
cacactgcgcgagagccgacgccggtcttagtctgagagaagagggcaagaggccatggcgagcgagcgcaatggcgacggcggcaaggagcgcgccgggggagaacggcaacggcggcggcggcggagtgtccttggagatgccggagatcaggtacaccaggctcttcatcaacggggccttcgtcgacgccgtctccggtaagacattcgagacgagggatccgcgcaccggggacgtgatcgccagcatcgctgaaggcgacaaggaggatgtggacctggcggtcaaagcggcaagagaagccttcgatcatggcaaatggcctcgcatgcccggatccgaaagggggcggatcatgatgaagtacgcggacctggtggagcagcacgcggaggagctgaccctgctggagagcctggacngccgcaagccgcgcatggcga

SEQ ID NO: 1220 - DNA, 194 bp, Triticum aestivum
  Clone ID: uC-tsfl189120g10b1
tctgttgtttggcatctcatttagttggtgaacagaagcctgcctgtctacttagtttaacagctgtagctttgttgccagataaaatggtgaactttgcgtatctctgttttggtttggcatgctgagagtattcatgcagcatcacataacaatgtttagggcgttacctctgatttatgtgcgttgttttc

SEQ ID NO: 1221 - DNA, 575 bp, Triticum aestivum
  Clone ID: uC-tsfl189120g11b1
gaacctggattcccgcgaactctggaagcgtgtcatgcaaggccatgccggtgctaacttggttcctcttgttgcttctaaccggataggaaaggaaactgtcgagactgagcatgggaacagcaccataaaattctacgggaactcattcatcgcagggccaactggagaaatcgtgaagcttgcaaatgacaaagacgaggaggtgctcgtggcagagtttgacttggacgagatcaaatctacgagacacggctgggggatattcagggacaggcgtcctgatctatacaaagtgctactgacgttggatggcaagacatcatcatcatcctaggttccacttttatgaagacgacatgaactccagaatgctatactgggaaaacacagggtccgtaagtctagcttccccctgcaaaagaaatggtttgcctctttgcaacgtatccccgtgtttgcgactcggtgattttccaccaatagagcattaataaaatactgtcatgtaagagaaatattgctcctacaagtatgaagattagggatcaaagcaatataataatgatgcatcg

SEQ ID NO: 1222 - DNA, 364 bp, Triticum aestivum
  Clone ID: uC-tsfl189120g12b1
tgctacggaggtggccgctttggcggcggtggtggttacggcagccgtgacggcggcggctacggaggcggcggcggtggcggctacggcggcagccgcggcggctccggcggcggcaactggagggagtgaatggtggggcccctagctggccagttatcctagttaccgatccctttttttacctgtctaccaaagtgttatcgctcgctcccgagtaccctagatctcgctccatcgcgtaggttccgagatgttctggctaccgttagatgtgacgccgctaccgttccgtgttacttgttaccgtccctgttccgttcgctatgaatgaaatgaaaaatcagagcaaaagtttgttcgc

SEQ ID NO: 1223 - DNA, 460 bp, Triticum aestivum
  Clone ID: uC-tsfl189120h01b1
ggcttcgtatatcaatttcatgcaactaccttctccggtcccgatccagcctcagcttcacctgaggccggccctaaatttgtttgatcaattcttttgctactagtagtaactagtgatgatcactgttgcatcatttatttatttattttatatatcatcacaagtttcctgtgattcttttctttctatacctttttgtcgatcgtcggctccagctcgatcgaacgatccatgctgctaattgtttgtgtacgggtgattaagtaacttgtgcacttgtgcttacagttaaaaaaaatagagattaggaaaacccttaagttacccaacttaatttgctatgacaaaaatgccaattttgccagatagcataaatcccaaagaggtccccgacttatacttttcccaacaatatcctaactaaggggggccctttttaaaggatccaatctttttt

SEQ ID NO: 1224 - DNA, 462 bp, Triticum aestivum
  Clone ID: uC-tsfl189120h02b1
ctgccacgccccaccccggcttaccgttctaccggcagccgccgctgcgcgcccctccggcacgcctacccctaccccaagtgcccccacacccgcgagctttcaccgccggtgacccgacccaattcgctcgggtgttggaggcactgacagcacaagcagcttccatgaagctgcgcggccacccctagcccccttcacctccttcctcccacttgcacacatgagaaggaattggatcagagtcggtccctcaatctaaaccaagaggagtgcccattgaacatgatggtgtgcagatcgcggagagttgcatcggcaagcgtcgactcatatcttgaagtgccatggaggaaagcttgtgaggatgcaggggccgttggtggtgttggacttatcgtaggttgaaccacatcttgcttttctttggtcaatctgctctcttgtctctctgagtcataa

SEQ ID NO: 1225 - DNA, 130 bp, Triticum aestivum
  Clone ID: uC-tsfl189120h04b1
tggttcggcttgttctccctgtattattttgaggctttccatctgatccggcctaattttcggacgtggatatctgttgtactgctataatcgggacctttatctttggtataaggcatggttgccattc

SEQ ID NO: 1226 - DNA, 273 bp, Triticum aestivum
  Clone ID: uC-tsfl189120h06b1
tataaagtgccattgcagttttgtcaactctgacattgctttgggttttccttctccatttatctttcttatttgttcctaagaatatgtgtatgtccatgttcatgtaccaacatggctcgagaaagcatgctcgtatgtgaatgctatcggtggctatgtatatgcacggacgcataatattatacaatatgtcaactatatacgttttaatggtaaccaactcaaaaaaaaaaaaaaaaaagaagaaattgaaaggcaaaaaacacaaaa

SEQ ID NO: 1227 - DNA, 415 bp, Triticum aestivum
  Clone ID: uC-tsfl189120h07b1
ggtgctgcttgcggcgggttagcgtttactactgcgtttgggggaatgccggcgactactcatggcagaccagttcagggaagctcgaccacgggcggtggaggtgtacgctgaggtgctggacgaaggatgtagcacttggctactgggggagcctcatgctccaggaagcgtgtggtggcagccttaccgaggcttatgcagtaacaagcatccgcgcccccacgaccgaatacatgcgtgcctccgcaaggaagacgactcagacgagagaaggacgttcaggagcacggcccggtacccatgacctccctcagattcagtgacgactcgtgcaatgcgcatttttcctttttgttccccacatattatgctgatgacggacgccacactactcgatttggagcattttgat

SEQ ID NO: 1228 - DNA, 439 bp, Triticum aestivum
  unsure (1)..(439): unsure at all n locations
  Clone ID: uC-tsfl189120h08b1
tgggccctgcacgcgccccaggctggctttagggaacggcttagcagtggcagctacgcgccatcccggccaaggaccgacgtccccgccgtcgtctcgcccgtgcccatacaagtacgctctggtggcggcacggcggccgtctcgcttcgtctgcaagtgcaagaacgtcgtcaacgaagtgattgtggctgaccagaagaattgggataacatggtgatcgcgtgcgagtcgccggtgctggtggagttctgggcgccatggtgcgggccgtgccggatgattgccccggtgatcgaccaactggcaaaggactacttgggcaagatcaagtgctgcaaggtgaacacggacgactgcccaaacatcgcatccacctacggcatgcggagcatccncaccgtgctcatgttcaaggaccgcgagaagaatgagagc

SEQ ID NO: 1229 - DNA, 62 bp, Triticum aestivum
  Clone ID: uC-tsfl189120h09b1
gaccccccctgtagcggcccattaagcccggcgggttgtggtggttactcccaacgtgaccg

SEQ ID NO: 1230 - DNA, 289 bp, Triticum aestivum
  Clone ID: uC-tsfl189120h10b1
ccagagcatactcatagttgggtgggttcgtttatattcgttgctgcgtttcgttacggaatttgagttccaataaaccaattacaccttcgttgttcacttgaaagattgtattattagaaacttcatacaaggcctggctgtttgtattaccgtctctttttgtggaacttgtgctccttacgttttagcctatgcacttccctaaatcaattatagcaatgttggtgcctagcaaaaaaacttaaagaaaaccaaaataaagaccaaaataaactacacaataaaa

SEQ ID NO: 1231 - DNA, 485 bp, Triticum aestivum
  Clone ID: uC-tsfl189120h11b1
tgccctcctcgtctccggtgcgagcgcggagggggcgcccaagaggctgaccttcgccgagatccagagcaagacctacatggaggtgaagggtaccggcaccgcgaaccagtgcccgaccatcgacggcggcgtcgactccttccccttcaaggccggcaagtacgagatgaagaagttctgcctggagcccacctccttcaccgtcaaggccgagggcatccagaagaacgagccgccggccttccagaagaccaagctcatgacccgtctcacctacacccttgacgagatggaaggcccgctcgaggtcggcgccgacggcaccctcaagttcgaggagaaggacggcatcgactacgcggacgtcaccgtgcagctccccggaggcgagcgcgtgcccttcctcttcaccgtcaagcagctcgtcgccaccggcaagcccgagagcttcagcgggcccttcctcgtgcccagctacaggg

SEQ ID NO: 1232 - DNA, 438 bp, Triticum aestivum
  unsure (1)..(438): unsure at all n locations
  Clone ID: uC-tsfl189120h12b1
gtgtttttagtagctcaacatcgcatgagcactccatcaacgtagaaattaagctccacgcaagcgcgtccatgcatgcacgtaggaaggattatatattgaactagttgacattgttgcagttggtggacatgctgatggggaagggcacgctgacgccgcacttgccgggcacgccggagaccttgcccatgttgatggacttgatgctggtggcgaggctcttgaggcacctgcacgctatcttgcggtccgggctgctgcgggccaggccggtcagcccctgcacgccggagcagcactccttgctgatcgaggacgccctccccgtcacgtacgccacgcacggngcgagcttggagtacacctgcccgtacgacagcgctcgcgaggcctccctgtcggccatcatgagcaccaccgtcgccaggaccacgg

SEQ ID NO: 1233 - DNA, 196 bp, Triticum aestivum
  Clone ID: uC-tsfl189007c01b1
accgaggactttttgggcgtttttcgtgggaaaaaaagaaaaagaaaatgacgaggtcatttcctggcgagcgcccaaaaacaaaataaaaaaccggcggtcgctctcgggggactaatctatacaaataccgtaaccgggcggcttctgtttagcggtggtaacctaaaatctcagtgcttggagccatgttgtt

SEQ ID NO: 1234 - DNA, 118 bp, Triticum aestivum
  Clone ID: uC-tsfl189117b09b1
accatacatgtttgacatgcatatattcatataggacgagctccgcgcgctcatcatgtgtggtgctatctgctatatatatggataataagaataaagggaatcattttcgcttctt

SEQ ID NO: 1235 - DNA, 161 bp, Triticum aestivum
  unsure (1)..(161): unsure at all n locations
  Clone ID: uC-tsfl189119a11b1
aaatatttttgttggtggggatgaataatggtttagacccttctatttaaatgttnnagagtacttgaaatccttctgctgccgtgacatcagagattgtgaaacatttgatacccatttgcagtttcatttctgaatgcatgttgaatctacttatgttt

SEQ ID NO: 1236 - DNA, 320 bp, Triticum aestivum
  unsure (1)..(320): unsure at all n locations
  Clone ID: uC-tsfl189120c01b1
aggcaggccatcaggaggagcctggggttagaaacaaccagcggatatatccccctcgcttcctcccttccgccgggagctgacctgagctgagccaccgttcgaccaaactcgcctctacaagacagagcatccccaccggccggatctctttttcatcatctccctttccgcttctttgaaatcgcttaccaccgncatggctaagcagcagaaagaacgcgcacgtcccgaagttcggcaactgggacaacgacggcaacgtccccttacacgctctactttgacaacgcgcgcaagggcaagggcggaaagcccat

SEQ ID NO: 1237 - DNA, 324 bp, Triticum aestivum
  Clone ID: uC-tsfl15710042a12b1
ggttgatttggccaccggtcaagagattctcgctactggtattaaggtagatcatctttctacctctttgctatatccacaggtcacatgtgttgtttttcatgttctgagctcttttcctattaggttgttgatctccttgctccttaccaaagaggaggaaagatcgggcttttttggcggtgctggtgttgggaaaacagtgcctcatatggaactgattaacaatgttgccaaagctcatggtatgtactttccgggtagtttaaagtagtgtgcacagtggtgttccagtttttttttaactttggtgcttcttctgat

SEQ ID NO: 1238 - DNA, 401 bp, Triticum aestivum
  Clone ID: uC-tsfl15710042c11b1
aaaagaggctaaaaccaacaaaaagttacttagaagcagccaatagttttttttgagtttctaaggtcaaaatgtgccagaattcaatgcatttgactaattagaagagttaaagatgaattacgagttgttagacaacactgctacccattttgtccctaaaacgctaaaaacaaccgaaaattgcttagaagtagtaaacagctttgttagtattttcatggtcaaaatgtgtcataatctaattcatttaaccaattcataagagttagagatggagtatgagtgtttagacaacacttttacccattttattcaaaaagaggctaaaaccaacgaaaaattgcttagaagcagtaaatagctttgttagtgttttcaaaatcaaattttgtcacaat

SEQ ID NO: 1239 - DNA, 453 bp, Triticum aestivum
  Clone ID: uC-tsfl15710042d11b1
atcgaatccaattcctactctctgttttacaataccttattgcatttgttcccagactagcaataaaatgagcgatgagttggatcttttgagggaacagaaaaagatattatctgaagaggcggcactgcaattaagttctttaaaacggatgtcagatgaagctgcaaagtcccctcaaaatgaggagattaatgtaatataatcaccctgttcatgatatctatatctagttgttttactctagcaaaatattgaccttctcggttctcgttgttgcttaggaggaaattaaagtactcaatgacgacatcaaagcaaagaatgaccagattgctacgttggagagacagataatggattttgttatgacatctcatgaggcattggataaatctgatatcatgcaggtaggttccaattgtcaagtattatgcactgactttttttgtc

SEQ ID NO: 1240 - DNA, 517 bp, Triticum aestivum
  Clone ID: uC-tsfl15710042d12b1
catatggtataaaggcgttgaactaattactgatcccgtcatgtatagtggagtgtgatttgtttgttttacttcataggataatagaaaaacaaacaatatatacaaaattaactgtggattacaaataattgtgttcatatatcttatccacttatataaactagataccatgatacttgagcttaaataattgatcacatccgccgaacacaaatcatggtcacatccacatgaattctttcattacttttgtttgagatttaagtcccaacgggtaaattggaatcttgcactactttaattgtatatagtttattgcctaaacagccaataatcagtttcacaaacaaataaaatataactaaaaacactccaataatcagaaagaaaccaatagaactgcaaggaaaacaaacttttttgagtaaccaatgaatttttaaactttgcaaatacaaaagaagattctgattacacaattttaaattatgatccgggcaaatagaatctcttt

SEQ ID NO: 1241 - DNA, 489 bp, Triticum aestivum
  Clone ID: uC-tsfl15710042f10b1
ataagggtttgtacatatagatatcgaagaaaatagaaaaaaatattaaaagttccctttttgcttcaatccgtcaactaaaaaaagggtataaaaggaaggtaacattagttgatactatggtatttaatagacaagtatttaatacacgcaaaaaagaaaaaaaaagttctttattctttatctgaataatgagtcatccgacaattcatgatttagattcaactacttatacttattaataaactaatagcaaggaagaaacaaattgagttgatccgtttacctaagtaaggaccaataaaatcaaaaattttgatcttcgaaaccaattaaatgaaattctaagggttccattttatggggcagtgcgcgagaaattaaatcataaacaaatgatagaatttgagcgccctgaaaatgccataatatataacatcaaaatctattacattaatggggttcggaaatggttgaagtagatgaata

SEQ ID NO: 1242 - DNA, 469 bp, Triticum aestivum
  Clone ID: uC-tsfl15710042f11b1
cctttctagaagtttcaaatggtcatctgaccatgggctgagcccagtccacaatattatggacattccatggtttttccgtaatgaaaacgggctgtatggtctaaagaccaattttgtccatggccttaatgggctagcccacacggtttatggttggcccatcaattttttcaacacatcaatttttcttctcttctctctctctcggcaacgacgctctctctcccggcgacaaagctctctctcggcgacgaccaagctcgacctctctctcaactcctactccggttagttctactagcttgtgggtttgtccaaatttcaattgttagtgtttctgaaagaatcttagctttttggatatgaggagagctagctagcaaatgggcacttttcagattttgtttatggctcgccatttcgaatttcattatgaattgaagcacatcaatatgtagagaccctt

SEQ ID NO: 1243 - DNA, 291 bp, Triticum aestivum
  Clone ID: uC-tsfl15710042f12b1
ccatgtttcacatgaaagtctctttggtttgccctttgtcttgtttgttggggtttggtcttttaataaaaaagagctcgaagaacatgcgtcggactctttctcttccttgaattcattcaattggccacggcgacaaaacagggagccgatacagcgaaactgatacatcttcttttattttctggattcttagggttctttttcggggaatttaggtaattatgtctgtccattttggtggggcttgggagatataaaatttgcttttctttgcgtcggattctcaaa

SEQ ID NO: 1244 - DNA, 344 bp, Triticum aestivum
  Clone ID: uC-tsfl15710042g10b1
agaatgggcttgctttgcgtgggctgccattagttcttcgaggcgggagggttggggcggtttaaaagtgtcggggttttttcagcagttctcggacaaaaattgctgagtggccgagaagaatgggcgtgtcatgcgtgggctgacacggattcttcgaggcctaggggtggcggtatataacttgctcgcatgatattaccgagatgtccccacgggcatcttttcacctcgtcgcccaagagaatgggcgtgtcatggcatgggctgacatggattctcctaggccgtttgggtggcggtatagtcgtcttgcgcacgaaataccgagatgtccccatggg

SEQ ID NO: 1245 - DNA, 334 bp, Triticum aestivum
  Clone ID: uC-tsfl15710042g11b1
agacggtgttgttacaacgaccaactgacaaggtactcgcgatggctctttagaagaatttggcattgtgtgaggtttgtggctcatttcttgtggctaatgatgcagcagaaagaacgcaatctcatgtcactggaaagcaacatgttggctatggcttggctcgggatcttattgctgaacaaaaagtaagtctcagaactaatacttgaatcttgtttcatttgagctgtcattccttataaaatggggatagtgatgctatgattactttttctattctaggctgctaaagataaaggaaaggaagaagaaagactagtcagaggaaaag

SEQ ID NO: 1246 - DNA, 437 bp, Triticum aestivum
  Clone ID: uC-tsfl15710042h10b1
atacaacagaccaatttccaatcctaaaactaaatggaatacacacttttttttttctttatggaataggaaatttctgtgcgtctttaggttcctttcttttatgaaaaggaaactcttaagacttctagaattggaaatatttgatttgattgaacacaaacgacttcttgaagtcttctccaaaaacctacatatgtttcataagtgctggtcctttttggagaaaaaaatgctaatgggggacaggcgaatttgatgcataaaacaaagaccgcatgctttcaagcaagaaaaagtcgcatagacataagtacaacaaggattaaaagcaatactaaaataaggaaaatatattttaaaagatttgaaatccgcaagtagtctatagaaaccaacttaagatctgtactagcactcgttgacttcttcgcacg

SEQ ID NO: 1247 - DNA, 444 bp, Triticum aestivum
  Clone ID: uC-tsfl15710042h12b1
ttgtgcattttcatgctcaagcaatctccaacattcaatactcctagcgttgtataacttcttactgtcctttgctcgagttactggtgggacattgctcaagtttcttaattgtttcttcatttttgttcttctgtgtttattttttgcagctttctcgacatgagcccaggggattacacactgttttggtcactggtggtgctgggtctattggttcacatgcagctctaaggcttctaaaggaatcatatcgagtgaccattgtggtatcttctttggcttacatggatttaggttattttgctcaacattattgtaaatgtcgatatcacaaagtaaatctctttctgtttaataggacaatctatcacggggcaatctcgctgcagtcaggattttgcaagaactatttccggaacctggaaggcttcaatttattta

SEQ ID NO: 1248 - DNA, 498 bp, Triticum aestivum
  Clone ID: uC-tsfl15710066a07b1
ggaggaaattacgaaaggaagaggtacaaaatcgattctcttaaattccagcggacaaaacacaaagccttaaaagtatctagtggaccttagtaaaagcccaaatgatggagcgtgcttgattgaggcatagtacatatgtcatcataagatgaagattttgaaatcaccaagcagagtcaaaatctaaggcaatgacaaaacgtaagcagcaggatacaaaagaaaacctaaccctaaccgtatttgaatccaataaacgatgttcaaactctggaggagaatactttgatcgaatccctgcagatttggtcatcaaaatcttatcgaaattgtctgcaaagtctatggccaagtgtcgttgtgtatgtaagctcttgtcgtcgataattcgacaaccaaattataaccagttgttcccgatcaagtatcccgatccaccgaggttcatcttcaccttcttaggtggaggaatgttattttcctacacttcaacac

SEQ ID NO: 1249 - DNA, 455 bp, Triticum aestivum
  Clone ID: uC-tsfl15710066a08b1
aactcatgataaatcaaaaggtggaaattatgtttacgacggtttatatcttttggaaaagtattggcaacaagtcggatctcacggtatgaatgtcttcaagtttcaacttaggcgcatacctggacaacctgaactttcttgggttgaggtgaagaaatctaagtcaaaataccgggaaggtctatgcaagcttgacatctcagaagggaaagagcagtcacccattagcgctgtgaacgaaatagacgacgagaaaccgcctttgttcacctacactgttaaactgatttacccagattggtgcagaccatttcctccaaagtcatgctgttgcaccacgcgctgcaccgaagctgaagcgagggtgtgcgcttgtgtggagaaaaacggtggagagataccgtacaacttcgatggagccattgttggtgcaaaacctactatctatgaat

SEQ ID NO: 1250 - DNA, 509 bp, Triticum aestivum
  Clone ID: uC-tsfl15710066a09b1
aaaaagtaggtcagatttcgcctattcctaatcctaaatggaatgtaacgacgtagggatccctatgtaaacatagtatctatttagatacgctcgaatgaccccttctcataatgagaatgtatataaccttattccggtctggtccggtatggaatgaacttataatcatggaatcgactcgatcatcagattatagattataagttcataaccttagtccattcccattttgggcggaaccgatctactaattctttgattccagttagtattagtaagagggatcttgaactaagaaatagattctagaagctaaaaagggtatcctgagcaatcgcaataatcgggttcattgatattcctggtatagtagatgctatcacacatacaatcatactcaattcgatggaattgtttgatcttaaaggggatattctataatttcgcatgtgaggggttatttcttggtttcgttcagtcattaataacttgattatttttagata

SEQ ID NO: 1251 - DNA, 249 bp, Triticum aestivum
  Clone ID: uC-tsfl15710066a10b1
gatcggacggctcctgcgatttcatcagctttcacgatttctccatattttgacacgtattccaaccgcatctccaacgcgaaaccaagctccttcacaatcgtgaacgcgtttagttgttgttccgcgtacattggccacgtggctattggaacttcgaaacgcaaactctccaatatcgagttccaaccgcagtgtgacacgaacccttcaattgctttatggtgccagaatttcaacttgaggagc

SEQ ID NO: 1252 - DNA, 473 bp, Triticum aestivum
  Clone ID: uC-tsfl15710066b09b1
tatgtacctagtctctcaagcatgaaacatcgccgggtagagatttaagctaagtaaccttattatattttataatgaagtttcatacgattggttttgagttgaattttataggtttttgattaattgaaaactgattgtcaaggactagattaattttcaattttggtgtaaatttctaatgtctcctcgaagaaagactcttatcatttaatctcgatatctcactcaaacctatattaaacttatttagataaaataattaagcttcatgaatttccaattcagaatcatttcaaaattatttgcaataagttgacttcgacatgcatattatgtttagttccttcaaactcccaaaatgattccgatcatatgtattggtttttttttttctctttatttggtcaattataatatgtttagaaaaaccccatgtgtttttgcatgttcatggattggtcattttcatt

SEQ ID NO: 1253 - DNA, 463 bp, Triticum aestivum
  Clone ID: uC-tsfl15710066b10b1
cgagcaaggcaacaaatgcgatgacgagaggtgaacaagcgccgatgtttgtgcccacgacttccccacgaaggagaagccgcgggcatgggtgtaaaccgaactcaacaattccttcaaattaggtacgaaacacaggccccggaactcatcatcgagcgtaacatcgcccgtgaattaactgagaaggataggtggtaggtagttcgatgcgcgagcatggagcctacgaacactagctatccgatcaccactcatacgccgaacgttcaattaactcaaaatcatcaatcgttccaactaatctaccgaagtactcggctaagaagaaagaagacggacgaatccgagccaaagccgtacaagcgcgagataccttcgggacagcctaggcggatccatgctttccaacgaagcacgcccatccaacctaggcgagacaagggttcacatttcgttcatc

SEQ ID NO: 1254 - DNA, 430 bp, Triticum aestivum
  Clone ID: uC-tsfl15710066b12b1
gaatcgactatgagtccttttaatatttagtatagaatgtttacagcaaaaataaatattttaaagtctctttcagagaaaactaataacaataaaaaaaaaaaaaatcgtcaggtaatgcgcctacactgcgtagatgcattatgtatataatggatcaaacaactttgtcatttcaaataagactagcatgtaccgacacatgatagcatatcatctcaattaatgaagcttcgctttttagttcaatttaatatcagtttaacatctagcatttgtttttcatacttattctattaattccacgtacgatccgcattcttcatacttattctattattttgtccgacctgatttttcagtatcaatttgtttcgctgtttctaaattctttgtgaatccactcatatattatcttatcaaaatcata

SEQ ID NO: 1255 - DNA, 565 bp, Triticum aestivum
  unsure (1)..(565): unsure at all n locations
  Clone ID: uC-tsfl15710066c07b1
cgtggaagacatgacggatgtcatacttggtttacaaggagagcctccttccaactatttgcacggagttccattcgttggtggcaggtaaggcttttgttaatttggttcggttatgatagccttacaaaagtatgttcggtctttcatgcgtgttattttgatagggataaagttgcagcctgtgccaagcattacgtgggagatggtgggacaacccgcggagtaaacgagaacaacactgtgactgatttacacggtcttcttagcgttcacatgcccgcttatgctgatgcagtttacaaaggtgtttccacagtgatggtttcatattcgagctggaatggtgagaagatgcatgcaaatactgagctgatcacagggtatcttaagggtacccttaagtttaaggtctgcttacttatcacaacttcaacgcacattctctgtgttctggcagtagtctttctgaatgaatatttctctctctccatgtantttatagattcttgaatagaacatatatatagcatgtgtgagttcttagatgaaggagttgattttg

SEQ ID NO: 1256 - DNA, 484 bp, Triticum aestivum
  Clone ID: uC-tsfl15710066c10b1
gatgatgatcactataaattaattgccggccagttggaaggtttcctactttgttcagatttccaacttaaataataaatatgtgatgatggctcaaccctgcataaaatcacgtacaagcaatcatatgacatttatgaccaatccaatataaagattagcgcccatctaagtgttcaaatgttaaccatgagtattggtcgaggataaattatgagcatatgacttatacgtacaaatacaatagtagtattttaaaacatttttactttacttaatagttggtggtagtacaaaacaattgatagttcagatactctttattctttaacatctttgttttattcgtgtgcatgctaaggtatttgcgttatcttatataagatttcttggctatctcatcaagacaagaaattagggatcttatatctatatattcaaatttacgtaatgcatgtttttatttgaagtacatcgtatacac

SEQ ID NO: 1257 - DNA, 496 bp, Triticum aestivum
  Clone ID: uC-tsfl15710066c11b1
aacgggaagtaataacccgaaaagaaacaaaggaaggtaaatagtcccgcaatgcaagatctgtctatgagagtgtgtatatagaatggttgagacccaaattcttccctgtctagcattctaacgcataggtctgcacctgtggttcaaaatttttccaaggatggaaatcgaaacattcatatgttagttcaaaaagattcgtttgctttcattcatcttttattattatttcaagaagatcaaccttgttaataattctacctcggccaagttctcatcgggagagctatttggtgcagtgagattggacgcagcagctgtgttgtaccggaagatccttagttttccctcctgagataaatattgagcaaatatcaatacaagtcaacattttagcgccgagaagtttttcacattacgatttaggattaattacctttgttccatagacaagacctcccccaggagaaggatgaaagcaagcaacattaac

SEQ ID NO: 1258 - DNA, 389 bp, Triticum aestivum
  Clone ID: uC-tsfl15710066d07b1
ataaacaaaattcaataaataattttttagtaattattatgttatttattaattcacctttctggttaccatttaccataatcattttgttcaattcctatgttcctcttggttcctacttatggccattttctttttttcttgttcctttttgttatttttcattcatattcctatcgtttcttttgtttatcaccaatcagagtcttaaaagtaattaccaatcacaaaagttttaccaaaagcatcattcttagtctttattttcaaagttaattttcaccgcctttaactattccgatattgcttataccttcttttacctataacaaacttgtatggttttgtatcaccaatggtattaatgtatatttgaggggggggggggg

SEQ ID NO: 1259 - DNA, 505 bp, Triticum aestivum
  Clone ID: uC-tsfl15710066d08b1
tgtagatgaaatacaataaattagtttccacaaccagaggaatacaaaaaggaaccttcgtttataactcaaaaacaaagaaagaattattaactaaaagaacaagcaacataccttgtgccttgatctacagaatttattgaattctttgggtcttttcctcttagatactggctttgttcctcagagtactcctgagagtcactgtcaccacctccctgtatgaaccatataaggttttagtcttccacaaacgtttcacaaaatcaactgcattttgcaatggtatatttctcatagtataagcatccagtgagactatgctatggacagtttaccaagctccatcgtaagtactaagatatcaatcctaactgcatcaaaaggaaaaaaatctgtaacaacaactacaaacctcttggagggaagctgctttggctctgaaagatgcctctaaaaattcagcctctttcttgagcttccttatcttttctaggtcagagca

SEQ ID NO: 1260 - DNA, 409 bp, Triticum aestivum
  Clone ID: uC-tsfl15710066d09b1
taggaaaatataaaattaatcaagaaaaatagacatgaaaaacatactactccatatgtttttgtttggccaataaagagactaactaagctaatatctaactaaaaaagagtttatttattatcaattttataactgagcaaattactaatctattatgcaaaaagatattcctaattaataagatggattctactaattttgataatagatatttgattcatatatagtgaaaaataaaaatgacctttagcaatcattaaatttttggtcacaaaatactaacatttttcttttctggcatagcataaattaactttagatagtttgcaataatcttaaggatcaaaagataatagatacaatttatgaaaaaattgttcttgcaatgtaacaaagatcacctaaa

SEQ ID NO: 1261 - DNA, 258 bp, Triticum aestivum
  Clone ID: uC-tsfl15710066d11b1
cctgcaaatatagggtttgtgtattcagacgtgagaacttacacagtctataatgaaaaagggggcgtgttgtgcgaaagattaaataacatctatacacaaaatagaaaaatgttagctaacacttcgccaactatgatggataggtctaaataaactatgaatgcttgggatagatcatagcggtaataatactagcatatgcctatgtgaaccaaaacatatattattaattaaaaaatatagatatgttaatgg

SEQ ID NO: 1262 - DNA, 569 bp, Triticum aestivum
  Clone ID: uC-tsfl15710066d12b1
tttatcttgtttctaatttcctcttgaatctgcatcagtgtccttcgttatgttcctttggaatcactttacccatctctagctctaggattctattgccgcgacaaaggtattgtattactacattctctgaaaccaaaagtttttaaattctgtaacttgaaaaaacctttccctaatcttcaacagatgatttcgacgatttctgtctccgagcattgaaactagctgaggaatcaaacggtgctccattgttcacagtgactcaaacccacacagcgataaaccaaagcaactacgggtttgcggatgacgacagcgaggatgaacgtgaagatgactggcaaatgctctgatcatgatcatcgtcaaacattttaacaatctcaagctacaattctttttttccttttgttaaccagttctttgttttttatatgtgttggtgtatattacatcagatcagaacacaatgttgtactataaaatcttttgggattttcaaacatagattgaagcatgcgaaaatggaagagtagagaaatcacaaggtatatgaacatgatgac

SEQ ID NO: 1263 - DNA, 392 bp, Triticum aestivum
  Clone ID: uC-tsfl15710066e10b1
ttgggtttatctcaagaagatgagccacaatgtctgtgatttcttggtctcccattggcaggcgatgtctgaacgatgttctttttggtatcaggtactccaatctgttgctttcctgaacaaacaatttttccagagagaatgttctttattagcatatgtgtcttccattcaacttaagagttgcagagtttttggagttcagggaatgttcctttaaggtctctggaaacactaacctgggtccgatcatagagcattcggctttttgtgaaatatttgtgggaatcacgtaccttggtaagcatttcattatcgaaagatcctacgatttccatatcccttgctagcaaactggccggcgaatcattctggaagagaacctgcaaaag

SEQ ID NO: 1264 - DNA, 509 bp, Triticum aestivum
  Clone ID: uC-tsfl15710066f08b1
agaagtttatcttctgttctgttatgattttcattgatacttaacgaacgtttaagcagttttaacgatcttttccctgaattttcaccgattttctcttaatttcccgcaaaatttacataagaacgacatgtttagtctgttcttttcttttgaatctcccgaggcaggtacaactctaaatattcaagttatgtcactgaagaagatccaaacgacataaatcatacgtcaaaacataaaagaaccaacgcgtttcttatgaattctgcttcagctcatggtaaaacctagctcctctgtttcctctgtttctatgtttgctctgttttctcttgtcctctgtattcttattcattgcttgtacaccaaaaaacctagcttctttcaacgttttctctcccttctcctcccagatctaagattactagaggtagataaagagaagcaagaccccaaatcaccaagaggagccctcgaagcctgcttaactcgttgctcaatctctt

SEQ ID NO: 1265 - DNA, 404 bp, Triticum aestivum
  Clone ID: uC-tsfl15710066f11b1
gggctatgttacggacccaaaattacttgctcaagcattgatttcgaattttttcatgcattatagctcgtttagactagatggggtatccctacatagcgggtgggacccacggcgaatggttcatcaagtcttcaaaaaagaatatatacgattgcattgcatattctaacggatgctatcataccatcactaatgcaccggatcccatcataactccgcagttaagcgtgcttgggcgagagtagtactaggatgggtgacctcccgggaagtcctcgtgttgcatccctcttttatgtttaacctttttttttttggttaaaactttatgactccataacttttaaaccgtgaggccaaacttggcatgtgatacctttttggaaagcccaaagacagcc

SEQ ID NO: 1266 - DNA, 499 bp, Triticum aestivum
  Clone ID: uC-tsfl15710066f12b1
agaaatcattcaaaacaataatcgtcaataaaagaaatattatatacaaaacaaattagctcagtagatataaaactctttctaagaagttatttatagttttttatgtcactataattaaaaaatatattaacatagcgtcactattctatagctttttaatttattgctttgttgaacacattacatataaaatctattgcagaatagatataaagaacatataagatgctttacaatgatattacatgaaacatgttattataaaaaattaaagtttttaatttgtcccaaacatacatgttatgtcttctctctctcaagatgtatacatagatgataattagataacaatttaagcaatgtaaaggacaaaaaagaatccaagtagaaaattgataccagcgcttctatttttgtacatgaagttcttagaatgttatttgtgcattttgtcttgtactatgttccttttgggctgctgcaatacactcatgtg

SEQ ID NO: 1267 - DNA, 567 bp, Triticum aestivum
  Clone ID: uC-tsfl15710066g07b1
caaaatgcctctggttcttctgttcgtttgtctctccctttgtctattcctcttctatattttctatcttctctttatcttttctctttaactctatgttcatcactactactcatctcatggactatagcttgccacaagtatagtggaattattaaaagagaaatgattttcacatttcgttaatttaaataaatttaaggaaaactaagcaaaacctaccaatgttgaaagaacaataaaacactccactagtcttattattaaaaagagaaacaaagattcttaaaagaaaccaaataagctcgaccctaaattttctcttcctccggcaagtagtatctattcttcaaccaaatagagtctgcaataacagcttcgtcttctttatttctatgtcaagtgtaatgtgcatgggtcctgttttttatttccaaaagggcgtgtccgaaactcgcctccctaaacgccgagtaacttggttggggatcggtgaaactatatgaaaaataaataatcttaatcaaacaattcacaaaacgaaagctttagtcaaattcactatat

SEQ ID NO: 1268 - DNA, 534 bp, Triticum aestivum
  Clone ID: uC-tsfl15710066g08b1
acaacaaataacttgtgattggcagtaaaacaccgattaccctgttgaggtctaattcgatccttatagatttctctagctattttcttacgaagctttgttatagcgtctataacagcctctggtttaggtggacaacccggcaaatagacatctacaggaattagcttatcaactcctcgaacagtactataagaatcggtactgaacatcccccctgtaattgtacaggctcccatagcaataacatacttcggttcaggcatttgttcatataatcgcactaaagaaggagccattttcattgttactgtacctgctgttaaaataaggtccgcctgtctaggactcgatcttggtactaacccataacgatcaaagtcaaatcgggagcctattaatgaggcaaattcaatgaaacaacaactggtaccataaagaagcggccataggctggaaagtctcgaccaatttgaaagatcatttaacgtagttgaaataacggaattttttgttgttcgatcaagtatggga

SEQ ID NO: 1269 - DNA, 368 bp, Triticum aestivum
  Clone ID: uC-tsfl15710066h08b1
tgtaatgaccgagagaggaacttccatatcatagacagctaaatccttttagatgttttactttccatcgtcgtatgtaacttcaacaggctcaatctcaaattttctggcacaaaattctgagaaggttgcaacctggaaaacgctaaatgattagttagctattgatcagctagcactgtaggtttgatttggtaacaacataccattgtattcaaaacaatcttggccttcgtcaaatcagttgcagtacattcaatgaagacattctttgtctgtaagggaattgctgaaagtgcaccattgataataggtggcaatgacagcacagttctgcaaaagtgagctttcattatgtgtcagtacgt

SEQ ID NO: 1270 - DNA, 466 bp, Triticum aestivum
  Clone ID: uC-tsfl15710066h09b1
ctccctcctatgtttctctcatcagctacgctggaggcgactatatttattacatcgactaaaatcgtccttccgctgtaagaaaaaaaacattaatcttagatgtcaaggctaattaattcagttgtatcaaacatcattacaccaagttctctgcctttacatgtgaaagaacacttttgtttgtttgttattagaaaaaaatcataacgccaaatgtatatatacttttattttgggtgattatttgattcttatcttcattaaaatttgcatgcagggcttaaaagcactagtagagaaagtcgtggataatttacgcgttaatatgatagtattgggtggcctgctatttaagaagatagcagtaacatcgctgcagccgatcggatgccttccttcttacacctctgcatcctcgttcaagagttgcaacgagtcacaaagtgcattggtggaactacac

SEQ ID NO: 1271 - DNA, 435 bp, Triticum aestivum
  Clone ID: uC-tsfl15710066h10b1
atcgcaccctggaaaccccgcgatcgtttagtttgattggacgactagtgggacacctaggagatctgcaagaatcagtgagaagactaaggctacgccgataccaaataaagagccacccaagaagcgaggtagaaccaaatctgcagtgtcaaagaaagatgcagaaggtgagaaatcagagggaggaggagaggaaaactctcatgtgaaagatactgaaatgaatcctccagagggaatcgcccagaatgaaaatgtgaccgataagaatggctccggtgaaactgagagggtgaatgatgcaaaagaaaacattgttgctgaggaaactccaaatgctgctccagttcaagaagagggtgagtcgatgaaggagaaagctctggattctgttgatgataagagtaaggagactgacaaagaaaaagatac

SEQ ID NO: 1272 - DNA, 436 bp, Triticum aestivum
  Clone ID: uC-tsfl15710067a01b1
aatttaattgcggttctagttggtatactcactcatacacatgacatctagtcttatttcgctccaaaacactaaccaagcttcttcttgcttctaaaagcttggatggtttagtcgaattccgtatgagtctttgtctatgtatcttctaacaaggatacaatatttaggcttttaagatccgttgcggttctagtttttatactcactcatacacatgacatcaagtcatattcgactccaaaacactaaccaactgcttcttgcttctcaaagctttgatggtttagccgaagtccatatgagtcttcgtcattgtatcttctaacaatgatacaatacttatgcttttaagatctgttgcggttctagtttttatacggagtcatacacatgacatcaagtcatattcgaatccaaaacactaaccaagctt

SEQ ID NO: 1273 - DNA, 472 bp, Triticum aestivum
  Clone ID: uC-tsfl15710067a02b1
gtgtctgcatatacgtcacactcttgctcatctctgatgttattttttttttatgtgcagttagagaactatagcaaagaagagtcccagctccaaacgacgtcgttacacagttcctcctctgtttctggaatcagaagaccatcgtcctctagtagctcaagatcaacgagtagacctcccacgccaaccagaaagtctaaaactccagccaaaaggccatcaacgccgacctcacgtgccacctcaacaactacacgtgcggcattaacctcgtcctctactactagctcaacaagatcatggagaagaccttcctctagctccggaactggaacctcacgtgttaccttaaccgctgcacgtgcaaccagtcccaccacctcaacagaccaacatactaccggttcagccacctctactcgatccaataacaggccgatgtcggctcctaattcaaaaccgggatcga

SEQ ID NO: 1274 - DNA, 514 bp, Triticum aestivum
  Clone ID: uC-tsfl15710067a03b1
caataacactaatacatctcaatacagataaattttttcttaaaaccgcgctttcaacaaaagtgagttttttggacctccatgaaatataacctgaggacttggatttacaagcattggtgcagcttgaacagaatggtactgagcggtgtatctctgaggctgtgctctgttaacagttggcccaatcatctgcaggaaaatgggttgcaagtggaagaatgattcatccatggcaaaacaaacaaaagttggtggcagaaagtatatggaagcattttaacagtacagacaaagccatatcaattcagaatgatcttttaatctggtgttcaatactaacatttatggttgttaaccattcaggcgcttagtggtgagaggaacagtctattctcaattactagttgataaaagccctttgacataacatgcttgaagagagtaagataatacttacgtgttgaggaaattgaaatccaccgacagcatgtccagcggtcacattaccata

SEQ ID NO: 1275 - DNA, 460 bp, Triticum aestivum
  Clone ID: uC-tsfl15710067b02b1
atatacaattcttgttcaatgagacaaatcatatgtacctgaaacctgaaccataatcttataaaacccgcaggattgaccggattggtctctctgaacgtctcaaactctcgagtatcaagctcaggactacgtcacctgaagccattgaagaacttgagatctctgaccttggagtcctgcaagctctctgctaatgacatcaggaagcttcaggcgactgatctgccaaacttggtcaacttccgtcctgaataaaataatatgttcaaaggcaaattcacgaactctgtaaatagatcgatctcctctggtctcagactaagacactgctcttagatatatcgtcaaaagctatgctcttcttcggattatttgctgaagaaactgtaaataaagcttctttcaagctatggccggacgaaagagtcctccatggctcttctacgtggtcagcttt

SEQ ID NO: 1276 - DNA, 357 bp, Triticum aestivum
  Clone ID: uC-tsfl15710067b03b1
aatacatatgacagtgaatataatatatatgtcaaatacagaaatttatacaatttataatatctatataaaatacagtttttttgaatccttttttttttatgaagaggcctgttttgagtttgggctgggctgaattgtttttacccaccacatcattcctaaggataattatacagtaaccctagaaaggtttcctccaccttcctttttccctcctatataaaaaaaatcgacatcgtttttgctcactcttctctcttaggttttttttcccttctcccaatctcatcttcttcgaaaacctttcttctttcaaatttctgtgaaaacatgtttgacgacgagcaccacttt

SEQ ID NO: 1277 - DNA, 494 bp, Triticum aestivum
  Clone ID: uC-tsfl15710067c02b1
gatggattgttcgtgtggacgctttggaagatataattggaggacatgtatggttaggttctcatttgtatatttggtggaatctggcatatcttaaccaagccttttgcatgggctcgccgcgcacttgtatggtctggggaggcttacttgtcttatagtttagctgctttatctgtttgtggtttcattgcttgttgttttgtctggtttaataataccgcttaccctagtgagttttacggacctacggggccagaagcttctcaagctcaagcatttacttttctagttagagaccaacgtcttggagctaacgtggggtctgctcaaggacctacaggtttaggtaaatacttaatgcgttctccgactggagaagttatttttggaggagaaacaatgcgtttttgggatctgcgtgctccctggttagaacctttaaggggtcctaacggtttggacttgagtaggttgaaaaaagacatacaacc

SEQ ID NO: 1278 - DNA, 465 bp, Triticum aestivum
  Clone ID: uC-tsfl15710067c03b1
gtaaggtcctgcaattctgcagaaacatattgacatttttacttatgccaaaaccttttgttctattttgaagtttgatgctgttccatggggtctggaaggtgttcttcagcatataaagcatcgctataacaatcctccaatctacattcttgaaaatggtacacttcattctcttttgtcttctggctctgtttttgtctacttgaaagcaaaccttcttgttcttaagattcttcaaatcgcacccgaaaacaaaaacaggttcaccgatgaaacacgattcgatgctacaagacacaccaagagttgaatacattcaagcttacattggtgctgtcctcaacgctatcaagtatggtcatcctttttcaaattttagtcctcacgttaatatatttgactgatcggtggtttagtttcggtttacttgactctctctttgtgacaaataatttgactgat

SEQ ID NO: 1279 - DNA, 447 bp, Triticum aestivum
  Clone ID: uC-tsfl15710067d01b1
ttggaaattggaactgatttgggggctcattgtttatttttggataggcatagtacttggtttatttgaagatggtaggtataagtctgaatcaaagaaaccatctttgaaagctgttgatattattggatttggaactggggctgaggtagaaaagaagctgaagtatgctgaagatgtttcttacggtgtaattttcgggagagagctcattaattctcctgccaatgtgcttactcctggtatgaattgttgtcatttatgaaatcaaatattttcgtgtttgtgtggtgttcgctgagttttcctaaactgctttgatttttgtatcgtttcagctgtactagctgaggaagcagcaaaggtggcttctacgtacagtgatgtcttcactgcaaacatcttgaacgaagagcaatgcagagagttgaagatgggttcttacct

SEQ ID NO: 1280 - DNA, 453 bp, Triticum aestivum
  Clone ID: uC-tsfl15710067d02b1
acttttataaacaaaatcgggtgttatgcttcctaacctgacagatcgtgttgccaatctggaattgctctgtcataacacgaagagtgctttgagagacattgtaactagaatccatgcatgggtatgcaggagccattattggcatatgatgatagcggtcacgacgattttttcgtgggtcccaaacaggaaagctaaggtcatcttcttctattgcacaaagcacgactggattcggccagcgccattgtgtatatactctaaaaaatcgtgaaaccaacatactaggaatagcatttggataaaactggcaaaggcgtgcaaccagaagtgcccagtttacaccaccaagaaatccagttacctgctcaatataacagagattacaagagctgtaacctaagaatattgtcaacagatgtgatattcagaaagacaccaccttacatt

SEQ ID NO: 1281 - DNA, 139 bp, Triticum aestivum
  Clone ID: uC-tsfl15710067d03b1
ggctggcgattgggtccctctaatgccgtgaagtcctgtgcttccctcggtcttagacattgcctgtgccatgttctcctgtgtgacgtccttacttgatgtgaatatttttataggccttatctgttggaatatatcc

SEQ ID NO: 1282 - DNA, 459 bp, Triticum aestivum
  Clone ID: uC-tsfl15710067e01b1
ctatcctattctaagagaagagcaaacccaacaaattgttgaaaagacatttaggtaaatactctctcaatgtatataaagccatggagccaaacactaagcttatcgttcttaccttggttcttgcctttacactcacggcagcaaccggacagatcttctgcggtatgacttctacttgtctgaactcttgcaagccctatgtgtaggctaggaacccaatgaccaccggaattgatcccttgggcccttgctgcaatgccctgtccaaggccgatttccagtgcctctgtaagcataaagacagtatcaatgtccgtgatatcgagctttgacctcgctgagaaactcccggagaagtgtggattagctgctgcaacttgctagtaggttttctttcggaaggtttcgctttgtggtttggttttcatggttttcttatactgatttatattgatg

SEQ ID NO: 1283 - DNA, 515 bp, Triticum aestivum
  Clone ID: uC-tsfl15710067f02b1
aacgtgtatcccctgttgattgcatttaggtttcttaattttgtcacctgttggttctactcgacccaatgatcgtgtagggcttttaagttcttatttttacttgtttgaatcctgacctaggattgttactagaaacccaccatcattataatctggcttgactttgttgtttttgtgcacatcttgattgctagcaatacagtggactggattgacaccctgtataactgcatcgacatgtttgtgttttaggggaattgaactgaatcacacattcaccataagcagacctgaaaaacctgtttatcaatttggcgccattgccaattcattgttgcattgttacattcaagatatcagaaacttttaagatcaagttcttttacatttatcaagttactaactcatattttcgtctgcttgtttttgtggtataggtactaatctttgtgcatgcaaactcgatccaaaggttctgcacacctactaccattcaaagacagaattgacag

SEQ ID NO: 1284 - DNA, 477 bp, Triticum aestivum
  Clone ID: uC-tsfl15710067f03b1
tttagagcattcttgcctctcagcattctcttatccagaagcataagtgaacactcatggtttatatcaattttttctttaacttgagtacgacgccataaactgtccgttgccatggaaatcagttctgtaccatcatccctttcacacttgatgcgtttgagaaggtctagaatttgattaagttcatcacattccaaaaagcagatactctgaggtgtttccactaaacggcactcggtagtaatagtgttctcggaaacttcaaattgtgcgataagatgcttaacaggaaaccgcatcatccagtctcgaatactacaagagagaattttacgctccaacaacaacacaaggagcaatcggatttccttgagtaacttcctgcgctcttcatctgcagctaaaggccattctttggaccacccattcacatatacaaactcttttacaaactctagccggttcttgatcatt

SEQ ID NO: 1285 - DNA, 437 bp, Triticum aestivum
  Clone ID: uC-tsfl15710067g01b1
ttaattggaatttggttattcaccatgtacgaggatccccactaagcatccatggctgtatggttaatgcgcccaactcataattggcgaattcgtaggttcaattcctactggatgcacgccaatcggaccctccaataagtctattggaattggctctgtatcaatggaatcttctcatcatctatacataacgaattggtgtggtatattcatatcataacatatgaacagtaagaactagcattcttattgagactagaactcatagggaagaaaatcgatttatggatggaatcaaatatgcagtatttacagacaaaagtattcggttattggggaaaaatcaatatacttttaatgtcgaatcaggatcaactaggacagaaataaagcattgggtcgaactcttctttggtgtcaaggtaatagctatg

SEQ ID NO: 1286 - DNA, 443 bp, Triticum aestivum
  Clone ID: uC-tsfl15710067g02b1
aatttctccaaaacttcataagaatcagctgcactctcaggtttttcaccttttgctttaggatttgctttcttagtatcaccagcaggtccattacttaacttggccttaggcttatcagtgggaagagcagacaaccgagattcagcaacaatgtacacttttccagtgttcttgttacgaaccttcacatagacaaacttcgcatttacacacaaagcaagattgcttggaagagtccacggagtagtagtccatgccacaaaagcagcattatcttgatccccaataaccggaaaagtcaccatgatttcaggatcagggacttcctgtacatacacacattctaccaatatcagagatcaaactatacaacacaaatcaatcacctgaagaacacaataacaacaacattaccttatagttctgaccagcttcaaaat

SEQ ID NO: 1287 - DNA, 478 bp, Triticum aestivum
  Clone ID: uC-tsfl15710067h01b1
taaagaaagaaacttgtgtggatcatttttaaatgagatgaaatccagttgtcagttattctcaattacacaattttgtgttgactttagattctgttagttctcaccgtctctttctcgattctacatgttaggccaaggaggtctctctagacaatgcatattcagaccaagaaatagaaaagaggtcatcagttgtattgttcaatgcctcaaagaaagaagtgaaacaagaatcaagcttcaagcaggaaccattattatgtgaaccacaaatagaagcaagggttaaccccagagttttcagatacaacccaaaattcaaatcaccttcgacgaacaacacttctttacatgagttgagaccaatacaaatccaagaatccatctccatgaactccaacagacaaaagtctccagtagaccaagaatcatatgacaaggaaaatgttgacggccatagtactgaaactggatt

SEQ ID NO: 1288 - DNA, 478 bp, Triticum aestivum
  Clone ID: uC-tsfl15710067h02b1
cttttaggtatattctcttgtactaacggatatttgttgtttctagtattttttttcctcagatgaatctgaattcttgatttgtatgttctgtacatgttgtgaagtttaaactagaaaaagtgggaggatagtaacttgaagcatatgagccaaaagtcaaactatttaaaaatacaccaaaggagcttgagattgattaggtaatttaagttagttattctcacgttctttaactatatagtagtgcttatttccttcctagcattaagttgcagaaaaaacagagaagtagagattttttctcttctcttcaaatttcatagttcattaaaatttgtgtgttgaatgaggcaatctcatgtttaagattgttcttaaattgtcctctgagtgattctagttggttttgtcttttgactttctgttgtcttgatctctctattcaggtttttttggtcacgtgagaagaagcttt

SEQ ID NO: 1289 - DNA, 495 bp, Triticum aestivum
  Clone ID: uC-tsfl15710067h03b1
gactgttactcataaaaccagccacaaactcaaccaccatatacgccgtattgatcaaaagaaacaacgcaatcttcctcgatttcttgtcgctcaaaatgtgacggataggcttcataaacatagtggaaaacgactcaggcgattccataccaatctcttgataatctgaatacacagactccaactctctaacagcaatgtaaagcaacaaaccacaaagcaacaatccccaaagagatagctcaggaaaatagaagagttccaatactatagtacatagaaacgttacaagaaactccctctctgagtccttcttcgagcttgaaaacttatcatcattataattctcactcaacaacactccaaatacaacagtgttagctaaaggccaacctaaattcccaaaagagacactatcatcaccactaccagagaagaagaaactccaaatagcaagtgggaacaacaacacagtggttagaaacaaagaca

SEQ ID NO: 1290 - DNA, 372 bp, Triticum aestivum
  Clone ID: uC-tsfl15710068a01b1
taaaataccaaagtggatgattgactcttttccatactagaaagaatcgcaggaaatggggtgatttgacggattcagcctatttctcaatcgtatcccacgatcaagacaattggctgaatcccgcgaaaccattttagagaagtccatttgatatcttctttttctaaagcaaatcgacttcgattcttgaataatccacatcacttctgtctctattgtaacaaaagattccctttttatgtggaaaaggcccgtctcaataattctgattttacgtttacgtatggacaattcctcactatctcgttcattcacaacaaaacattttcttcgtgcggtggtaaaaaaaaacatgcttttttggagaga

SEQ ID NO: 1291 - DNA, 343 bp, Triticum aestivum
  Clone ID: uC-tsfl15710068a03b1
tatatgaaatccatctggaaagcttgaactaattcgatcacaacttaaacttgaacaatttaaaagcatattataccttgtcgtctggggggtcagataaagacccccagggactatgaactgaagcctcaaaaaagtcacgaaggaagcagaaagctgcatatggtttcaaccagccctttcaaagataacaaaaatccgtaagccaatggaacgctgacgtggccttaggaggcataagttctatgcagacaattcttaagagatatcaaggaaacaatatcagattttgaagcataccttgcttttagagaagaatttctggaaggtgcttgagttcaaa

SEQ ID NO: 1292 - DNA, 433 bp, Triticum aestivum
  Clone ID: uC-tsfl15710068c01b1
gtgacgtttgtttacccctgacatatttatacaaagaaatcgttatagcctatatcatgtaaatacacaccccacatgtagtgggattaacaataacacgttttataaattttaaaacaaatggatttagtattagttaacgttttacccattcccgtcgacttttctcaaaaatgttctctcatgtcaaaacaaaataagaaagaaagatggtcaaaccatgcatttcacacactaagtatttgggtaaacattcatgcaccatttgaatttcaactctagtggggatcttcataatatctctcccataacccctcccatacgaattctccagacgcctatctatctatctattattatttaattcgatctctatgactaaaaataatcacacattaatatgggagtttctctaataatctctagtatcaaa

SEQ ID NO: 1293 - DNA, 344 bp, Triticum aestivum
  Clone ID: uC-tsfl15710068c03b1
caacgacaatggcagcggtggcaaagtggccttgaagagctattgtttgacagcttttctatatagcacttgatcattgctcctgggttggtgtatatgacatccccaactacacagaaaacatgtaaatgtgaccgccacagttctttacattgtgtgtaaccaagtctttggatttgattctctttcgcaaatatcacaccagtatttgccgcttgccttttcttcaccataacaaagagtgagtggatgatcattatacctgggaagcattaccgttaatggttgagtggcacaacggaaatccaaaaagtaatctgatttggtacaacctatggcgactc

SEQ ID NO: 1294 - DNA, 155 bp, Triticum aestivum
  Clone ID: uC-tsfl15710068d01b1
tgtctgtgactgccactcagatctgatggttctctttgcttaatggaagctctcaacagatcttctcactcgaatcaccatcaaggtcagtagtagtgatgttggagtttttagttttcttggtgttgatgttgctgtgtcttgtttgatgggaa

SEQ ID NO: 1295 - DNA, 317 bp, Triticum aestivum
  Clone ID: uC-tsfl15710068e02b1
gaacttaaaccgcaatcttatcctaaaagcctaagttttgtttttttgttcgaagatacaaagacagagactcatattgacttcagctaaaccatcaatgctttgagaagcaagaagaagcttggttagtgtttcggagtccaatataaattgatgtcatgtgtatgattgagtataagaacttaaaccgcaaccatagcctaatagcctaagtagtgtttccttgttagaagatacaaagataaagactcatatggactttggctaaaccatcaaagctttgagaagcaagaagaagcttggttagtgcttttgga

SEQ ID NO: 1296 - DNA, 494 bp, Triticum aestivum
  Clone ID: uC-tsfl15710068g02b1
tttattatgtttctttactatgtgtgaaaactctaaaattatattattcagaaacatagtttgtatgtttcagtgaacaaagttgaagataaatactttttaaaagtactatactgaaatgctatatttattatatattgttaacaatatttaattaaaaatccgaatgtaattattttctataaatttttagatttaatttattagaaatattctcttatttctatatcgattatagtaaaaaaacttcacaaattctcttatataaaatacacttttaggtgtaataagttaaaccagtgtgttatacaaaaacttaaagcttaatagtgtctacagaaaaaataattatgcaataacataatttcttatcttatctcatattaaaacttctgaactaattatcccgtgcattaacacggatcattaccaaggtttgtaatcaaaattaccttgttttaattaaattataattttagatttaaaataaatag

SEQ ID NO: 1297 - DNA, 382 bp, Triticum aestivum
  Clone ID: uC-tsfl15710068h01b1
atgggcgacccgcagggaggttttcacgaaagttgacctggagcatttttttcagcaaactgccaaagagcaggatgatgataaccaggagctcaattaagaactgtttgaaaacgcattgagcctgcccatggtcaagatcaggcaatgcctggtgcccaggaccgaaatagaagggcttgatatcagcacacccatcgaagagctgaagcagcagtttatcactacccaactcagtaagctgatcgtgtatgatgataatatcgattccatacaagggtatgtgcaccagcttgacctgttcaggaaacccggttccatcagggagatcctgcaccccatcatggctgtttcggaaagcatgagcgctaccgacctgatc

SEQ ID NO: 1298 - DNA, 397 bp, Triticum aestivum
  Clone ID: uC-tsfl15710068h02b1
gagagtctagggcatagttccaaggaaagacatggccacctaaaggagagatgttccgattacagaagagagccccctcggaaaggtctaattttaggggaaccggaagtatgaaagaagtaaaggagaaggaggtattttaaagaagaagtggttggaaactatggacctcaactgatctgttctctcttgtggttttgctacatatcctgcattcgagactattcggtaaccctaaatactttaactccaccacataaaaaccaaattcccctttcataccaagctccgtctaccctgacaccttcaaaagagaaagaccacgccaaacatttcaaagaatgtaaagagttgactaacgtgaattcaaagttctgtaggatcaaagcggatggac

SEQ ID NO: 1299 - DNA, 485 bp, Triticum aestivum
  Clone ID: uC-tsfl15710068h03b1
gagaaaacttttagaaaatattctttttaaaaaatttaggagttagatagatgatttaattcttgatttacagtaatagaatttgcggcgaatttttgttttaaaaaaaccatgattatttttttgtcattttttttcatcgttggatatgtgaaacaatttattttcactttactgtagccttttgctatttaaagttacgtcatagagctcttttagtaatttataaataggtgatatagtatatttggaagaaatataaatattgaccggctttttttattagtctaattgggttaattaattcacatacaaacaaaataaaataataataaacctcgattttggaagaaatgtaatttggattcctaattgtaacttgtaagtagtaggtccaaatttttattagtacatgatgtgattaaatccttgaaatcattgtcatattcatatagaagaaaagctgagatttattatttattata

SEQ ID NO: 1300 - DNA, 489 bp, Triticum aestivum
  Clone ID: uC-tsfl15710073b01b1
cttttctatcaccaaacgcccggagcccccctcgggaaggatcccttatcgaattgcggccgtctcgatcatctgctcgattcgacgccgccggacgatttgggcgcggaatccggaggggggaatctgtgcgcgcgggcggaggcgatcgtggggagcagccatgagcgaggtattcgagggctacgagcgccagtactgcgaggaatccgcttccctctcccgcaagtgcaccgccgcctccgctctcgatggagagaagaagaagcagaggctctccgagatccagtccggcgtgcaggaagctgaatcgctgattcggaggatggacctggaggccaggaatacgccgcctagcgtgaaagcgggtttgctagctaagctgcgggagtacaaatctgaccttaacaacctcaagagcgagctcaagaggatctcggcgcccaatgccaggcaaactaccaaggaggagcttcttgagtctggcat

SEQ ID NO: 1301 - DNA, 84 bp, Triticum aestivum
  Clone ID: uC-tsfl15710073c02b1
gactagtctgtttatgaccccctatttcatggttatatgtttcactgcttcttgctatcgaatgctgcgttccgggtatttaca

SEQ ID NO: 1302 - DNA, 326 bp, Triticum aestivum
  Clone ID: uC-tsfl15710073c11b1
tctgttgactaccactccgggtacaaggacggggggggggcgaccacgcagggggacgacatccagcgcaaactcgggaacctgcccgagaagccggagcccttcaagccgccgaccttcgcccccagggtcgacgccgacgagcagcccaagtccaaggagtggctcgacgcgcgcgaccccgacgagctcgaggagctcgaggacgaactcgacgatgaccgcttcctcgagcagtacaggaggatgaggcttgcagagctcaaggaggcagcaaaaactgccagattcggcacagtacagcccatcacaggctctgattttgt

SEQ ID NO: 1303 - DNA, 268 bp, Triticum aestivum
  Clone ID: uC-tsfl15710073d06b1
cctgacatggagggcattcccccggaccagcagggccggatcttttttggtaagcagcttgaggatggccgcaccttggcggactacaacattcagaaggagtcaacccttcacttggtgctccgtctccgtggaggccagtaagctcctggccatggagctgcttttgtctctgggttcacaagtctcgtcttcggtgtccttaaggagtctggtctatgtctgtcgttgcctgaactgtctttgtttctataccgtactatgatgc

SEQ ID NO: 1304 - DNA, 181 bp, Triticum aestivum
  Clone ID: uC-tsfl15710073e12b1
tcgaattggtaccatgacacgctgctttgaggctaaagcggagcggatgtcgggcctgcatgtctgtccccccacagctgcactgaatctcgcagcataagttaggtgtctccctgaaatcggaatttctcgagttgacctgcataattcaaattaataaatgttgtatccttgtatgtgt

SEQ ID NO: 1305 - DNA, 342 bp, Triticum aestivum
  Clone ID: uC-tsfl15710073f03b1
ccctcgcttccgcccacgcgtccggcgttcttgggatcaaggtgaagattatgcttgactgggaccccaagggcaagcttggccctaccactccgctgcctgacctcgtcaccatccaccccccgaaggaggaggacgagctgcgccccccggctttggttgaggtctaaagtcccagtagagcaagcagaccatgaaacgtcacatcattttggtcgtagctagttttctatccctgtgataagcgagggctatgcaacgcttggttacctattttactttttaatggacaaaagtttctgtgtaatgctgctatgttaatttcgtttaaactaagttttg

SEQ ID NO: 1306 - DNA, 383 bp, Triticum aestivum
  Clone ID: uC-tsfl15710073f11b1
atctggttattgctcccgccgccgccgccgccggcggggtcacctttgagtcttcgtcggggccgcgacgatgccgtcccacaagaccttccgcatcaagcagaagctggccaagaagcagcgccagaaccgccccatcccctactggatccgcatgcggaccgacaacaccatcaggtacaacgcgaagcgcaggcactggcgccgcaccaagctcgggttctagatccggcccggccgaccgccgcgtgggggagccatggctcaagagttatctgcattttgttttatggacgtttcagtgtttgttatgcaagctaggaagtgatcccaggatgtctctgttatcaatttcttcgtgttatgaggattgcttgtaccct

SEQ ID NO: 1307 - DNA, 502 bp, Triticum aestivum
  Clone ID: uC-tsfl5710001a04b1
cactttgttacatctagcggatttggatttctttaacaactaaggttcctgtttttaacattttatagccaagggcttttgcccatctccaatagctaacaagaactctttcttttctttacaaatcccaaaacctttactagactttttctgcttctttagcttacttcacctagagtcttctaccttttcttatcattgaatcaacccctttttttttttcttttaaacacatcccaacccaaagtataagcgcccacctagtcctatctagtccgaaaaatgcgaactagaactacatgagacactatctctgtcgttacgaacctaacactttctaccaagcttaatcggaataagacctcacaaacactcacaagttatatagggcttgaaagaaagtctaggtttgggttctgggttaactgctctaataaggagagtcagctacttggattaaaaagagtgatcaaaatgaataagaaaatccaagtattttacg

SEQ ID NO: 1308 - DNA, 441 bp, Triticum aestivum
  Clone ID: uC-tsfl5710001a06b1
ctttgtcacatctagcggatttggatttctttaacaactaaggttcctgtttttaacatttttaagccaagggcttttgcccatctccaatagctaacaagaactctttcttttctttacaaatcccaaaacctttactagactttttctgcttctttagcttacttcacctagagtcttctaccttttcttatcattgaatcaacccctttttttttttcttttaaacacatcccaacccaaagtataagcgcccacctagtcctatctagtccgaaaaatgcgaactagaactacatgagacactatctctgtcgttacgaacctaacactttctaccaagcttaatcggaataagacctcacaaacactcacaagttatatagggcttgaaagaaagtctaggtttgggtttgggttaactgctctaataaggagagt

SEQ ID NO: 1309 - DNA, 405 bp, Triticum aestivum
  Clone ID: uC-tsfl5710001a09b1
tcactttgtcacatctagcggatttggatttctttaacaactaaggttcctgtttttaacattttataagccaagggcttttgcccatctccaatagctaacaagaactctttcttttctttacaaatcccaaaacctttactagactttttctgcttctttagcttacttcacctagagtcttctaccttttcttatcattgaatcaacccctttttttttttcttttaaacacatcccaacccaaagtataagcgcccacctagtcctatctagtccgaaaaatgcgaactagaactacatgagacactatctctgtcgttacgaacctaacactttctaccaagcttaatcggaataagacctcacaaacactcacaagttatatagggcttgaaagaaagt

SEQ ID NO: 1310 - DNA, 405 bp, Triticum aestivum
  unsure (1)..(405): unsure at all n locations
  Clone ID: uC-tsfl5710001b04b1
actttgttacatctagcggatttggnccgcacctagcaaatggtaagccaagaaagccaactgtctggacaggggcttttgcccatctccaataggtaacaagaactctttcttttctttacaaatcccaaaacctttactagactttttctgcttctttagcttacttcacctagagtcttctaccttttcttatcattgaatcaacccctttttttttttcttttaaacacatcccaacccaaagtataagcgcccacctagtcctatctagtccgaaaaatgcgaactagaactacatgagacactatctctgtcgttacgaacctaacactttctaccaagcttaatcggaataagacctcacaaacactcacaagttatatagggcttgaaagaaagtct

SEQ ID NO: 1311 - DNA, 468 bp, Triticum aestivum
  unsure (1)..(468): unsure at all n locations
  Clone ID: uC-tsfl5710001b06b1
ccgacctcttcccgcacctagcaaatggtaagccaagaaagccaactgacggcattgcacatgtgcagacaaagaaatgctgctgctgctattcaacgagatcgattctaacctcaaagcgcccagatcccaatgacgagctcgtcgacgatgtccaccacgttgcagtcgcgccatgggccccgaatgcgaaccccgtcgacatggcctggtccgttgtgccggtactgcgatccggcgacttgtcccattcgaccatccagttctcgccctcctcgtcggcgcttcagagcttcgccgtgaccctgcaacaggtggccccttcgaagctgtccagccacagccgcagcggcattgagatcctcgtcctcgacgttgctccccttccgctagacancggtgttcgtcaacctggagagcgaattgacaaaacggctggagagcggcgagggcaccttttacaaggac

SEQ ID NO: 1312 - DNA, 521 bp, Triticum aestivum
  Clone ID: uC-tsfl5710001b09b1
actttgtcacatctagcggatttggatttctttaacaactaaggttcctgtttttaacattttaaagccaagggcttttgcccatctccaatagctaacaagaactctttcttttctttacaaatcccaaaacctttactagactttttctgcttctttagcttacttcacctagagtcttctaccttttcttatcattgaatcaacccctttttttttttcttttaaacacatcccaacccaaagtataagcgcccacctagtcctatctagtccgaaaaatgcgaactagaactacatgagacactatctctgtcgttacgaacctaacactttctaccaagcttaatcggaataagacctcacaaacactcacaagttatatagggcttgaaagaaagtctaggtttgggttcgggctaactgctctaaaaggagagtcagctacttggattaaaagagtgatcaaaatgaataagaaaatccaagtattttacggtatccatgagttcaaatttgat

SEQ ID NO: 1313 - DNA, 512 bp, Triticum aestivum
  Clone ID: uC-tsfl5710001c05b1
tctagcggatttggatttctttaacaactaaggttcctgtttttaacattttaaagccaagggcttttgcccatctccaatagctaacaagaactctttcttttctttacaaatcccaaaacctttactagactttttctgcttctttagcttacttcacctagagtcttctaccttttcttatcattgaatcaacccctttttttttttcttttaaacacatcccaacccaaagtataagcgcccacctagtcctatctagtccgaaaaatgcgaactagaactacatgagacactatctctgtcgttacgaacctaacactttctaccaagcttaatcggaataagacctcacaaacactcacaagttatatagggcttgaaagaaagtctaggtttgggttctgggttaactgctctaataaggagagtcagctacttggataaaaagagtgatcaaaatgaataagaaaatccaagtattttacggtatccatgagttcaaatttgat

SEQ ID NO: 1314 - DNA, 401 bp, Triticum aestivum
  Clone ID: uC-tsfl5710001c07b1
ctttgtcacatctagcggatttggatttctttaacaactaaggttcctgtttttaacattttaaagccaagggcttttgcccatctccaatagctaacaagaactctttcttttctttacaaatcccaaaacctttactagactttttctgcttctttagcttacttcacctagagtcttctaccttttcttatcattgaatcaacccctttttttttttcttttaaacacatcccaacccaaagtataagcgcccacctagtcctatctagtccgaaaaatgcgaactagaactacatgagacactatctctgtcgttacgaacctaacactttctaccaagcttaatcggaataagacctcacaaacactcacaagttatatagggcttgaaagaaagt

SEQ ID NO: 1315 - DNA, 534 bp, Triticum aestivum
  Clone ID: uC-tsfl5710001c08b1
cactttgcacatctagcggatttggatttctttaacaactaaggttcctgtttttaacattttaaagccaagggcttttgcccatctccaatagctaacaagaactctttcttttctttacaaatcccaaaacctttactagactttttctgcttctttagcttacttcacctagagtcttctaccttttcttatcattgaatcaacccctttttttttttcttttaaacacatcccaacccaaagtataagcgcccacctagtcctatctagtccgaaaaatgcgaactagaactacatgagacactatctctgtcgttacgaacctaacactttctaccaagcttaatcggaataagacctcacaaacactcacaagttatatagggcttgaaagaaagtctaggtttgggtttgggctaactgctctaataaggagagtcagctacttggattaaaagagtgatcaaaatgaataagacaatccaagtattttacggtatccatgagttcaaatttgatgcagacatgata

SEQ ID NO: 1316 - DNA, 440 bp, Triticum aestivum
  Clone ID: uC-tsfl5710001c09b1
cactttgtcacatctagcggatttggatttctttaacaactaaggttcctgtttttaacattttaaagccaagggcttttgcccatctccaatagctaacaagaactctttcttttctttacaaatcccaaaacctttactagactttttctgcttctttagcttacttcacctagagtcttctaccttttcttatcattgaatcaacccctttttttttttcttttaaacacatcccaacccaaagtataagcgcccacctagtcctatctagtccgaaaaatgcgaactagaactacatgagacactatctctgtcgttacgaacctaacactttctaccaagcttaatcggaataagacctcacaaacactcacaagttatatagggcttgaaagaaagtctaggtttgggttcgggttaactgctctaataaggag

SEQ ID NO: 1317 - DNA, 244 bp, Triticum aestivum
  Clone ID: uC-tsfl5710001d05b1
caaagaattgctgctgctgctattcaacgagatcgattctaacctcaaagcgcccagatcccaatgacgagctcgtcgacgatgtccaccacgttgcagtctcgccatgggccccgaatgcgaaccccgtcgacatggcctggtccgttgcgccggtactgcgatccggcgacttgtcccattcgaccattcagttctcgccctcctcgtcggcgcttcagagcttggccgtgaccctgcaaca

SEQ ID NO: 1318 - DNA, 482 bp, Triticum aestivum
  Clone ID: uC-tsfl5710001d06b1
ctcttcccgcacctagcaaatggtaagccaagaaagccaactgacggcattgcacatgtgcagacaaagaaatgctgctgctgctattcaacgagatcgattctaacctcaaagcgcccagatcccaatgacgagctcgtcgacgatgtccaccacgttgcagtcgcgccatgggccccgaatgcgaaccccgtcgacatggcctggtccgttgtgccggtactgcgatccggcgacttgtcccattcgaccatccagttctcgccctcctcgtcggcgcttcagagcttcgccgtgaccctgcaacaggtggccccttcgaagctgtccagccacagccgcagcggcattgagatcctcgtcctcgacgttgctccccttccgctagacacggtgttcgtcaacctggagagcgaattgacaaaacggctggagagcggcgagggcaccttttacaaggaccatccgacaagccccaatgc

SEQ ID NO: 1319 - DNA, 481 bp, Triticum aestivum
  Clone ID: uC-tsfl5710001d08b1
cctcttcccgcacctagcaaatggtaagccaagaaagccaactgacggcattgcacatgtgcagacaaagaaatgctgctgctgctattcaacgagatcgattctaacctcaaagcgcccagatcccaatgacgagctcgtcgacgatgtccaccacgttgcagtcgcgccatgggccccgaatgcgaaccccgtcgacatggcctggtccgttgtgccggtactgcgatccggcgacttgtcccattcgaccatccagttctcgccctcctcgtcggcgcttcagagcttcgccgtgaccctgcaacaggtggccccttcgaagctgtccagccacagccgcagcggcattgagatcctcgtcctcgacgttgctccccttccgctagacacggtgttcgtcaacctggagagcgaattgacaaaacggctggagagcggcgagggcaccttttacaaggaccatccgacaagccccaat

SEQ ID NO: 1320 - DNA, 431 bp, Triticum aestivum
  Clone ID: uC-tsfl5710001e04b1
ccgcacctagcaaatggtgagccaagaaagccaactgtctgcattgcacatgtgcagacaaagaaatgctgctgctgctattcaacgagatcgattctaacctcaaagcgcccagatcccaatgacgagctcgtcgacgatgtccaccacgttgcagtcgcgccatgggccccgaatgcgaaccccgtcgacatggcctggtccgttgtgccggtactgcgatccggcgacttgtcccattcgaccatccagttctcgccctcctcgtcggcgcttcagagcttcgccgtgaccctgcaacaggtggccccttcgaagctgtccagccacagccgcagcggcattgagatcctcgtcctcgacgttgctccccttccgctagacacggtgttcgtcaacctggagagcgaattgacaaaacggctggagag

SEQ ID NO: 1321 - DNA, 401 bp, Triticum aestivum
  Clone ID: uC-tsfl5710001e05b1
cactttgttacatctagcggatttggatttctttaacaactaaggttcctgtttttaacattttaaagccaagggcttttgcccatctccaatagctaacaagaactctttcttttctttacaaatcccaaaacctttactagactttttctgcttctttagcttacttcacctagagtcttctaccttttcttatcattgaatcaacccctttttttttttcttttaaacacatcccaacccaaagtataagcgcccacctagtcctatctagtccgaaaaatgcgaactagaactacatgagacactatctctgtcgttacgaacctaacactttctaccaagcttaatcggaataagacctcacaaacactcacaagttatatagggcttgaaagaaa

SEQ ID NO: 1322 - DNA, 308 bp, Triticum aestivum
  Clone ID: uC-tsfl5710001e06b1
caacaacaacaactagttctaccgcaacaacaaataccatttgttcatccatctatcttgcagcagctaaacccatgcaaggtattcctccagcagcaatgcagccctgtggcaatgccacaaagtcttgctaggtcgcaaatgttgcagcagagcagttgccatgtgatgcaacaacaatgttgccagcagttgccgcaaatcccccagcaatcccgctatgaggcaatccgtgctatcatctactccatcatcctgcaagaacaacaacaggttcagggttccatccaaactcctcagcagcaacc

SEQ ID NO: 1323 - DNA, 469 bp, Triticum aestivum
  Clone ID: uC-tsfl5710001e08b1
gtgttctccgacctcttcccgcacctagcaaatggtaagccaagaaagccaactgacggcattgcacatgagcagacaaagaaatgctgctgctgctattcaacgagatcgattctaacctcaaagcgcccagatcccaatgacgagctcgtcgacgatgtccaccacgttgcagtcgcgccatgggccccgaatgcgaaccccgtcgacatggcctggtccgttgtgccggtactgcgatccggcgacttgtcccattcgaccatccagttctcgccctcctcgtcggcgcttcagagcttcgccgtgaccctgcaacaggtggccccttcgaagctgtccagccacagccgcagcggcattgagatcctcgtcctcgacgttgctccccttccgctagacacggtgtctcgtcaacctggagagcgaattgacaaaacggctggagagcggcgagggcaccttttac

SEQ ID NO: 1324 - DNA, 415 bp, Triticum aestivum
  Clone ID: uC-tsfl5710001f05b1
cactttgttacatctagcggatttggatttctttaacaactaaggttcctgtttttaacattttaaagccaagggcttttgcccatctccaatagctaacaagaactctttcttttctttacaaatcccaaaacctttactagactttttctgcttctttagcttacttcacctagagtcttctaccttttcttatcattgaatcaacccctttttttttttcttttaaacacatcccaacccaaagtataagcgcccacctagtcctatctagtccgaaaaatgcgaactagaactacatgagacactatctctgtcgttacgaacctaacactttctaccaagcttaatcggaataagacctcacaaacactcacaagttatatagggcttgaaagaaagtctaggtttgggt

SEQ ID NO: 1325 - DNA, 417 bp, Triticum aestivum
  Clone ID: uC-tsfl5710001f06b1
gctcaacactttgttacatctagcggatttggatttctttaacaactaaggttcctgtttttaacattttaaagccaagggcttttgcccatctccaatagctaacaagaactctttcttttctttacaaatcccaaaacctttactagactttttctgcttctttagcttacttcacctagagtcttctaccttttcttatcattgaatcaacccctttttttttttcttttaaacacatcccaacccaaagtataagcgcccacctagtcctatctagtccgaaaaatgcgaactagaactacatgagacactatctctgtcgttacgaacctaacactttctaccaagcttaatcggaataagacctcacaaacactcacaagttatatagggcttgaaagaaagtctaggttt

SEQ ID NO: 1326 - DNA, 485 bp, Triticum aestivum
  Clone ID: uC-tsfl5710001f07b1
tgctctacagtgttctccgacctcttcccgcacctagcaaatggtaagccaagaaagccaactgacggcattgcacatgagcagacaaagaaatgctgctgctgctattcaacgagatcgattctaacctcaaagcgcccagatcccaatgacgagctcgtcgacgatgtccaccacgttgcagtcgcgccatgggccccgaatgcgaaccccgtcgacatggcctggtccgttgtgccggtactgcgatccggcgacttgtcccattcgaccatccagttctcgccctcctcgtcggcgcttcagagcttcgccgtgaccctgcaacaggtggccccttcgaagctgtccagccacagccgcagcggcattgagatcctcgtcctcgacgttgctccccttccgctagacacggtgttcgtcaacctggagagcgaattgacaaaacggctggagagcggcgagggcaccttttacaaggacca

SEQ ID NO: 1327 - DNA, 467 bp, Triticum aestivum
  Clone ID: uC-tsfl5710001f08b1
tgttctccgacctcttcccgcacctagcaaatggtaagccaagaaagccaactgacggcattgcacatttgcagacaaagaaatgctgctgctgctattcaacgagatcgattctaacctcaaagcgcccagatcccaatgacgagctcgtcgacgatgtccaccacgttgcagtcgcgccatgggccccgaatgcgaaccccgtcgacatggcctggtccgttgtgccggtactgcgatccggcgacttgtcccattcgaccatccagttctcgccctcctcgtcggcgcttcagagcttcgccgtgaccctgcaacaggtggccccttcgaagctgtccagccacagccgcagcggcattgagatcctcgtcctcgacgttgctccccttccgctagacacggtgttcgtcaacctggagagcgaattgacaaaacggctggagagcggcgagggcaccttttac

SEQ ID NO: 1328 - DNA, 203 bp, Triticum aestivum
  Clone ID: uC-tsfl5710001f10b1
ttggacgcgtgggcggacgcgtgggcggacgcgtgggcggcgcgtgggaaaaaaaaaaaaaaaaaaaaaaaaaaaaaaaaaaaaaaaaaaaaaaaaaaaaaaaaaaaaaaaaaaaaaaaaaaaaaaaaaaaaaaaaaaaaaaaaaaaaaaaaaaaaaaaaaaaaaaaaaaaaaaaaaaaaaaaaaaaaaaggggggggccttt

SEQ ID NO: 1329 - DNA, 491 bp, Triticum aestivum
  Clone ID: uC-tsfl5710001g05b1
tgttctccgacctcttcccgcacctagcaaatggtaagccaagaaagccaactgacggcattgcacatgtgcagacaaagaaatgctgctgctgctattcaacgagatcgattctaacctcaaagcgcccagatcccaatgacgagctcgtcgacgatgtccaccacgttgcagtcgcgccatgggccccgaatgcgaaccccgtcgacatggcctggtccgttgtgccggtactgcgatccggcgacttgtcccattcgaccatccagttctcgccctcctcgtcggcgcttcagagcttcgccgtgaccctgcaacaggtggccccttcgaagctgtccagccacagccgcagcggcattgagatcctcgtcttcgacgttgctccccttccgctagacacggtgttcgtcaacctggagagcgaattgacaaaacggctggagagcggcgagggcaccttttacaaggaccatccgacaagccccaat

SEQ ID NO: 1330 - DNA, 488 bp, Triticum aestivum
  Clone ID: uC-tsfl5710001g06b1
tgttctccgacctcttcccgcacctagcaaatggtaagccaagaaagccaactgacggcattgcacatgagcagacaaagaaatgctgctgctgctattcaacgagatcgattctaacctcaaagcgcccagatcccaatgacgagctcgtcgacgatgtccaccacgttgcagtcgcgccatgggccccgaatgcgaaccccgtcgacatggcctggtccgttgtgccggtactgcgatccggcgacttgtcccattcgaccatccagttctcgccctcctcgtcggcgcttcagagcttcgccgtgaccctgcaacaggtggccccttcgaagctgtccagccacagccgcagcggcattgagatcctcgtcctcgacgttgctccccttccgctgacacggtgttcgtcaacctggagagcgaattgacaaaacggctggagagcggcgagggcaccttttacaaggaccatccgacaagcccca

SEQ ID NO: 1331 - DNA, 103 bp, Triticum aestivum
  Clone ID: uC-tsfl5710001g07b1
ccgcacctagcaaatggtgagccaagaaagccaactgatctgcattgcacatgtgcagacaaagaaatgctgctggtgctattcaacgagatcgattctaacc

SEQ ID NO: 1332 - DNA, 491 bp, Triticum aestivum
  Clone ID: uC-tsfl5710001g08b1
tgttctccgacctcttcccgcacctagcaaatggtaagccaagaaagccaactgacggcattgcacatgtgcagacaaagaaatgctgctgctgctattcaacgagatcgattctaacctcaaagcgcccagatcccaatgacgagctcgtcgacgatgtccaccacgttgcagtcgcgccatgggccccgaatgcgaaccccgtcgacatggcctggtccgttgtgccggtactgcgatccggcgacttgtcccattcgaccatccagttctcgccctcctcgtcggcgcttcagagcttcgccgtgaccctgcaacaggtggccccttcgaagctgtccagccacagccgcagcggcattgagatcctcgtcctcgacgttgctccccttccgctagacacggtgttcgtcaacctggagagcgaattgacaaaacggctggagagcggcgagggcaccttttacaaggaccatccgacaagccccaat

SEQ ID NO: 1333 - DNA, 466 bp, Triticum aestivum
  Clone ID: uC-tsfl5710001g09b1
tgttctccgacctcttcccgcacctagcaaatggtaagccaagaaagccaactgacggcattgcacatgagcagacaaagaaatgctgctgctgctattcaacgagatcgattctaacctcaaagcgcccagatcccaatgacgagctcgtcgacgatgtccaccacgttgcagtcgcgccatgggccccgaatgcgaaccccgtcgacatggcctggtccgttgtgccggtactgcgatccggcgacttgtcccattcgaccatccagttctcgccctcctcgtcggcgcttcagagcttcgccgtgaccctgcaacaggtggccccttcgaagctgtccagccacagccgcagcggcattgagatcctcgtcttcgacgttgctccccttccgctagcacggtgttcgtcaacctggagagcgaattgacaaaacggctggagagcggcgagggcaccttttac

SEQ ID NO: 1334 - DNA, 517 bp, Triticum aestivum
  Clone ID: uC-tsfl5710001h04b1
cactttgttacatctagcggatttggatttctttaacaactaaggttcctgtttttaacattttaaagccaagggcttttgcccatctccaatagctaacaagaactctttcttttctttacaaatcccaaaacctttactagactttttctgcttctttagcttacttcacctagagtcttctaccttttcttatcattgaatcaacccctttttttttttcttttaaacacatcccaacccaaagtataagcgcccacctagtcctatctagtccgaaaaatgcgaactagaactacatgagacactatctctgtcgttacgaacctaacactttctaccaagcttaatcggaataagacctcacaaacactcacaagttatatagggcttgaaagaaagtctaggtttgggttctgggttaactgctctaataaggagagtcagctacttggattaaaagagtgatcaaaatgaataagaaaatccaagtattttacggtatccatgagttcaa

SEQ ID NO: 1335 - DNA, 405 bp, Triticum aestivum
  Clone ID: uC-tsfl5710001h05b1
cactttgttacatctagcggatttggatttctttaacaactaaggttcctgtttttaacattttaaagccaagggcttttgcccatctccaatagctaacaagaactctttcttttctttacaaatcccaaaacctttactagactttttctgcttctttagcttacttcacctagagtcttctaccttttcttatcattgaatcaacccctttttttttttcttttaaacacatcccaacccaaagtataagcgcccacctagtcctatctagtccgaaaaatgcgaactagaactacatgagacactatctctgtcgttacgaacctaacactttctaccaagcttaatcggaataagacctcacaaacactcacaagttatatagggcttgaaagaaagtct

SEQ ID NO: 1336 - DNA, 357 bp, Triticum aestivum
  Clone ID: uC-tsfl5710001h06b1
ggattcctttaacaactaagggtcctgttcttaacatttttaagccaagggcttttgcccatcttcaatagctaacaagaactgtttatttggtttacaaatcccaaaacctttactagactttgtctgcttctttagcttacttcacctagagtcttctaccttttcttatcattgaatcaacccctttttttttttgtttgatacacatcccatcccaaagtataagcgcccacctagtcctatctagtccgaaaaatgcgaactagaactacatgagacactatctgtgtcgttacgaacctaacactatgtaccaagcttaatcggaataagacctcacaaacactcacaagt

SEQ ID NO: 1337 - DNA, 492 bp, Triticum aestivum
  Clone ID: uC-tsfl5710001h07b1
tgttctccgacctcttcccgcacctagcaaatggtaagccaagaaagccaactgacggcattgcacatgagcagacaaagaaatgctgctgctgctattcaacgagatcgattctaacctcaaagcgcccagatcccaatgacgagctcgtcgacgatgtccaccacgttgcagtcgcgccatgggccccgaatgcgaaccccgtcgacatggcctggtccgttgtgccggtactgcgatccggcgacttgtcccattcgaccatccagttctcgccctcctcgtcggcgcttcagagcttcgccgtgaccctgcaacaggtggccccttcgaagctgtccagccacagccgcagcggcattgagatcctcgtcctcgacgttgctccccttccgctagacacggtgtttcgtcaacctggagagcgaattgacaaaacggctggagagcggcgagggcaccttttacaaggaccatccgacaagccccaat

SEQ ID NO: 1338 - DNA, 468 bp, Triticum aestivum
  Clone ID: uC-tsfl5710001h08b1
tgctctacagctcaacactttgttacatctagcggatttggatttctttaacaactaaggttcctgtttttaacattttaaagccaagggcttttgcccatctccaatagctaacaagaactctttcttttctttacaaatcccaaaacctttactagactttttctgcttctttagcttacttcacctagagtcttctaccttttcttatcattgaatcaacccctttttttttttcttttaaacacatcccaacccaaagtataagcgcccacctagtcctatctagtccgaaaaatgcgaactagaactacatgagacactatctctgtcgttacgaacctaacactttctaccaagcttaatcggaataagacctcacaaacactcacaagttatatagggcttgaaagaaagtctaggtttgggtttgggttaactgctctaataaggagagtcagctacttg

SEQ ID NO: 1339 - DNA, 466 bp, Triticum aestivum
  Clone ID: uC-tsfl5710001h09b1
tgttctccgacctcttcccgcacctagcaaatggtaagccaagaaagccaactgacggcattgcacatgagcagacaaagaaatgctgctgctgctattcaacgagatcgattctaacctcaaagcgcccagatcccaatgacgagctcgtcgacgatgtccaccacgttgcagtcgcgccatgggccccgaatgcgaaccccgtcgacatggcctggtccgttgtgccggtactgcgatccggcgacttgtcccattcgaccatccagttctcgccctcctcgtcggcgcttcagagcttcgccgtgaccctgcaacaggtggccccttcgaagctgtccagccacagccgcagcggcattgagatcctcgtcctcgacgttgctccccttccgctagacatcggtgttcgtcaacctggagagcgaattgacaaaacggctggagagcggcgagggcacctttt

SEQ ID NO: 1340 - DNA, 154 bp, Triticum aestivum
  Clone ID: uC-tsfl5710002a10b1
cctacgcgttcgcaacgatcgagtgtctagaaactgatcgaccgtgcacgtacgtacgtacgcgatgaagcgtgcgcatgcatgcatgcacctggtttcgtttgtacaaccatgatgtaaagtacgaaggttgaatgcaaaagtctgttgctag

SEQ ID NO: 1341 - DNA, 60 bp, Triticum aestivum
  Clone ID: uC-tsfl5710002h10b1
cccacgcgtccgcccacgcgtccgcccacgcgtgcgcccacgcgtccgcccacgcgtgcg

SEQ ID NO: 1342 - DNA, 354 bp, Triticum aestivum
  Clone ID: uC-tsfl5710003b06b1
tatcgccctctttataatgcgatgagaactgagagtgctttgaagtttgggtggtttttcctattttacatgattcacataatcttctgcgtgtggtcagctgcgtctcccccattccctttcaaaggaaattctttgactgggattttgcctgccattgatgtcataaccaagagccttattgttgggatattttactttgttggatttggattgttctgccttgaatcactgctgagcataggtgtcattcagcaagtgtacatgtacttccgtggaagtggaaaatcccaggagttgaaacaacaggcagcacgtggtgccctgagctctgcgttctgatgaagaaaacca

SEQ ID NO: 1343 - DNA, 223 bp, Triticum aestivum
  Clone ID: uC-tsfl5710003b09b1
gtacgagggtggagggaatgatcttaaataaattatactccatctcaaagaaagacttgtttcttcctgcgaggatttttgtaatggtaatattttcctgtgttccaaaatccagtgccgccttcggtttttatttcttcatttcaaatggaattgattgatttccatttcataattgcagtcaaattgtcaaaatataatcaaagttattttttttcataaa

SEQ ID NO: 1344 - DNA, 88 bp, Triticum aestivum
  Clone ID: uC-tsfl5710003b12b1
cctgaacttgccgcagcttgtgaagtatggaaggcgatcaaattcgagttcgagccggtagatactattgataagtagataaaactaa

SEQ ID NO: 1345 - DNA, 330 bp, Triticum aestivum
  Clone ID: uC-tsfl5710003c02b1
cggacgcgtgggcggacgcgtgggcggacgcgtgggcgacggcaagctctacgtctgcaaggcgcaagccggagacaagaggtggttcaagggcgccaagaagttcgtcgagaacgccgcaggatccttcagcgtcgcataaatatacacgaccgaccggcgagtttaatggaaatttcctcagggatgcaccatgtagagaccgatcgagggcatgcatgtgtgtttctttgatttgtacatgaggatggatgaactaagaggtcgatttccctcaaggattcatgtgtgcacaatgattaagaaatcttagtaataatgtttcaaaaa

SEQ ID NO: 1346 - DNA, 136 bp, Triticum aestivum
  Clone ID: uC-tsfl5710003c07b1
gtggaatcttctatgctaaagattacctatcttatgtgcttttaggttgaattttgcggatttgatatgttattctgttgagacctaagtatctgtgcaatgagaactgcaaaccaccttgggatggtctttttag

SEQ ID NO: 1347 - DNA, 368 bp, Triticum aestivum
  Clone ID: uC-tsfl5710003d02b1
cccacgcgttcggcaaggagcgtcgaggtctggctcaccgccgtcaccaccccgggccatggccggcgccgccggtggcgatccggggcgcgccgaggagattactggcggtagcctagcctgattatgcataataacgcatgcacgaactatgacatccatgagcagatcgatcaagaacctatgatgctgaaaagttaattacaagtaatcgaggggcaaatcaatacgcgtatttgcatatatggcgaggtgagggtgagaatcttgagatggtatgaatatgttagagaagacgttgaagcagggtgcatgttttttcttcaggctggttggttcagatctgtagtcatgatgcaaacaaatgt

SEQ ID NO: 1348 - DNA, 84 bp, Triticum aestivum
  Clone ID: uC-tsfl5710003e04b1
cgtacgcgtgggttgtaatttagtgttgaattgccatcgtacttaggataaattatggcctgagtaataaagttcattttaatt

SEQ ID NO: 1349 - DNA, 357 bp, Triticum aestivum
  Clone ID: uC-tsfl5710003e09b1
aaataaggaggagcctcaccaactaaggaggcccaaacaggacagctgttgtgtacattctcctgttcctgccatggaggcttggaggaggaatgccctgcgctgcgcgcttctcgtgctgctcctcgccgtttcaagcggggtggcgagggctcaggggggcggcgagtgctggagcacggacatggggtacggcatctgcgtgaagcccggcgggtgcagagctgcctgccatgccctcggcaagaacgacggccagtgcaacgggggctacttctggccggtctgcgagtgcctgtctccacactgccactaggatcggattggcgttgctactaggcaggcagacgcctcgtc

SEQ ID NO: 1350 - DNA, 60 bp, Triticum aestivum
  Clone ID: uC-tsfl5710003f06b1
tttcgattttgaaaaacagatatttatcaatgagtaaataaatacactgttgtaactact

SEQ ID NO: 1351 - DNA, 60 bp, Triticum aestivum
  Clone ID: uC-tsfl5710003f08b1
attaaaaaaaaaaaaaaaaaaaaaaaaaaaaaaaaaaaaaccaaaaaaacaaaaggggcg

SEQ ID NO: 1352 - DNA, 68 bp, Triticum aestivum
  Clone ID: uC-tsfl5710003g02b1
aaaaaaaaaaaaaaaaaaaaaaaaaaaaaaaaaaaaaaaaaaaaaaaaaaaaaaaaaaaaaaaaaaaa

SEQ ID NO: 1353 - DNA, 374 bp, Triticum aestivum
  unsure (1)..(374): unsure at all n locations
  Clone ID: uC-tsfl5710003g05b1
gtttgccatccggtttggcaccgttgagaattgcaagaagtttaaagacttagttgatgagatcgctgagtcgcttgcaaagaatgaaggcggtgaaagcgaagaaggttcttccgcagctggactgctggagaaacttagtgtaagtgaaagcaaacctgaggaaagcgcagctaaggaggaatcaactgatgctagcaaggagacagaaaccaaagccgcgacagccccctcagagtagtgggcagagcaacgcccgtcacaatggtaccgctgagcattgctcggtggcaagagtcagtttgtcggtccttcctgttgacggaagttggtagtcgttgacgatgaaatatgctgagaactttntgagacag

SEQ ID NO: 1354 - DNA, 143 bp, Triticum aestivum
  unsure (1)..(143): unsure at all n locations
  Clone ID: uC-tsfl5710003g12b1
tttatncggtggaatcttctatgctaaagattacctatcttatgtgcttttaggctgaattttgcggatttgatatgctattctggtgagacctaagtatctgtgcaatgagaactgcaaaccaccttgggatggtcttttta

SEQ ID NO: 1355 - DNA, 292 bp, Triticum aestivum
  Clone ID: uC-tsfl5710003h05b1
acgtcaccggcgagggccccttcgagaacctgtgcgcgcacctcagcgaccccttcggcaacaacctgctcaccgtcatctccggcgccgccgagagggtgcccagcctgtgagctggccgttaattgcccgtccgccgccgtcggctgttgatgatcagctgcatgcgcgcgatgcagcatcatgtgctgtgtgaattttaccggggaaaagtatgagagtacgaatgtgccgtacgtgtaaattatcaaggggcagaagaaacatgaccgttctgatttctgatgggaaa

SEQ ID NO: 1356 - DNA, 136 bp, Triticum aestivum
  Clone ID: uC-tsfl5710003h06b1
gtttcagaatgtgcgtcgtgttagatccatgttagaaccctgttcctctcgtggtgggtggatgtgttatgcctaatctggtggtaccttcttgttgccatcagcaatggaaatgaaaatgtttgtccctgttctc

SEQ ID NO: 1357 - DNA, 337 bp, Triticum aestivum
  Clone ID: uC-tsfl5710003h08b1
ttagaggagagctcacaagataagatggcgcacatgcgcgtggtgcaccgggacgaggagggccacaaggtggcggagaagctgccggtgccggagacgaggcgcccggacacggccaggcacgtggagcgcaagctggaggagcaggggctgcaccggctggagcgccacccggccaacgcgccccggagcgtaggcatcggcgcgcccccgcccaagtccggccgcggctgcaagtacacctgggagggccccgaggggctggtcgacagcgagctcgaccccgtgcccgccgccatcgaccgcaacgaccccaactacgacgaggaggaaggcg

SEQ ID NO: 1358 - DNA, 73 bp, Triticum aestivum
  Clone ID: uC-tsfl5710004a04b1
cccacgcgtgcgcccacgcgtccgcccacgcgtgcgtccacgcgtgcgcccacgcgtccgcccacgcgtccgc

SEQ ID NO: 1359 - DNA, 74 bp, Triticum aestivum
  Clone ID: uC-tsfl5710004a10b1
tttacgcgtgggtgtgttctctcttcacatgtgtgtattttacaattgttcaaattgttgagaaccatttcatg

SEQ ID NO: 1360 - DNA, 348 bp, Triticum aestivum
  Clone ID: uC-tsfl5710004b05b1
cccacgcgtccgcgcaaagttcgaggagctcaagctcaaggagatcaagaacgggcggctggcgatgctggcgttcgtggggttctgcgtgcagcagtcggcgtaccccggcaccggcccgctggagaacctggccacgcacctcgcggacccgtggcacaacaacatcggcgacatcgccatccccagaaatatctacggcccttgagcggagccgaccgggctgaggggagatcgaggagccggagcacatggttttcattcatgtttctgcgtcgatcgactggttgatcaacttgccacgctggctctgcgcgcgtacgtccgtgcgtgcaggaactgtacaac

SEQ ID NO: 1361 - DNA, 118 bp, Triticum aestivum
  Clone ID: uC-tsfl5710004c04b1
ctttacgcggggtttataccagttcgagccggtagatactattgataagtagataaaactaaagataaagaagagaaggcctaaataaaaaagaaacgaaactaaatggaaaaaacat

SEQ ID NO: 1362 - DNA, 111 bp, Triticum aestivum
  Clone ID: uC-tsfl5710004e01b1
gttgatcatcactgacagggagacgggccgatgccgcgggtccgggttagtcaccttcgcgtcggacgaggcgatgcgccaggctatcgaggccatgaacggccaggacct

SEQ ID NO: 1363 - DNA, 124 bp, Triticum aestivum
  Clone ID: uC-tsfl5710004e04b1
tcgcttttgttatttataatatgagtccttagctatctgttcaactaaaaaaaagttgttatctgttggacatgtttgtgagattgtataattacatatgtattatgaagttgctagtttcagt

SEQ ID NO: 1364 - DNA, 278 bp, Triticum aestivum
  Clone ID: uC-tsfl5710004e05b1
tcggtttgcggcttttctgggcggtcaccggctggttctccacgggcggtgctccgggggcgccggcggtgagggccaggccgtcggccggcacggtggacgtggcgcgcttcgcgttcggcagcgccctgctctggcaccccagccggtgggacagcttccccgtctacgagcccgacgcctcacaggatttcgtgaagttcgtgcatcggttggccgcggtggattacaacaagtctggggggatgcccaaccgggattgctcggaggttatggtg

SEQ ID NO: 1365 - DNA, 155 bp, Triticum aestivum
  Clone ID: uC-tsfl5710004e06b1
attaattgcacctatctcataacagaccagtagcttgaaaccatgcatgcatgcagtacgatcgactacaaggactggcaagcaagcattttagtgtttgtgtggacgtgtacatatacaaatcactgcatggaatattcaagaggaccctacgt

SEQ ID NO: 1366 - DNA, 250 bp, Triticum aestivum
  Clone ID: uC-tsfl5710004f05b1
tcggttatgatgactttgctgcggttataattgatcaaaaaggcaatccaaaaggaactcgagtttttggcgcgattgccgtggaattgagaggattgaattttaccaatgtagtttcattagctcctgaagtattataaatactagtgggcgaaattgagatcaaagaattaatttagtagattgtgttttacgtatatgttttaaaatccaaaatgaaaaaaaaaaaaagaacacatgttgattatag

SEQ ID NO: 1367 - DNA, 75 bp, Triticum aestivum
  Clone ID: uC-tsfl5710004f11b1
ctcacgcgtgcgaccacgcgtacggccacgcgtacgctagttctagctcaaaaaaaaaaaaataaataaacatga

SEQ ID NO: 1368 - DNA, 98 bp, Triticum aestivum
  Clone ID: uC-tsfl5710004h11b1
tttcgtccggtcgatgactttttttgcacaacaaaagttatggacgttcaaacagacttgctggctgaccgtgtgaatgtcgatgactttcgttgtgc

SEQ ID NO: 1369 - DNA, 263 bp, Triticum aestivum
  Clone ID: uC-tsfl5710005b03b1
taacaccctcatcaggcctgatggcaagaagaaggcgtacgtgaagctgacaccagactacgatgctcttgacgtggccaacaagatcggcatcatataagccagagggagggtcctgcagtaggcgcttgtgtcgtggtttcttatgttatcggaattttgtagttgttacttagcaaagggccttagtggctccattgcctaccatatcgctgcacactttcatgaatttgatgcaatcgaagtgacttgtgttgatgcta

SEQ ID NO: 1370 - DNA, 242 bp, Triticum aestivum
  Clone ID: uC-tsfl5710005c01b1
cccacgcgtgcggtccgcctcaggcccgtcggggacccccctgaccgccttcccgcggagcgcttgtcgtagctgctgctcggcggcgccgagtgggacttcaggctcctcgactgccgccacggcctcgtgctcatctgcgacacctcgcggaacatggtgactggtctgggaccccgccaccggcggccagcactgggaggacgctcagggagaaaacccccatcagctgggcggggctt

SEQ ID NO: 1371 - DNA, 85 bp, Triticum aestivum
  Clone ID: uC-tsfl5710005c08b1
cccacgcgtccgcccacgcgtccgcccacgcgtgcgcccacgcgtgcgcccacgcgtccgcccacgcgtccgcccacgcgtccgc

SEQ ID NO: 1372 - DNA, 127 bp, Triticum aestivum
  Clone ID: uC-tsfl5710005d03b1
ctactccccagtggccagcaactctgaacctcccggaccaagttagcaatggcaaagcgcctcgccgtcgcgctcctgctgctggtcctgctcgcgtccagcgacgccggtgctgctgcccgtgctg

SEQ ID NO: 1373 - DNA, 303 bp, Triticum aestivum
  Clone ID: uC-tsfl5710005d05b1
gcttaaaagaaatatttgtttgggtttccattgaactttcttctatgagttggtttcaccagggaggggaacctggtgattaatcatggtgttgggtttgggatgtgtaacctgggttttgtggagggtttggaatcaaatgcctatgggggtcgactaatcaaggccgtgttgcatcaagctgctcaaggagaacaaaaatgtcttggaagacaggaggtggccatctgatcgtggcgctatcttcttgatctcttggtgttagtctgattttgtggtgtggtcttgttctgtactctgctg

SEQ ID NO: 1374 - DNA, 318 bp, Triticum aestivum
  Clone ID: uC-tsfl5710005d06b1
catacgtgggcctggtgccccatcgcaggagacagccatgccggcagcaggaaagtccatcaatgtccgcgaattcatcgacgagcgcgcggtcagcccgttccagtggctggtcgggtttctgacgttcgtcgacatctcgctggacggatgggataccgtcatcatcggcttcgtcgtgcccgagctcatcaaggaatggggcgttaccaagagcgcgctggcgccggtactcagcgccgcgctgttcggcctcgcggccggtgcgctgctcggtgggccgatcgccgaccggttcggacgcaagcgcgtgctggt

SEQ ID NO: 1375 - DNA, 380 bp, Triticum aestivum
  Clone ID: uC-tsfl5710005d12b1
accacgcgtgcgcccacgcgtccggccacgcgtgcgcccacgcgtgcgcgcaaacacaactactccccagtggccagcaactcggaacctcccggaccaagttagcaatggcaaagcgcctcgccgtcgcgctcctgctgctggtcctgctcgggtccagcgacgccggtgctgctgcccgtcctgctaatggcgtccgcgagaagaaggctctggtgcccgggctgccggtggacctccctgggctccctgggctgcctgggctccctgggctccctggcctgccggggctccgtgggctgcctgcccttcccaaatccaccgccaccaacaagtctccatgatcgtctgtggtgtacgtgctggcttacatgcaagct

SEQ ID NO: 1376 - DNA, 99 bp, Triticum aestivum
  Clone ID: uC-tsfl5710005f07b1
tcgctgacgcgtgggcggacgcgtgggcggacgcgtggggtacccccaaacttgctccaattttggtccttgcggatatgtacctgattcggacctgtg

SEQ ID NO: 1377 - DNA, 339 bp, Triticum aestivum
  Clone ID: uC-tsfl5710005g09b1
cgataattaatgcttcaactatttcgactccatttgcttcgttttcattcagcgcaactgcttcttttgaagtccaaactccatcaaggatagaggtccaattcaaagaggggagcttccagcctcctgagatatcatcatcggtaaatctacctgaacagatcgccatattcgggcagaagttcagcctggggactgttaaggagctgctggagcctttgcagcgagcatttgctagcattgcagggtccatctctgggcagccacccctcaaggtaccgattcctggggacaacaaggccaaggtcgtggcttttgacaacctacctggacaaagac

SEQ ID NO: 1378 - DNA, 344 bp, Triticum aestivum
  Clone ID: uC-tsfl5710005g12b1
cggacgcgtggtcccacgcgtccgcgaacacacaccatatcaatcaagaaaaccccgagaggatcatggccggcgtgaacaccagtgtggtcggcctcaagcccgccgcggcggtgccgcagtccgcctcgtcggcggaggcaaagcgcgtgcaggtcgccccggtcaaggaccggcggttggcgcttctcggactggcggtggtcttcgccgtcacggccgcctgcgccgggtcggccagggcaagcgtctttgacgagtaccttgagaagcgcaagctcaacacggagctgtccgacaagaagagggcggcgaccagcggggccaacttagcgcgcgcctac

SEQ ID NO: 1379 - DNA, 110 bp, Triticum aestivum
  Clone ID: uC-tsfl5710005h08b1
ggttaactctagctgagtactcggccttgttttaatgtcttaactgaagtgaaccttggcaattagtgggtctgttaatgtccatcggtacttgtatgcttgtgtgtggc

SEQ ID NO: 1380 - DNA, 366 bp, Triticum aestivum
  Clone ID: uC-tsfl5710006b02b1
cccacgcgtccgcggacgcgtggggatcgatcgatcggtgcgcggcgtcgccgtcggagagagacgaccagaaggtgcagttcccgccatgattgggacggctgcacgaatgaccggggcggtgggtcaactgccgccggtgggtcaccgaaaatttctccggttttcacacgctgcttgccggaatgtacgaggatcaacggcagccactagcaaatggcagaagaaacaagacgcactttgtacttattttcgccttgcatggctctcgtgttcgcgtcaaaaatgccctatgagagacgctaatatgaaaaaataatattggtgtacatgatgggaaaacgtcacaattgttggtatacaatg

SEQ ID NO: 1381 - DNA, 398 bp, Triticum aestivum
  Clone ID: uC-tsfl5710006c04b1
cccacgcgtccgctcctccccactcagtcctcggttcccggtccggtcccgttccgttcgttagggtttagtagtagcggggaagaggaaggaatggcggacgtcgagtaccgctgcttcgtcggcggcctcgcctgggccaccgacgaccagtccctccagaacgccttctccaagtacggcgacgtcatcgactccaagatcatcactgacagggagacgggccgatcccgcgggttcgggttcgtcaccttcgcgtcggacgaggcgatgcgccaggcgatcgaggccatgaacggccaggacctggacggccgcaacatcaccgtcaacgaggcgcagtcccgtcgctccggcggaggaggcggcggcggcttcggcggcggcggtggcggcta

SEQ ID NO: 1382 - DNA, 364 bp, Triticum aestivum
  Clone ID: uC-tsfl5710006h04b1
ggctgcatcactcatgcaggagctgagtagggagagatctgataaacaacagttacctatgctgaaagcagagattgagggccttcaactggaacttacccatgcaagttgtattgtttgcaggaatgcatgtgaattggagcagaaggggaatttcgagttggtggaacaaaggaaagcaatggagaagagtatgatttcgatggcacaagaaattcaacaaatgcgggccgaattagctaattttgatggcagaccatggggcacaggtggagcacatgggatgaagctgggcagtcctgaagcgaccttccctactcaatatggagataaatacaatatacatgcggggagtttctgagaa

SEQ ID NO: 1383 - DNA, 110 bp, Triticum aestivum
  Clone ID: uC-tsfl5710008a08b1
ataaaaaaaaaaaaaaaaaaaaaaagaaataaagaataaaaaaaataaaaaaaaaaaaaaaaaaaaaaatctaaaaataataaaaaaaacacaccacccgtaccaaaaag

SEQ ID NO: 1384 - DNA, 441 bp, Triticum aestivum
  Clone ID: uC-tsfl5710008a09b1
gcggaactgccccaaccacgcctgggactggagactgcccgccctcgccgtcgacaggcgccgcccctactacgcctggtggcgaggacgccccgcccgcgccgtctagtgacacctccccgaccacccctggtggaggctactacccgccaactccgtcaagcggcactgcaccaaccacgcctgggactggagactccccgccagcgccgtccagtgacacctctccgactacccctggtggaggctactacccgcctactccgtccaccggtactgccccaaccacgcctgggactggagactgcctgccctcaccgtccgccggcacctctcctagcacccctggcggtggtgactacccgccctcgccagccagcggcgctgcgcctggtggcgggaactgccctccctcgccgtccgccggcacctctcctacca

SEQ ID NO: 1385 - DNA, 201 bp, Triticum aestivum
  Clone ID: uC-tsfl5710008b01b1
gatctgcgccttatgtatgttatttttgctcgcatcaggctggactgggatcgctggagagggcgtacggtaaaggttgcccccatccaggcagagcccagggatcgatatgtgtatattatatataacaatgctacactgtaacatgaaatgaaatgcagaggaattaaaatgcgtgagtttccttacaaaggcaacggt

SEQ ID NO: 1386 - DNA, 100 bp, Triticum aestivum
  Clone ID: uC-tsfl5710008b02b1
aaaaaaaaaaaaaaaaaaaaaaaaaaaaaaaaagaaaaaaaaaaaaaaaaaaaaaaaaaaaaaagaaaaaaaaaaaaaaaaaaaaaaaaaaaaaaatggg

SEQ ID NO: 1387 - DNA, 143 bp, Triticum aestivum
  Clone ID: uC-tsfl5710008b06b1
ggggggggggtttttttgggggtcccgtttttttccccggggggttggggggtttttttttttttttggggccctttttttttgtttccggggccggtttttccccctgggggggtggggaaaccccgggggccccccctttt

SEQ ID NO: 1388 - DNA, 98 bp, Triticum aestivum
  Clone ID: uC-tsfl5710008b07b1
attaaaaaaaaaaaaaaaaaaaaaaggaaaaaagaaaaaaaaaaaaaaaaaaaaaaaaaaaaaaaaaaaaaaaaaaaaaggggggccgtttttgaggt

SEQ ID NO: 1389 - DNA, 295 bp, Triticum aestivum
  Clone ID: uC-tsfl5710008d10b1
tcgtccctcctctctgtggaggaaggagagagacggaccccaacatacaggggcggagagggatcatgctgaagcttaggctctgtctcgtcgggctccggccagagaccgactactgctaagaggatggccaatcggaccagcgtgcccaagttcggcacctgggacagggacgatgtgggctacacggtctacttcaataaggtgcgcgagaacaagggcgccaccgcgccgacggtccatgggacgctcaaccccaacgacccttaagaggaagccccgagggtgatccccc

SEQ ID NO: 1390 - DNA, 144 bp, Triticum aestivum
  Clone ID: uC-tsfl5710008e01b1
cttggcttcatgaaataaaatcctccatgtattctcaaatgttgcatggcgtgcattaaaaaaaaaaaaaaaaaaaaaaaaaaaaaaaaaaaaaaaaaaaaaataaaaaaaaaaaaaaaaaaaaaaaaaaaaaaaaaggggcgg

SEQ ID NO: 1391 - DNA, 401 bp, Triticum aestivum
  Clone ID: uC-tsfl5710008e02b1
cccacgcgttcgctcgcggtatctttttcactcaggactgggtatccatgccaggtgttataccggtagcttcaggtggtattcatgtttggcatatgccagctctgaccgaaatctttggggacgattctgtattacaatttggtggaggaactttaggacatccttggggaaatgcacctggtgcagcagctaatcgagtggctttagaagcctgtgtacaagctcgtaacgaagggcgcgatcttgctcgcgaaggtaatgaaattatccgagcagcttgcaaatggagtcctgaactagccgcagcttgtgaagtatggaaggcgatcaaattcgagttcgagccggtagatactattgataagtagataaaactaaagataaagaagagaaggtat

SEQ ID NO: 1392 - DNA, 72 bp, Triticum aestivum
  Clone ID: uC-tsfl5710008e09b1
cccacgcgtccgcccacgcgtccgcttgagaccatgcttgcaagccagttatgaatatcatttgtagcaaaa

SEQ ID NO: 1393 - DNA, 165 bp, Triticum aestivum
  Clone ID: uC-tsfl5710008f04b1
cccacgcgtccgcccacgcgtccgaagatcatgcaaattgctttgttgcatactactccgtacataacatagttgaaccatgagcatccatcactctataaaatcatactaaaatatgttatgtacggagtagtatgcaacaagatcatgcaaattgctttgtaa

SEQ ID NO: 1394 - DNA, 243 bp, Triticum aestivum
  Clone ID: uC-tsfl5710008f11b1
cgacgggggcggttcgccgcccccgacgtcgcgagaagtccattgaaccttatcatttagagaaagggagggtttactgtcgacgatgaggacattgacaagctccttgcagagattgaggaccggcctgctgccgctgaggagcctgagcccaaggcaggcaaggcagaggatactgtgcctgctgctgctgctgctgctgctgccaccagtgtggatgatgctgaagggaagaaatcgaag

SEQ ID NO: 1395 - DNA, 111 bp, Triticum aestivum
  Clone ID: uC-tsfl5710008g11b1
cccacgcgttcgcccacgcgtccgcacgagcagagcagagtggtgaactgatattgtgtgcgccgtactatgtgcgtctttatgtaatgtgcgtgctttatctataaacta

SEQ ID NO: 1396 - DNA, 364 bp, Triticum aestivum
  Clone ID: uC-tsfl5710008h03b1
gtcctcatgtacgccaagcgtgccttcgtccactggtacgtcggtgagggcatggaggagggagagttctctgaggcccgtgaggatcttgctgccctggagaaagactatgaagaagttggtgctgagttcgacgagggtgaggacggtgacaagggcgacgagtactacagcctgcctcctggtgctttcgcaaggcgtgctgctgctatcccatgatctgcccgagtggctttatctgttatctgtctgtttgaatctttgctttgtggtgtttgttttacaacctgttgtgttggaagacccttgtatctttgaacctgttatgcaccttggttaatatgcatgctatctggttatctaa

SEQ ID NO: 1397 - DNA, 91 bp, Triticum aestivum
  Clone ID: uC-tsfl5710008h09b1
acgcggacgcgtgggcggacgcgtgggcggacgcgtgggtggatcgtggtctagtcgtgtataatagctctgcctgctacttttgtccggc

SEQ ID NO: 1398 - DNA, 60 bp, Triticum aestivum
  Clone ID: uC-tsfl5710009a01b1
cctacgcgttcgtccacgcgtacggccacgcgtgcgcccacgcgtacgtccacgcgtacg

SEQ ID NO: 1399 - DNA, 221 bp, Triticum aestivum
  Clone ID: uC-tsfl5710009a02b1
gtttcttctttcttgccagggagagagggtagcgagcaaccagggagctaggcgtcaatggcgaccatagccacgatgaccatgctcaagcccgccaagatcacggccaggtcggcgccttcgtcgtcaccgtcagtcagcaccaaggtggcgtccccgagcatctcgctgcgcagcctgcagaagaacgcggccaagaagggggccctggccgtgtcgcc

SEQ ID NO: 1400 - DNA, 54 bp, Triticum aestivum
  Clone ID: uC-tsfl5710009a03b1
tcgcggacgcgtggggacccacgcgttcggccacgcgtgcggtactagatcgcg

SEQ ID NO: 1401 - DNA, 122 bp, Triticum aestivum
  Clone ID: uC-tsfl5710009b11b1
cgtcttgttcctatttctttgcattgcacacatacacagttttgtttcatggaaagtttgtagccctactgctagtgtttgatgatgatgatggcgatcgccattttgtccaatcaaatcaa

SEQ ID NO: 1402 - DNA, 361 bp, Triticum aestivum
  Clone ID: uC-tsfl5710009c01b1
gtgaagcttgcatgagttcatatttatcaggattcagattacagcaagaaggattagcttcttgagctcggagagaactttggcatggcaacagaatctgcacggggcgttgtccaacacaaactgaaacagcatatgcggatcatctatctactgacgtccggctcgccggagggcctcacgccggcgcgatggacaccttgtcgacctgcacgacgtactcgagcgtcgccccggggggcacctgcgcgccatcgtccccgaaatccgcgccgtcctcgccgaagcccaggctcgccgggacgaccacgcgccgcttgccgccgttccgcatggaccgcagcgcgtactcgatgccctc

SEQ ID NO: 1403 - DNA, 88 bp, Triticum aestivum
  Clone ID: uC-tsfl5710009c03b1
gttgagttatatcatttgattaaagacgatgaagaaaaaaaaaaaaaaaaaaaaaaaaaaaaaaaaaaaaaataaaaaaagggcggcc

SEQ ID NO: 1404 - DNA, 184 bp, Triticum aestivum
  Clone ID: uC-tsfl5710009c12b1
tccacgcgtccgagagaaggtataaataaaaaaaaaaaaaaaaaaaaaaaaaaaaaaaaaaaaaaaaaaaaaaaaaaaaaaaaaaaaaaaaaaaaaaaaaaaaaaaaaaaaaaaaaaaaaaaaaaaaaaaaaaaaaaaaaaaaaaaaaaaaaaaaaaaaaaaaaaaaaaaaggggggggctttt

SEQ ID NO: 1405 - DNA, 334 bp, Triticum aestivum
  Clone ID: uC-tsfl5710009d12b1
ctcaccctcccttctccccctcccgaagcagcgatggcccccaaggcggagaagaagccggcggcgaagaagcctgcggaggaggagcccgcggcggagaaggccgagaaggcccctgctgggaagaagccgagggccgagaagcgggttccggcgggcaagaccgcctccaaggagggcggcgagaagaggggcaggaagaagggcaagaagagcgtcgagacctacaagatctacatcttcaaggtgctgaagcaggtgcaccctgacatcggcatctcctccaaggccatgtgcatcatgaactccttcatcaacgacatcttcgagaagc

SEQ ID NO: 1406 - DNA, 66 bp, Triticum aestivum
  Clone ID: uC-tsfl5710009e03b1
cccacgcgtgcgggccgtctcatgatttggcgatttcaattggtttaaagcaaaaagaataaccct

SEQ ID NO: 1407 - DNA, 137 bp, Triticum aestivum
  Clone ID: uC-tsfl5710009e04b1
acgcccacgcgtgcgcccacgcgtccgcccacgcgagcgaccacgcgtgcggccacgcgtccgaccacgcgtacgtgtactgctgacacctaattctctcctagaaaaaaaaaagacaaagaaaatatgaggaggag

SEQ ID NO: 1408 - DNA, 455 bp, Triticum aestivum
  Clone ID: uC-tsfl5710009f05b1
cggacgcgtgggttacgagtcacctatgttgcacctccacagccaccatctccagttcctgaagaatccgaggaaggctccccatctagggttgaatcagaaaatggagatggtcctgctgggggattcaccagagcactgcgagaacgcattgagccccaagaaaaatctttagaggctggagctttgatctccaagttgaccgaagaaaagaattctgcaattcaacagaaccataaaattagacaggaacttgatatgatgagacgggaagtcagcaagaggcgcggtggagggttttcctttgtaattgtcataattgtagctttgatcgggatcttcctgggctacatgatgaagtcataattcttttcatccgtatcacttgaccgtatcgaagggaactggacttgctagtcatgtttgggaacttgaaagatcattcgagatcaaat

SEQ ID NO: 1409 - DNA, 231 bp, Triticum aestivum
  Clone ID: uC-tsfl5710009f06b1
attttccatttatttagttagtttttcttaatgaaattgaaattattaaagagggcaaataaaaataaagaaacaactttgctgaccatgatatatttttatctaggcggaagagtcctcttaatatttatctagtcttatataggtttcggtatattgaaatataaacataaaaaagaagatagaggataggctcattacttaaaaaaaagatatggaaatagctataga

SEQ ID NO: 1410 - DNA, 109 bp, Triticum aestivum
  Clone ID: uC-tsfl5710009g10b1
ctgaaggagagggagctagccatgatgaagactggggggtgatgatgggatttggaccggggttcactgtggagacgatgctgctgcacgctgccacctaggtaattag

SEQ ID NO: 1411 - DNA, 62 bp, Triticum aestivum
  Clone ID: uC-tsfl5710009h07b1
cggacgcgtgtggcggacgcgtgggcggacgcgtgggcggacgcgtgggcggacgcgtgggc

SEQ ID NO: 1412 - DNA, 192 bp, Triticum aestivum
  unsure (1)..(192): unsure at all n locations
  Clone ID: uC-tsfl5710010a04b1
gctctgactctgccggcgaccgcatgaggctaagccccatttgaagcatcaaaaccccangcatgtaccgttccaaacctgccatgttgtcctccctcttttgctcgtcttcgaccactcgaaatgtaagagaccaatgttttatagagaaatactgggaactgtttgaataacacccccagcaatttgtgc

SEQ ID NO: 1413 - DNA, 343 bp, Triticum aestivum
  unsure (1)..(343): unsure at all n locations
  Clone ID: uC-tsfl5710010b07b1
attaagtcctccctgngcaaaaagcaaacccccgcatggctgtgaggctagcacactggaaggagccactcgacgaccctgacaataacaacatgaggccccaacaggtatacacgggcgtttggctgaggcattacacccctgtgagggaacgagtgacatctaaccagggcgaggaacttggtcagatcgctacatcgaacgcgacgaggcgtcgccgtgccggttcttccctgtagaacaacagcacgcatggatgcatggtgcagcatccagcccacacaataaaccaagctgctgtccttgccactcacaacgcctcagcggctcgagtatgggggct

SEQ ID NO: 1414 - DNA, 365 bp, Triticum aestivum
  Clone ID: uC-tsfl5710010b08b1
cctacgcgttctgcgacgacctgctacaatcactgggcaaagatactgggcggcaagacgccagacgccgtcaccgtgaaccccaggaacgagccgcaagaccgcgcgcctgccgacgccgccgtgccgcgctccgtgaagtcggtcgggcccatcgaggactactggtttgtccccgccggcgtcgacatggcgggctactccttccacgtcaccgagccgatgctcacgaggctgcagcagcaggagccagcggctgccggcggcgccttcgagctcatctcggcgctcctgtggcagacggtggcgaagatcagggccgccaaggaggtgaagacggtgacggtggtgaggaacgacatgtc

SEQ ID NO: 1415 - DNA, 266 bp, Triticum aestivum
  unsure (1)..(266): unsure at all n locations
  Clone ID: uC-tsfl5710010b10b1
gtttgccattgcttggctanacaccaacatcnccgccatcgtcgaccttctactcctcagagacgtggggatggcggtggagaccgcccccatagcgctcggtgatctggagacggcggtggagaccgcccccaaagcggcggtcggcgacgccaacgtcaaaaggttttgcgccgaaacgccctacccggacgtctgcgccgacatgatcgcgcgctacgacgacgagtgcaaaggcgccgacgacaagaagctggcggggatgg

SEQ ID NO: 1416 - DNA, 377 bp, Triticum aestivum
  Clone ID: uC-tsfl5710010c01b1
tttagattttggtgcctctgctgaagaaggcgatcgtgatgaagagggtgaagcacttcaagagggcgcacagcgaccgctacatcggcctcaagcaaagctggcgtaggccaaagggtatcgactcccgtgtcaggcggaagttcaagggatgcaccttgatgcccaacatcgggtacggttcagacaagaagacaaggcactacctgcccaacaagttcaagaagttcgttgtccacaatgtctctgagctggagctgctcatgatgcacaacaggacctactgtgccgagatcgcacacaacgtgtccacccagaagcgcaaggcgatcgtggagcgtgctgcgcagctcgacgtcgtggtcaccaacaagctt

SEQ ID NO: 1417 - DNA, 283 bp, Triticum aestivum
  Clone ID: uC-tsfl5710010d05b1
cctacgcgttctcccacgcgtccgacggcgacgatggcggcggttcggtgcgcggcgaggagcctcggtggctcactgctccagcgaacgcaggcggcggtcgcggaggagggacgccggctcgtgccaagcaggttcatgcgctcccgccagctctccaccaagcatgctggcaagatcccgaaggaactggagccgtctgaagtggaagctaagttgaagctgacgagggcgaagctgggtgcaacgttagataaattggagaaggaacagccagatgagt

SEQ ID NO: 1418 - DNA, 101 bp, Triticum aestivum
  Clone ID: uC-tsfl5710010d08b1
actaaaattctaaaaaaaaaaaaaaaaaaaaaaaaaaaaggaaaaaaaaaaaaaaaaaaaaaaacaaaaaaaaaaaaaaaaaaaaaaaaaaaacagggggg

SEQ ID NO: 1419 - DNA, 117 bp, Triticum aestivum
  Clone ID: uC-tsfl5710010d10b1
cggttactcttagctgctcagagagagctaagcttcagtcgattattgacggttgaaccaagtgaggctgtgaattgtcgttgttttcatctatcaataaaatcttgtacgtactct

SEQ ID NO: 1420 - DNA, 74 bp, Triticum aestivum
  Clone ID: uC-tsfl5710010d11b1
cctacgcgatggatcatcgggctgcactggttattgcctcttgatgaacctttgtgatacttcggtggttctag

SEQ ID NO: 1421 - DNA, 315 bp, Triticum aestivum
  Clone ID: uC-tsfl5710010d12b1
cctcgcgatcgccacgcgtccgccccctcaacaatgcaagggctaccgtcaaggcgacgcaaatgatgagacagttctcagacgtcgctgcagagcgtggacttccaatggaggagttatggaaatgataaaacaaaatcattcaactgcctgagggaattcttttcttttttctctactgtatttcttgagtttgttttctgttgtatctatatattgggataaataggggtgcaaatgggggtaccctttgggggtactctatatgacttctgaaaatttagttcacttggttgaactaaggtgggtcggact

SEQ ID NO: 1422 - DNA, 149 bp, Triticum aestivum
  Clone ID: uC-tsfl5710010e07b1
actcaaaatttaaaaaaaaaaaaaaaaaaaaaaaaaaaaaaaaaaaaaaaaaaaaaaaaaaaaaaaaaaaaaaaaaaaaaaaaaaaaaaaaaaaaaaaaaaaaaaaaaagaaaaaaaaaaaacaaaaaaaaaaaaaaaaaacggggggg

SEQ ID NO: 1423 - DNA, 182 bp, Triticum aestivum
  Clone ID: uC-tsfl5710010e10b1
gataatgttttttcatgcatgcaccaataaataaacaaaggctagtgttaattgaccaaaaaaaaaaaaaaaaaaaaaaaaaaaaaaaaaaaaaaaaaaaaaaaaaaaaaaaaaaaaaaaaaaaaaaaaaaaaaaaaaaaaaaaaaaaaaaaaaaaaaaaaaaaaaaaaaaaaaaagggggg

SEQ ID NO: 1424 - DNA, 175 bp, Triticum aestivum
  unsure (1)..(175): unsure at all n locations
  Clone ID: uC-tsfl5710010e12b1
tgtgattccttcttcattnatctnncttatttggtcctaagaatatgtgtatgtccatgttcatgtaccaacatggctcgagaaagcatgctcgtatgtgaatgctatcggtggctatgtatatgcacggacgcataatattatacaatatgtcgactatatacgttttaatggt

SEQ ID NO: 1425 - DNA, 131 bp, Triticum aestivum
  Clone ID: uC-tsfl5710010f09b1
taacggttcctgcccgctggactctgatacggaggagggttcaccaccaagacggcatgagcagcagacgatatgtactcataagacgaggagaggacccacaattggtcgatgtgcatgcccttctctct

SEQ ID NO: 1426 - DNA, 316 bp, Triticum aestivum
  Clone ID: uC-tsfl5710010f11b1
tgccgcgtcgttgccgcacaatctccggcgagatcccctcccccgttcggcagccatggcctccaccttcagcggcgacgagaccgcccccttcttcggcttcctcggcgccgccgccgccctcgtcttctcctgcatgggggcggcgtacgggacggcgaagagcggggtgggggtggcgtcgatgggggtgatgcggccggagctggtgatgaagtccatcgtgcccgtggtcatggcgggggtgctcgggatctacggcctcatcatcgccgtcatcatctccaccgggatcaaccccaaggccaagccctac

SEQ ID NO: 1427 - DNA, 382 bp, Triticum aestivum
  Clone ID: uC-tsfl5710010f12b1
tctgccgcatgatgacaacaagacggaccacctcaatcttggcctgatgaacctggatcttaagatgaatgatctcaagatgaacgaggctgccatgaagtaccctttccgcaacatggcctattacatgaatccgatgtaccccaagggaaacaacggtaatgtcaattcgttcaagatgaatgttggggtcaacaaatatcccaataatcagaatgggaaggaaacaaacggcaaacacaatggtggtaacaacaacaatggaggcaacagcaacaacaactctgttgacaagcgcttcaaaacattgccaacaagcgagatgctaccgaggaatgaagttcttggtggatacatctttgtctgcaacaatgataccatg

SEQ ID NO: 1428 - DNA, 97 bp, Triticum aestivum
  Clone ID: uC-tsfl5710077a10b1
tttttgataaagcactcactgtacagtgtaacaaagaggagatactcatacatacagcagtactaaataaagtccatatcaggctgatttgcaaaaa

SEQ ID NO: 1429 - DNA, 279 bp, Triticum aestivum
  Clone ID: uC-tsfl5710077a12b1
ttggtcagtggggggagctggaggttcgcagttggtgcgcgagcgagacagcgagtcgcggcgatggcggaggcgggaaagccgagggtggtggtggtcggcggcggcatcggcggcgccctcctcgccaagaccatggagcccgacgccgacgtcgtcctcctcgacccgaaggactacttggagatcacctgggctgaattgagatcaacggttgaaccatcttttgctgagagatcattaatatatcacagagattacctcaccactgctactatt

SEQ ID NO: 1430 - DNA, 420 bp, Triticum aestivum
  Clone ID: uC-tsfl5710077b04b1
tcgtaggcggacccgccgccggccgagggcctgcgcgtgcagaggtgggccggggcgaggtacgcggccgtgcgccggttcggcggcttcgtagccgacgccgacgtcggcaagcaggccgcgctgctcgaggccagcctgcaggggaccaggtgggccgcgcccgtgtccgacggccgcaaggccgacccggcgtccgagtacaccgtggcgcagtacaactcgccgttcgagttcagcggcagggtgaacgagatatggatgctcttcgacaccatggccgcgtccgacatgtaactgtgcaagctagccgcttgttagactaaaccagtgagctcgtatatataagagtgtcttgtcttttaagcttctatgtaagccgacgaataatggtagcgtataaacttgcgagcaataaag

SEQ ID NO: 1431 - DNA, 229 bp, Triticum aestivum
  Clone ID: uC-tsfl5710077b05b1
tcgatttgaaacagaaaaggccattgtcgtactcttgtacatatgcagcaccgctaatatattgtatggctgaatgtattagggagccatgctgacatgaaacctgttcttccaatcgatttcttgtgctgaatctagttgaaacatggaaaccgcacttcctagtttgtatttgcttctgaggtgcagtgatggagtaagcagatctgtatttatatgaatgaaaaca

SEQ ID NO: 1432 - DNA, 216 bp, Triticum aestivum
  Clone ID: uC-tsfl5710077c06b1
tcgtaaaaaaaaaaaaaaaaaaaaaaaaaaaaaaaaaaaaaaaaaaaaaaaaaaaaaaaaaaaaaaaaaaaaaaaaaaaaaaaaaaaaaaaaaaaaaaaaaaaaaaaaaaaaaaaaaaaaaaaaaaaaaaaaaaaaaaaaaaagggggggggcctttttaggggtccaagtttttcctcccgggcctggccctgtatttttttttttttggggccc

SEQ ID NO: 1433 - DNA, 425 bp, Triticum aestivum
  Clone ID: uC-tsfl5710077d12b1
tcgttctaccctagcagagaaaaaaaaagcagaggagaggaagcggaggcgacgatgtcggcgatgactgcggcggtgcccttctggcgcgcggcggggatgacctacatcggctactccaacgtctgcgcggcgttggtgcggagctgcctcaaggagcccttcaagaccgaggtctcctcccgcgagaaggtccacttctccctctccaagtggaccgacgagaagcagcagaagcccactgtgcgcacagatgatgaatgaagatcaggtgccatggtgatgttttgagaagttgttggtttatggtcaggggctcagggcttaagaacttgaaaataaattcttgtggtgacaatggatctattccgatactatgttgttatatttactaattgctccttttctacttgatgaaccatgtg

SEQ ID NO: 1434 - DNA, 228 bp, Triticum aestivum
  Clone ID: uC-tsfl5710077e12b1
tcgcggacgcgtgggcggacgcgtgggacaagctcgtaacgaagggcgcgatcttgctcgcgaaggtaatgaaattatccgagcagcttgcaaatggagtcctgaactagccgcagcttgtgaagtatggaaggcgatcaaattcgagttcgagccggtagatactattgataagtagataaaactaaagataaagaagagaaggtataaataaaaaagaaacgaaat

SEQ ID NO: 1435 - DNA, 422 bp, Triticum aestivum
  Clone ID: uC-tsfl5710077f01b1
tgtacagcccatatgaggtgaaggctaggctcaagttctgggcgcaggcggtggcgtgcaccgtcaagctgtgcagctgatcaaccgcaccgtcaatcaatccatcccacagactaaggaagacgaagccaactcatactcgcaaggcggcagcccaattcatcaggcgacctatgcgcacgagcgcacgccatctgcccgaatcgcgtgggaattacattacattgcatcaattcatcgccatcatcacgacaacaagcagaaggaagggtgcacgcatcatattgtggacttgggatcgcgcctctgatgacaggaagcgatgaagctagccaggaggatgtcgccggccatttctaatgctgcactcacacattatgatttatgaatcactgaatttccgttcagaagcaagcactatg

SEQ ID NO: 1436 - DNA, 345 bp, Triticum aestivum
  Clone ID: uC-tsfl5710077f07b1
ggcaaattacagtgtctgaactgaaatacatggaggagatccagaccatgcaagttgaaacaactgaaaagaatgaagcacttacaagcaagatgcaggagcatgcaaacttagtccatgaaaaagatcagttggagcaacaattgctggaagttaggaaggaactggaggctgcttaccgtaccatagctaaccaggaagagcaagcttcagtgagggagataaagtgggatgcgtttaagacgtattcagcggatcaactagaagctgcacaaaaacacgctgcagagctggaagtacaagtatcagctcttaatcagcagctgcaagaagctgagatccatt

SEQ ID NO: 1437 - DNA, 144 bp, Triticum aestivum
  Clone ID: uC-tsfl5710077f10b1
tttaaaatttatctgatatagaacactcatatcgataaaatggtttgaactatttactagaaaaaaaaagggggcaccctgcccttttttaaccaatgccgaatcgacgacctatgtataaaaaagagaaattttttggatttg

SEQ ID NO: 1438 - DNA, 142 bp, Triticum aestivum
  Clone ID: uC-tsfl5710077f11b1
ttctcggacgcgtgggcggacgcgtggggtgccattgcagttttgtcaactctgacattgctttgggttttccttctccatttgtctttcttgttcctaagaatatgtgtatgtccatgttcatgtaacaacatggctcgtg

SEQ ID NO: 1439 - DNA, 64 bp, Triticum aestivum
  Clone ID: uC-tsfl5710077g01b1
aaaaaaaaaaaaaaaaaaaaagaaaaaaaaaaaaaaaaaaaaaaaaaaaagaaaaaaaaaaagg

SEQ ID NO: 1440 - DNA, 148 bp, Triticum aestivum
  Clone ID: uC-tsfl5710077h04b1
tcggttccgcttaactttgtacgactattacatatctatctgaatttgtaactgtttttttttgtcggagggaatttgtaatcgttagtggcatgtattactaatgtactgtcaaactatactctcctttattttcatgttacagccc

SEQ ID NO: 1441 - DNA, 389 bp, Triticum aestivum
  Clone ID: uC-tsfl5710077h06b1
tcttggacgcgtgggcggacgcgtgggcaagagatgcagcccttcagtccagaaatacagagaaccaaacagggcgagctgttcccaacaattccgaagcttcgtctagttgtcacactgtgcagaagagatcaggaccactgaagctcactcccggcgcgaagcatatactggtgccaagtgatagcacgcatggcgactctatgcctgtgtactcctgtttatctttcggaagtaggagcggaaatgctgcagggtctcagaacaaaggagcatgatagactttgtgaaatgctgtttaaccttcagaagtaggagccttttgaaaaatgtttacatttttctatctgtaaaactggattgactatcctgtaagaatagttaccata

SEQ ID NO: 1442 - DNA, 344 bp, Triticum aestivum
  Clone ID: uC-tsfl5710077h10b1
ttgcggacgcgtgggtttgacttcaggcctgggatgatcagcatcaaccttgacttgaagaagggtggcaacaggttcatcaagacggctgcttatggccactttggccgtgaggatgctgacttcacctgggaggttgtgaagcccctcaagtttgacaaggcctctgcttgagaggtgggtatgaaggagtctaatcattcctgctgctgccgctggtggttgtatcttggataattgaattccttctctttagaaggaagcagggtttcaacatcgccgtggacacgctgaattggcgtctagtgattggtattttggtatggaatacaaaaatatgtgct

SEQ ID NO: 1443 - DNA, 100 bp, Triticum aestivum
  Clone ID: uC-tsfl5710077h12b1
tttcttttttattgttgcagcaatatccggtggatgtttgtcaaaaaaaaaaaaaaaaaaaaaaaaaaaaaaaaaaaaaaaaaaaaaaaaaaaacaaggg

SEQ ID NO: 1444 - DNA, 220 bp, Triticum aestivum
  Clone ID: uC-tsfl5710078b03b1
aggcagggtgggtgctcacctgccacgcctacctcaagtccgacatcgttatcgagacccacaaggaggaggagctcaccgcataagctgccatacctatctctctttgcaagaggatcgagctgatatcatattatctcctacagtatcatgcatgcatggacatcgccagatcgatacaccgattgttttgtgctcgaatgaattgctcgatgcatgg

SEQ ID NO: 1445 - DNA, 55 bp, Triticum aestivum
  Clone ID: uC-tsfl5710078d09b1
tcgatcgcccacgcgtccgcccacgcgtccggccgcgcgtcttcccacgcgtccg

SEQ ID NO: 1446 - DNA, 230 bp, Triticum aestivum
  Clone ID: uC-tsfl5710078d11b1
cgctcttcagtttagttgctaaactggtggtagtctttcagtagtcagtacttatgattacctataccaaattttcctgacccgtatgcttgcgttgttttattgagactttgagaggctaccgttgtttatggtgtactcaaaaaaaaaaaaaaaaaaaaaaaaaaaaaaaaataaaaaaaataaaaaaaaaaaaaaacaaaaaaaaaaaaaaaaaaaaaaaggggggg

SEQ ID NO: 1447 - DNA, 227 bp, Triticum aestivum
  Clone ID: uC-tsfl5710078e02b1
tgttgtgagagtatacgtgaataacgagcgtctgatctgatggagtcgagcaagggtgcgtgtgcgtgtgcgtgtggtttgcttgctcgctctcccatgctctgcccatggtgtccttgtgtgtatgtgtgtgtgcatgtgtccctgtaattgcttcatctatccccactatggatggagtgatgaatatgtaagaatgaaagatttacctaattaactactcctaa

SEQ ID NO: 1448 - DNA, 348 bp, Triticum aestivum
  Clone ID: uC-tsfl5710078e08b1
tttgttcgggacgatgttcttggaagcgcgcacgtggaagtctagtttggcgacgtggtgcatcagatccaggtggctgtggagtcttgccctgtgaactgcatccactgggttgggagcgaagagctcccggtgctggagttcatggcacgtccacagcccaaggaagggcacggcgtgttcggcggcgggtgggagaggcctaaggacgtgttcgcggcggccaggaacttctccaggaaactcgagaagcaggagcggcaggaaagttccaggggcgcaaacgggggtgaagatatggaggctgaaacggcagctcatgccgaagcgagacgccacgcggggcag

SEQ ID NO: 1449 - DNA, 179 bp, Triticum aestivum
  Clone ID: uC-tsfl5710078g09b1
tttcgttcgcccacgcgtccgttccattgtcttcttgttcttggtgaacttgatgttcttgtcgagcttgtggaggagcttgccgagcttggggaggagcttgtgaaacttgacgatgcacgtgagtttgatatattcgtgcttgaacttcatggctaagtgctctttgttgctcatga

SEQ ID NO: 1450 - DNA, 138 bp, Triticum aestivum
  Clone ID: uC-tsfl5710078g10b1
ttggtcgcccacgcgtccgaaaaaaaaaaaaaaaaaaaaaaaaaaaaaaaaaaaaaaaaaaaaaaaaaaaaaaaaaaaaaaaaaaaaaaaaaaaaaaaaaaaaaaaaaaaaaaaaaaaaaaaaaaaaaaaaggggcgg

SEQ ID NO: 1451 - DNA, 74 bp, Triticum aestivum
  Clone ID: uC-tsfl5710078g12b1
tgtgttcgcccacgcgtccgcccacgcgtccggccacgcgtccgcccacgcgtccgcccacgcgtccgaggttt

SEQ ID NO: 1452 - DNA, 128 bp, Triticum aestivum
  Clone ID: uC-tsfl5710078h11b1
tctgtcgcggacgcgtgggcggacgcgtgggggatgattgttttgttttgattttccatggcttggattttaattatgtttgatggtgtttttttaattcgtatatcatgttgtgttgccgttaaaaa

SEQ ID NO: 1453 - DNA, 54 bp, Triticum aestivum
  Clone ID: uC-tsfl5710079a03b1
tcgtcatgcgtacgcccacgcgtccgtccacgcggtgcgttatgcgttcggcga

SEQ ID NO: 1454 - DNA, 315 bp, Triticum aestivum
  Clone ID: uC-tsfl5710079c09b1
ttctgtccacgcgtacggggcagtccatagtcccatccagactgccgggaccactggactgtaccaatgtcagagcagcagattactggtactaccatcactccgcactccgcagagatcacggggtccagcgtgagcgctcggcgcagcatatcggcagccatggtcacggtggttctgaccctgctgctgctggtgctcctcccggtgcgccatgctgtcgccacggcggacggcgactcgcacccgggctacgcggacacggaggccgacacctgcggggcggctcccggtggctctgcccgttccggagga

SEQ ID NO: 1455 - DNA, 403 bp, Triticum aestivum
  Clone ID: uC-tsfl5710079d01b1
tttttacgcgtccgcccacgcgtccgctcgcaatgcaagtggtggcatgcccacaggttgaatatgtctcaatggaggacataccagagagtgttgtcagcaaggagaaggagattgagatgcagagggaggacctgcagtcgaaacccgaaaacatcagggagaagatcgtggaagggcggatatcaaagaggcttggagtgatagccctcctggagcagcccttcatcaaggatgacagcaagacggtgaaggatctcgttaaggagacgatcgccggcctgggggagaacatcaaggtacggaggtttgtcaggtataccctcggcgagaactgataaatgagacagtgacctccgttacaatccatggcatcaggagtcgggcacattttgattcatcg

SEQ ID NO: 1456 - DNA, 151 bp, Triticum aestivum
  Clone ID: uC-tsfl5710079d04b1
tgtttggctcagaagttattgactgcctgtcgtttccttgaacagtccttgggaactgtatgcatctggatctgttggactgcttgtatttggaagttttcctcaagtttcagtactgatgaattttactgtcttgatacaatttggcaag

SEQ ID NO: 1457 - DNA, 227 bp, Triticum aestivum
  Clone ID: uC-tsfl5710079d06b1
tgtttacgcgtgggttttttttaagcaagtaactgcaggtagatgaagccttcgactgttcttcagaaacagagcaactactctctcaaaaagaaaagaaaaaactcaaaagatatactggcatacagcttgctcgtacatgcatctatgtttgtttcgcttacataacaatttctagtgcctcgcttcaaacttcgaacttcaagagagtgaaagaagagagagac

SEQ ID NO: 1458 - DNA, 246 bp, Triticum aestivum
  Clone ID: uC-tsfl5710079d08b1
taaaaaaaaaaaaaaaaaaaaaaaaaaaaaaaaaaaaaaaaaaaaaaaaaaaaaaaaaaaaaaaaaaaaaaaaaaaaaaaaaaaaaaaaaaaaaaaaaaaaaaaaaaaaaaaaaaaggggggggcctttttgggggtcccaagtttacttccccgggcttgcaacgtaatactttttttttggggccccctaaattaaatccacgggccggggttttaaaacggcgggacggggaaaacccggggg

SEQ ID NO: 1459 - DNA, 164 bp, Triticum aestivum
  Clone ID: uC-tsfl5710079d10b1
tactggttgaatttgggtcttgctggggttgtaatttgatcaggagaggaaatacctgcaaaaaaaaaaaaaaaaaaaaaaaaaaaaaaaaaaaaaaaaaaaaaaaaaaaaaaaaaaaaaaaaaaaaaaaaaaaaaaaaaaaaaaaaaaaaaaaaaaaagaaaa

SEQ ID NO: 1460 - DNA, 383 bp, Triticum aestivum
  Clone ID: uC-tsfl5710079e09b1
ttcttgtccacgcgtccgcccacgcgttcgggatgagatggtgttgctgcttaggctggtgctggcgtgactctgagtagtacgacctcatcgtgtgcgcggctaaggagtaccactactacttattacgtataaaactataaattataacctgcatatatagagagagtttgttgttcgtaccatctatgaacttcattgcgaaccaagtttctctgggcctggaacagcattcgacatgcttttcctcgtctgaatgatcgactaaataaagcggcaagtttgtaacccctgcttctacttcaggcttggagaataactcagcatggttttacagtttggattgtcgacaagataaaccgacttgtactcatgtgcgcatg

SEQ ID NO: 1461 - DNA, 235 bp, Triticum aestivum
  Clone ID: uC-tsfl5710079e11b1
tttctgcaggttgcgaggaatccggcaaggcctaaagtgcaagttgaagtaaccgatatacatgtcatgttagtcacatttgtcggcggctctgctttctcagttttacttctcgttctactcatatatatgtgaatatatgagcatatgtatgtaagcacctaccaatgtaggtcgaggaggatgcatatgagaattatagcaccggctatacatatacatatatattatatgc

SEQ ID NO: 1462 - DNA, 89 bp, Triticum aestivum
  Clone ID: uC-tsfl5710079g02b1
tttgttatatgcctttttttttcaaaacgaactgccatatgccctcctttgtaagcctgtgcacgtactatttcaatagactggaatac

SEQ ID NO: 1463 - DNA, 416 bp, Triticum aestivum
  Clone ID: uC-tsfl5710079g05b1
tctgttgaagtacctcggtggctccggcgaccccgcctaccccggcgggcccatcttcaacccgctcgggttcggcaccaagagcgagaaggagatgaaggagctcaagctcaaggagatcaagaacggccgcctcgccatgctcgccttcctcggcatgtccctgcaggccatcttcaccggcgtcgggcccttccagaacctcctcgaccacctctccgaccccgtcaacaacaacatcctcaccagcctcaagttccactaggcgaaatcgatccgatccgatccgagcatcgtcgtcctgtgcatggtacccgtcgtcgtgggaaacgtgagcgtgcgagaggtatacatgcgagggtgggtgtaaaatgtaaatttgtacgcgtgctgcgtgcatgcttgtaatatttata

SEQ ID NO: 1464 - DNA, 381 bp, Triticum aestivum
  Clone ID: uC-tsfl5710079g07b1
ttttctttccacgcgtccgccggggtgaaggagcagctgcagaagctgtgcagcatctacgcgctccacctgcttcacaagcacctgggcgacttcctgtcgacggggtgcgtcacagccaggcagggcgtgctggccaatgagctgctcggcaagctgtatgcgcaggtgcggcctaatgcggtggcgctggtggacgcgtttgactacacggaccactacctggggtcggtgctggggcggtacgacggggacgtgtacccggcgctgtacgaggaggcgtggaaggacccgctgaacgagacggtggttcccgacgggtaccaggagcacctccggccgctgctcaagcagcagctcaggctgtccagactatgatac

SEQ ID NO: 1465 - DNA, 70 bp, Triticum aestivum
  Clone ID: uC-tsfl5710079h03b1
tggacgcgtgggcggacgcgtgggaaaaaggaggaattataaaaaaaaacaccgagtgcagccagactag

SEQ ID NO: 1466 - DNA, 90 bp, Triticum aestivum
  Clone ID: uC-tsfl5710081b02b1
catacttctatgttctgagactgtttgcattgtatgctgattgttctgcactctgttctgcactctgtttgcattgtatgctgattgttc

SEQ ID NO: 1467 - DNA, 67 bp, Triticum aestivum
  Clone ID: uC-tsfl5710081b04b1
ttgtaacaccgcggcaggaaaagaagaaaataaatagaggaatctttagggtacgagacgtatcctt

SEQ ID NO: 1468 - DNA, 97 bp, Triticum aestivum
  Clone ID: uC-tsfl5710081c07b1
cgcgagaaagcatgctcgtatgtgaatgcaattggtggctatgtatatgcacatgcacataatatatttatacaatctgtcgactatgtattcgggt

SEQ ID NO: 1469 - DNA, 224 bp, Triticum aestivum
  Clone ID: uC-tsfl5710081d07b1
cccccccgtccttcccccccctttccttttttttggggccccctatttcttttccccggccccccttttccccccctcggacctggaaaccccctgggttccccccccttttcccccttgcacccctcccccttttccccagttgggtttttcccaaaaggcccccccccttccccccttcccaccttttcccccccctttttgccatttggcccccccccttt

SEQ ID NO: 1470 - DNA, 96 bp, Triticum aestivum
  Clone ID: uC-tsfl5710081e09b1
tcacgcgtccgcccacgcgtccgcccacgcgtccgcccacgcgtccgcccacgcgtccgcccacgcgtccgcccacgcgtccgcccacgcgtccgc

SEQ ID NO: 1471 - DNA, 413 bp, Triticum aestivum
  Clone ID: uC-tsfl5710081e12b1
tctactcgtccggccacgcgtccgaaaaaatctctctcggctccccgctccgagtcgcgtcgcgtgaggagaaaggaagggaagccggaaagggttctcgccgacgcggaaggaggagatggccgggaagggaggcaagggcctgctcgcggccaagacgacggccgccaagaccgccgagaaggacaaggggaagaaggcccctatctcccgctcgtcccgcgcggggctccagttccctgtgggccgtatccatcgtcagctgaagcaaaggactcaggccaatggccgtgttggtgctactgcggcggtctactctgctgctatcctggagtacctgacagctgaggtcctggagctggctggcaacgccagcaaggatctcaaggtgaagcgtatcacccctcgtcacc

SEQ ID NO: 1472 - DNA, 168 bp, Triticum aestivum
  Clone ID: uC-tsfl5710081f07b1
tgctcggatgccgggatggcccgatgtgaattcgccataagctatagaaccctttttcttttaccattttctgacgaggaattgtactacccgtgtgatgcataatttgatcgtcctgtgatcaaaagacatcatatataagtttaataatattttcatgaacagttt

SEQ ID NO: 1473 - DNA, 71 bp, Triticum aestivum
  Clone ID: uC-tsfl5710081h11b1
aaatccataaaaaaaaaaaaaaaaaaaaaaaaaaaaaaaaatttaaaaaaaaaaaaacaaaaaaaccaaag

SEQ ID NO: 1474 - DNA, 216 bp, Triticum aestivum
  Clone ID: uC-tsfl5710091b09b1
tgtttggccaacccttcaacagacagtagagtgaagctatggttccttgctagaccaggctggatgtactgtggtggtgcaaatgtagaaatgggatgatttttgtgcatagagttgatgacgatggttgtatcagttgtaaaatctaacggtctggaatttgagtagtcgttcacaacaaaagtaagtaccaacatacatattttcctgacacag

SEQ ID NO: 1475 - DNA, 326 bp, Triticum aestivum
  Clone ID: uC-tsfl5710091c05b1
aaaatatataaaaaaaaaaaaaaaaaaaaaaaaaaaaaaaaaataaaaaaaaaaaaaaaaaaaaaaaccaaaaaaccaaaaaaaaaaaaaaaaaaaaaaaaaaaaaaaaaaaaaaaaaagggccgcccgcccaaggggacccaagctaacacccccggccagccaacgaaaaagctcttcaatggggcccccaaaatcaaatccccggcccgcggtttaacacccccgggacgggaaaaccccgggcgtacccaaactaaaacccctggcaaaaaacccccctttccccagcgggcaaaaaaccaaaaagcccccccccaaccccc

SEQ ID NO: 1476 - DNA, 460 bp, Triticum aestivum
  Clone ID: uC-tsfl5710091d04b1
ccatttctcaagccaatcaagctctctgctccttcccagctacatttccagcaagcaagccgaagcactagatcctcgatggctcgcgtggcactgctcgccgtgttcaccgtgctcgccgcactggcagtggcggagatggcgtctggggcggtgacctgcagcgacgtgacgtccgccatcgcgccgtgcatgtcctacgcaacggggcaagcgtcgtcaccctcggcggggtgctgcagcggggtgaggaccctgaacggcaaggcgtccacctcggccgaccggcaggcggcgtgccgctgcctcaagaacctggcggggtcgttcaatggcatcagcatgggtaacgccgccaacatccccggcaagtgcggcgtcttcgtctttttccccatcaacaacagcgtcaactgcaacaacctttattaagttatctacgagcatcatcatcacacca

SEQ ID NO: 1477 - DNA, 203 bp, Triticum aestivum
  Clone ID: uC-tsfl5710091d12b1
cctactcgtccgctgatggagtcgagcaagggtgcgtgtgcatgtgcgtgtggtttacttcgctcgctctccgcctatgctctgcccttggtgtccttgtgtgtatgtgtgtgcatgtgtccctgtaattgcttcatctatctccactatggatggagtgatgaatatgtaagaatgaatgatttacctaattaactactcct

SEQ ID NO: 1478 - DNA, 320 bp, Triticum aestivum
  Clone ID: uC-tsfl5710091e02b1
ccctctcgtccgtatattagcaagtggtggtttggatcattgcgaatgggtggcgttactggagaccaccacccctgcgtcacactggacgacgatggattgcaagctctccaaagctcggtccatgaagggctcgatcggctctcggagattacgccaggcatcggtctgtgtcgagttctgcagggccgatgaatccgccgccgctccaaagacgggagcaggggccggtctcgagtatctacacccacccaggaatgatccaaactccagccggaagaaacagatgtacaagtatgctttgccctttgattattctc

SEQ ID NO: 1479 - DNA, 152 bp, Triticum aestivum
  Clone ID: uC-tsfl5710091f03b1
cccactcgtccgcccacgcgtccggttctgttttcaaaaaaaaataaaaaaaaaaaaaaaaaaaaaaaaaaaaaaaaaaaaaaaaaaaaaaaaaaaaaaaaaaaaaaaaaaaaaaaaaaaaaaaaaaaaaaaaaaaaaaaaaaagggggggg

SEQ ID NO: 1480 - DNA, 246 bp, Triticum aestivum
  Clone ID: uC-tsfl5710091g02b1
cccactcgtccgtatattagcaagtggtggtttggatcattgcgaatgggtggcgttactggagaccaccacccctgcgtcacactggacgacgatggattgcaagctctccaaagctcggtccatgaagggctcgatcggctctcggagattacgccaggcatcggtctgtgtcgagttctgcagggccgatgaatccgccgccgctccaaagacgggagcaggggccggtctcgagtatctaca

SEQ ID NO: 1481 - DNA, 474 bp, Triticum aestivum
  Clone ID: uC-tsfl5710091g10b1
tcatcacacaagccaatcaagctctctgctccttcccagctacatttccagcaagcaagccgaagcactagatcctcgatggctcgcgtggcactgctcgccgtgttcaccgtgctcgccgcactggcagtggcggagatggcgtctggggcggtgacctgcagcgacgtgacgtccgccatcgcgccgtgcatgtcctacgcaacggggcaagcgtcgtcaccctcggcggggtgctgcagcggggtgaggaccctgaacggcaaggcgtccacctcggccgaccggcaggcggcgtgccgctgcctcaagaacctggcggggtcgttcaatggcatcagcatgggtaacgccgccaacatccccggcaagtgcggcgtctccgtctctttccccatcaacaacagcgtcaactgcaacaaccttcattaagttatctacgagcatcatcatcacaccaggctagctagccca

SEQ ID NO: 1482 - DNA, 107 bp, Triticum aestivum
  Clone ID: uC-tsfl5710092a01b1
cccactcgtccgcccacgcgtccgcccacgcgtccgcccacgcgtccgaaaaaaaaaaaaaaaaaaaaaaaaaaaaaaaaaaaaaaaaaaaaaaaaagggggggccg

SEQ ID NO: 1483 - DNA, 376 bp, Triticum aestivum
  Clone ID: uC-tsfl5710092a10b1
tacataacacacacaatcatttggaacggaccaatgggtgtttttgaatttgacacgtttgcattaggaactgagtctattgcaaagaagttggccgagcttagcaaaaagggtgtgacaactatcattggaggcggagactccgttgcggctgttgagaaggtgggagtggctgatgttatgagccacatctcaactggtggtggcgccagcttggagttgttggaaggaaaggagcttcctggagtcgttgcacttgatgaaggtgtcatgacgaggtcggtgaccgtatgaggctaagcttcatttgttgcatcttaattcctttcatgtaccgttccaaacctgccatgttgtcctccctttttgctcgtct

SEQ ID NO: 1484 - DNA, 422 bp, Triticum aestivum
  Clone ID: uC-tsfl5710092b01b1
ccttcttgtccgcaaaaggctttcagttgaaactactcctaatcaggaccctcttgtgaccaaagggtcaaacctgcatcctttgttgggaattgatgtctgggagcatgcgtactacctgcagtacaagaacgtgaggccggactacctgaccaacatctggaaggtggtgaactggaaatatgccggagaagagtatgagaaagtgcttgcatgatttgtccgagtagacagacagtacttcgctcgctcttgagttccccgctgttggatctttgtatatgcagtaataaaagtgggcactattccactgtcgggaccttctgtacatcgcatagaggcggggtaatgtccaacgcatagaacagtgcctgtccattttggtactttttactgtgcctgcgtgactaataaactcattc

SEQ ID NO: 1485 - DNA, 429 bp, Triticum aestivum
  Clone ID: uC-tsfl5710092b02b1
ccctcgtgtccgcaaaaggctttcagttgaaactactcctaatcaggaccctcttgtgaccaaagggtcaaacctgcatcctttgttgggaattgatgtctgggagcatgcgtactacctgcagtacaagaacgtgaggccggactacctgaccaacatctggaaggtggtgaactggaaatatgccggagaagagtatgagaaagtgcttgcatgatttgtccgagtagacagacagtacttcgctcgctcttgagttccccgctgttggatctttgtatatgcagtaataaaagtgggcactattccactgtcgggaccttctgtacatcgcatagaggcggggtaatgtccaacgcatagaacagtgcctgtccattttggtactttttactgtgcctgcgtgactaataaactcattcgctagtg

SEQ ID NO: 1486 - DNA, 394 bp, Triticum aestivum
  Clone ID: uC-tsfl5710092b07b1
ttctcgcgtccgcccacgcgtccgggatgcagatgctaacaaatttctgtaaagctcttctatatatggatttgattggcaggagcagaaaaaaggaaagaaatcttgaatagggttttgagatttttttttttaacttagagaagcctagtattaaaccagtggcatcttccttctgttaacttgcttttgtttcagagttagaaaaatgggttttcctgttttgttagtttcgatggcaaaaaaatctgaagttttggtccgtgtaaatttctgtatctattcaccgcagtgacatttaatcgctcatgtagagttttgctaattgtagtggcagcgctgttttctcaaaaaaaaaaaaaaacaaaataataaccttaaaaacaaataattg

SEQ ID NO: 1487 - DNA, 480 bp, Triticum aestivum
  Clone ID: uC-tsfl5710092b08b1
tgcctacgcgtccggtgaagctggtgccgttcaacccggcgttcgaggacgcgtcggtgctgtggacggagagcaaggacgtgggcaagggtttccgctgcatccgcatggtcaacaacacccgcctcaacttcgacgccctcaacggcgacaaggaccacggcggcgtgcacgacggcaccaccgtcgtgctctgggagtggtgcaagggggacaaccagtgctggaagatctggccgtgggccgaggcgcacgccgccgtcgagtccggcgccaccatgggcaacaacgcccacgccatgggcggcgggccccccgtgcacgccgtgcgcatcttctgcaaggccggcgaggactacagcctcaccgcccgcaacggcaccgtctgcctcgcccccaccaaccccagggacgactaccagcactggatcaaggacatgaggcacagcaacaagatcagggacgaggaagggtaccctg

SEQ ID NO: 1488 - DNA, 366 bp, Triticum aestivum
  Clone ID: uC-tsfl5710092c04b1
ttgcgcccggttgagtagaacgcggcgaagttcaccggggaacccgccgaccttaaggagcccaccggcaacatgttccagcaggccggcgggcaggtgatgggtgccgctacgggcgccagggacgccgtcatgaacacgctcgggatgggaggagacaaagccgacgtcggcagcgccaaatgaagaccgcaaagcgcacaggagggctagcccacttttcgtttcgttattccctccgtattcctttatttgcgttccaagaaactgatctttacgcatgcgtgggtgtaactttgtccggtgtatgcaaagatgctttgaatctacagacttgctaattctcatctgatgatatttatcttc

SEQ ID NO: 1489 - DNA, 51 bp, Triticum aestivum
  Clone ID: uC-tsfl5710092d12b1
aaatataaacccaaaaaaaaaaaaaaaaaaaaaagggcaaaataaaaaaaa

SEQ ID NO: 1490 - DNA, 132 bp, Triticum aestivum
  Clone ID: uC-tsfl5710092e03b1
ccctcttgtccgaaaaaaaaaaaaaaaaaaaaaaaaaaatatttttaaaaaaaaaaatctaatttcttacaaaaaaacaaaaaaaaaaaaaaaaaacgggggcggcccctctgggggccccgggcctccccc

SEQ ID NO: 1491 - DNA, 279 bp, Triticum aestivum
  Clone ID: uC-tsfl5710092e04b1
cccatcgtccggcaactataccaatctgcaacccagataaatatagatgctattgttgtgttcaaaattggcaatgctacaaaacaatggatgagtgcagagccaagtgtgcatatttacctccctcctcttcctctgtacttccatgaaaccgggttcttatcatgagctagaagaaaaatgaataagatccagacaataaacaatttgctatgaaaaaaaaaaaaaaaaaaaaaaaaaaaaaaaaaaaaaaaaaaaaaaaaaaaaaaaaaaataaaa

SEQ ID NO: 1492 - DNA, 200 bp, Triticum aestivum
  Clone ID: uC-tsfl5710092e10b1
tagataccacatggagcttctgctactacacaatcagccgcattcttcggagccaggtgcttgtaattccttgtacttgaaagcacgggctctttacgaggttctttactcaaaagtggatgtgtgaattgccacgacttatgtgcaccaaaattttgggatgcgtagcttctttgaagtttgaagcaggcgttctttcc

SEQ ID NO: 1493 - DNA, 90 bp, Triticum aestivum
  Clone ID: uC-tsfl5710092f12b1
tgctagaccggccgtcttcagttggatgttacaattaatgtattagcaaataagctttcttccttttccatctaaaaaaaggctttctcg

SEQ ID NO: 1494 - DNA, 401 bp, Triticum aestivum
  unsure (1)..(401): unsure at all n locations
  Clone ID: uC-tsfl5710103a03b1
ctttgatgcactccatggcgacaaggaccatggcggtgtgcgcgatggaaccaccctcattctgtgggagtggactgagggcgacaaccagcgctggaagatcgttgcctggtgaatgatgcacatgctacagtttgttggttcaaacagcgcgcgatcttaataataagcaagtactgtatgtttctggaataaaaaggatggcgccaatgtgagcggtatgtctgttttgtttggggagttatgtatatggatgaacttgtaatgatggatttatttggcctagattatgtgtgatggatgcatgaacaaaccagtgcttattattatgcatgcatatacatgccgtgtgacatgtttgtgaactacactgtataatagaattggtttatcccatcnna

SEQ ID NO: 1495 - DNA, 337 bp, Triticum aestivum
  Clone ID: uC-tsfl5710103a07b1
cccacgcgtccgcaagcagataccgagacccagtccgcctgctgcgccgccgccacctccgcgatgagggccaagtggaagaagaagaggatgaggaggctcaagaggaagcgccgaaagatgaggcagcgatccaagtaggcgaacaatgaggagaaagcttaaccttgtgtcactacaccagtctgttgggatgacagggtcttttggttcctgatatgtctgggttgttctgatattttggggatgcccacccttgtaacatgaggataattatatgctttccttgaaggctggatattcggcttaagaagtattatcgtctatttttgattaa

SEQ ID NO: 1496 - DNA, 143 bp, Triticum aestivum
  Clone ID: uC-tsfl5710103b03b1
cggacgcgtgggtttccgaccagagcatatttctcgttccatatgatctgtgtttgtacgaacataggttgtggagcatgcatatgtaaattctagcgaaaaatctatactgaagtcgagaggggctcggggctccgctgctt

SEQ ID NO: 1497 - DNA, 143 bp, Triticum aestivum
  Clone ID: uC-tsfl5710103b04b1
tctgtcgcgtgggtttccgaccagagcatatttctcgttccatatgatctgtgtttgtacgaacataggttgtggagcatgcatatgtaaattctagcgaaaaatctatactgaagtcgagaggggctcggggctccgctgct

SEQ ID NO: 1498 - DNA, 197 bp, Triticum aestivum
  Clone ID: uC-tsfl5710103b05b1
cggacgcgtgggcagatgtttaagaaattcttttatctcgattcgttttgaaaaaaaaaaaaaaaaaaaaaaaaaaaaaaaaaaaaaaaaaaaaaaaaaaaaaaaaaaaaaaaaaaaaataaaaataaaaaaaaaaaaaaaaaaaaaaaaaaaaaaaaaaaacgaaaaaaaaaaaaaaggggggggcccttttaggg

SEQ ID NO: 1499 - DNA, 109 bp, Triticum aestivum
  Clone ID: uC-tsfl5710103c01b1
gtctggtcctatgtatcgtcatgctcgaatgaaattgcaacggaaaagttcagtcatcgatctgatgctcgaatgaatttaattttgcttgtaaatcgctccgtgattc

SEQ ID NO: 1500 - DNA, 371 bp, Triticum aestivum
  Clone ID: uC-tsfl5710103d11b1
cgctctatcgtgtacgagtgcctcatcaacccgctgatgcgcggcctgccgaccaaccagacggtggtggacgaaagcctggagaagctgaagaaggtgctggaggtctacgaggcgcgcctgtcccagcacgagtacctcgccggggacttcgtcagcttcgccgacctcaaccacttcccctacaccttctacttcatggccacgcctcacgcggcgctcttcgactcgtacccgcacgtcaaggcttggtgggagaggctcatggcgaggccggccgtcaagaagctcgccgcacaaatggttcccaagaagccgtgatttgctaggcgggatttcgcatcgtgggatccgattccgatcactgatct

SEQ ID NO: 1501 - DNA, 292 bp, Triticum aestivum
  Clone ID: uC-tsfl5710103e07b1
tctatttttccggttgaagcgtgccaacgaaatcataggcaccactactgaagaaatggtgatgcgagcacaacagagccctgcttcttaactgtcacctcaaatgaaatgtttttctctgtctaaaagcacaagccagaactgagaaggcatctgctcatcctcaaggaacacgttgctttcaatgtaccatctgtacgcaatatcttagattctattttccgacatcggcgagttctattgagtgtaactaagggtgccttgtttaggtccaaaatctggacatgttact

SEQ ID NO: 1502 - DNA, 193 bp, Triticum aestivum
  Clone ID: uC-tsfl5710103f01b1
tctgtggttccgtcggggcactgtctgtacaaaatcttcacggtttgtagaaccgctccgcatgttttttcgcttgaactgagtccatttgatctgttgggtctgtacaatccctgtacctgagtccattcggagaactacgttattataaggataatgaatcacacaaaggatttttctttgtgctgctttc

SEQ ID NO: 1503 - DNA, 51 bp, Triticum aestivum
  Clone ID: uC-tsfl5710103f05b1
taaaaaaaaaaaaaaaaaaaaaaaaaaaaaaatagggcaggaccgcatcta

SEQ ID NO: 1504 - DNA, 288 bp, Triticum aestivum
  Clone ID: uC-tsfl5710103g11b1
gtgttactactgcttcctcatccaatccggcttgtgcattcccgagtgcgcaaacctctgcagggtcaactgcgagtgatcgaccatgcaggaacgcatcgacatgcatggattcgagggtgtcgatgagcgtgcctgcgttgccattgttatattagctgctctatgtacaataagtcgatgccggtcaggctgcatgcatgtattgcgtgcgagtgcctcgacttagcatttgataccgtgtttaatttgctactattcccttcactcaacatattacatattacc

SEQ ID NO: 1505 - DNA, 127 bp, Triticum aestivum
  Clone ID: uC-tsfl5710104b05b1
tttaactagccgcagcttgtgaagtatggaaggcgatcaaattcgagttcgagccggtagatactattgataagtagataaaactaaagataaagaagagaaggtataaataaaaaagaaacgaaat

SEQ ID NO: 1506 - DNA, 84 bp, Triticum aestivum
  Clone ID: uC-tsfl5710104c09b1
cttgtaaaaaaaaaaaaaaaaaaaaaaaaaaggggaaaataaaaaaaaaaatcaagaagaaccaaaaaaagggccgcgggcctg

SEQ ID NO: 1507 - DNA, 62 bp, Triticum aestivum
  Clone ID: uC-tsfl5710104c12b1
cctggtacgcacgctatatgtatatgttgtcaactataagaaaattggacgctcttgatgat

SEQ ID NO: 1508 - DNA, 343 bp, Triticum aestivum
  Clone ID: uC-tsfl5710104d01b1
ttgttgattggtcctgatgggaagacactgagcagcaatattgcagacataatcaatgagcactagtgtaggaagatcactaagctcaaagtaactgacaagcttctgacacatcttgtcgccatggggaatggcgagccaaggcatgcttgaaaaactgttattgaatgattcctcatcactgtccaaggatacagctacaacttcaaacttctcccccactagtgctgattggtcctgatgggaagacactgagcagcaatattgcagacataatcaatgagcatggtttggatgcatgggaggggttccccttcaatgcagagaagctggaaattctagc

SEQ ID NO: 1509 - DNA, 178 bp, Triticum aestivum
  Clone ID: uC-tsfl5710104d02b1
tccacgcgtccgtctgatgtggtggtactgaataatgaactgtaaagtgaaaaacaccagttgaaactgtaaaaaaaaaaaaaaaaaattaaaaaaaaaaaaaaaaaaaaaataaaaaaaaaataaaaataaaaaaaaaaaaaaaaaaaaaaaaaaaaaaaaaaaaaaaaaataaaaa

SEQ ID NO: 1510 - DNA, 153 bp, Triticum aestivum
  Clone ID: uC-tsfl5710104d09b1
gctgagcgcatataatttgttaaaaaaaaaaaagaaaaaaaaaaaaaaaaaaaaaaaaaaaaaaaaaaaaaaaaaaaaaaaaaaaaaaaaaaacaaaaaagaaaaaaaaaaaaaaaaaaaaacaaaaaaaaaaaaaaaggggggggcccttta

SEQ ID NO: 1511 - DNA, 416 bp, Triticum aestivum
  Clone ID: uC-tsfl5710104e02b1
ttttacgcgtgggcggacgcgtgggcggctacagaaatttcccccaaatcttcctcccctcctcctcgtcgtcttcttcttcttcttgcccggggaccttccagaagcttctcgaaccgaccgacaggccgtgccgcgggcgggtgggcgagatccggttgcggcggccatggtgaaggagaccgcctactacgaaaccctgggggtcagcgtcgacgcctccccctccgacatcaagaaggcctactacgtccaggccaggctggtgcacccggacaagaatcccggcaaccccgacgcggcgcgcaaattccaggatctcggagaggcctaccaagtcctaagcgatccagcgaagaaggaggcttatgataagcatggaaaggagggtctttcccaggataacatggttgatc

SEQ ID NO: 1512 - DNA, 410 bp, Triticum aestivum
  Clone ID: uC-tsfl5710104e06b1
tttcacgcgtccgcccacgcgtccgcccacgcgtccggtggagctcatcctcatcggctgggccgagggccgccggtgggcagacatcatcaagcccggctgcgtcaacaccgaccccatctttcccaacaacaagctcaccggcaccgacgtcgggtaccccggtggtctgtggtttgacccgctcggctacggcaccggctcgcccgagaagctcaaggagctccgcaccaaggagatcaagaatggccgcctcgccatgctcgccgtcatgggcgcgtggtttcaggccgagtacaccggcaccggccccatcgacaatctcttcgctcacctcgccgaccccggccacgccaccatcttccgggccttcgcccccaagtaaggaacacgttgggagttagcaacta

SEQ ID NO: 1513 - DNA, 105 bp, Triticum aestivum
  Clone ID: uC-tsfl5710104e08b1
cctcgttccagccaataatgtaatggtctatgggcaaataaatcatggtttaaatcaggctctttattactcttttgattgatttaaggtattcacatatataat

SEQ ID NO: 1514 - DNA, 413 bp, Triticum aestivum
  Clone ID: uC-tsfl5710104e12b1
ttttccacgcgtccgcccacgcgtccgcccacgcgtccgcccacgcgtccgcggacgcgtgggcgcggagatgcacgccatcctgcacgaggaccccacgctggcgccctcgctgctccggatgcactaccacgactgcttcgtccagggctgcgacggctccatcctgctcaggtcccgtcggggcacggcggagcgggacgccacccctaaccggagcatgcgcggctacgacgccatcgagcggatcaaggccaggctcgagacgctctgcccgctcaccgtctcctgcgccgacatcatcgccatagccgccagggacgccgtctacctgagcaaggggccgtggtacggcgtggagaccgggcggcgggacggcaacgtgacggtggccgagtacgctgagaacgacc

SEQ ID NO: 1515 - DNA, 89 bp, Triticum aestivum
  Clone ID: uC-tsfl5710104f02b1
tttagaccggccgtcttcagttggatgttacaattaatgtattagcaaataagctttcttccttttccatctaaaaaaaggctttctcg

SEQ ID NO: 1516 - DNA, 107 bp, Triticum aestivum
  Clone ID: uC-tsfl5710104f04b1
ctgacgcgtgggcggacgcgtgggcggacgcgtgggcggacgcgtgggcggacgcgtgggcggacgcgtgggatcaaagttaagttataatggatgtccggttgtct

SEQ ID NO: 1517 - DNA, 124 bp, Triticum aestivum
  Clone ID: uC-tsfl5710104f05b1
tataatatgtgtatgtccatgttcatgtaccaacatggctcgagaaagcatgctcgtatgagaatgctatcggtggctatgtatatgaacggacgcataatattatacaatatgtcgacttttt

SEQ ID NO: 1518 - DNA, 62 bp, Triticum aestivum
  Clone ID: uC-tsfl5710104f08b1
tctgtaaaaaaaaaaaaaaaaaaaaaaaaaaaaaaaaaaaaaaaaaaaaaaaaaaaaaatat

SEQ ID NO: 1519 - DNA, 388 bp, Triticum aestivum
  Clone ID: uC-tsfl5710104f10b1
tttttccgcgacttccacgccgcgcaccccgccgacgccttctccacctccttcggcggcggcgccgccctcgcctgcgtcgccgcgcagccccgctccctcgccgccggcgggtaccagcggtaattaacgatcggcacggcctctcatgaccctcccgaatcgcccccggcaaccgtgtccggacgactaaggatttctgtgcgcgcatgcatgcaggatgttctgcgggctggacgacatctactgcgtgttcatgggcacgctggacaacctgagcagtctgatgcggcagtacggcctcaccggccgctccaccaacgaggcgctgctggtgatcgaggcctaccgcacgctgcgcgaccggggcccctacccggcggaccag

SEQ ID NO: 1520 - DNA, 111 bp, Triticum aestivum
  Clone ID: uC-tsfl5710104g03b1
tttcacgcgtccgaaaacttcagtagcggcttgtacgtatggaaatgtaattcttgatgtgaatgatggcagagaatccaaaattggctctaatacgtcaattatttgttg

SEQ ID NO: 1521 - DNA, 438 bp, Triticum aestivum
  Clone ID: uC-tsfl5710104g05b1
ttaagacgaagctgacaatggcagatgtgatctcccggatgtcatgggatctgttgcggctggtgatatagaagggaatacttctgagcattcttcagaaagaaacattattgaagatgaggaggccaagggtgatatttctctcatggtatgtgatttgaacaatgatgttgctgagcagtcttcacccgtggtatgtgatttgaacaatgatgttgctgagcattctcccgcaacaattgctgtcgaatctgaggacgcgaaacatgaagatacttctgtggatctcaaggtagaagatgatatcgaagttggcatggaggaaacttgcgccgctgcggataagatcagtgatggtatgcggcatatttcacccgagtccaaagagggaaacattgacagctgtgctatcagtgacagcgctgttccccatgagcc

SEQ ID NO: 1522 - DNA, 159 bp, Triticum aestivum
  Clone ID: uC-tsfl5710104g08b1
tgctcacgcgtccgcccacgcgtccgggatgttagattagattagctttcttgactcgttgactttcttgacttgttgttgttttcccctgtgccatgtgtataccgttgtgctgactcatagattgtgtgtatcaaggataaaataccttttacagtg

SEQ ID NO: 1523 - DNA, 398 bp, Triticum aestivum
  Clone ID: uC-tsfl5710104h03b1
tggcgctcgggttcagctgggcgcacctcatcggcgacgtggccacggcgacgacctgcttcaatcactgggcaaagatactgggcggcaagacgccagacgccgtcaccgtgaaccccaggaacgagccgcaagaccgcgcgcctgccgacgccgccgtgccgcgctccgtgaagtcggtcgggcccatcgaggactactggtttgtccccgccggcgtcgacatggcgggctactccttccacgtcaccgagccgatgctcacgaggctgcagcagcaggagccagcggctgccggcggcgccttcgagctcatctcggcgctcctgtggcagacggtggcgaagatcagggccgccaaggaggtgaagacggtgacggtggtgaggaacgacatg

SEQ ID NO: 1524 - DNA, 111 bp, Triticum aestivum
  Clone ID: uC-tsfl5710105a02b1
aatttatatacaccaaaaaaaaaaaaaaaaaaaaaagggaaaaaataaaaaaaagaggcaaaaaaaaaaaaggggggggccgataggggggcccccagctggcgcccgcgc

SEQ ID NO: 1525 - DNA, 208 bp, Triticum aestivum
  Clone ID: uC-tsfl5710105a04b1
gtgattaaattctaaaagaaaagaaaatggagttgtaacacatactgtgttcttttagttttttttttcacatgttcctttgggagattgtggttgtgcatttgatgcatttttgttgatcgtacaatccagtttgatgtgtttttgttgtaaacttgaagttggccattttgtcattgtgtaagattattttccaagattcattcaa

SEQ ID NO: 1526 - DNA, 284 bp, Triticum aestivum
  Clone ID: uC-tsfl5710105a06b1
ggttcctatgtggagacgccggtggccgccgaggaggcccttaagacggaggaggtccccgtgccggcggaggccgaggtcgaggcgcctgcccccgtcgaggttgaggcgaccaaggaggaggcgccgggcgccgctgagacggaggaggccaaggagaccgagccagtagctgcggccgagccggaggccgaggcgcccaaagagccagaggcgccagccgtggtcgagacagagaccaaggaggccgtggcagaggccgagccggcggtggtcgaggaggt

SEQ ID NO: 1527 - DNA, 71 bp, Triticum aestivum
  Clone ID: uC-tsfl5710105b04b1
ccctcgtgtccgaaaaaaaaaaaaaaaaaaaaaaaagggaaaaaaaaaaaaaaaaaagccggattactgcc

SEQ ID NO: 1528 - DNA, 59 bp, Triticum aestivum
  Clone ID: uC-tsfl5710105b08b1
ataaataaaaataaaaaaaaaaaaaaaaaaaaaaaaaatttaaaaaaaaaaaataatgg

SEQ ID NO: 1529 - DNA, 141 bp, Triticum aestivum
  Clone ID: uC-tsfl5710105b11b1
atacgcgtccggtgtatgtccatgttcatgtaccaacatgtttcgagaaagcatgcttgtatgtgaatgctatcggtggctatgtatatgcacggacgcataatattatacaatatgtcgactatatacgttttaatggtt

SEQ ID NO: 1530 - DNA, 262 bp, Triticum aestivum
  Clone ID: uC-tsfl5710105c02b1
ggttattgtgcggctggtgattgagggcaaggaaggtagtcagctcagggcccggctagctgctctcagggaagaggcagaggcagccctgcaggaagggggctcgtcgcaggcggcgtttgcccagtttctgttggatgtggataatcttgaaaggcagctcagcgaatgatgcactagtatgtacatttatgttgccagcatgttgctagtccaagccgcccctgtttacattttggttgtgtggtcaataacttaagtc

SEQ ID NO: 1531 - DNA, 60 bp, Triticum aestivum
  Clone ID: uC-tsfl5710105c09b1
tcctcgcgtccgcccacgcgtccgcccacgcgtccgcccacgcgtccgcccacgcgtccg

SEQ ID NO: 1532 - DNA, 477 bp, Triticum aestivum
  unsure (1)..(477): unsure at all n locations
  Clone ID: uC-tsfl5710105d05b1
cccatgcgtccgcacaagctaatcaaggtctcagctccttccgagctccacgatttccagcatgcaagccgaagcactagatcctcgatggctcgcatggcactgctcgccgtgttcgccgtgctcgcggcactggctgtggcggagatggcgtctggggcggtgacctgcggcgacgtgacgtccgccatcgcgccgtgcatgtcctacgcgacggggaaggcgtcggcaccgacggcggggtgctgcagcggggtgaggaccctgaacggcaaggcgtccacctcggccgaccggcaggcggcgtgccgctgcctcaagaacctggcggggtcgttcaagggcatcagcatgggcaacgccgccaccatccccggcaagtgcggngtctccgtttctttcccgatcaacaccaacgtcaactgcaataacattcactaagttatcggtcagcatcatcacaccaggctctacatg

SEQ ID NO: 1533 - DNA, 145 bp, Triticum aestivum
  Clone ID: uC-tsfl5710105d09b1
tttgtactcctttttttctctcctgtgtttattatgtgtactatgctagtaattttgtggtggagccgctgctactgtgtttcctccccctgacttgagcttgcaagccaataatgataatgtttgctactgaacatatatcagc

SEQ ID NO: 1534 - DNA, 392 bp, Triticum aestivum
  Clone ID: uC-tsfl5710105d10b1
gtgcccccaaatcggcgacccctctctctccgatctccaatccccacctcgcacacgcgcaccaaccgggcacgatgcgggcgatctcgtcggcggcgggagggatgctgcgggcgcggctgagcgcggcggcgcgcctccgcggcggacacggcgacggcgggggccggtggacgacgcccggccacgaggtgcggcccaaggggtacccgatgaaccgcacgccgccgccgccgggcgagtcgcgcaagtgggaggactgggagctcccctgctacgtcacctccttcctcaccgtcgtcatcctcggcgtcgggctcaacgccaagcccgacctcaccctcgagacctgggcgcaccacaaggcgcttgagcgcctccagcagcaggag

SEQ ID NO: 1535 - DNA, 432 bp, Triticum aestivum
  Clone ID: uC-tsfl5710105e04b1
ctttcgtgtccgggtgcagccagctgctgagaaggagatgactgtggtcctctccacaaccaagtcaaagaagcagaacaagcctgctgcgttcacccacaagactgtcatgcgcaaggagttccgcaagatggccaaggctgtcaagaaccaggtcagtgacaactactacaggcctgacttgaccaagcctgctcttgcaagactgagcgcagtttaccgcagcctccaggttgccaagtccggtgtcaagaagaagaacaggcagtaagcactgaggggccaatgagcttgttttgtggatccgttggtttatgtttccagctttttagatttgttctaagagtatggaggttgaatatgatgaatggtgtgctctgcatactggcccaagttttctcagtaggttctatatctgtacccatgactatg

SEQ ID NO: 1536 - DNA, 423 bp, Triticum aestivum
  Clone ID: uC-tsfl5710105f01b1
ccctcgttttcgcccacgcgtccgcccacgcgtccgcccacgcgttcgcccacgcgtccgagatcatgtccggcaggttcacggcgtcggccggcggcctgctggagggctgggcggcgagcttcctccgtggggagaggcagctgagggacgtgatggaccctgacctgagctggaacgcgcccctccatgccgagaccgtcaacaggctggacggtgtgattcggtcctgcaccgaccgggaggcgaggcggcgacccgccatggcagaagtggcgaggcggctgagggagatcacggccatgccgacggacgccgccacccccaaggtgtcgcccctgtggtgggcggagctggagatcatctccaccgaggccacctgaagatggcactggagctgcaccctgatggagcatagcatac

SEQ ID NO: 1537 - DNA, 448 bp, Triticum aestivum
  Clone ID: uC-tsfl5710105f10b1
tgtttcagagcagagcggataaactcgagggcagtagatcatcaccaaccatgtcgtgctgcggaggcaactgcgggtgcggatccggctgcaagtgcggcaacggctgcggagggtgcaagatgtaccctgagatggacgagggggtgaccaccacctcccagaccctcatcatgggcgtcgccccctccaagggcaccccgtcgttcgaggccgccgccgagaccggagccgacaacggcgggtgcaagtgcggctccaactgcacctgcaacccgtgcacctgcaagtgatccatcaaatcaggacaaggagatggcatggcatggatggacctaatgaaggagcactagtagtagttatgcatggtgtgtgcgtttgtgttctctttttaattgccgccgagaataagacgagatctatcgtatcgtatcgtatcgtatcgagc

SEQ ID NO: 1538 - DNA, 218 bp, Triticum aestivum
  unsure (1)..(218): unsure at all n locations
  Clone ID: uC-tsfl5710105f11b1
tcttcatantcgtccgctcaaatgttgagttgtccatcactggagtgattttgtgcaataaagcaaattaaccagtcaaaaaaaaaaaaaaaaaaaaaaaaaaaaaaaaaaaaaaaaaaaaaaaaaaaaaaaaaaaggagaaaaaaaaaaagaaaaaaaaaaaaaaaaaaaaaaaaaaaaaaaaaaaaaaaagggggggcgttttaaaaaaataaaat

SEQ ID NO: 1539 - DNA, 72 bp, Triticum aestivum
  Clone ID: uC-tsfl5710105g04b1
cccatgcgtccgcccacgcgtccgcccacgcgtccgcccacgcgtccgcccacgcgtccgcccacgcgtccg

SEQ ID NO: 1540 - DNA, 57 bp, Triticum aestivum
  Clone ID: uC-tsfl5710105g05b1
ttgattttgtatctacacattacatagtacatccctgcagattctttattccttgtc

SEQ ID NO: 1541 - DNA, 112 bp, Triticum aestivum
  Clone ID: uC-tsfl5710105g06b1
ataaataataaaaacaaaaaaaaaaaaaaaaaaaaaaaaaataaataaaaaaaaaaaaaaaaataaaaaaaaaaaaaaaaaaaaaaaaaaaaaaaaaaaaaaaggggcggcc

SEQ ID NO: 1542 - DNA, 483 bp, Triticum aestivum
  Clone ID: uC-tsfl5710105g10b1
ttcttcctcagtcctcacagcatcctctcagtccttagcttccttccctcgccgccacccaccaaggaaaggaggatgtcttgctgcggcggcaactgcgggtgcggcgccggctgcaagtgcggcaacggctgcggcgggtgcaagatgttccccgacgtggaggccaccgccggcgccgccgccatggtcatgcccaccgcctcccacaaggggagctccggcgggttcgagacggccggggagaccggcggctgcgactgcaccacctgcaagtgcggcaccgcgtgcggctgctcctgctgcagctgcaactgagccggcgcccaggaggccggccggcagaggcgagcacgaggatgaggaggacaagcaagcaagcaccatcaccaccagttcaccaccacccagcgtatcatcaccagccgtcgcatgcgctcgcgcgcgcgcgcgctgaataaaataaaaccaccgttcgtgttc

SEQ ID NO: 1543 - DNA, 397 bp, Triticum aestivum
  Clone ID: uC-tsfl5710105g11b1
cgcttagactccgacgatgcactctgtggttgttacagcaggcttgatcattatgtcgactacttcacaaccgaacatccgcatgacaataggccacgctctttctcggtgtacactcctagcagaactgcggtcgtgtatgcccttacagagtaagaaccagcagcggcttgttacaaggcaaagagagaactcgagagagctcgtggattgtgagcgaagcgacgggcaacggcgcgaggctgctctaagcgccatgaccgggaggggatcgtgcctcttcccctgatgccaggaggatcagatggataaggtagctcgttggtgagcgctcgaaagaaaatggacgggcctgggtgtttgtcgtgctgcacttaaccctcctcctatcttgcac

SEQ ID NO: 1544 - DNA, 477 bp, Triticum aestivum
  Clone ID: uC-tsfl5710105h11b1
cctacgcgtccgcttagactccgacgatgcactctttggtggattcagcaggcttgatcatgatgtcgactacttcacaaccgaacatccgcatgacaataggccacgctctttctcggtgtacactcctagcagaactgcggtcgtgtatgcccttacagagtaagaaccagcagcggcttgttacaaggcaaagagagaactcgagagagctcgtggattgtgagcgaagcgacgggcaacggcgcgaggctgctctaagcgccatgaccgggaggggatcgtgcctcttcccctgatgccaggaggatcagatggataaggtagcttgttggtgagcgctcgaaagaaaatggacgggcctgggtgtttgtcgtgctgcacttaaccctcctcctatcttgcacattcccggttgtttttgtacatataactaataattgcccgtgcgcttcaacatgaacatataaatattct

SEQ ID NO: 1545 - DNA, 147 bp, Triticum aestivum
  Clone ID: uC-tsfl5710106a03b1
ccctcgcgtccgcccacgcgtccgaaaaaaaaaaaaaaaaaaaaaaaaaaaaaaaaaaaaaaaaaaaaaaaaaaaaaaaaaaaaaaaaaaaaaaaaaaaaaaaaaaaaaaaaaaaaaaaaaaaaaaaaaaaaggggggggccgtttt

SEQ ID NO: 1546 - DNA, 399 bp, Triticum aestivum
  Clone ID: uC-tsfl5710106b02b1
ccctctcttccgcccacgcgtccgctcaccttcctccaaagctcaggcatcgacaaatatgggccagagtcatttctggtgaacttcacggcattggttgttgtgctattcggtgcctcagttgttgtagctgctgttgccccagctcgccttgaagagccacagggttacgctccaatcccagaacactagtatttgtgaagtgtactgcatgcacagaaattcacaaagtttgctctcaccattgtgcttcgataccaggatctctccgatttgaaaataaatgatctgataagaaaatgttgtgcatcttctgtgtatatgtaaatacatacaagtacatattgtccttccatgtatcatgtataattgaaacatctatgtaagcagctattttac

SEQ ID NO: 1547 - DNA, 57 bp, Triticum aestivum
  Clone ID: uC-tsfl5710106b03b1
tgtatacttaccggatgttgcattatttagattcctaatgggtactattggttttgg

SEQ ID NO: 1548 - DNA, 69 bp, Triticum aestivum
  Clone ID: uC-tsfl5710106c12b1
ccataaattaactgggcaattctcttcttcttaattaatcgatgaggcaaaacttttgcctccgtttcg

SEQ ID NO: 1549 - DNA, 423 bp, Triticum aestivum
  Clone ID: uC-tsfl5710106d03b1
gctgtgtgcaaggacagggccacccctgaggaagtagccagctacaccctcaagctcctccagagaaggatccccccttccgtccccggcatcatgttcttgtctggcggccagtcggaggttgaggcaacgctgaacctcaacgcgatgaaccaggcgccgaacccgtggcacgtgtccttctcctacgcgcgggcgctgcagaacacctgcctcaagacgtggggcgggcggccggagaacgtggccgcggcgcaggaggcgctgctgctgcgcgccaaggccaactccctggcgcagctcggcaagtacaccagcgacggcgaggccgcggaagccagcgagaacatgttcgtcaagaactacagctactgatccgtcggcgagctgtctatctaataatctaccgcatcactgtcagcc

SEQ ID NO: 1550 - DNA, 109 bp, Triticum aestivum
  Clone ID: uC-tsfl5710106d08b1
tttcgttattagctataatagcggaagaatttctcgcattttgttggatgatatgaatctagctgctactttcagcgttgttgagttgtaattgatgctgttttgcgtg

SEQ ID NO: 1551 - DNA, 449 bp, Triticum aestivum
  Clone ID: uC-tsfl5710106e03b1
gtgtccatggaaaggtgtccaaggacaaggaggagcaggcagagttcaagaagatgtttgatcttattgaacagtacaacctgattggtcacatccgctggatctctgctcagatgaaccgtgtccgcaatggtgagctctaccgctacatctgcgacatgaagggagcctttgtgcagcctgctttctatgaggctttcggtcttaccgtgatagaggccatgacatgtggccttccaacattcgccactgcatatggtggtccagctgagatcattgtcaacggcgtgtccggctaccacatcgatccttaccagaatgacaaggcctccgcactgctcgtggacttctttgggaagtgcaaggaagacccgagccactggaacaagatctcgcagggaggactccagcgcatcgaggagaagtacacctggaagctgtactctgag

SEQ ID NO: 1552 - DNA, 329 bp, Triticum aestivum
  Clone ID: uC-tsfl5710106e04b1
cccacgcgtccgcggacgcgtgggtctggagctcgccgggaacgccgccaaggacaacaagaagagccgcatcatcccgcgccacctgctgctcgccgtccggaacgacgaggaagatgaggaccagccaccggccaagaagaagaaatgatctgccttcctgctgtcagtgtttcagtccgttagtttatctgctgtctagatgttgattgagcgggtctggtacacaccgacctatgtagcttctgtgtcttggtggttcggtgtctcatagggtagaacattgaacttctaatgttgtttcctgcgttgtgcaagtagtcttaaca

SEQ ID NO: 1553 - DNA, 61 bp, Triticum aestivum
  Clone ID: uC-tsfl5710106g02b1
aaattaaaaaaaaaaaaaaaaaaaaaaaaaaaaaaaaaaaaaaaaaaaaaaaaaaaaaaaa

SEQ ID NO: 1554 - DNA, 105 bp, Triticum aestivum
  Clone ID: uC-tsfl5710107c01b1
aggtgttgtgctactcgacccgggcagtgctgcatctaaggcgttgagcatcccgcccagggacatgcgcggttgatatacaattgatatcacagacgtttattt

SEQ ID NO: 1555 - DNA, 229 bp, Triticum aestivum
  Clone ID: uC-tsfl5710107c04b1
cccactcgtcctctctctccgattgtccatctccgctcatatggggaccgaggtcctccgcccgcacagcatcctgcagccgcagacgcagaggatctgcgccgcgcaccggaggcccagcaaccccggcaccgccaggaggtctcctcctccatcggcctcgacgaccggccggagaaaccatgggcggccttcctcttcttcttcttcctacgggaaggtgacgtat

SEQ ID NO: 1556 - DNA, 114 bp, Triticum aestivum
  Clone ID: uC-tsfl5710107c05b1
aaaattataaatttaaaaaaaaaaaaaaaaaaaaaaaaaaaaaaaaggaaaaaaaaaaaaaagaaaaaggggaaaaaaaaaaaaaaaaaaaaaaaaaaaaaaaaggggggggcc

SEQ ID NO: 1557 - DNA, 306 bp, Triticum aestivum
  Clone ID: uC-tsfl5710107d04b1
acccttctcgtctccgccaccgccacccacaaggcgagcgcgggcgggatggagatggcggcggagaacggcggctgcggctgcacccagtgcaagtgcggcaccagctgcggctgctcctgctgcagctgctagatctatcatcggtcatgcatgcaccgcgcgcatcatatctatgatctatctacaatctacttaccatgtaacgccacctgatcgagggtctttgtatgtatgtaagcacctgccagcatgagcagagcaggtgcactgccatgcatgtaaaccgacccctaaataaaatct

SEQ ID NO: 1558 - DNA, 263 bp, Triticum aestivum
  Clone ID: uC-tsfl5710107d09b1
tgcccactcgtccggcctcccttgtcctcctcccagggctgtacagtagatgtgtgcgcgtatagaaaggtagcaaaaataatagtccgagcgtacgattgttaccgatcttggcaacattttagctcttccatttttggcatggtaggacatttgtttcttttttcttttccagaccactgtttcttcctttttttttttctttcgagccctgttactccccgtcaagtagacggtggaagatttggttatcagggttgcat

SEQ ID NO: 1559 - DNA, 66 bp, Triticum aestivum
  Clone ID: uC-tsfl5710107d10b1
tgtaaaataaaaaaaaaaaaaaaaaaaaaaaaaaggaaaaaaataaaaaaaaaaaagatgatggtt

SEQ ID NO: 1560 - DNA, 136 bp, Triticum aestivum
  Clone ID: uC-tsfl5710107e06b1
agtattttaattaaacattgctgctcaaaaaaaaaaaaaggaaaagggaaaaaaaaaaaaaaaaaaaggggaaaaaaaaaaaaaaaaaaaaaaaaaaaaaaaaaaaaaaaaaaaaaaaaaaaaaaaaagggggggc

SEQ ID NO: 1561 - DNA, 133 bp, Triticum aestivum
  Clone ID: uC-tsfl5710107e11b1
tttcgctgatttaccgcatgtaatgttcgcatgtacaggtctgttgcatcaaaatttgcctagaatcatttttcctcatgggcctgatacagagaacacacatacgtgggggcccctctgtttcgggggcccg

SEQ ID NO: 1562 - DNA, 89 bp, Triticum aestivum
  Clone ID: uC-tsfl5710107f10b1
tttcccactcgtgcgcccacgcgtccggccacgcgtgcgaccacgcgaccagaaaggtaagactgtttattggaataacactaattcta

SEQ ID NO: 1563 - DNA, 157 bp, Triticum aestivum
  Clone ID: uC-tsfl5710107f11b1
tctctttctctcttaaagtcgcgtcccttccgacggaaccccgccattaatccccacgaccgacatgccgtgtttaattctctgtaccacctagctctagtagatgatccatgaccggaccagtgttgcttcctaattgtgcttgatttcgttgctc

SEQ ID NO: 1564 - DNA, 354 bp, Triticum aestivum
  Clone ID: uC-tsfl5710107g10b1
tcgacgggatggggcctgctcctggttgctcaggcgctgaggcctgcgatcatgagcgtggggctgtgggggtcgatccgggcgctggctcgtgggtacgagatcatcatggggctgctgctcttcaccccgatcgcgttcctggcgtggttcccgttcgtgtctgagttccagacccggatgctcttcaaccaggccttcagccgtgggctgcagatctcgaggatcctgggcgggcacaagaaggaccgggcggcgctgagcaaggacgataggtagatagatcgattgctgtagtagctagtaaggtaggaggatgattgcctgcttgcttgcttgctgtagaatatatat

SEQ ID NO: 1565 - DNA, 54 bp, Triticum aestivum
  Clone ID: uC-tsfl5710107h06b1
tcggccacttgtgcttccacgcgtccggccacgcgtacgaccaggcggggggac

SEQ ID NO: 1566 - DNA, 217 bp, Triticum aestivum
  Clone ID: uC-tsfl5710107h12b1
tcgagacttatcgcctcagctcagtcctcaatgcagaaacagggcacgatctggaaaaaaaaggggcagaacatgtcgtcggagaaacaggagacggtggcggtgcgcgtgctgggcaggtggccgagcccgttcgtgatccgggtgctgatagttattgggctcaagggcgtggaccactagctcgtggaggaggccgcgggcaacaagagcgagc

SEQ ID NO: 1567 - DNA, 366 bp, Triticum aestivum
  Clone ID: uC-tsfl5710108b10b1
attaggaaaacaattactattcattaattgcctgaacaacgtggtcaggcacatcatacgtacacatcggctaggactggagtacagcaaggagttgacagttcactcacgcatacggacgcgtgcatacatgtcgcataaatatatatgcacacacagtgtgtgtgcaaggtacagacatagacacactactgaaataacacacacaggcaacttcattttattttttagtagctcaacatcgtatgagcactccatcaacgtagaaattaagctccacgcaagcgcgttcatgcatgcacgtaggaaggattatatattgaactagttgacattgttgcagttggtggacatgctgatggggaa

SEQ ID NO: 1568 - DNA, 188 bp, Triticum aestivum
  Clone ID: uC-tsfl5710108b12b1
tgtacgcgtgggcggacgcgtgggcggacgcgtgggctgacgcgtgggcggacgcgtgggcggacgcgtgggcaggatgaaggccgcggtcttatatataggtcacctcgtgagtgtgcgcaattaatgtgttaatttgttctttggtgtgggcgtggagactaggttccattaattgccgtgtgcta

SEQ ID NO: 1569 - DNA, 280 bp, Triticum aestivum
  Clone ID: uC-tsfl5710108c05b1
ccaaggtgaaggtgaaggactgtgcgagcgcgctgagggccaaggcgaagatcgtgtgggccaaactggcagagaaaacggaggccgcgacgtcgaggtcgcacgacgagcggcagctggcgcatgagcgcggcagggccaaggtcgccgccacggaggcgcagcttcaccaggagaaggtcgcgcatcgggaggctgccatggagcaccgcctccacaagcacgccagcgtcggcggtcacaaccacaagcacggcgcccgtggcgtgcactgatatat

SEQ ID NO: 1570 - DNA, 437 bp, Triticum aestivum
  Clone ID: uC-tsfl5710108d03b1
gcgtccgggcgcaccttcgactagcaccacgaccacggggctccggtggaatttagataatactcatatgagcttcggtggattgattagcacatcaaacacagttgatgaggaccaggttatggtcacttcagattctgacctgatctggacaatatcgctccggcactgagtttttcgatgcatcttctcgtcagacaatacttctatgagctacgatggattgattagcacgtcgaacatcgttgatgaggaccgggttatggtcgcttcagattctgacctgatttggacaatatctctctggcaccgagcttatgctaggcagaacgttttagctatcgccaattgtctcatctaatttatgtctatgaccactacatccagcagtgacgtgataaattctggcgtgttagaatttcaagccttgtaaattt

SEQ ID NO: 1571 - DNA, 144 bp, Triticum aestivum
  Clone ID: uC-tsfl5710108e10b1
ttttagtgcaagttttgctactgttagcgccgtgtgatatgcgccctgttgatgtgtcatttgagtactgtcgttaattttggcttttggcaaaacatggaagcttctgagactactcatttttatcctctgctttggaatgtt

SEQ ID NO: 1572 - DNA, 62 bp, Triticum aestivum
  Clone ID: uC-tsfl5710108f07b1
ggcggacgcgtgggcggacgcataatattatacaatatgtcgactatatacgttttaatggt

SEQ ID NO: 1573 - DNA, 216 bp, Triticum aestivum
  Clone ID: uC-tsfl5710108f10b1
tttcttttaatgatggtgcctgcttaatgaacgagcgatgaattggcctgtatctctgttatccatgtggtgaaaactggaagtgtttggtttgagcagtttaccacctgcgtcgatgtactctgtctgtatggttcattgtgtccaagctgacctcctgcttggaagccagcttgcctaaaacctgtcgctttcaaactaatcgtcttcatctca

SEQ ID NO: 1574 - DNA, 240 bp, Triticum aestivum
  Clone ID: uC-tsfl5710121a10b1
gtgcttgttccggagagggtgaagcctaagtacaactacgaggaaatgtacaaggaccctcagaagttccttacgccgcatgtcccagacgatgagatatactaaagctagcttgagctttcgtcaaacaaagatgatgtaatccttagcagtagactttatctgccgttgcatttggtgtgatggtgtagctgttgtgttttggcatttgaccaagcaaatgaaagcacatggaactta

SEQ ID NO: 1575 - DNA, 373 bp, Triticum aestivum
  Clone ID: uC-tsfl5710121b01b1
gtgggcccagtctggaccaaaatagcattgaacccaaacaatgtaagtttgagtgagcatggcaagcatctctgaagacagtccgaactccaaaccatacaacaagtgctaaatctcacacattacaaatattaggacacaaaatgcctgattccataagcatcggttttgaccaaacactattaagtactaaaccagaagcaggtaagccaaaatatcactgagacctggcaattggttcaagggcttcaatcatcacaacactatttcctctcagaaccaccatccctatgtcggtcttctcatctccattgacctccacagtgttgtccaccaccaaattcatgaactgatcaaagttgtattgataaat

SEQ ID NO: 1576 - DNA, 370 bp, Triticum aestivum
  Clone ID: uC-tsfl5710121c04b1
cccacgcgttcggcgcgttccaacttcgaaactgctgtgcggacgacgcacagcctgcacgacaaggaaacgatggctaatccatccgttggccccactttagtcatatgcatggacggcttgatttagttgtcgtacacaaatcgtcttcaaaacatcgtctgcatagcagtgctcttccaacttttggttatgcgcttggttatctagtactagtagtatgtggtagtggcctgtgatggcctgttgggactcctggtatgttgcgttcctaagctggttgccgcacttggtgcctcagaacctttgaatcctgttaggatgctgctgttgaacctttactattaaaccatcttaattgctgcttttc

SEQ ID NO: 1577 - DNA, 198 bp, Triticum aestivum
  Clone ID: uC-tsfl5710121d02b1
atttgtagaggctattggttttctagtttctactacctaacaatttatttgtatctacaccagttgttgacgatgatgtgctgctgtaagttgttaacaaaaaaaaaaaaaaaaatttaaaaaaataaataataataaaaaaaaaaaaaaaaaaaaaaaaaaaaaaaaaaaaaaaaaaagggggggccgttttaaagg

SEQ ID NO: 1578 - DNA, 118 bp, Triticum aestivum
  Clone ID: uC-tsfl5710121e01b1
ctcgtttattcttgtgaagtatggaaggcgatcaaattcgagttcgagccggtagatactattgataagtagataaaactaaagataaagaagagaaggtataaataaaaaagaaacg

SEQ ID NO: 1579 - DNA, 433 bp, Triticum aestivum
  Clone ID: uC-tsfl5710121e05b1
gggaggtcttgtgctccaagccgctggttggccccttcaacttccgcttcttgtccaagaatggcatgaagaacgtcttcgacgaggtcttctccaccgatttcaagatcggcaaaacctaccaaccggaatattgatccacaccggcactgcacaccggccaagtttcagttgatcaaaatcgtcctaattaattaacacccatgtatgagtcgcgtaggaaatatgtgcctgcatgagtggatagctagtgaataattttaatttttgatgcacatagatatggtaggagaagcaacaacggatgtgtttgctctcccatgcatgcatccactgtcgatgcagcagttttcttttgtgttaccgaatgtgtaaccgaaaatgctcaagtttcttaatgatctatggaagaaaactctattcttttgtcggg

SEQ ID NO: 1580 - DNA, 164 bp, Triticum aestivum
  Clone ID: uC-tsfl5710121e08b1
ttcaacaaggcgtacgggatgtcggcgttcgagtaccacggcacggacccgcgcttcaaccgcgtcttcaacgaggggatgaagaaccactccatcatcatcaccaagaagctcctcgaggtctacaagggcttcgagggcctcggcaccatcgccgacgtggg

SEQ ID NO: 1581 - DNA, 125 bp, Triticum aestivum
  Clone ID: uC-tsfl5710121e10b1
ttctcacgcgtccgctatttatgacatgtcaaccaaagatttgtgtattgtattaatgtgtgtattatatcaccacaacaatgtgcctgctattagcattaatgagtaccgtatatcttgagaca

SEQ ID NO: 1582 - DNA, 423 bp, Triticum aestivum
  Clone ID: uC-tsfl5710121g11b1
ctcttccatcgggaaaagacagcggcgcgtagcaaacgaaacacggcgaggccggcgatggatgtcaagtgccggcgtctggaggggaaggtggccgtcgtgacggcttccacgcagggcatcggcctcgccatcgccgagcgcctcggcctggagggcgccgcggtcgtcatctcctcccgcaagcagaaaaacgtggacgaggcggtggagggcctcagggcaaaggggatcaccgttgtcggggccgtctgccacgtctccaacgccgagcagcgcaagcacctcgtcgacacggccgtcaagaatttcggacatattgatattgttgtctccaatgccgctgcaaatccttctgtggatagcatactagagatgaaagagtcagttcttgacaagctatgggatattaatgtcaaagct

SEQ ID NO: 1583 - DNA, 148 bp, Triticum aestivum
  Clone ID: uC-tsfl5710121h03b1
ggtaatatagaaccttgaaagatagggttttcacggttgtcggctgtgtcggtttttgtcagatgcgtttctgtgctgtattaacttgtcgaaagagtatggagcacaccttataaacatcaatagcaactgggttttgggagtccaa

SEQ ID NO: 1584 - DNA, 188 bp, Triticum aestivum
  Clone ID: uC-tsfl5710121h08b1
tctcactcgtccgggactggaagttgtgtgcaatttgtgaaactaatttttggggtccttgttgttatccatattccgagttcatgtgtgaagttctttttgtagaaatggtacctttgtaagtcattttgttttataggagtgacttattcgtcacagtaaagaatgtgtgactttcaaaataaaaa

SEQ ID NO: 1585 - DNA, 143 bp, Triticum aestivum
  Clone ID: uC-tsfl5710122b07b1
cccatgcgtccgaaaaaaaaaaaaaaaaaaaaaaaaaaaaaaaaaaaaaaaaaaaaaaaaaaaaaaaaaaaaaaaaaaaaaaaaaaaaaaaaaaaaaaaaaaaaaaaaaaaaaaaaaaaaaaaaaaaaaaaaaaggggggggc

SEQ ID NO: 1586 - DNA, 412 bp, Triticum aestivum
  Clone ID: uC-tsfl5710122b08b1
ccctttcgtccgaaagaagccaacaccaatcaaggcctccatccaatcccaagcaacctcgaagatgtcttgctgcggaggaagctgcggctgcggcagcgcctgcaagtgcggcaacggctgcggcggctgcaacatgtaccccgaggtcgaggccgccggcgccaccctcctcgtcgccgccaccgccacccacaaggcgagctccggcgggatggagatggcggcggaggatggcggctgcggctgcacccagtgcaagtgcggcaccagctgcggctgctcctgctgcagctgctagatcattgatcatcgatcatgcatgcaccgcgcgcatgcatcatatctatgatcgatccatccatccatctagtaccatgtaacgctacctgatcgagggtctttgtatgta

SEQ ID NO: 1587 - DNA, 271 bp, Triticum aestivum
  Clone ID: uC-tsfl5710122d02b1
aaaaaaaaaaaaaaaaaaacaaaagaggcacctaaaaaaaaaaaacagaaacacaaaaaaacaacgggggggcctgttaaaagccccaagctacccccccgggggggggcagaacaaaacccctttttgggggcccccaaaaaaaaataagggggcggggttccccaccccggggagggggaaaacccggggggtccccaaaaaaaacccccggggaaaaaccccccttttcccagggggggaaaaaaaaaaaggggccccccccaacccc

SEQ ID NO: 1588 - DNA, 214 bp, Triticum aestivum
  Clone ID: uC-tsfl5710122d05b1
gtttttctttatgggcgggtatgcatttctattcttcatccacctggtgatgatcccaacggatacgagctcgcgagtgagcgttggacaccagtccatacggtagtgcttcttatttagtgtctaccacgctaaaattttgcttctgttccatttcttctgcttaatgcctttatctgctacatttgtcgccatacatcatcaaacatcattc

SEQ ID NO: 1589 - DNA, 189 bp, Triticum aestivum
  Clone ID: uC-tsfl5710122d09b1
ggagcaactataggggggctttaccgttcgcttactcgcctttcgatgaactatgttccttggtgaaatttcccacgaggcagtaaaataactgcattgtagtttctgcattgtatttcatgtgctgagtttcttcctgatgatgctgcacgtttatgctgtgatgatacccagcctactgtttttgtc

SEQ ID NO: 1590 - DNA, 129 bp, Triticum aestivum
  Clone ID: uC-tsfl5710122e09b1
ttcaagggaataggaggggattcaccaaaccattcctcggagatttgcactcccagttctcttgtttggcttgtggattgaattaaatattgagagctggacaaggaattcatatccttctgtttggtg

SEQ ID NO: 1591 - DNA, 123 bp, Triticum aestivum
  Clone ID: uC-tsfl5710122g07b1
tttcatgcgtccgcccacgcgtccggtttcagattgccatgttcctcttctgctttatggagactctgtaaccattagccgtccagcacaatgaaatgaaatgaaagggcgttgctcctgtcc

SEQ ID NO: 1592 - DNA, 241 bp, Triticum aestivum
  Clone ID: uC-tsfl5710122g12b1
tttctctttgacatctaactgcctttcggatccagtgcagtggctgtgctgctgaaggttccctcgtgaaataaaagctttcctttacaagagaacggcactctgttttattttgtcttgtgggttaggaagaagcccactgaacaatctttaatttcctttctaccgaaaaaaacatggacaaaaacatgaagagaggtcatggaaagtttttaattcaagtgtttgtaattttcgtttg

SEQ ID NO: 1593 - DNA, 67 bp, Triticum aestivum
  Clone ID: uC-tsfl5710122h03b1
ggaggccaagcgcaaggccgggcgggataaggtgaagcgcgacatcgaccaagagaagcaagaaagt

SEQ ID NO: 1594 - DNA, 343 bp, Triticum aestivum
  Clone ID: uC-tsfl5710122h04b1
ctcctagcaagctatattcctacatagtacatccatggcccccaccgtgatggcctcgccggccacctccgtcgctcctttccaggggctcaagtgcaccgtcggcctccccgttagccgccgctccaacggcgctagcctcggcagcgtcagcaacggcggaaggatcaggtgcatgcacgtgtggcccatcgagggcatcaagaagttcgagaccctgtcttacctgccaccgctcagcacggaggccctcctcaagcaggtggactacctgatccgctctaagtgggtgccttgcctcgagttcagcaaggtcgggttcatcttccgtgagcacaatgcg

SEQ ID NO: 1595 - DNA, 278 bp, Triticum aestivum
  Clone ID: uC-tsfl5710122h08b1
gaaaggcgaggactatgtcggccacgacgggggctgtgccgttctggcgaacggcggggatgacctacatcggttactccaggctctgcgcgtccatggtgcggagctgcctcaaggagccctacaagtccgaggccgccgaggtcgagaaggtccactactcccgcttcaagtggtccgacggaaagcagcccaagcccaccatctgcgaagatgataaatgaaagatccggtgccatggtgacacagtcctttctacggacgttttgaaaagctat

SEQ ID NO: 1596 - DNA, 247 bp, Triticum aestivum
  Clone ID: uC-tsro5710001b11b2
tcgcttggatcttagagggctgcgcagttaccgaaggctgtaaatgcttcacctgctatcagcataacatgtaatcttcagctgctcttccttagtagcgtatttctattattctctggggtcatcaacttcggccatggttaggtatgcagaaaactagatagatgttggatctggctccatcctgttttatttgcagctaacctgacgatgtaagtgcgtttgatactcgctctgatacatctgc

SEQ ID NO: 1597 - DNA, 137 bp, Triticum aestivum
  Clone ID: uC-tsro5710007b10b1
tcttacgcgtgggttgtaataaaacaaaccttgtgttgtatcaatggtctgtgtgtgatgatgtaataaaagggcagcctcttccgctcgacgaacatgcggtgattgacctagcgttatcaagttgcttgcagttt

SEQ ID NO: 1598 - DNA, 89 bp, Triticum aestivum
  Clone ID: uC-tsro5710007b12b1
gcgtccttcccagttttatgtgaaactgtgtccctggttatctgcccgattgccgttcttgtgatggaatgaaacatgtaccggtttgg

SEQ ID NO: 1599 - DNA, 170 bp, Triticum aestivum
  Clone ID: uC-tsro5710007d02b1
tttgttagcagataaagttcaccttcagatgtgccggacaactgatccccggggccagttgtctcaacatgttgcattagttgtgacatcttgttttttgtttcggtttacactcaattgcgtcaaagcttcaaagaaaatcaactgacttgataagattttccggtctc

SEQ ID NO: 1600 - DNA, 154 bp, Triticum aestivum
  Clone ID: uC-tsro5710007d05b1
gtagtaagctgtagttgatctgggttccatgccttctatgattagtagtaatatctgtagtagcagtagctggttgttcaatggttgcttcagtgttctgaatttctgatgggcaaacactgtgtttgccgagatatatgaatccagagttaac

SEQ ID NO: 1601 - DNA, 147 bp, Triticum aestivum
  Clone ID: uC-tsro5710007d07b1
ttctttacgcgtccgcggacgcgtgggtcttccgcctccctcccggcgccccaccgtgagcgcgagcgaggagaccgtcctagggttcgcgcctccccgccggtccccgcccgccgatcctctccccgccgccgcccccgaggatcc

SEQ ID NO: 1602 - DNA, 57 bp, Triticum aestivum
  Clone ID: uC-tsro5710007f08b1
ttttgtaatgtaagaatgaaagatttacctaaggaagtacttttaaatcgctccttc

SEQ ID NO: 1603 - DNA, 406 bp, Triticum aestivum
  Clone ID: uC-tsro5710007g09b1
ttgtgtttctagctaaccagaggtgtggtttacggacaccaaccaacatgctagaggagcgggatacaaacattttgtgaaggtttcagattttagtttaattttctacgtgtattaggtcttttggttttccaatgagatgtgcagtggtgattgcggcacacacttagaaggtgttccaacataagctggaattctgtcatacggacgacaaacttgtataccagggatgctgtattatcttgcccatttatggcaacattagcttgcgtgtttttcctcttttccttttttaaccatttcatttgttactagaggatttggtcggctttatactagtaaaaactatttgggggtgccaatgccatcctggtccccattaataaagtcacccaaagtacatact

SEQ ID NO: 1604 - DNA, 415 bp, Triticum aestivum
  Clone ID: uC-tsro5710007h10b1
ttttttagcccttccaagttatgatgatccatacatcaaagttccaaatgcactgaccaaagtaatgacatgtgggtctgtaaatcaaagttgtgattattgtaacattctatttcattatacaatgaggcatggtgaatcaactgagcttgcaaaacatcgaacgagcaatcagcaagcctgagttaagtttgacatcctcggctagaacagtacgactcaacaatttgagcgatggatctgcagtgcctgcaatagaagatccatccttgcgtgccatcctgtgttcggaccaaatacatgtcattttcttaatgtgcttttatttatgtttctggaatgtgggggcttcttgcgccatgccttccaaacggcgatagggttcatgtgatgctattacccggtaatttgtctt

SEQ ID NO: 1605 - DNA, 85 bp, Triticum aestivum
  Clone ID: uC-tsro5710017h03b1
gaaagagactctcctatttcctatgaaattccaagggatttaggagctctgagtcaggaccaggatcaaagattctcctagcacc

SEQ ID NO: 1606 - DNA, 113 bp, Triticum aestivum
  Clone ID: uC-tsro5710018a07b1
tcgtgttttcccagtgtgtatgaatgaggcttgtagctccccttttgcctgatgatttacaggacagtacatttgctggaagagtgaaacaatttgacacctgattagaatct

SEQ ID NO: 1607 - DNA, 97 bp, Triticum aestivum
  Clone ID: uC-tsro5710001c03b2
tataatttaaaaaaaaaagtaaaaaaaaaaaaaaagagggaaaaaaaaaaaaaaagttggaaaaaataaaaccataaaaaaaaaaaaaaagaacaag

SEQ ID NO: 1608 - DNA, 367 bp, Triticum aestivum
  Clone ID: uC-tsro5710001c04b2
ttttgctagcgagcaggcagcaggaaggaaggaaggaagggaggtggagatggcgcccatcaagctgtacgggatgatgctgtcgcccaacgtgaccctcgtggccacgctgctcaacgagctcggcctcgacttcgacttcgtcgacgtctacctccgcaccggcgcccacaagcagcccgactttctcaagatcaacccttttggccagatccccgcgcttcaagacggggaggaagttgtcttcgagtcgcgcgccatcaaccggtacattgcgaccaagtacggggcggccctgctgccgactccgtctgccaatctggaggcgtggctggaggtggaattcaacaattttacccttcgtcgc

SEQ ID NO: 1609 - DNA, 142 bp, Triticum aestivum
  Clone ID: uC-tsro5710001d02b2
gacgcgtggggggaccgtgcctgggaatataagaaaataaaaataatctgcaatacctatgaccacgttttgctgcataaccgagatttaaataaaaaaccactaaactcaacaacaaccaacataaaaaccaacctaatac

SEQ ID NO: 1610 - DNA, 155 bp, Triticum aestivum
  Clone ID: uC-tsro5710001d04b2
aaggaagctggacaatggacaaggcacacggcggccaaacatgtgaggcggagacaaatgagacgatgacagctaatgaagcccccgagagggagccaatggactgggaccctgaagggagcacagaccacgggtccacctggaaaactaaagat

SEQ ID NO: 1611 - DNA, 510 bp, Triticum aestivum
  Clone ID: uC-tsro5710001d11b2
tttcgtacccgccaccggagtccccttcttcgggagggggcaatcaacacccaccttactcccactcccacctaccatcccccgctcttctacacatcgaggacgaaacggtggtgagggagccgggggactagctgctaggcggaggaggagatggagcgagggctcgtcgcattgctgggtctggggctggcgcttcttctgctggcgccctcccgacgtctcgcctcggccgctccggtggaggacggcctcctcatgaatggtgatttcgagacagcaccacctggcggtttcgtcaaatctgcttcagtttccgagggcgcagcgaccccaagctggatgatcaatggaacagttgagctcatttccgcaagccagcaccagggtggcatgatccttattgttccacatggcgatcatgctgtgcggctagggaatgatgcaggcattgggcaggtggtggagggtgagaagggctcatagtacgcgatcacattcagggccgcc

SEQ ID NO: 1612 - DNA, 265 bp, Triticum aestivum
  Clone ID: uC-tsro5710001d12b2
tctgtgcacactcccaccaacacacgcggcgggagcaaagcgcggcgaggcgagcgcgcgcccgcaagaaggacgggggcggcgaggaagggaagcagcaaccgcagctggttccggcgcacaagccgaacctcccctcgcagccagacgtggacgaccccgccaagggcgggctccgggaagacgtcctcgccgcagagaaaacccatgacatggcggcgctgtacgaagacatggcggacgacggcgtgacggaaaaggacgc

SEQ ID NO: 1613 - DNA, 161 bp, Triticum aestivum
  Clone ID: uC-tsro5710001e03b2
tcatttcttttttggcttccaccttcccctcacgcgcgggacctcgtagtcgacgcctgctcggagatctcgcctcgcccgccggcagcagccatggacgccgttgactcctaggtggaccccttcgctgagttcgcaaggacagcgtccgcctcgacaag

SEQ ID NO: 1614 - DNA, 303 bp, Triticum aestivum
  Clone ID: uC-tsro5710001e05b2
tcctgggactttcccacgcgaacgttcctttctccaggatctcgctggtcgtggagctcgccttggagcgcacttcggtgttttttgcgtacgtacgaggtacgcgcttgacacggtcgctacacccgacgagcacggtgtacgtcgtctcttccaccggtgacaggcgccgggcgcgagacactgagcgccagacgtgagcgagcagggactggagggacgagagggtggctgtggaggtcgccgagccgacgccggcgctggccacctcggcgttcgctctggacttcagcttcttgatgc

SEQ ID NO: 1615 - DNA, 455 bp, Triticum aestivum
  Clone ID: uC-tsro5710001e10b2
gctcacacgaaacagacagagacagagggaacaaacaacccagaacccgcaccaccaggacaggacacgaggcaaggaaagggaccgcaggaagagagccagaagaaaccgacccgagcctcaacgcggacgaagccggaacaaacgacaaggcaaaaagggccacaaacagaaacgaaaacagccaaacaaacgggcggcggggaacccacaaaccggggaaggaaaagaaggaaagaggggccagagaaaaaccagggccgaggcgaaaacaacacaaggagcaccaccgagaaaaaaagcacaggcaaagaagaaaaacagcaagaaaacgggaaaaacaccaaggcaaaccaaagacaggcagaacaaaggaaaaaaagaaccccgaaaggggggcggaaccaccaggggcaggaaggcaaagaaaaaaaaaaaaaaaaaggggggccgaa

SEQ ID NO: 1616 - DNA, 142 bp, Triticum aestivum
  Clone ID: uC-tsro5710001e11b2
aaaaggaggaaggacaagaaagcctccccaacccggggggggggagacaaaacattcaaaacgcagcgtacagaaaccaggagacaagaaccagcgcaccaaacctcaaacaaacagggacaggggggccgagcgggagggc

SEQ ID NO: 1617 - DNA, 426 bp, Triticum aestivum
  Clone ID: uC-tsro5710001f05b2
ttatttacaaaaaaaaaaaaaaaaaaaaatagggaggattttaaaagaattttgtgtggatttaaacaaaacactaaagtgttaatgattcatacacttgtcgttatttatgtggtctatataggccattgttatattatggtggggggcatgttttaaggggacacagtttgtccgccttctgctcggtgggagaacattttgtctgtggggtcccctcagtctaatcctggggaggagctgacaccccgtgtgggggggaaaaccctggggctccccgacttaaggttttaggaatgataccccttttcccctgtgggtgataatcctggagggggcccaccctatcgtccctcccaacatctcgcatttcaataggggtatgggggccgcctcttttgggggcttttatgggggggggggggg

SEQ ID NO: 1618 - DNA, 381 bp, Triticum aestivum
  Clone ID: uC-tsro5710001g04b2
ttaatacccaggacgtcccacgcgaacgtttaattgtgagcccaactgcatgtagaacccgggcgcgggaatcgtcgacttcttatgcaatcgacgaccaccacctagctaatcggctaaacatcgaacgtatcgagacagtcgagcgctgggttaaataattatgatgacgcttgctactataatgagtgagaagtatcacctcacctgcagccatgcctataagaatgagcgcagctcctataattaaggcacttcaagaacttgatctctacggtactgcacgtataacgaacgtgcgaacctcactgtaaaaaggccttgaggcggagtgtgacaacctcgagcccaatgcccccttaataaacatatcaagttttc

SEQ ID NO: 1619 - DNA, 303 bp, Triticum aestivum
  Clone ID: uC-tsro5710001g05b2
ttcccgggatttcccacgcgtccgttcacgtctcccagaaatggaaactgtgaccaccaggcatttcgtatggagtgtcattttttataacagccacctaaagtgaaagatgaactgacaagcgatggtcatctgccaacggacaacaggagactggaacgtgtggtgcacgaaacgaaaagaataactgcaagccctgcgccactgcatagatgaacaacgcaacggcacatgctcttgagcatgtgacaaaccaagagcagccaactatacatcagcggttgagcgatctgaacttgatga

SEQ ID NO: 1620 - DNA, 486 bp, Triticum aestivum
  unsure (1)..(486): unsure at all n locations
  Clone ID: uC-tsro5710001g07b2
tttacgtgttcgcccacgcgtccgggcagctgctccttctgcctctgccgtttccgtcaggcagaggactgccgcggcagcatcgccactgctccaggatcagcagcaagaaaagcatgaagctgctgatccggtgccgccgccgccgccgcgatcgacgctgtaccaggcgctgacgtcgacggcgagcctggccaacctgctccccacaggtacggtgctggctttccagctgctcgcgccgaccttcaccaaccacggcgcctgcgacgccaccacggcgctgctcacgcggatcctcctcgccgtcctcgcgctctcctgcctcctcgccttcttcaccgactccctcaatggccccgacggccgcgtctactacggcgtcgccaccctcaggggcctctggctgctcgactacccgcccggcgcgcncacgccgtcggacacgttcaggtacaggctggcaccaatcgacgccgtgcacgc

SEQ ID NO: 1621 - DNA, 203 bp, Triticum aestivum
  Clone ID: uC-tsro5710001g11b2
ccaaactttgggttaccaccggcgaaccggaacgaaaggggaggatgaaccaaacaaccccggcgaccaagggaagagagcgtgacgagaagcacgaaagccaaccggccgaagaaaagcccaatgcgggcaggaagaagcgaaagaggaagccaggacgaaagacgaacaacacagaccgtcaccagcaacaagacagaaca

SEQ ID NO: 1622 - DNA, 355 bp, Triticum aestivum
  Clone ID: uC-tsro5710001h01b2
tttcaattggaacgaactattcagcaaacgcgagtggggagatgtgagcgtgggagcggcactgtttacgccgcagcaactagctggcataaatgcatggtgagtactacatctacactcaggagttccccgcaggtgcaaggcatatgcatcatgacggtgcagcgagcgctcttgctggtgccgccaaagtttttgggaccatgattgcatcttcactgatggacaagcaagggaggaagagcctcctcataacaagcttttctggaatggcggcgtcgatgttactcctgacattgtccttcacctggaagggctttggcaccttatttcggcactcatgcctgtggcggca

SEQ ID NO: 1623 - DNA, 270 bp, Triticum aestivum
  Clone ID: uC-tsro5710004a02b1
ttctcatgcgtccgcccacgcgtccgcggacgcgtgggctacagcaaaagggaattctggctggagaagagcaccggcatggattgcatggcattgcacttgaaagcgtaagtgataacagggatcgatgacaggagatattgggttcacatgccaaacacagagtttaggttccagtccgtggcgtacctgaaccaaatattcgtggatcgaggtgttctcgggagatcgactttcacttaccggtggggacctacagcctttacttta

SEQ ID NO: 1624 - DNA, 115 bp, Triticum aestivum
  Clone ID: uC-tsro5710004a05b1
ttttattttcagggaccggacgagtagtaggccaggatttactctcccgggcgagtaaggtccgttgaaccagggcgccgtgcctacgcaccaacctcgatcatggaattccccg

SEQ ID NO: 1625 - DNA, 205 bp, Triticum aestivum
  Clone ID: uC-tsro5710004a06b1
atcttgcattttccagcgatcggacgaatgagtggaccatgatttagtcagcacggctctcactgtcggctgaacctggtgagtccgagcctgtacacctgccgcaatcatggccataacgcagccatagttctttcctggacggactacataacaaaagatgatactgagtgcctcccttatttcgatgggtgagcaactgaac

SEQ ID NO: 1626 - DNA, 315 bp, Triticum aestivum
  Clone ID: uC-tsro5710004a11b1
ggcaggactcccgccggcccgttccggaccggaatggttggctcaacccacgctgtacttttcacgcgtccgcccacgcgtgcggccacgcgttcgcccacgcgtccgcccacgcgtccgaccgttaccacgagaccccgggagggccgatctctgaagggtggcaaatctctgccttgaaatataagaacgtgaattacactttcgttagtgtttttggaatcgtgttggacgcccggttagattgatgtatatacgcatgctgatatcagagggatatgccaatagttttggctagatgggattctaaaaaga

SEQ ID NO: 1627 - DNA, 287 bp, Triticum aestivum
  Clone ID: uC-tsro5710004a12b1
cggcccgtaccggtctggattgcttggcccgacccacgctgtcctttcgagcggacgcctcagtatcataacacatacgaggagcgcctcgagcttttcagctcgctccgggagagcggagtgcttgtgcatcacaggttttgatagctgccatacccattcagagtagctgccgatagaagtccactacagatgacaaaaggtgatcataccttcaatacatgtttgagtaactgagtatattagtataatggtcgagataggtaaaaaaggattcggtttattca

SEQ ID NO: 1628 - DNA, 196 bp, Triticum aestivum
  Clone ID: uC-tsro5710004b05b1
gacttctgacctattctgtagagtcacctaatttcaaatcactggccttaggtttacaacgagccgactggtaaaaccctgggggtacccaacttaatatgcatggagcacatccctctcttgccagctggaaaaatagcgaagaggtctgtaccgatcgctctccaaacaagagcgcatcctgcatggcgaatgg

SEQ ID NO: 1629 - DNA, 398 bp, Triticum aestivum
  Clone ID: uC-tsro5710004b07b1
tttcttagaaggtcaagaaagaagagttgaagagatcactttatgcattgtgctctcagtatggaaggatagtggatgttgtggccttgaaaactcataaactcagggggcaagcctgggtggcattcagtgaaattacagcggcttccaatgctttccggggcctacaggactttgatttttacggcaaaaaaatgcgggtacaatatgcaaaaacaaagtctgactgttttgcaaaagcagatgggtcttatgctcctaaagagaaaaggaagaagcaagaggagaaagctgcttgaaaaaaactgcgaactgaagatggacaacaacctggtgctaatgctcctgttgccccaagcaatggaactggtcatcaatcttatctttttgccaagtct

SEQ ID NO: 1630 - DNA, 432 bp, Triticum aestivum
  Clone ID: uC-tsro5710004b08b1
tttcttaaacaaaagcatataacagtctccgatcgagagggatccagagggcatcaacagctagcatggagagtggtggtggcaagaggagggcatcggatgtggtggccattgccattacaatgctgctgcttctgcagctgatggcagctccgcggacggtcatggccgcccgcaccctgcacgtggaggacatgaataccttccctgtcctgcgcttaaacaccatcgcgagcgaatttgccaagccattgctagccccattctgtaaggatacctgtatttttacttcttgcagtgaatccttttgccgttgcaggtggcccgactgcgtgaagagggatgactttgctagacgactcctcatgatggtagcttttttttttgcgcttgaagttgtctgatcgaagcagttgatttctgactatcata

SEQ ID NO: 1631 - DNA, 363 bp, Triticum aestivum
  Clone ID: uC-tsro5710004b09b1
tcttggcgcccaagaccggctgccaccccaacaagtcctccccgcggctggtggaccccaagcccgagcctggcacgccggtggagtgccagcccgagcaagggcctgaagcgccggagcaagagcaggaggaggaacatgagcagaagcctgtcatcggtctggccgaccccgcggcgatcacgacggtgaccgcggcggccgatgaggaggaggagagcttcgactttgggtggttcgaccagtacctgacgtggccccggacggtgctgaacgagccggacgtagacgtggtgccgtcgccggaggactggtagcgctagctgcagggggaggacccgcttttcgtggggctgggcgagc

SEQ ID NO: 1632 - DNA, 274 bp, Triticum aestivum
  Clone ID: uC-tsro5710004b11b1
tttcctttcaggcgtccgcccacgcgtccgaaccaggtctgcatggtccgcgcccaggtatcatgcgcactggtactgggtctgctcatggacagcaaactccttagccattccaccaacatatggatccaaggggacgtgtgctccaacacccacctgcacctcggcacatccctgaggtccaacagatgcatggggttggtgttggaggtattcaacatccatatgacatgggaagctaacttgtgcaagatgctgctctgtgatctgctac

SEQ ID NO: 1633 - DNA, 266 bp, Triticum aestivum
  Clone ID: uC-tsro5710004c01b1
ttttcttggagagcttgagccttgagctccacgataaccttagggatccagccagcattggacgggcgcaacgcaatggcggagctgctgcgagcggccgatttctttgacctgcgcgcggcagcgccgttcgtggcggcggtggtggcgctctactttctggctgaccagctgtcctacctccgtaagaaaggccccctgtcaggtccgtcgctcgtcgtgccgttcctcggcagcgccgtgcgcatgatccgcgaccccacggg

SEQ ID NO: 1634 - DNA, 180 bp, Triticum aestivum
  Clone ID: uC-tsro5710004c03b1
ttgtgctagctcacagctcacgagtactacgtacatgtatacgtgttgatcggggcgaagttagcgtatacaagtggcgagcggtacctagaggcaggggagagggaagctagagcagtggtcgtggccatgggtgcccaggagatcaagtacttctcgcaggcgaagcttggccggcgg

SEQ ID NO: 1635 - DNA, 250 bp, Triticum aestivum
  Clone ID: uC-tsro5710004c07b1
tttttgaaaaggaggaggaatctagggaatctaggaataatgggcgagcgctctggaggagccagggatacaggcacgcgagggcagcaagggaaggatacaatggtggcaccgaaactcaagtctcggctcgttgcttatacagtcccgacgacttggtaaaacattggtgtgagcaaaatttttagcattactaccaatactgttgttgcaagatggggtaatacttaataggctcctacctgatttc

SEQ ID NO: 1636 - DNA, 294 bp, Triticum aestivum
  Clone ID: uC-tsro5710004c09b1
ttgcggggggcccttccatacattcatgtaagctgtaacgggtatgcaggaagtcaagagctgggatgcttgctgttgtttcaagatgtaaacattgtgtagtgacgtcggaaatgaggtaccacttcttattttttgcttctacatatatactcgtatagtatttgtcgagatttttatccccaagttgtcactgtatattatatataaatatgtaacagggaagtgatttctgtccagaagtgtaaagggagtatgttggactgacaatatatatatattattatttttaat

SEQ ID NO: 1637 - DNA, 70 bp, Triticum aestivum
  Clone ID: uC-tsro5710004c11b1
tttattaaatggtgaaccacaacaatagataagcctaactttcacaaaaagaatcaatgggcggactatc

SEQ ID NO: 1638 - DNA, 440 bp, Triticum aestivum
  Clone ID: uC-tsro5710004d02b1
tttcttgctaaacagtaaacagagagctcttcgtgaatgatgtctaggaagaggaagaagaagaagtgtggagcacgctgctgctacctggtcgcgctctcagcagtgtgaatttccagaagcatgcttgccgtgccttcttccgggtgcaccggaggccggcttgtgagcaggggtgctttagtgatgcagaagaaaaaaggcaagtcttattggcaagggaaggctactcctttcttccaggtctccctctctccatctaaatccgtgtttggaggagggggctacggttagtttacccaccggtttatcgtgtccttgtgagttgtggtcattatcatgcactccgtatgtgcttgtaatgtatggtgtccttgaatttcagctacataatggccggttgagaaagtgaatgggagtgtgttcatgtgagtaaatta

SEQ ID NO: 1639 - DNA, 79 bp, Triticum aestivum
  Clone ID: uC-tsro5710004d03b1
tgttttcagtcgctaaggatgatgctgctttgatgcatataaaaaaaaaaaaaaaaaaaaagaactaaaaaaaaaaata

SEQ ID NO: 1640 - DNA, 291 bp, Triticum aestivum
  unsure (1)..(291): unsure at all n locations
  Clone ID: uC-tsro5710004d06b1
cggcggcttccagcgcctgagtccgttgctcgacccacgctgtgttcaccgcanagccggcacacgggatgcccgaggtgcagttagnnacgcggaagctattggtcgatcttgatgagaacgccccctgtcatcgggactgagtgggggctggaacggacattgcggctcgctgagccagcccatgactaaggatgaactggttggcggcctccgctcgttgggtgtacactgatccgtgatgtaagcctgacggtgacgaaatgaagaactggcactgggttgggcttt

SEQ ID NO: 1641 - DNA, 455 bp, Triticum aestivum
  Clone ID: uC-tsro5710004d09b1
ttaccaaaccccgctccaaaatccccaaatcccctctcttccgaagctactcagccatgtcggggcgcggtaagggcggcaaggggctcggcaagggcggcgccaagcgccaccgcaaggtcctgcgcgacaacatccagggcatcaccaagccggcgatccggaggctggcccggaggggcggcgtgaagcgcatctcggggctcatctacaaggagacccgcggtttgctcaagatcttcctcgagaacttcatccgcgacaccgtcacctacaccgagcacgcccgccggaagaccgtcaccgccatggacgtcgactacgcgctcaagcgccagggacgcaccctgtacggataccgtggctgatgagcctctgcgcttgctggccggccgaggcgcacaagccctggctcgcggacaaaaaattgaggagaggaaaaagctgtattttaa

SEQ ID NO: 1642 - DNA, 314 bp, Triticum aestivum
  Clone ID: uC-tsro5710004e03b1
tctgttatccaagctggcgagcaaagtggctaccgcagtgttgtcggtcatggtggtgataatggccgggccggtcgccggagtgcgcgccggcgcgctcgcgatctgcatgggcatgtactgtgaccaggtctctctcgaggatgcgttcgcgacggtgaactacacggttaacaacaaggtctgtatcttgaccttcctgtggagccataagagggtccatgaacctggtcgtgaacttgcacctgcacagcaacccgtctagcacctttcttgggcaccttcgtaaaagcctgccataatgcctgcatata

SEQ ID NO: 1643 - DNA, 419 bp, Triticum aestivum
  Clone ID: uC-tsro5710004e05b1
ttctcattaaacacgcaagccgtctgcccccgcacggaaagtgatccgtcggaggcgacgcattcgtcggcgagctaaaacgacattattcacatctcagtctggggttgcgaattccttcgggttccgtagtagacgccttagcactaagcgttaccggaatatgctttggaactcgtctgtacttaggactaagattagaaccaatagcgctttcacgcagagtcaagcatccgttgcaagcttctgcacagtatacagtgggtatatacgatgccttcggcaatacagctagtcccttttggaccgcgggtggaggcgcattgcaccggattgagagattaaaaaaaaaaaacaaagtggtttttttcgataaatttaaaagaagaaatgtagagagctgtaagaagagccctttt

SEQ ID NO: 1644 - DNA, 251 bp, Triticum aestivum
  Clone ID: uC-tsro5710004e07b1
tgtctttgtgattcaacgagtgctaagctgaaactggcgtgttcctatatcctagaaaccggtactctgaaccacttacgtataactagtataagtattggactgattcctggtactttagtggcaaaaaccatatggctgaagtttgaattgagtagccggttgttttgtgttgatgtattgtttatataaatatgcacctgtcttgtgtatatggacaaatgtatgaatactagtcctgggttttggct

SEQ ID NO: 1645 - DNA, 437 bp, Triticum aestivum
  Clone ID: uC-tsro5710004e08b1
tttctttctagacaggcttcgtttcctccggcgacggcggaacgagcgagagagtcctcggcgcggccgacaaccggttgtgggatcgcgcgaatcagtcgtcgccaagggccgtataactagcggtaccgcaccgtgccgcacgccatggcaggtaataacccaccaccaaagccatgggaacgtgttggcactttatctggtccagcgccttttaaaccctcatttggaggcagcacaagtgacgtttttgaggcctttgggaccatataatctgggttagttgtttctgttgcacagagctgtgctgctttcaacgtgaacatttcaattgcagggcctgtgtctctgtgttcttgtgttcagcaaggtttctgaaattctttatgtgggttttggttctcgatcctaaaattcatatggaggatttggtgggg

SEQ ID NO: 1646 - DNA, 67 bp, Triticum aestivum
  Clone ID: uC-tsro5710004e09b1
aaaaaaaaaaaaaaaaaataaaaaaaaaaaagaataaaaaaaatataaaagtacatggccgtaaata

SEQ ID NO: 1647 - DNA, 371 bp, Triticum aestivum
  Clone ID: uC-tsro5710004e11b1
tgttttacgggctggacctggagctccaccttgccgcgcgtgatgacaacggtgacggctacggtaacaggaacaacaacaagaacatgtgcggctgaggctacggcgccggagggcggtgcaacaacaggcggaccgtggaggcgctgagatgaaccgactttgcttgacccgacctgaccgatgattagttgtagagcggttaaccttgctttaattgcttatatgatctgcgatccgagccgatagcttagctccttgcttttcgatgagcgttgttgtacatagagttagcggtttaatccgtgatgttttgatgggtattaacatcatgtttttatttgttggttgatttaaatttcttttttcta

SEQ ID NO: 1648 - DNA, 380 bp, Triticum aestivum
  Clone ID: uC-tsro5710004f04b1
tttttactagggtgtcaatggcgtctgccattacaaggctgaaaatgccgtagttcaggttttggactcagttaacatcacactgaatgctgaggacgaactgaaaaacgccgtcgggttggttcgcccagtgagtgttgcctttgaggtgatcgacggtttcaggcagttcaagagcggagtttacactagcgaccattgtggtactacacctgatgacgtgaaccacgccgtcttggcggtcgggtacggtgtggagaacggtgtcccgttttggcttattaagaactcgtggggcgcccactggggtgaaaatggttactttaagatggaaatgggcaagaacattgttgctgttgctacctgcgccttctacccca

SEQ ID NO: 1649 - DNA, 177 bp, Triticum aestivum
  Clone ID: uC-tsro5710004f10b1
ttttcctttacggagccaccccacccaccaaagcgatccgtcggaccggcgagcggcgagcggcttgagcaagggagagatggcggacaccggggaggagactgtgcaagcgtcgcacattctgatcaagcacgaggggtcctcgcacagggcgtcctggaaggacccgatgggccg

SEQ ID NO: 1650 - DNA, 312 bp, Triticum aestivum
  Clone ID: uC-tsro5710004g02b1
tttcgtttgagacattcacctaagccggagtcaagtgcagtgattgctgggtgtagcatatctgcttaccactacctatcatccgtgacatttgggacccttgtattccctatggttttatatatgtgcttggtgtcaataattgattgatttggaacggtgcaaactgtatgccagaaagcacgcctggctattattattgtggatcgcatgatacttttaaaaataaaatataaatatatattttttaattctataatatatttaattttatattttttcaataaatagggggcggccgtttttaaggat

SEQ ID NO: 1651 - DNA, 184 bp, Triticum aestivum
  Clone ID: uC-tsro5710004g05b1
accttttgtttgtgtgggtgtgggtgatatgtgtgtggtctgtttctagcgggagcgcaagttttgtggtgtgaacctttttcgcgtgaatgaataatggtgctgcgtaaaatttcagatttgttttgctgtatagagtggaggagcgcctcctaggaagtaagatgtggtacgccgtttctcc

SEQ ID NO: 1652 - DNA, 273 bp, Triticum aestivum
  Clone ID: uC-tsro5710004g09b1
cgaaggcatacacgcccgtaattgttgccttgaaaaatttttatttacccgtcagacaggacggggctgacctatggttcaggatcgacagcaactccaatgccatggtttgagagcttgtttcaagctgcgagactggtaatataatgtccagtgtgggcattaacttgttatttcgtgggaaatagtgaaacatgtgtgacgtgtttgtttgtttgccattctcattgttttactgaacatacactctgtcttgtctactttagtttaaca

SEQ ID NO: 1653 - DNA, 322 bp, Triticum aestivum
  Clone ID: uC-tsro5710004g12b1
agcattctaccaccgaaccgaacgagtgaagtgagagctgtgcacgaaaactttatcagaaaccatgaagggcaccaagctcggggcgaagctgatcctgcaggccgtcctggacatgggactgctcttacacgtgaacgcatatgttaaccccaagtgctgcaacaactgctggtacaactggggggccgacgtgtgcgacgacgcccaccacaagtgttaccaggactgttctgagggctgcgtggtgtgcactagcccctaaaagaggcgctaagcggatatgaaatccaccgtggaatgcacctgtggcggaccctgc

SEQ ID NO: 1654 - DNA, 289 bp, Triticum aestivum
  Clone ID: uC-tsro5710004h06b1
ttgggaagaacccggcaggctcatctctttttttctcgaaaagactactgtgattatcgcacctattaagtaaccatgacgtgcagtgtggggagttatctccgtgtaaatacgcagtgcgatgagaaccgcatatggatagttcttgttatggaccactatttggtgtatgtatactgttgtgtttgtgtatgagctcaagaaagaactgttgaagcgtcttaaaaaaaaataagatttatattttgtttaactaaatttataccttatatttttatcatgttttttt

SEQ ID NO: 1655 - DNA, 321 bp, Triticum aestivum
  Clone ID: uC-tsro5710004h09b1
cccgtccttctcaattcgatctcttccaccaagccacttgagtacgcgacagaagccagtgaatcagtgagcgacaggcagagagctcggcctcgaccaagaagaagaagaagaagaaagaagcatggcggcagctatggcgggcgtgggtcgcaacatggtggcgctgctgctggtgctgaacctcatcatgtacattattgtcatcggctttgccagtaggaactctaaccacttcattaacgggctcaccaaccgtcccggtgtcggcggcaacggcgccaccttttactttcttgtcttcgccatcctcgccggtgt

SEQ ID NO: 1656 - DNA, 132 bp, Triticum aestivum
  Clone ID: uC-tsro5710004h11b1
gaccaccggcgatccgggacgtgagtatactatagttcactcagctcctcttatgctgtaggctgaccctgcatgctgtgtgtcgagtcaactggttgtagaatcgccgctgcgaggccaactgtttttttt

SEQ ID NO: 1657 - DNA, 458 bp, Triticum aestivum
  Clone ID: uC-tsro5710007a02b1
ttagtgatgccgtagtggaagcgctccctatggatgctcttgttcatctcgacactgaagcatgttcatatctacaaggtcgagtcatggtccgtgtggaagactaccatccagagcaacctgaagtctctcttcatattacctggcagccaacaccccaaagcaatgggaaggagcaattgacagaatggaagagaacccctcctggtgctttgggaagcactaccggagcgtcaaacagctggaaattgtcggggcgtgcgaggacgagttcggggtgcccaacgacctgcatcttcctgatctgcaccttctcccgcacaacctcagacggctgaaaattagttgtcctaatctgctgaatgatgaaaaccccatgccattacttgggagctggctgacgttcctgaatgtgttggaaataggggtcaagtcatacactggcgcgaccatgacct

SEQ ID NO: 1658 - DNA, 379 bp, Triticum aestivum
  Clone ID: uC-tsro5710007a04b1
ggcactggcgcggaagcccggggtcgtcccacgcgtgttctctcccgcgcgcctgctagagcgcgagcgggggctctagaagaaccaggcgtagctgcgcgcgcatgcaacaaagaaccggcttcgagagtggcacctaaacttcaacccacctggggcgccatgatacaacgtgggggactggcaagaccaaggaggtacccaactggcatcggtcctgaagcacatgtcaccaaatcgccacgctggcgtaatgagcgaacgggggaccgaaccggaacgccggttccccaaacagtggcgcagccctgaatgggaaaatggaaacacgccagggtaacaggcgcaattaagccgccggagggtgtacaagggttac

SEQ ID NO: 1659 - DNA, 222 bp, Triticum aestivum
  Clone ID: uC-tsro5710007a06b1
cttctagcggaccttcgatagggtgcggccggattcattaagcatccggagctgcgggctaccttgagagttacgaccgaacactggcgatcgcatggcgcttcggggggtggagatttctgtggagaacctgcggactgaaagatgggcagagtagatgctttcgattgctggggggacaacagagccgggaaagcccattgaacgggacaaaagaagggg

SEQ ID NO: 1660 - DNA, 447 bp, Triticum aestivum
  Clone ID: uC-tsro5710007b02b1
gttgtcgtcgccgccgaccgttgttgcggacgcgtgctccttgtcgacgagatgacgaagctcaccaagaaggctggaatcgttggcaaatatggtacaaggtacggtgccagtctgcgtaagcagatcaagaagatggaggtctcccagcactccaagtacttctgtgagttctgtggcaagtttgccgtgaagaggaaagcagtcggaatctggggatgcaaggactgcgggaaggttaaggccggtggtgcctataccatgaacaccgccagtgcggtcactgtcaggagcacgatccgtcgtctgagggagcagactgaagcttgatcgcggtcaatctgacaaaggagcctctggattttgtagttcagacgagactcattcgacgcaatatagcctaaattgacaacatacaatgttatttatcggcttgttggggttctg

SEQ ID NO: 1661 - DNA, 443 bp, Triticum aestivum
  Clone ID: uC-tsro5710007b05b1
gttattctggcaggtgccgcagtacgtggtggtaggcgcggcggaagtgttcacgtttatcgggcagatggagttcttctatgaccaggcgccagacgccatgcggagcgtctgctcggggctctccagcgcggcgtttgcgctgggcaactacgcgagctcggcgctcgtggccgtcgtggtgcgcgtgacgactaggggcgggcggcccgggtggatccccgacgacatcaacgacggacaccttgactacttcttctggctgctcgccatgctctgcaccggcaacttcgttgcgtacctgctcgtcgcacggtggtatacctacaagaagaccgctgactaaacctggcgatcactgtgccgtatgtgctagggtacttctttgatgcaaaaacgtgtaattgggaaagcttcctgtgttgcggcaaatccttgaggaa

SEQ ID NO: 1662 - DNA, 403 bp, Triticum aestivum
  Clone ID: uC-tsro5710007b07b1
gtcttttgaagggctgcacggtggagccggtagcttgatcaagtggaaccctgtggctaatgtcgatggcaaggatatctggaccttcctcaggaccatggatgtccctgtgaacaccctgcatgctcaaggctacgtctccattgggtgcgagccgtgcaccaggcccgtgttgccggggcagcacgagagggaagggaggtggtgggggaggacgccacggccaaggagtgcggcctccacaagggtaacatcgacagggaagatcaggcacccaaggtcggcgttaacggcaatggctcggccgaggcccgcgccccagacatcttccagagccaggccatcgtcaaccttacccgtcccgggatcgagaacctcctgcggcttgagaaccgcgccgagc

SEQ ID NO: 1663 - DNA, 465 bp, Triticum aestivum
  Clone ID: uC-tsro5710007b08b1
tctttctcccttgcagactacaacatccagaaggagtccactctccacttggtgctcaggctccgtggtggtatgcagatcttcgtcaagaccctcacaggcaagaccatcaccctggaggttgagtcctcggacaccatcgacaacgtcaaggccaagatccaggacaaggagggcattcccccggaccagcagcgtcttatcttcgccggcaagcagcttgaggatggccgcacccttgcggattacaacatccagaaggaatccaccctccaccttgtcctccgccttcgtggtggcatgcaaatctttgtcaagaccctcaccggcaaaaccatcaccctggaggttgagtcctcagacaccattgacaatgtgaaggccaagatccaggacaaggagggcatccccccggaccagcagcgcctgatctttgccggcaagcagctcgaggatggccgcacc

SEQ ID NO: 1664 - DNA, 432 bp, Triticum aestivum
  Clone ID: uC-tsro5710007c03b1
gttcttttcgaagctgcaatcatggcaaaaatgggagcagagcagtcaaaacctgctgaaagtatgaagtcgtcaggaaatgaagggcatgatgttccaacaattgagactgccgttgagacgcgaccagtttgctctctgtgccaggattcggattccaaaagtcgactctgctgtttgattcgtcttcaggctgccatggaaactatgatggcagagactgttgaagatggtcagaccccaagttcaattgcagagctcgcttccaaggtactctcccatgtcagttccacaagctcgctggagtcgccggctgttcaagttcttgaggataaactcgaggcagaaagacggggtgcagctgcgctccgggaagaaaatagcgccctgaagaagcgagcagaaaaagctgatgtggtcatcgcgaaaccc

SEQ ID NO: 1665 - DNA, 390 bp, Triticum aestivum
  Clone ID: uC-tsro5710007c04b1
tcgtttttgccaagctgcaatcatggcaaaaatgggagctgatcaatcaaaacctgctgattgtatgaagtcgtcaggaaatgaagggcatgatgttccaacaattgagactgccgttgagacgcgaccagtttgctctctgtgccaggattcggattacaaaagtcgactctgctgtttgattcgtcttcaggctgccatggaaactatgatggcagagactgttgaagatggtcagaccccaagttcaattgcagagctcgcttccaaggtactctcccatgttagttccacaagctcgctggagtcgaccgctgttcaagttcttgaggattaacttgaggcataaagacggtgtgcagatgcgctccgggaagaaattagcgccct

SEQ ID NO: 1666 - DNA, 398 bp, Triticum aestivum
  Clone ID: uC-tsro5710007c09b1
gttcctcagcctctaaggtttgctcatacggaagcagttgagccaagatttgccattctgttgcagagaaggggctgggatgcatcatactgcaaaaggggtgggttacagtgtacaaatatcggggaagaggctgtaaatctatttgacatgttcaaagatctatcggttttaaatgtgaaggcaacctctctgaacctcttaaatgatgaccctgaaatgctagggtatctcgagcaaattggcgatgtagctcaagagggtaatgttctcatctcaccaatggaaattcaggcatacaagttagacctacagccaccatcatcaccagaagaatagtatgtcgaaactgtacgtttgggccgctttgccactaattggagaaaggatctacttgg

SEQ ID NO: 1667 - DNA, 394 bp, Triticum aestivum
  Clone ID: uC-tsro5710007c12b1
tttgtctagagtgctgctgctgctgccccaaagaaggctttatgccaaggaggtagaggtggacgatgaggaggaataccacaagttcaagtcggtgatcaatgatgacgatgacgatgagggttgcgaccaggacgaggaccacgaccagtgaagcggacaatgcgggagctgctgtgcgagaagcgacctgagctgtgtgcggtggtgtcataaggagcctatccatgtgcactagaattataccaagcttcacttgacatcgcgatgtaacattaccttattttttgtgattgaccggctataaccgatagcgctccctgtaggcgccgctgccggcggggtgcccttgtgttggagggtgtatgctcccagcgcctggggggccctgctt

SEQ ID NO: 1668 - DNA, 61 bp, Triticum aestivum
  Clone ID: uC-tsro5710007d01b1
tttatcccgcacccgcccaccagagacacagggcaggcgtctcaccacccaggtccagctt

SEQ ID NO: 1669 - DNA, 441 bp, Triticum aestivum
  Clone ID: uC-tsro5710007d06b1
ggcttctcctactagtctgaaaatctctctcacatcgataagagaagggaggctgcaaactgttggtgagtgcttgcgccgagaatatagaatggtttgccatgtgatgcgcggtgacttcagcagagacttctttgagggatgcagggcgatacttgtagataaagatcgaaacccaaagtggatgccgccaactctggataaagtgcatgacggggtagttgcaaaatatttctccaaggtcgacgatccacagtgggaagatttgaacctgccaactagaccttcccatggaagaagaattgttcccaagctctgatggaagtctcaggctggtcatagtgaggagtaacttatattagtgtcatgcatataatactagcctaagttactaccttcatagtgcaaaaaacatagtagtagtgtcatggaggactttat

SEQ ID NO: 1670 - DNA, 78 bp, Triticum aestivum
  Clone ID: uC-tsro5710007d10b1
ttggcgcgtgggaaaaaaaaaaaataggggggggttttttaaaaaaagaagcactttttcaaaaaaaaaaaaataggg

SEQ ID NO: 1671 - DNA, 116 bp, Triticum aestivum
  Clone ID: uC-tsro5710007e01b1
ggggaggaattcatggcccaagagacagtgattgggcacctggggatctaagatgagaaactgaaccgccatatgggcatggcggagcctaacgaaggactggaactgcttgtgga

SEQ ID NO: 1672 - DNA, 473 bp, Triticum aestivum
  Clone ID: uC-tsro5710007e02b1
tttgtttgttgcatctttgaaagatgattgagggggcaaggttccacaatatgttaggtggtggtggtgctggcatcggcggcggcagagggaagctggagaacgagggcaacggcttctacgacatgccgtattaccacaaggtcggggagagctcccacatgtcggtggacagcgcggacaacatgaactcgatgaactacgtcggcggctcggtcgccatgtcggtggacaacagcagcgtggcctccaacgagtcccgcaccgtcatgctcaaccacccgggcctccgtgatgttcccacaccaaactattcggtttgcaacagcgtcatctatcccaacaaggctgccgcgtctgtcctcaaggaggatgctttggctcgggttttgatggacccaactcatccaacggagatactcactaactacgaggcgtggaccattgatccggggaagctggacatgggggct

SEQ ID NO: 1673 - DNA, 400 bp, Triticum aestivum
  Clone ID: uC-tsro5710007e03b1
ttttctcgtacggctcgacggataagtagctagcatgatttccggaaggaagggcggcctctggaagaaggcagtgaccaggttcgtcaaggccgggctccattttcccgtcggacgattctggcgctacctaaggaagggccgctacacgcagagagtacgttcctgcgcccccgtctacctgggcaccgcactggagtacctcgctgccacggtcctggagcttgccggcaactctgccaaggacaacacgaagacccgaatcatccctagccacctgctgttcgccggacgcaacgaccaggagctcagcaagctgctcgccggcgtcaccatcggccacagcggcgtgatccccaacatcaacttccggctgctcccttagaagtcccccgccgcc

SEQ ID NO: 1674 - DNA, 307 bp, Triticum aestivum
  Clone ID: uC-tsro5710007e04b1
atacgttttttcctaccgctcatccgaaacgtgagttgactattattcagtcagaacggctgctgctgctagttggccctgatcagattgtgcacggacaactggtataatcatggccctccattctcattgtttctatgtagaggacgctacgaccaaagagcaacttactgccccacttcgttcgttggaacaacaactgagccctgatgtgaccctgacggggaccaaagaagaactggtgctacgggcagcacaactgcaagaggaacttgttgccacgaggtcttagcatgacaactcgacc

SEQ ID NO: 1675 - DNA, 434 bp, Triticum aestivum
  Clone ID: uC-tsro5710007f02b1
gtttcgctgttcgtgatgctggcccgggagcccatggtgcctttcatggaccggccattcatgaccagcatcgtgttcgcgcacgacaaggagggcacctctgtgctcttcaaggtgctctccgccttcgccttccgtgacatcagcctcaccaagatcgagagccggccgcaccggcccatccgccttgccgacgatgccgacagcggcaccgccccgaagcagttcgagtacatgttctacgtggacttccaggcctccctggccgacccgcgcgtgcagaatgcacttgctgaggtccaggagttcacgttattcttgcgggtgctcgggagctaccccatggacatgacacctatggctgccggcgttgcctcactcgattccttgtcggcttattcgtcttctttgattggatttgatagagttaatta

SEQ ID NO: 1676 - DNA, 484 bp, Triticum aestivum
  Clone ID: uC-tsro5710007f03b1
tatgatctataactgaaatgaataaagaagaacaggggggatttttttggaacatggagaataataaatgccttggtgtgctgtcagggcacacttttagtgtgtagtctctgacatgccattggggggggcctgttctggggatccagggttcctgcgccgggtttgctgcgctttgggtttttttttgggacccctaattcaaatttgggggcggtgttttcacaactgctgggccgggaaaaccccgggggtccccaagcttttcttcttgtggagatttcccttttcatccaggtgctgttttgacaataaggccctctcttttggcctttctaatgggtggtgcatcctgtgggggtattgggagccccctgttcagggcattttattcggggtggtggagttggttccccccaggggaaccctttctttttccattcccgtagccccccggttttttggatttttttccttttttttt

SEQ ID NO: 1677 - DNA, 343 bp, Triticum aestivum
  Clone ID: uC-tsro5710007f04b1
ttgttgttcacacaaaaaacaaacacaaaagagggggattttttaaaaaagcaccgtcgatgtctatggcctgccccagttgaggccgctttcccaacctaccggcataaaccctggccccttattagggggcggccctcttgggggtcccaactttcctaacgctgccctgcaagcccatctcccttctttggggcccccaaagtccacttcacggcccgctttctaccaccgttggaccggggaaaccccggggggcccccccctaattggcctgggatcacacccccctttaccctgggggcttttaatgtaaagggcccccccccgatggccttcccca

SEQ ID NO: 1678 - DNA, 164 bp, Triticum aestivum
  Clone ID: uC-tsro5710007f07b1
tttgttacgcgtccgaccacgcgtccgctctagggggaatgttcccacactggctctacttacaaaaaaaaaaaaaaaaaaaaaaaaaacaaataaaaaaaaaaaaagaaagaaaaaaaaaaaaaaaaaatacaaaaaaaaaaaaaaaatacaacaaagggaga

SEQ ID NO: 1679 - DNA, 481 bp, Triticum aestivum
  Clone ID: uC-tsro5710007f09b1
tttctaattactgactgcatcaggcgaccaatctgtaaagatatggagcatggtgaataagaaatgccttggtgtgctgtcagggcacactagaagtgtgaagtcactgacatgccattcttcaaatcctgatcttattatttctggttcaagagacggttcttttgcactttgggatctaagatgtgacccccaaaccccaaatggtcatggtgaagcatgactcatgtgtcgaattgttgatggaggcttcaggccgtccttctcaaggagatgaggctggccattaaggatctggggtgaaggtcatgttatctcttctcgtggctctactgcccactgcttccactgctgatattttgagctctttgatcagagcatgcaccatgggaagatgaaattggagcaaaccaagccaacataatctatgtccctttaggaggcgagtggatgcccgaaagatgttgggggcgtgaactgt

SEQ ID NO: 1680 - DNA, 261 bp, Triticum aestivum
  Clone ID: uC-tsro5710007f11b1
gtgttttccggaatgacgtcgcgggagagaggaagaagataatgtgtggagcacgctgttgctacctgcccacgctatgagcagtgtgaataaccaggagcatgcatgccgtgcctgggtccgggtgcaccggaggctggcatgtgagcaggggtgcaacagtgaggcagacgaaaaaaggctggtgttaaagggaagggaaggttacgcctttcttgcaactaaagaagaacccatgtaaacctgtgtatggaggaaggg

SEQ ID NO: 1681 - DNA, 376 bp, Triticum aestivum
  Clone ID: uC-tsro5710007g03b1
tttctcgtgggcggacgcgtgggcggacgcgtgggatctatgtattactgctggggctttagtccttcgcttccagcggcggctcaagacggctgagagagtgatgggaaccgtgaagcggttcaacttcaccaaggggttcggattcatcttcgcggaggacggcagccaggacctcttcgtccaccaggactccatcaaggccgacggctaccggagtctcaacgagaacgacgttctcgagtttgaggtcataaccggcgacgacggccgaaccaaggtcttcgacgtcaccgcaccaggagggggcgcgctcgccgggggatcccgccctggccaccgctgaggtgaccgcgggggtatccgctggggtggc

SEQ ID NO: 1682 - DNA, 78 bp, Triticum aestivum
  Clone ID: uC-tsro5710007g04b1
ccaccgggacgccggggcgggcgggggggatttattaatcaccgctggggctgctgcccgccgacgccgaggacggcg

SEQ ID NO: 1683 - DNA, 263 bp, Triticum aestivum
  Clone ID: uC-tsro5710007h01b1
aaaacggttgttattcaccgagtcctactggtcggggggggaggtttttgaaatgccatcaggggatttctcccataacggcgataactttggaagccaacaaaacgcggtatcatgggccgggttcaacattggctgaagatgcccggttggacgagtaccgaagcaccttgcgtgggactagtcatattgggggaagaactgaaccttgaggtaaggctgggtgctgccagagaggatctaagccttcgtctagccaatct

SEQ ID NO: 1684 - DNA, 360 bp, Triticum aestivum
  Clone ID: uC-tsro5710007h02b1
tcccatgcgatttgttaatgacacaccctgcatttgaagctgcgcgccttgttcggaagccgggggccccttgctacggctgagacataggccaggggagaatcaacagttcttactccttggtttgcacctgtgtgctgccccgtggcttcaaaccctgccatgataagcagttaagcacacaacttgctgaacgaaatgacaaggaactactgttgttggtgtcaaaacaatgatataattgggaatgtgagatcacggacatcggtcagagaaacccctgcactgtaagctgcatgcactcgtaccgtcgtacataacctgtgatggtgtgagagtatacgtgaataacgggggggt

SEQ ID NO: 1685 - DNA, 354 bp, Triticum aestivum
  Clone ID: uC-tsro5710007h03b1
gttcttcacaccatcttaattaccctgacagagatggttttgtcttgtgttagtgaagctcgctcggctagaaaaaacatggcggcttcccgtgcctcggctgcactgcttgctgtggcggtactcatggtctgctctccggcgcctcctgttctggccactgacccgacccagctccaggacttctgcgttgctgatataatgaaccctgtgattgtgaatgggctcgcgtgcaagaacatgaatatggttacggctaacgacttcttcttgcccgggcttaacaagcctggcatgttgcacgctcacggctccgcggtgacacccgacactgcgcggcagctgccggggctg

SEQ ID NO: 1686 - DNA, 426 bp, Triticum aestivum
  Clone ID: uC-tsro5710007h08b1
tttctaagctcatcttcttctccttgaaatcttttggggttcatcagatttggaggatgtcttgcaactgtggatccggttgcagctgcggctcacactgcaagtgcgggaaggtgtaccctgatctgacggagcagggcagtgccgccgcccaggtcgccgccgtggtcgtcctcggcgtggcgcctgagaacaaggcaggtcagttcgaggtggccgccggccagtccggcgagggctgcagctgcggcgacaactgcaagtgcaacccctgcaactgttaagctgcatgcactcgtaccgtcgtacgtacgtgtgatggtgtgagagtatacgtgaattaccagcgtctgatctgatggagtcgagcaagggtgcgtgtgcatgtgcctgtggtttaccttgcttcgtctcccctatgctctg

SEQ ID NO: 1687 - DNA, 222 bp, Triticum aestivum
  Clone ID: uC-tsro5710007h11b1
gtctttaccacccagagcagagccgcggcaggggggagtgtacacagcgacgggggtccttttcgccagcgcgctggtggcgatcccgagctcaatggcgctgatggaccggctgcggctgggccggctgtcggcgggcccgcgcacgaggacggaggagggcaacctgcggcagatcaagccggggcggcaccgcaacttccaggagtgggcgaagcggac

SEQ ID NO: 1688 - DNA, 334 bp, Triticum aestivum
  Clone ID: uC-tsro5710017a02b1
tgcgggatacccgaaacacgggatttctttcgagggtccggagcgagagctcaccgggacctagacagcaccgaacttgcttggggcgaggcctgacgagttggggcacggacatgagagacagtcatgggccctttgacccaggagtccactgtgttaaaagtgaacactagagacaaactggaacaacagcttaacgcttagctgggggaacaactgaacatttatagggagactggccgggaccaaagataaactgaaaatacgagcggcagaaacaaaagaggagctcgaagacacacagactaagaacggtaacaaccgaggtggtaca

SEQ ID NO: 1689 - DNA, 151 bp, Triticum aestivum
  Clone ID: uC-tsro5710017a05b1
ggtccggcctttgcgggtggccctaaacgcgggttggtttccggcgccccgacgcgtgagttcaccaggatacatgcagaaaccgatgccgctgatgaaacagccgcgcagagtaagtggccaacaacacggcacaggaggacctgagagc

SEQ ID NO: 1690 - DNA, 52 bp, Triticum aestivum
  Clone ID: uC-tsro5710017a07b1
gagtccttttaatattacccccgcgtcgctggcgttccgggatgggcttttt

SEQ ID NO: 1691 - DNA, 485 bp, Triticum aestivum
  Clone ID: uC-tsro5710017d02b1
gatggatttctatgaaaggatgggtgatacattagctatccagtacggtggttctgctgctcacaacaagatcttctgtgagcaaagagggcagtggaaggcagcaacccaatcccaggagttccttcgaacccttcaacgttactacaataatgcttacacagatcctgagaagcaggatgctataaatgtattcttgggtcatttccagcctcaacaaggcaaacctcctctgtggaagttggactcagatcagcattacaatatcggccggcaaggaactttaagtgaagaaactggaagatatggccgtgtgggaataagcgagtggtgcatgtaccacttaagtggggcactagtgactgcatggtgcctacatgtgatgtgtgcttgtgggaatatttctataagcatgtaatggttcgtctgtgttaacgtgaacacacgtctccgtgtgatttctattgtcaaaacacctacatttc

SEQ ID NO: 1692 - DNA, 402 bp, Triticum aestivum
  Clone ID: uC-tsro5710017d05b1
cccgctggatgcggacgcccagcgcgaaggcaacaacgcctctgcccgatacccgaaaaacaggtttacttccggcgacccggcgcgagcagccaccatgagtcagacagcaccgccgaagccgctggcagaccccgaggagcccgcgaccgaacaacaggcgaaaccatggcacctacggggccactgcacactccgcggaggagcccaacgacgaaagatgaacagaatggcccgccaccgccccgcagggagaacacaccgacaccgcgacgaaagcccagacggggaacgaaagaagaaccggcgcctccgagaggcagacctgaaagaggagcccgacgacacgaggcccaagctcggcactggccgccgaccaacaacgccgggactgggaaaaac

SEQ ID NO: 1693 - DNA, 60 bp, Triticum aestivum
  Clone ID: uC-tsro5710017e09b1
ttgtttttcttgtgcatagcggttctacagggggggatgttttttttagcacccatcctt

SEQ ID NO: 1694 - DNA, 264 bp, Triticum aestivum
  Clone ID: uC-tsro5710017h10b1
gggcgaggcataacgcctctgcccgtacccgaaaaaatggtttccaccggcgcccggcccgcgaggggggatgattagacacaccgctgctgccccggctgaccctgcgagatcgagtccgcccaactggcgaatcacggccctccggggccactgttcctctgcggaggagtccatgactaaagaagaactcgattgacagtctccgatcgctgggagaacaactgaaccgcgatgtcacctcagacaggtacgaaagaagaa

SEQ ID NO: 1695 - DNA, 68 bp, Triticum aestivum
  Clone ID: uC-tsro5710018a05b1
cgggacgggcggggtagaggcacctaacgcgcggcaaccggccggcggaccacaacggcgcgcgcgac

SEQ ID NO: 1696 - DNA, 218 bp, Triticum aestivum
  unsure (1)..(218): unsure at all n locations
  Clone ID: uC-tsro5710018a06b1
gtgcttccagcgngaatgaccgaggccagcgggggggccttatgcaagaagacctacaggacagcacatctgatggaagagtgaaacaacccgacccccgagcagaaccaaggccctcagagacaaaagaaaccctggagaagccagcagaacaaaaaacaaacaaaccaggggcggccgacccagggaacacaagctccacacccacgggcaaccga

SEQ ID NO: 1697 - DNA, 361 bp, Triticum aestivum
  Clone ID: uC-tsro5710018b01b1
tgtctgttggatgcttgcttctaagttgaattctaagcgacagggaagagatttggtgcagctgctatgtgctccatattggaaattgggattggcttgttgattaatagtagtactacttcttagaggagattacaagaactccttaccgtcatgtttgtatgttcagatgattggtgtaccttttcgcattaaaaaagatgtttgttgtaatgcctaaaaaaaaaataaaaaaaaaaaaaaaaaaaaaaagaaaaaaaaaaaaaaaaaaggcaaaaaaaaaaggaaacaaataaaataaaataaacacaaaaaaaaaaaaaaaataaaagggggggggcctttttaggggtcccaagtt

SEQ ID NO: 1698 - DNA, 219 bp, Triticum aestivum
  Clone ID: uC-tsro5710018b02b1
gtctttcgtatgctcgcttctaagacgaattctaagcgacagggaagagatttggcgctactgctatgtgctccatattggaaattgcgactggctcgccgattaatagtactactacttcctagaggagactacaagaactccttaccgtcatgtatgtatgactcagaccattggtgctcctttccgcattaaaaaagatgtctgtcgtattgccct

SEQ ID NO: 1699 - DNA, 405 bp, Triticum aestivum
  Clone ID: uC-tsro5710018c06b1
ttctttctcgcgaaaatgtcgactgaagtggctgccgctgacatcccggtgcctcaggtggaggtagccgccgacgccgccgttgacacaccggcggcgaagccggccaaggcggccaaggtggccaaggccaagaagtccactggcccgaagaagccccgcgtcaccccggcccacccgtcctacgccgagatggtgtcggaggcgatcgccgccctgaaggagaggagcgggtcgagcaccatcgcgatcggcaagttcatcgaggataagcacaaggcgcaccttccggccaacttccgcaagatcctgctgacccagatcaagaagctcgtcgccgccggcaagctgaccaaggtcaagggctcctacaagctcgccaaggcccccgccgacgtcaagccc

SEQ ID NO: 1700 - DNA, 489 bp, Triticum aestivum
  Clone ID: uC-tsro5710018d05b1
ttctttctcgcgaaaatgtcgactgaagtggctgccgctgacatcccggtgcctcaggtggaggtagccgccgacgccgccgttgacacaccggcggcgaagccggccaaggcggccaaggtggccaaggccaagaagtccactggcccgaagaagccccgcgtcaccccggcccacccgtcctacgccgagatggtgtcggaggcgatcgccgccctgaaggagaggagcgggtcgagcaccatcgcgatcggcaagttcatcgaggataagcacaaggcgcacctcccggccaacttccgcaagatcctgctgacccagatcaagaagctcgtcgccgccggcaagctgaccaaggtcaagggctcctacaagctcgccaaggcccccgccgccgtcaagcccaagacggcgaccaagaagaagcccgccgccaagcccaaggccaggcgccagccaagaagacggccgccaagtcccccgccaaga

SEQ ID NO: 1701 - DNA, 388 bp, Triticum aestivum
  Clone ID: uC-tsro5710018f01b1
tttctttcgtccgcacaaacccaagcacatcagtagatcggcatggcgcacttccaggaggtggactactgctcggaggaggtgagggcggcgggctacccggtccgccgcggctgcggcggcgtgcaggagcacatcgtcaaggagacgttcgtgcaggagttcgacaccgccggccgccgccatggtcaccacggccgtggctccggccacttcgaggtgcgcgagagtaggctggaggaggacatcaacacccgcaccggcgagttccacgagcgcaaggagaacttcgtcgtcagggccgatgactaagcttacacgttacggagcacactacgatgtgtgtatatgtcggcatcatatatatgtatgtgtgatgttgcgcaca

SEQ ID NO: 1702 - DNA, 512 bp, Triticum aestivum
  unsure (1)..(512): unsure at all n locations
  Clone ID: uC-tsro5710018f05b1
acccacgcgtccgccatttcctgcctgaattcacattatctaagttagttgccaggtcaagcttcagacaggataggcacttggacaggaacatggatggggacaaccctgattttcagttccttcaactttatttgttcttcctctaaagatgtatgctaaaattaaaattcctttttctccaagatagagacacataaattgccataagagaagtccagagaccggcaacttttgtttgcactgttcaacttcagacaggattctcaacggagactgcgccaatttttctttcctaaggcttcgttcgtttaatcccacccccgccaggatcgagggggtatttgtcccgaaccccgntgggttttaccctcgcaggggtttggatccccgcttagcttatatgcatattcggttaaacccggacgggtttattttccatccaaaaccccctcaaacgcagggattcaccgggttttgggccacgtcttcctccgcgtggaaaaaaacca

SEQ ID NO: 1703 - DNA, 467 bp, Triticum aestivum
  unsure (1)..(467): unsure at all n locations
  Clone ID: uC-tsro5710018g03b1
ttccttgcgtattgttcgaccccccgctctcgtccaatccaagtccctttcatactaagtgacaccttctgaacatcggagtttttttcggaaaggaagttgaaacctcagcctctgcatcattctgaacattggagttaacggagctggctttgcatggcttttcctatgtgccaatccagtcttgtgatatagatgtgccatctctctctgcatgacaagttctcaggtactcttctgctgatgaanttcctccacacctgcagtgacaagaaaacgctgaagaagtggttcttcatcgacaagacagtgggctaagaaaatccagctgaaagagagacgaccgccgtaccgagcacactttttcttcgtccgacccgatggatttgagcaacggctcaccggtcatcagtgatccgatggcaatgagccagtcgttgatgggagtgctgccttccaacatgatg

SEQ ID NO: 1704 - DNA, 361 bp, Triticum aestivum
  Clone ID: uC-tsro5710020a01b1
ccacgacccagaacagaagggcaccgtgaattttacagaaacggtgcgctttgttacccgacgatcaaaaggacaaccccgaccaccaaaaataatcaaagaccttccgcgacatagacgatccactgagaaccgcacaactaaagacgaacaacaaggtcggacacgctgagatgaactaacaactaatcccggatgttataccacacggggacaaaagaaaaactggcgctccccacggaaaaccggaaagaggacattgaagacacgacgactaaactatgaactaagacgcctggaccaatcgccctacccaaaaaacgcccccacctacaaactaaagggacgcgcccaataaccg

SEQ ID NO: 1705 - DNA, 340 bp, Triticum aestivum
  Clone ID: uC-tsro5710020a03b1
ccctgaagagaacggggccgaacaaccggcgaaaacaaggccctccggggccaaagaggccccgaggaggagaccacgacgaaagaagaaccgaaagcccccctccgctcgctgggagaacaacagaaccgagatgtcaaccagacggggaccaaagaaaaactggcgctccccgaggcagaaccgaaagaggaacctgaagacacgaggcctaagctaggcacagaaccgacccataacaaccacccgacagggaaaaccctggcggaacccaactaaaaacccatgcagaaccaaccccctatcaacagcgggccaaaaaacaaaaaggcccagaccg

SEQ ID NO: 1706 - DNA, 190 bp, Triticum aestivum
  Clone ID: uC-tsro5710020a06b1
acaacacaaacccacaaacaacaccaccaaacaaaacccaccccaaaacacaaaaaccaaaacacccccccacaccaaacacccaaaacaacaaccaacacaaccaaacaacacccaacccacaaccaaaaaaacacaccaacaaccaaaaaaaccaacaacaacacccccccaaaaaacacccaaaacc

SEQ ID NO: 1707 - DNA, 359 bp, Triticum aestivum
  Clone ID: uC-tsro5710020a07b1
caccctgaaaagcacaacccccaacaaccccccaaaccaaggaccccccgggccaaagggcacacccagccaggaccccacaaccaaagaagaacaaaaagcccgccaccgcccacaaggagaacaaccaaaccccgaaccaaaaccccaccaggaccaaaaaaaaaaccggccccccccgagacaaaacagaaacacaaccccgaaaacacaaggccaaacccagacacccgcccgcccaaaacaaacacccaaacccaaaaacccccacgaaacccaaccaaaacgcccaaaaaaacaacccccccaagccaaccgaccgaaaaacaaaaaacccccccaccaaacacccaccaaac

SEQ ID NO: 1708 - DNA, 523 bp, Triticum aestivum
  Clone ID: uC-tsro5710020a11b1
ccccggagggaccggtccgatttccctttggttcacgcgtccggatccgtcggtcgatccagaggagatgggctcgttggagattacagccacggaggtggcggcgctgctggatctgaagccgcacccggagggcggcttctacgccgagaccttccgcgactcctccgtctccctcagcaccgcccagctcccgccgcagtacaaggtcggtcgtgctgtgagcactgctatctatttcttgcttccttcagggagtgtttcacatctgcatcgtattccttgcgctgaaacctggcatttctacaagggagagcctctcacggtatttgagctacacgacgatggccacattgacctcaccgtaattggtccgcacctagatgctgggcagcgcccccagtacaccgtgccaccaaatgtgtggtttggatctttccctacgttggatgttgagtcgtttgcatcccatggcagccatcttgtgaactctcggaagcgagaccccgagagcactactccc

SEQ ID NO: 1709 - DNA, 517 bp, Triticum aestivum
  Clone ID: uC-tsro5710020b01b1
aaaaccaaacaaacccacaaaaaaaaaaaaacaacaaaaaacacccaaaaaaaacaaagaaaaaagaaaacaaacaaacaacaaaacaaaaaaaaaaaacaaaacacagccaaacacaaaaaaaagaacacaaaaaacaacaaccccaagaaaacaaaaaacacaacccaacaaacaaaaaaaaaagaaaaaaacaaaacaccacaaaacgacaaaaaaacaaaaaaacaaagaaccacaacaacacaaacaacaaaacaaaaaaccacaagaaaacaacacacagacacaacaaaaaaaaaacaacgccaaaacgagaaaaaaaacacccagcagaacaaacaccaacaaaaacacacaacaaaacaaaacaacaaaacaaacaaaacaaatacaacacaacgagacacaaaagcacaaataaaagcacaccaaacaacaacaaacccaaacaaaaaacaaaacacaacaaaacaaaaaaaaaccgaacaagaccaacaagaaaaaccagcaaaaa

SEQ ID NO: 1710 - DNA, 283 bp, Triticum aestivum
  Clone ID: uC-tsro5710020b04b1
acccagaggaggaagggagcaaacaaacggggaaaacaaggcccgaaggagccaaaggggaatgaggaggagaaaaagacgaaagaggaacagaaggcccggccacgagagaagggagaacaacagaaccgagacgacagccagaaggggacgaaagaagaaccgggagccccggggggaagagcagaaagaggaggcggaaaacacgaggcccaagacaggaacagaacggccacaaaaacaaagggaaagggaaaaccccgaaggaaacaaaaaagaaaag

SEQ ID NO: 1711 - DNA, 404 bp, Triticum aestivum
  unsure (1)..(404): unsure at all n locations
  Clone ID: uC-tsro5710020b06b1
cacccngaggaggacggggacgaacaaccggcgaaaacaaggccccccggggccaaagacacacagaggaggagaccacgaccaaagaggaacggaaagcccggccccgcacgcggggagaacaacagaaccgagaaggcagcccgacggggacgaaagaaaaaccgagcgcccgggcggcagagcggaaagaggagaacgacgacacgaggccaaaacacggcaccgagccgccacaaaaaacagccgggacggggaaaaaccagccgagacccaacaaaaaagccacgcaacacaaaccccaccccaagcagggggaaaagccaaaaaggccgaacccgagcggccccacaaacaggggcgcaacccgaaaggagaaagggcccaggagggggaaacaaacc

SEQ ID NO: 1712 - DNA, 376 bp, Triticum aestivum
  Clone ID: uC-tsro5710020b09b1
aaaaaaaaaaaaaccaacaaaaaaaaaaaaaaaaacaaaacaaaaaaaacaacccacaaaagaaaaaaacaaaaaaccaaaaaaaacacacaaaaaaaaaaaacaagaaaacacaaaaacaaaaaaaacaacaaaaaacaaaaaaaaagcaaaccaccaaaaaacaaacaaaacaacaaacaaaaaaacaacaaaaaaaaccaaaaaaacaaaacaaaaaaaccaaaaaaacaaaaaaacaaaaaacaaaaaaaaaaaaaaaaaccaaaaaaaaaaaacaaacaaaagaaaaacacaaaaaaaaaacacaaaaaaaaacaacaacaaaaaaccaaaaaaaacagcccaaaaaaaaacaaaaaacaaaaaaaacaaa

SEQ ID NO: 1713 - DNA, 269 bp, Triticum aestivum
  Clone ID: uC-tsro5710020b11b1
acagaggaggagcaccacgacgaaggaacaacagaaagcccggacacggagagacgaacgaacaaaagagcggggacgtgagccagacggggacaacagaaaaccgggcgccccgcgaggcaaaggagaaagaggagaatgaggacacgacggccaaaggaggaacaagacgagccgggaacaaaagaccgaaccggaaaacgcagcgacgacccaacggaagcgacgcgcggggcaacccccgagcaaaagcgggcggaaaggcgaag

SEQ ID NO: 1714 - DNA, 371 bp, Triticum aestivum
  Clone ID: uC-tsro5710020c07b1
aacgctgctgctcgagatccgaaaaccggggctccacccccgaaccggcgcgagagaacagtgtgacttttaaaggaccgggccggctgtcccccgacccagaggagggcgaggccgaacaaccggcgaaaacagggccctacggggccaaaggaaccccggggaggagaccacgacgaaagaagaactgaatgcccgcctccgctcgccgggggaacaactgaaccgggaggacagccagacggggacaaaagaagaaccggcgccccccgcggcagagctgaaagaagagccggaggacacgaggcccaaaccagggactggccgaagaatgacaacgacgtgaccggcaaaaccccgggggaacccaa

SEQ ID NO: 1715 - DNA, 400 bp, Triticum aestivum
  unsure (1)..(400): unsure at all n locations
  Clone ID: uC-tsro5710020c08b1
aaaaaaaaaaaaaaaccccacaaaaagaaaaaaagaaaaaaacaaaaaaaacaaaaaaaaaaaaaaaaaaaaaacaaaaaaaaacaaagaaaaacaaaaaaaagacaaaaacaaaaaaaaaaaacaccaaacacaaaacaacaaaagaaaaacaaacaaacaaaacgaaaaaaaaaagaaacaaaagagaaacaagaaacaaaaaaagacaaaacacaaaaaaaaaaaaaacaaaccaaaaccaaaagacaaaaaacaaaaaacaaaaaaaagaaaaagagaaaacaaacaacaaacagaaagaaaaacaaacaaacaaaaacnaaaaaaaacaaaaacagaacaaaaacaaaaaagacaacagagagaccaaacaaaaaacaccaagaaaaacaccaaa

SEQ ID NO: 1716 - DNA, 464 bp, Triticum aestivum
  unsure (1)..(464): unsure at all n locations
  Clone ID: uC-tsro5710020d01b1
aaaanaaaaaaaaaaaaagtgttnaattaaaagaaaaagccctttaaaaacccaaaaaaaaaaaaaaaaaaaaaaacccccaaaaaaaaaaaaaaaaaaaaaaacaaaaaaaaaaaaaaaaaaaaaacaaaaaaaaacaaaaaaaaaaaaaaaaaaaaaaaaaaaaaaaaaaaaaaaaaaaaaaaaaaaaaaaaaaaaacaaaaaaaaaaaaaaaaaaaaaaaaaaaaaaaaaaaaaaaaaaaaaacaaaaaaaaaaaaaaaaaaaaaaaaaaaccaacaaaaaaaaaaaaaaaaaaaaaaaaaaaaaaaaaaaaaaaacaaaaaaaaaaacaaaacacacaaaaaaaaaacaaaaaaaaaaaaaaaaaaacaaaaaaaccaaaaaaacaaaaaaaaaaaaaaaaaaaaaccaaaaacaaacaacaccaaaaaaacaacaaaaaaaaaaaaaaaaaaacaaaaa

SEQ ID NO: 1717 - DNA, 398 bp, Triticum aestivum
  Clone ID: uC-tsro5710020d05b1
acccagaagagaaagagcccagacaaccggagcaaacaaggcccaaaggggccaaagaaagactgggaaggagcccatgacaaaagaggaactgaaagacccgccacgctcgcagggagaacaactgaaccgcgaagacaggacagacggggacaaaagaagaacgggggcaccgcgaggcagagcagaaaaaaggagcacgaagacacaaggactaagcgaggcacaggccgaaggaaaaaaacagagtgacagggaaaaaccaggcgtaaccaaaacaaaaagcccagaaaaacaaacaccaaaagacagccggcgaaaaagcgaaaaggcccggaccgaacggccacccaacaaaagcacaaacagaaagggcgaaaggcgccagaagcggaaaa

SEQ ID NO: 1718 - DNA, 451 bp, Triticum aestivum
  Clone ID: uC-tsro5710020d07b1
aaaaaaaacaaccacaaaaaaaaaaaaaaaaccagaaaagaaaaaaaaaaaacaaaaaaaaaaaaaaaaaaacaaaaaaaagaaaaaaaacagaaaaaaacagaaaaaagaaaaaaaaaaaaaaaaaagaacaacgaaaacaaaaaagaaaggaaaagaagaaagaaacaaaaaagaaaaaaaaaaaaaaaaagaagaaaaaaaaaaaagagaacaaaaaaaaaaaaaaaaaaagaaaaaaaagaaaaaaaaaacagaaaaaaaaaaacaaaaacacaaaaacaaaaaaaaaaacacaaaaaaacaaaaaaaaaaaaaccaccaaacaaaaaaacaaaaaacaaaaaaaaaaacaagcaaaaaaaacaaaaacaacaggaaaaaaaacaaaaaagaaacgaaaagcacaaaaaaaaaaacaaccaaaaaaaagaaaaacaaaaaaaacaaa

SEQ ID NO: 1719 - DNA, 184 bp, Triticum aestivum
  Clone ID: uC-tsro5710020d08b1
gacccagaggagaaagagaccgaacaaccggcgaaaaaaaggcccaaaggggccaaagaaacaaagcggaggagcccacgacgaaagaagaacagaagggcccgccgcagcaagcagaaagaacaaaagaaccgagaagacagcccagaacggaaccaaaagaagaaacaggagcgacgagagg

SEQ ID NO: 1720 - DNA, 451 bp, Triticum aestivum
  Clone ID: uC-tsro5710020e06b1
gctaatccttagaggagtttggcctagtgccggggattgttttcatgccgatgaggattttgctgccggcgcgcccgagccgcgttcggtggttcctggcgatactcttgttggtggtggcggttggctcgctgctgttggaaggaggtgcgctggaatcctcggaaataagctcgatgtcttccctggtatgcaggaatccccttcgcttgctctcgccgacggcagtcaccatggtggtggtcaagtcgacggggactggtatgaagacggctcttgcgaccggttccagagcaaatcatcgatggtgcttgagctttggcgctcccggcggacagccggcttgcagcgccgccgcgccaccgaatcctctggccaaagggggggcaaacctcttcctcctagccttgaagctatatgggagggaggtgctactctagctcgatgttca

SEQ ID NO: 1721 - DNA, 349 bp, Triticum aestivum
  Clone ID: uC-tsro5710020e08b1
cccgaaccggcgcgagagcacagggtgacttttagaggaccgagccccgctgtacccccgacccagaggaggaaagagaccgaacaaccggcgaaaacaaggccccacggggccaaagaagccccgaggaggagaccacgacgaaagaagaacagaaggcccgccagccgacgctgggagaacaacagaaccgggaagccagcccgacggggaccaaagaagaacaggggccccaagcggaaaaacagaaagaggagcacgagaacacgaggaccaagcacggagacgagccgacgaaacacaaaaaaccagaatggaaaaacccccgcggaaaacccaaacggaaaaa

SEQ ID NO: 1722 - DNA, 376 bp, Triticum aestivum
  Clone ID: uC-tsro5710020e10b1
ggggggcggaaacgatgcccctggccgtccgaaacccggggctacaacccccgagccggcgcgagagcgcagtgtgacttataaaggaccgggccggttgacccccgaccccgaggaagaggggggcgaacaaccgaaagaaacagggaccgaaggggccagagggcaaagcggaggagaccacgacgaaggaagaacagaaagcccgccaccgagcagcgggggaacaacagaaccgggaggcgagccggacggggacaaaagaagaacgggcgccacgaggggcaaagggggaagaggaccaacgaggacacaaggcccaaacgaggaaccgggcgaacgcaccacaaaacccgagacggggaaaaaaccagga

SEQ ID NO: 1723 - DNA, 406 bp, Triticum aestivum
  Clone ID: uC-tsro5710020f02b1
aaaagaaaaaaaaaaaaaaaaagaaacaaaacgaaaaaaaaaagaaagaaaaacaaaagagaaacaaaaagaagacaaaaaaaagcaaaagaaaaagaaaagaaaacaaaaaaaaaaagcaaaaaaaaaaaaaaaacaggcagagaaacgaaaacaaaaaaaaaaaaaaaaaaaaaaaaaaacaaaagaaaaaacaaaaaaaaagacaagaagaaaaaacaaagaaggaaagaaaaagaaaaagaaagaagcaacacagcaacaaagaaaaaaaagaaagaacaaaaaaacgagagaagaaagaagaagaagaaggacaacgaagaaaacaagcaaaacaaaacaagaaaagagaaaaaaaaacaaaacaaaaaaagaaaaaacaaagaaaaacgaaggagaagag

SEQ ID NO: 1724 - DNA, 361 bp, Triticum aestivum
  Clone ID: uC-tsro5710020f03b1
aaaaaaaaaaaaaaaaacaaaaaaaaaaaaaacaaaaaaaaaaaaacaaaaaaaaaaaaaaaaaaaaaaaaaacaaaaaaaaaaacaaaaaaaaaaaaaaaaaaaaaaaaaaaaaaaaaaaaaacaataaaaaaaaaaaaaaaaaaaaaaaaaaaaaaaaaaaacacaaaaaaaaacaaaaaacaaaaaaaaaaaaaaaaaaaaaacaaacaaaaaaaacaaaaacaaaacaaaacaaacaacaaaaaaaaaaaaaaacaaaaacaaaacaaaacaaaaaaacaaacaaaaaaaaaaaaaacacaaaaaaaaaaaaaaacaccaaaaaaccaaacaaaaaaaaaaaaaaaaaacacaacac

SEQ ID NO: 1725 - DNA, 353 bp, Triticum aestivum
  Clone ID: uC-tsro5710020f11b1
gaaacccggggctaacaaccacgaaccggagcgagagaacagtgtgggttttaaaggaccgagcccgctgacccccgaccccgaggaggagaggagagaacaaccggaggaaccaaggaccaaaggggccaaagggggaaaagaggaggagagccagaacaaaagaagaactgaaagaccgccaccgccccggggggagaacaaacagaaccgcgagagcgaagccagacggggaccaaaagaagaaacgggggcccccgagaggcagaggggaaagaggagcttgaagacaccaggcccaagagaggcacaggacagaccgcaacaaagggggggaccgggaaaacccaggc

SEQ ID NO: 1726 - DNA, 145 bp, Triticum aestivum
  Clone ID: uC-tsro5710020g03b1
acgaacgggagcatgcgacgagttgtgtttttaaaggggcgatccggttgcaacccaccggccgggggtgaacaacgcggcgactggcaaaaccatggccgcaccgaaccaaagcgcctcggaggacaagcccatgacgaaagat

SEQ ID NO: 1727 - DNA, 342 bp, Triticum aestivum
  Clone ID: uC-tsro5710020g08b1
cggacacggaatgccctggccgctccgaaaaacggggatacaacccacgagcgggcgcgagagaagagcgtgacttttgaaggaccgaacccgaagtaacccgacgccgaggaggaaagagcgcgaacaacagaacgaaccagggacctaacgggacagaggggcaaaacagaggagtccacgacgaaagaggaactgagagaaagccgccctgagccgagcgaacaaacagaaccgaggggccggccggacggggacgaaagaagaacgggagccacgaagggcaaaggggagagaggagcaagacgacacaaaggccaagctgggaggggggcgacggac

SEQ ID NO: 1728 - DNA, 62 bp, Triticum aestivum
  Clone ID: uC-tsro5710020g10b1
cctcgcgcggggggacgcgggggcggacgcgtgtgcggtattgtaatgggcggacgcgtgtg

SEQ ID NO: 1729 - DNA, 389 bp, Triticum aestivum
  Clone ID: uC-tsro5710020g11b1
cccacgagccggcgcgagagaacagcgtgacttttaaagcaccgaacccgcatgaacccgaccctgaagaggacgagtccgaacaaccgaacgaaccagggccccacaaggccacacggggaaaacagaggagtccacgaagaaaaaagaacagaaagaccgccaccccaagccgggggaacaacagaaccgagaccccaaccggacagggacaaaaaaaaaaccggagccccgaagggcaaagcaaaaagagcaccaagaagacacgaggcccaaacagggcacaggcccaccccaaacaaccgccgggaccgggaaaacccaggcgcaacccaaacaaaacgcacaacaaaacaacccccaaaagcccaacggacgcaaaaaacaaa

SEQ ID NO: 1730 - DNA, 525 bp, Triticum aestivum
  unsure (1)..(525): unsure at all n locations
  Clone ID: uC-tsro5710020g12b1
ccagggcgaaggcaaaaacgccgtagcctgagactccgaaaaacggggctaccacccgcgaaccggagcgagagaacagtgtgagttttaaaggaccgagcccgctgaacacccgaccccgatgaggangagacccgaacaacccggcgaagcaaggccctacggggccaatggagaaacagcggaggaggcccaggacgaaagaagaacagaatgcccgcccccgaaagaaggaggaaaaaccaaaccgggaagacaacccgacgggggacgaaagaagaacgggcgcaccaggcggcaaaaccacaaaaaggaagcccgaagacaccaggcccaaacacggcaacaggccggcaaccaacaacgacgagaaaggaaaaaccccgaacgaacccacaacaaacaacgagagaaaaaaaaaccccaaccacaagcggcccaaaaacgaacaaggaccaaaacgaacaccccacacaaccagagagcgaaaccaaaagacaaaaggaagcacgaagaaaaacaaac

SEQ ID NO: 1731 - DNA, 227 bp, Triticum aestivum
  Clone ID: uC-tsro5710020h03b1
accgaaagccccccacccctagccgggggaacaacccaaccgagacgccagcccgacggcgaccaaagaagaaccggcgccccgcggggcaaacccgaaaaaggaccccgacaacacaaggcccaacccaggcaccgacccacgaaccacaacgaccccaaccgagaaaaccccgacggcacccaacaaaaacaccccgcaacacaaccccccacacgccaacaggc

SEQ ID NO: 1732 - DNA, 141 bp, Triticum aestivum
  unsure (1)..(141): unsure at all n locations
  Clone ID: uC-tsro5710020h09b1
gccaaaaccgaataacctttacattcaaaaaccaggatttaaaaccacaaaccggagcaaaagaaaagtgtggnctttgagagagcgagccggtataaaaccaacccccaaaaaaaaacaaaacacacaaccggaaaaacc

SEQ ID NO: 1733 - DNA, 322 bp, Triticum aestivum
  unsure (1)..(322): unsure at all n locations
  Clone ID: uC-tsro5710024a09b1
gatggggtcacctccgttgtcattccccttgcgcttgctggcaccagcttgttcatgattggccgcgggatctacaacatgtctaatgggatcgggaaaaaggagtgaatttctgtgggttttgctagtatctcagtaagcggcatggaagcaatactgcccaagctatgatgtcatcttcgtttgcaaataatattgtcagagaaagactcgggtccatttcatgttctcttttgctggtatttgcggatgcttgctaaacttgcaatgatgatgctataacatcagcatcgtccactttgcgtttnnaaaaaaaaaaaca

SEQ ID NO: 1734 - DNA, 460 bp, Triticum aestivum
  unsure (1)..(460): unsure at all n locations
  Clone ID: uC-tsro5710024b05b1
gcaactacgtgctgttggatttcggnggcatcaacatgctgcacaagggctcggtcgagcaggccgggttcgcggtgctgaaggcgcccgacattccgtcgatcctcgtcgagaccgcgttcatcagcaacccggacgaagagcgccggctcaacgacgacagctatcgcgacgagatggccgacgcgatcttccgcggcatcaagcgttatttcgccgcgaacccgccgctcgcgaagaaccggatggcctgacggccgaacctcccccgccgccggcacgcagcgcgtgccggcgcgtcacgacgccgcgaagcggcgcatcagtttcccgccgaacacgttcaccgcgagcccgcccatcacgagcgccgtgccgatcagttgcgtgcgcgtcaggtgttcgtcgagcagcagcgccgacgacgcgagcccgacgatcggcaccagcagcgagaact

SEQ ID NO: 1735 - DNA, 96 bp, Triticum aestivum
  unsure (1)..(96): unsure at all n locations
  Clone ID: uC-tsro5710024c11b1
ggccccggnngagcaggccagggtcgcggtgctcaaggacggcgacattccgtaaaatccttgtcgagaccgtgtcgcatcaggaaccaggacgaa

SEQ ID NO: 1736 - DNA, 233 bp, Triticum aestivum
  unsure (1)..(233): unsure at all n locations
  Clone ID: uC-tsro5710024d06b1
cccccccctggcccggtaaaaataaaataccctttcttgccccgccccccagcnggagcagagaaaagatcgatttgccaagtatagtgcaagtgtcccacatacgaaccttgaccgtctttggggagtggcaatcattgctcctttgtccgaacacgacgatctttccagcgcttgctctaccagatgcagaaggggttcaggcccctgaccttgtcccaattggaaagctt

SEQ ID NO: 1737 - DNA, 236 bp, Triticum aestivum
  Clone ID: uC-tsro5710024e02b1
cccgagagacggtcgcactgcgtatatggcttgggccatgttcttgggggagcctgacaagataactgatgccgctcctcgtggggacactgaccggagcagcctgacggacaaagaagaactgcctccggtgcagactgaaagaggagttgagacacaggcctaagctggcctggcgcgtttaccacgcagctggaaaccctgcgtacccactatcgccttgagacattcccctt

SEQ ID NO: 1738 - DNA, 144 bp, Triticum aestivum
  Clone ID: uC-tsro5710024f05b1
gctgggcgagcaggccggtcacctgtgctgaggtgcccatcattgcgcatagcctcgtgagaccgagttcatgagcaacgcggaccaagagcgccggctcaactaccacagctatcaacacgagacggacgacacgatcttccg

SEQ ID NO: 1739 - DNA, 463 bp, Triticum aestivum
  unsure (1)..(463): unsure at all n locations
  Clone ID: uC-tsro5710024f06b1
acggcaactacgtgctgaaggatttcggcggcatcaacaagctgcacaagggctcggtcgagcaggccgggttcgcggtgctgaaggcgcccgacattccgtcgatcctcgtcgagaccgcgttcatcagcaacccggacgaagagcgccggctcaacgacgacagctatcgcgacgagatggccgacgcgatcttccgcggcatcaagcgttatttcgccgcgaacccgccgctcgcgaagaaccggatggcctgacggncgaacctccggcccggcgggaacgcagcgcgtgccggcgcgtcacgacgccgcgaagcggcgcatcaatttcccgccgaacacgttcaccgcgagcccgcccatcacgagcgccgtgccgatcagttgcgtgcgcgtcaggtggtcggcgagcagcaacgccgacgacgcgagcccgaccatcggcaccagcagcgagacct

SEQ ID NO: 1740 - DNA, 101 bp, Triticum aestivum
  Clone ID: uC-tsro5710024g02b1
gctggtgcaatagctgaagaggccagtgaacccgccgttcacaacagcggcgccgactgaagggctgatggtacgcgcgctgagcggacaggagctcggga

SEQ ID NO: 1741 - DNA, 316 bp, Triticum aestivum
  Clone ID: uC-tsro5710024g04b1
ggtggcgtttaaagccaacccagaggaggtcgtgttacaacaactggactgggaatagcctgtcgtgacccaagttaatctgctggggagacaatgacctatgatcagctggaggaccgcctacagtgctggatgaacagcccatccgaaaggtgcgcatgctgaatgccaaagaggacctgccctgccgcgtggcataaatcacggaggacgttgtggacacgagcactaagaccggtactggttggcagcgctactacgccccgactgtgaaatctctggcgttacttaattgacacgtctggcggcacatccc

SEQ ID NO: 1742 - DNA, 265 bp, Triticum aestivum
  Clone ID: uC-tsro5710024g05b1
ctggggcgagcaggccgggactcgcggggctgaaggtgcccgacattccgccaatcctcgccgagaccgcgttcatcagcaaccctgacctagagcgccggctcaacgacgacagctatcgccactagacggccgacgcgatcttccggggcataaagcgatatttcccccgcgaacccgccgcttgcgaaaaaccgtatggcctgacggccgaacctccgccgccgtcggcacgcatagagtgccggcgcgttacgactcctcg

SEQ ID NO: 1743 - DNA, 496 bp, Triticum aestivum
  unsure (1)..(496): unsure at all n locations
  Clone ID: uC-tsro5710024g06b1
acggcaactacgtgctgtaggatttcggcggcatcaacatgctgcacaagggctcggtcgagcaggccgggttcgcggtgctgaaggcgcccgacattccgtcgatcctcgtcgagaccgcgttcatcagcaacccggacgaagagcgccggctcaacgacgacagctatcgcgacgagatggccgacgcgatcttccgcggcatcaagcgttatttcgccgcgaacccgccgctcgcgaagaaccggatggcctgacggccgaacctccccgcncgccggcacgcagcgcgtgccggcgcgtcacgacgccgcgaagcggcgcatcagtttcccgccgaacacgttcaccgcgagcccgcccatcacgagcgccgtgccgatcagttgcgtgcgcgtcaggtgttcgtcgagcagcagcgccgacgacgcgagcccgacgatcggcaccagcagcgagaactgcgcgacctgcgcggccggatagcgcgacagca

SEQ ID NO: 1744 - DNA, 90 bp, Triticum aestivum
  Clone ID: uC-tsro5710024g10b1
ctttggctcctgaaattttttttttccttggggcaccttgggttccctcaaaccctctgattttatgttgttttggatcattaagggtta

SEQ ID NO: 1745 - DNA, 87 bp, Triticum aestivum
  Clone ID: uC-tsro5710024h06b1
ccctgggagagcggcccgtcaactgccgtgaggtgcccgttatggccaagtttctctgagacggagttcatgaccaacgatgacctg

SEQ ID NO: 1746 - DNA, 266 bp, Triticum aestivum
  Clone ID: uC-tsro5710024h08b1
aaccgttgacttgctggcaccaccatgtacaggaaaggccgagggatctacaacatgtataatgggagcgggacaaaggagtgaattgctgggggctccgctagtagctcatttagcggcatgcatgcaatactgtccaagctatgatgacatctacgtttgcaaatactattgtcagagagagactgggggacattgcatgttctctattgctgggatttgcggatgcttgctaaagttgcaatgatgatgctataacatcagca

SEQ ID NO: 1747 - DNA, 404 bp, Triticum aestivum
  Clone ID: uC-tsfl19316057a02b1
cactggttccttatgctgccgtgtaatattaacatgtttgcgtttttgtttgactaactcctgttgtttttcccttttcagaacttcaaaaattccaagagcttgggaaagaagaacctataacatcactgcatgatggaggagaaagcagcagttgcatacacgcaggacacgaaggagctagtgaagcaagctcttcttaccggtttgggtctgaaaagatgggagaaatggaattaacttctctagattccgagatactaaacctggtgaacaatgtagagcatctggagatcaaactagaagaagcaaagcgtattcttgaggttaaagaaacacaaatccgcgaactcgaatctaccataaacgtttcagagacgtgtaacggaggaacagagatcggg

SEQ ID NO: 1748 - DNA, 392 bp, Triticum aestivum
  Clone ID: uC-tsfl19316057a07b1
ggacaggtcgcgttggcagctctcgatcctggcagatggtgatggcgttagcggttgtttactcttttggattctgaatggatttccctggaagttttgtaacttttggtgcagaggtagatgctgattggccttccaagtatctgagtttggtattcaatgcctccactttggcattcaggtcattgtagctgcagtccagcttatggtgcaattcagataatttcttagccatttccattgagctagatgcttgtccctgtagcagctgctggaccatctgtttcatttcagcatcaggggcagcaggaccttggttttgctgaggtgcaaacccaggtggtggtggttgctggtagttcccctggaattgctgcttaggaacgaaacct

SEQ ID NO: 1749 - DNA, 479 bp, Triticum aestivum
  Clone ID: uC-tsfl19316057a08b1
tagctttccacagaacaacactcttaaacaaaattcacactgtaaaattttgcatcgtttattcttgtttagaggcatttcgaaattaaaatatagaactatcatatacgagacattgacaagtggaatggctattgactgtaactagctacaagcgatatcgtggtacattaaccggttaaatcgtatagttcccgttcccggttaagcgtggtttccaccatcacatcattccatgaatcaattggaccaggtaagcaccaatgcagacaatcattctgaacattgctcttattcttaactccagcaaaaggatttggatgcctgtacggtcccggatgcccgtctggacggagaagagacattccagtcgtgtctaatagcctgatgttggaacctaagccaaaacctttcccaaatttctgaaacacctcaagctcaacatcacgcatcacatcatctacagttttcatatttgc

SEQ ID NO: 1750 - DNA, 510 bp, Triticum aestivum
  Clone ID: uC-tsfl19316057a12b1
aactacaggcagtggtttttttcttttcgttattgtcacaagaaacagacaggtattattcatatgcaagagatggatccagcttctgggctgctgactctttagcgagcttctctgcctttgcaaccacctcatcgatacctccaaccatgtaaaacgattgttcggaaagatcatcgtacttgccatccaacaaaccctgaaacaaacacaagatgattttggtcacttactcttactctaaatattctatttgataataacaaatctatctacgccagagtaaatttagtccatctacacatagacatcacaatgaattcttctatactgaaaggcagttgtagctaaacttctaatacgcggacatgttaaggcagcattgaaagctttcaggaattcaaagcaaaatgtttgataatcatatgattatagcaaaatgttgttgtatgtatcatacctggaaactgttgatgttttctttaaggtcgacatattttccaggggcac

SEQ ID NO: 1751 - DNA, 421 bp, Triticum aestivum
  Clone ID: uC-tsfl19316057b01b1
ctttgttttcctctagaccaatgagcttgttgtgtctgtttatgtggcagttctcgagttcttaatgtttccaatcgatgaccgcatcaatgtctattgagtccttacacgagatcatgtaacagcaaacctctctgtctgttacagattcaagccctttgcatcaaatcatttcaaagtcatatactcgaatccagattgttttgtatggactttgtataagaaacttacagttgatcaaccaaagcttgcttagagagagcttcagacttatcgattttgctgccaagaatcagaagaggaatgccacttaaagacggtttcgttagcagatcattcaattcgcttcttgatatcggtacactattcttatctgcagcatcaatcacatatctgcaatattaccacagtaacatatacc

SEQ ID NO: 1752 - DNA, 427 bp, Triticum aestivum
  Clone ID: uC-tsfl19316057c11b1
tataaatgttgtctaaacactcatactccatttctaactcttatgttttgtcaaatgcattggattgtgacacatgtttaccatagaaacactagcaaagctatttactgcttctaagcaaatttttgttggtttttagcctcttttgggacaaaatgggtataagtattgtttaaacacttctacttcatctctaactcttatgattaggtaaatgcattggattgtgacacattttgaccatacaaacactaacaaagctatttactgcttctaagcaattttttgttggttctagcctctcttggaagaaaattggtataaatgttgtctaaacactcctaaaccgtatctaacttatataactagtcaaatgctttgaattgtgacaaaatttgattttgaaaacactaacaaagctatttac

SEQ ID NO: 1753 - DNA, 344 bp, Triticum aestivum
  Clone ID: uC-tsfl19316057d03b1
ttccttcccttttgctatgtatttggacaaagttgggctaaagttgggtaaattcaatgttttttttctccctaatttagcttatcggttatcttctttagtactacaatgacccgtcaaaggagaaacttttgaaaagctaacccacaaagtagcttttttgttcagttgagtactcatttcgtttttctcttatccagtctcatgtttgtcaatcttgattaggtttttgcctctcctctttcacaacttcttatcaaaggttgaaggttgaagcaatgatggatatgaaggagagaatggtgaagaaacttaagcttattacatctcttgggaacttgaag

SEQ ID NO: 1754 - DNA, 437 bp, Triticum aestivum
  Clone ID: uC-tsfl19316057d05b1
gctcgctggaagagttcgttccgggatgttttgctttgatcgacttctcggcaattaacgaaattctccctggcgtgcttggcgtaatacggccttgaattcgccggcaaaagtctcaccagcctcataacgccgccgtatactctcagcaccttcttaattttcgattaccttctgcaacacgttacccaattctaggactctaatactgtatcataaacatccatgggctcttaatgggcctttaataataagcaatcactgaccggctaaacgttcacatttgagggtctaaaaccggttcaaacaagacttttaaagcttaaatctcttgatcttttaaaccggtctctatcgattacagaaaccataactcaaaacatctctttagatggaaataaacaaaaacttttattatcttaacacaaagccttaac

SEQ ID NO: 1755 - DNA, 428 bp, Triticum aestivum
  Clone ID: uC-tsfl19316057d06b1
aaacctgttcaatcaccatttgaaaagtacagaatttcacatttattagagcttggagtttctcatatattgaaaagtttaacagcacaaaacacttacccatatggctaacagcaccgagctcttgaatacaatcccacaccatttccatatttggttaagcaagactgaagtcctctttgacttgacatgctcgatagcatacctggccccagatatggtagtccaaaaggcatatgtgccaatgacgaaagcatacaaatctacatatttttagggaatactgttaataatgtgtaacccgtgccaaagaatgactcagaagatcaaaattaacaaacattaccattgcacttgatgccatgagttattggaagaatgggaatggcactgaattagagcacgtcccagcgaaactggcacaacta

SEQ ID NO: 1756 - DNA, 244 bp, Triticum aestivum
  Clone ID: uC-tsfl19316057d11b1
gattttggtattctgattcgatctaagcaagttaaattaaaagagacataatagttcttctctcttaattgaatctttctttacaaaattatcaacaaagttataaaagaaagtcccaataaccgaagaaatcgagacttacaaggcaaagtaccaaacacaaactctctggaatcactgcacaaacatatcctacttatgttgacttcttttttctcaaatctcaaaatgaaccttccgtttg

SEQ ID NO: 1757 - DNA, 460 bp, Triticum aestivum
  Clone ID: uC-tsfl19316057d12b1
atgaaccacaaatgtcataattcattctaatggtctttcgttttgtaccaataggcaagttcgattcgtgaagcgttttgttgaagcgctttcggagggtcgtgttacagcacgaaatccgcagcatttggatctcttactggtctcaggcagacaaatctctgggacagaaactagcaactcgtcttaacgtgaggccaaacttctgaatgatatcatctctaaagactaagtgaaatcctataaactcaatatgctcctcttacggtttggtttctaagtaatctcgtttattgacaatgaaacgcttaaagaagggtactagttcctgtttgtaatcttcttttcaaaatattaacgattattttctaaggcaaataaataaaaagctatgactaatatagcttagtaaacaagtattactatcatccatttggttctactttaaaaatggattttt

SEQ ID NO: 1758 - DNA, 353 bp, Triticum aestivum
  Clone ID: uC-tsfl19316057e01b1
attcttgaatacacataatttataaacataggttagattttcttagttaaatcagtgtttcttctaaagatcgctatcactcggggtacacatcctttggtgtgggttctcgcataaactttcacctcctataggacgctcttcagagaacagaggcaagaaataccctctaagcccctttagatctcatgattgggacaaagttgatagtagaagagacgctgccaggatttcgtcctcttttggcaatacaaatctacaatggcgagaaaaaactacttctagatgcagtccaagacgggatagctttgaagtattgataacacgacgttttagcccgttttatctattgt

SEQ ID NO: 1759 - DNA, 495 bp, Triticum aestivum
  Clone ID: uC-tsfl19316057e06b1
tcttcttaaatgcatcatcatcatcatcatctaaactctcttcagattcatcatcattatctaaaacctcttcagatgcatcagtatcatctaaaccctcttcagatgcatcatcatcatcatcattatcatccaaatcttcttcagatgaatcatcataatcatccaaatccttcttcagaagcatcagtagctggatctccttctttccagcacagaggttcagttatcttcacagtatcctttggtacatcaataactggaagaatctgtacctcagcgacaataatgagtctatctctcacgagaaatccattgcctctagcatctgtaccttaccaattgcagtcagaggctacgaaggtgcgagagtagcaattgttatgttgcaatgaacagaagtttttcaaaacccaactgaatcttgtctccttttgcttgctcattattcttgatgaaacggttgaaagtggcggagcacaatagagaatcact

SEQ ID NO: 1760 - DNA, 235 bp, Triticum aestivum
  Clone ID: uC-tsfl19316057f08b1
ggctaaatcgtgactataaagccacgaattggtcatgtaaaaattcgtggtaaatatagccacaacatagccacgaatatattcgtaaccaaatggtgacgagaaaatttgtggataattcgtcgctatacaatagccacgaaaaacaacgcggcttttcgtcgcaaatccaccgaattaaacatcacatcatgcaacaacaccgaattatacaatatccacgaatgggaaacgt

SEQ ID NO: 1761 - DNA, 484 bp, Triticum aestivum
  Clone ID: uC-tsfl19316057f09b1
ttgctctagctagattgtccaaaggagcaaatatcaggatagtaaagaatctgagaatttgctgagattgttacgctgttatgaagctaacgtcgaaggttgtgtggggtagaaatattggtccgagacagaaatcgctttcattcatttaaggacggttcttgctcatgccgtgactactggtaaaaggttgtggatagatgtacaccacacatatatcattttgtggactaatgcatccactagtgacctcaccaatggaagcttcactcccaacacaaactttcagatctctctactctctacaacttgaggtcttcatttgcgaggtttgtggtttacattgccttgggactgtgggtaactttgatactttgtattcttcttggcctagaacgtaatatacgaaatttgtttggactgttatttgaaatttctaacagattctaccaaactttgaccagaaatatcaagcacgtcttcg

SEQ ID NO: 1762 - DNA, 406 bp, Triticum aestivum
  Clone ID: uC-tsfl19316057f10b1
aatactagaagaaaggcaccgacacctaacaaaattaagtgaatacccaaaatggttgtcattttatttttatctttccatacatagccgaaagggggaaaatataattcaagagtgtcgggtcccagaagtgcatgataaataccgccaaagcccaaaactgcagaagaaattaagtgaagtactccagatacaaagtacggaaaggtgtctataacttcttccccaggacctaccccccatcctaaagtggctaggtggggaagtaaaattaatccttggtcatacatgggcttttcaggtacaaaatgggccacttcaaataagttcattgctccggcccagaatacgattaatccggcatgggctacatgagcttccaaaagtttaccagataaattgataa

SEQ ID NO: 1763 - DNA, 471 bp, Triticum aestivum
  Clone ID: uC-tsfl19316057g01b1
tgagtttggtggaatagagttctaacaatttcctcttcacctggtcaccggtagaagaaatgggtcaatgttagtaatcattacacaatgaactaaaatgtctttatctttgtggtcttatatgtttcttatcaccttttgctccatcaaacaaaacttcatgaatttgattattctggatttttttagaacacgtagttcatgtgactatttatgtggttaaggtctctactataatttggagtatccccaacgctttagctgtatatgttaccttggatagagttctaagatacaaacattgtataatctttttaaatgattctgataaactgatactgatcataataaaccaatatgagaagtagcacacaaaaaaaattacaatctagtgatttttagtcaacttacttttggtttctggaattggaggaaccacctcttcagcttcagctgctgcagcaagtgttt

SEQ ID NO: 1764 - DNA, 463 bp, Triticum aestivum
  Clone ID: uC-tsfl19316057g02b1
agacaatcgctacttacaaggagaagcttctagcagcgaacccatttttaactgtttttcctgtctttctctaacctgaaaagaagacatcaatattatactcagctggaatttaaacgttttggctggaacgataaaccggccaaagaactcacctggcaaaacaattactgaccctacgaagacgccataaacgtagcatactgaaaataccatatccctgaatactctcatgaagcaagctcccaaaaatttcgtaaggaaatgtggaaaccacgtcgaaaatcagccaagtcgacgcatatctccaagctattctctttggatcatcgacaagaagataagttaccttgtccagaaggcaacaaagaatgtcaagactatatcaacagcgaaaaacccgttgacaatgttatcgagaatactgagaggtggtcttggcttttgcagaaacccaaattca

SEQ ID NO: 1765 - DNA, 323 bp, Triticum aestivum
  Clone ID: uC-tsfl19316057g04b1
ctgtttggtttgtggattttgcacagttttaggaaattcacatattaagaagggaaatgaattttgactattaacatacctgttcaagtgcattaggtcgggattcaaaaacaatcagaagtacgcctaatggtgatgaggttttctctaagacaagaccatttgccacctgtaaaaggaattgtcacaaagaacaaatagcattaacaactattgtatgtcaactaggaggatagtcatattccttatttaactcatgagtatgtaaattaactatatggtaacaattgtcctctgatcacctctgttttctttaaaacacg

SEQ ID NO: 1766 - DNA, 443 bp, Triticum aestivum
  Clone ID: uC-tsfl19316057g07b1
agcctataataatgcgacagaagctactgagagtctgagaccacaaaagttgaacatttttgttacctaattataatatgctaagtagagggcactttactttgggtgtaaatgtaacagaaacccctgaaacgaactcaagcgcctcgtatgatgtgtggtttggatccgcatagacctctgtattgagagaaagttgattacagataattagatcatctcataaaaggaactactcaccaggcttttttagtaatcaagagaaaacatacctcctttaaacttagtctgttccacaaaagtattagcctgcatacatagatggtcataacgtgagaagcagcagcttaaaactgcttacgcttacaaaaattgcgtattcaaaatgttgtttacctgatcgatgctttccggtccgatcagaacaagagcaacaccagatg

SEQ ID NO: 1767 - DNA, 440 bp, Triticum aestivum
  Clone ID: uC-tsfl19316057g11b1
aatgcattagaaacttgggctacagaaaacgtgaacttttttaagatcccaacgaaaccttcaaagattatcattggtatccaactattgcatgctctggatatccaactattgcacgctcttcaactctcatcaacaacttttattttgacaaatgttgcgtcattcttacaagtttgccatataaaagaagcttatctatagctgcaaaccaggagccccgaaacaatggtttcatatgctgagctcttgtttgaatcaaatagactgtagaggagaaatcggcaaaaaacacaaaataaataaaaaacgacccagttgtatatgtttagatcaggatttaagccaggattacaaagacgccatccggctttgtggtagaccaacaacacagctgtttttggaacctcaatacagaccaccaaaacagttcttgctcc

SEQ ID NO: 1768 - DNA, 265 bp, Triticum aestivum
  Clone ID: uC-tsfl19316057h01b1
tgaaatataaatagatgttcccttcgactttttgagatttcaactatatcgaactcctcgtcctaagaggatgattttacgttgatgcgacataacagttccgactcattactcatttttgtgatatcatggttaggggaaatcaacgactcagaaccataaacttgggaattaccacccaatgggagaagaatggacaaagaatttccttgggctctgtgatcaaactctgctggcacttctcttcctggtaacagaaccgacc

SEQ ID NO: 1769 - DNA, 383 bp, Triticum aestivum
  Clone ID: uC-tsfl19316057h03b1
atgcttttcactttcctatatatttatgaaaactgcagtttcttatcagcccttttgtaccaaaactgattggaaagttccccccggagccgaggacagccattacagcgacaaataagacaatcattgatcctaacaactgcaccattttactcaacttatcagcgatttttcgagatttccatatttattgcagacacatgaaactaaacattgttaccaattctcaaaaggtgaatgaaaaatgttctacaaaatgtaagcaacgatgtattagtgtacctgaagacgcaaggagagccacaagcttgcgattatctctgagtaagaagtccgctggtatagcgtcaaatgctcaataaatttacctacaaaatgctcct

SEQ ID NO: 1770 - DNA, 431 bp, Triticum aestivum
  Clone ID: uC-tsfl19316057h04b1
cgtactctcaatcttgtttcgtaagaaaatgtgaaaagaatataaagatttgaacaattttattcctgtttcttacaagcttagagcaatcataatacataacgattgtaaaacagtacagagaaaagttcttgtcatatttttacatacttaatctgaagttttcttgttctttcttgtttaaggttgagaagaaatcaacagagacacaagcaaagaagcaacgattgtaaacattaaaattccaatatgattcactccgttactcatcactacttggttttctgtatgtacaacagagataataatcatagctatggactatggttcaagcttcatctgaagcgttggctcagaacctgcaacataaagatacgagactttaacaacataagagatagttctatagtttcgatagacgaatttgcttc

SEQ ID NO: 1771 - DNA, 470 bp, Triticum aestivum
  Clone ID: uC-tsfl19316057h05b1
aaggatttctttatgaacacaaggtagtgaactccatttgttagaacagcttccattgattctctgcacttatcccttttttcgcgctttgtaaactccggtttgttcgcgtaaaccaggatttggctcaggattgcccattgttaattccagggtttctctgaatttgaaagttatcacttagtaggtttccataccaaggctcaatccaattaagtccgtagcgtctaccaattccgccatatccccttttttaggatctcattatgatgtctttccttttttttcttatgccgaaacctcgggattcattacattatagatacttattttatgtctttgctatcttcttttatttttttgagctccatccatattgatttagtctaatcaacaaagattctatcatttttgtatttgcaattcaatatggttatatattacataacatatatatgttcttttttttt

SEQ ID NO: 1772 - DNA, 465 bp, Triticum aestivum
  Clone ID: uC-tsfl19316057h06b1
agtatataacataggtgcgaagttaaaaaatgcaggtgggactattgaacgtggatggattctacgattcactattgacgtttataggggaggcagtggacgaaggcttcgtctcctccaccgctcgccgtatcattgtctcggctccaaacgctcctcaattacttcaacttcttgaggtttttttatttgcctttcattactttttgattattctatttaatactatagactaaatgaacgaatcccaaaataggataattaaattaattgaattcatttgtaatcgcaggagtatgttccaaaacacgacgattttgtattcaaaatggtgtgggacaataccacggatgctttcactttggaaggcgactcgttttagatataggtcatttgtatcttagtctacttttattttattattaaaaatctcggtttttattggccatttcaaatttttgattt

SEQ ID NO: 1773 - DNA, 514 bp, Triticum aestivum
  Clone ID: uC-tsfl19316057h09b1
cattttgaccacggaaacactaacaaagctattgactacttttatataatgttttgttcgttttagcctctggggacacttaatgggtataaacgtattctaaacactcctaatccatctttaactcttcttattagtcaaatgcattggattttgacacatattgaccatagaaaaaccaacaaagctattgactgcttctaataaatgttttgttggttttagcctcttttggaggaaaatgggtataaatgttgtctaaatactcctactccatctctaactcttacgattagtcaaatgaaatggattgtgaaacatttttaccatagaaacactaacaaagctatttatttcttctaagcaatttttttgtttgtgttagcctcttttgggacaaaatgggtattagtgctgtctaaacactcctaatccatctttaacacttataattaggcaaatgaattacattgtgacacatttgaacatagaaacactaacaaagctattaact

SEQ ID NO: 1774 - DNA, 381 bp, Triticum aestivum
  Clone ID: uC-tsfl19316057h12b1
tttttcttcagtacaggactaatgtttgccaagtttcaacaatacctttcccggggccaacattggggatttcaaatttgcgtgggtttgccttaagaagagctctaacatgagcatcaaccaaatcagtgacatcaatgtggatcccgtacgcaagttccatcaccggttttgcagtctggtcctttgatctggggaaaaagaaaagttaaatgaatatcaatgattagagaagcttgaaagcttatagccatgtgcatgtaacaaggagactaatttaaacactgctttaataaaggaaactcaagaattacgtggctcaattatgtattttgctcagctggaaactataactacttatcagctcttttacacgcatgt

SEQ ID NO: 1775 - DNA, 201 bp, Triticum aestivum
  Clone ID: uC-tsfl9316001a04b1
cccgcacctagcaaatggtccgccaagaaagccaactgacgggattgcacatgttcagacacagtaatgctgctgctgctattcaacgagatcgattctaacctcaaagcgcccagatcccaatgacgagctagtggacgatgtccaccacgttgcagtcgcgccatgggccccgaatgcgaaccccggcgacatggcctg

SEQ ID NO: 1776 - DNA, 522 bp, Triticum aestivum
  Clone ID: uC-tsfl9316001c01b1
ctagcggatttggatttctttaacaactaaggttcctgtttttaacattttatagccaagggcttttgcccatctccaatagctaacaagaactctttcttttctttacaaatcccaaaacctttactagactttttctgcttctttagcttacttcacctagagtcttctaccttttcttatcattgaatcaacccctttttttttttcttttaaacacatcccaacccaaagtataagcgcccacctagtcctatctagtccgaaaaatgcgaactagaactacatgagacactatctgtgccgttacgaacctaacactttctaccaagcttaatcggaataagacctcacaaacactcacaagttatatagggcttgaaagaaagtctaggtctgggtttgggttaactgctctaataaggagagtcagctacttggattaaaaagagtgatcaaaatgaataagaaaatccaagtattttacggtatgcatgagttcaaatttgatgcagacatgat

SEQ ID NO: 1777 - DNA, 554 bp, Triticum aestivum
  Clone ID: uC-tsfl9316001c02b1
ctagcggatttggatttctttaacaactaaggttcctgtttttaacattttatagccaagggcttttgcccatctccaatagctaacaagaactctttcttttctttacaaatcccaaaacctttactagactttttctgcttctttagcttacttcacctagagtcttctaccttttcttatcattgaatcaacccctttttttttttgttttaaacacatcccaacccaaagtataagcgcccacctagtcctatctagtccgaaaaatgcgaactagaactacatgagacactatctctgtcgttacgaacctaacactttctaccaagcttaatcggaataagacctcacaaacactcacaagttatatagggcttgaaagaaagtctaggtttgggtttgggttaactgctctaataaggagagtcagctacttggattaaaaagagtgatcaaaatgaataagaaaatccaagtattttacggtatccatgagttcaaatttgatgcagacatgataattaaagattagattcaggttcaaattgata

SEQ ID NO: 1778 - DNA, 143 bp, Triticum aestivum
  Clone ID: uC-tsfl9316001c03b1
taacctcaaagcgcccagatcccaatgacgagctcgccgacgatgtccaccacgttgcagtggcgccatgggccccgtatgcgaaccccgttgacatgggctggtccgctgggccggtgctgagatccggggacttgtcccat

SEQ ID NO: 1779 - DNA, 256 bp, Triticum aestivum
  Clone ID: uC-tsfl9316001c05b1
tcttcccgcacctagcaaatggtaagccaagaaagccaactgacggcattgcacatgttcagacaaagttttgctgctgctgctattcaacgagatcgattctaacctcaaagcgcccagatcccaatgacgagctcgttgacgatgtccaccacgttgcagtcgcgccatgggccccgaatgcgaaccccgtcgacatggactggtccgctgtgccggtactgtgatccggcgacttgtcccattcgaccatcca

SEQ ID NO: 1780 - DNA, 506 bp, Triticum aestivum
  Clone ID: uC-tsfl9316001c06b1
agcggatttggatttctttaacaactaaggttcctgtttttaacattttaaagccaagggcttttgcccatctccaatagctaacaagaactctttcttttctttacaaatcccaaaacctttactagactttttctgcttctttagcttacttcacctagagtcttctaccttttcttatcattgaatcaacccctttttttttttcttttaaacacatcccaacccaaagtataagcgcccacctagtcctatctagtccgaaaaatgcgaactagaactacatgagacactatctctgtcgttacgaacctaacactttctaccaagcttaatcggaataagacctcacaaacactcacaagttatatagggcttgaaagaaagtctaggtttgggtttgggttaactgctctaataaggagagtcagctacttggattaaaaagagtgatcaaaatgaataagaaaatccaagtattttacggtatccatgagttcaaattt

SEQ ID NO: 1781 - DNA, 522 bp, Triticum aestivum
  Clone ID: uC-tsfl9316001d01b1
ctagcggatttggatttctttaacaactaaggttcctgtttttaacattttaaagccaagggcttttgcccatctccaatagctaacaagaactctttcttttctttacaaatcccaaaacctttactagactttttctgcttctttagcttacttcacctagagtcttctaccttttcttatcattgaatcaacccctttttttttttcttttaaacacatcccaacccaaagtataagcgcccacctagtcctatctagtccgaaaaatgcgaactagaactacatgagacactatctctgtcgttacgaacctaacactttctaccaagcttaatcggaataagacctcacaaacactcacaagttatatagggcttgaaagaaagtctaggtttgggtttgggttaactgctctaaaaggagagtcagctacttggattaaaaagagtgatcaaaatgaataagaaaatccaagtattttacggtatgcatgagttcaaatttgatgcagacatgata

SEQ ID NO: 1782 - DNA, 544 bp, Triticum aestivum
  Clone ID: uC-tsfl9316001d02b1
cactttgttacatctagcggatttggatttctttaacaactaaggttcctgtttttaacattttaaagccaagggcttttgcccatctccaatagctaacaagaactctttcttttctttacaaatcccaaaacctttactagactttttctgcttctttagcttacttcacctagagtcttctaccttttcttatcattgaatcaacccctttttttttttcttttaaacacatcccaacccaaagtataagcgcccacctagtcctatctagtccgaaaaatgcgaactagaactacatgagacactatctctgtcgttacgaacctaacactttctaccaagcttaatcggaataagacctcacaaacactcacaagttatatagggcttgaaagaaagtctaggtttgggttctgggttaactgctctaataaggagagtcagctacttggattaaaaagagtgatcaaaatgaataagaaaatccaagtattttacggtatccatgagttcaaatttgatgcagacatgataattaaag

SEQ ID NO: 1783 - DNA, 235 bp, Triticum aestivum
  Clone ID: uC-tsfl9316001d05b1
tcgtccacgcgtccgtccacgcgtgcgagccgacaacccaagcaaacaaactatggccgccgctccttcccccgccgtcgccgccgtcagcagcagcgcgccctcgacggggctcctgccgccgcggcgcagcaccgtcccgctgtcgtcgatgaggagcgcggcgccgggcggtaggatggcgaccgtggcgcgcgcggagggccacgtgggggccgtgggcaacacgtacctc

SEQ ID NO: 1784 - DNA, 431 bp, Triticum aestivum
  Clone ID: uC-tsfl9316001d06b1
aaagccaactgacggcattgcacatgtgcagacaaagatatgctgctgctgctattcaacgagatcgattctaacctcaaagcgcccagatcccaatgacgagctcgtcgacgatgtccaccacgttgcagtcgcgccatgggccccgaatgcgaaccccgtcgacatggcctggtccgttgtgccggtactgcgatccggcgacttgtcccattcgaccatccagttctcgccctcctcgtcggcgcttcagagcttcgccgtgaccctgcaacaggtggccccttcgaagctgtccagccacagtcgcagcggcattcagatcctggttctggacgttgctccccttccgctagacacggtgttcgtcaacctggagagcgaattgacaaaacggctggagagcggtgagggcaccttttacaaggacc

SEQ ID NO: 1785 - DNA, 513 bp, Triticum aestivum
  Clone ID: uC-tsfl9316001e03b1
cactttgttcatctagcggatttggatttctttaacaactaaggttcctgtttttaacatttttaagccaagggcttttgcccatctccaatagctaacaagaactctttcttttctttacaaatcccaaaacctttactagactttttctgcttctttagcttacttcacctagagtcttctaccttttcttatcattgaatcaacccctttttttttttcttttaaacacattccaacccaaagtataagcgcccacctagtcctatctagtccgaaaaatgcgaactagaactacatgagacactatctatgtcgttacgaacctaacactttctaccaagcttaatcggaataagacctcacaaacactcacaagttatatagggcttgaaagaaagtctaggtttgggtttgggttaactgctctaataaggagagtcagctacttggattaaaaagagtgatcaaaatgaataagaaaatccatgtattttacggtatgcatgagtt

SEQ ID NO: 1786 - DNA, 492 bp, Triticum aestivum
  Clone ID: uC-tsfl9316001e04b1
gtgttctccgacctcttcccgcacctagcaaatggttagccaagaaagccaactgacggtattgcacatgtgcagacaaagaaatgctgctgctgctattcaacgagatcgattctaacctcaaagcgcccagatcccaatgacgagctcgtcgacgatgtccaccacgttgcagtcgcgccatgggccccgaatgcgaaccccgtcgacatggcctggtccgttgtgccggtactgcgatccggcgacttgtcccattcgaccatccagttctcgccctcctcgacggcgcttcagagcttcgccgtgaccctgcaacaggtggccccttcgaagctgttcagccacagccgcagcggcattgagatcctcgtcctcgacgttgctccccttgcgatagacacggtgttcgtcaacctggagagcgaattgacaaaacggctggagagcggtgagggcaccttttacaaggaccatacgacaagccccaat

SEQ ID NO: 1787 - DNA, 458 bp, Triticum aestivum
  Clone ID: uC-tsfl9316001e05b1
actttgttacatctagcggatttggatttctttaacaactaaggttcctgtttttaacattttttagccaagggcttttgcccatctccaatagctaacaagaactctttcttttctttacaaatcccaaaacctttactagactttttctgcttctttagcttacttcacctagagtcttctaccttttcttatcattgaatcaacccctttttttttttcttttaaacacattccaacccaaagtataagcgcccacctagctctatctagtccgaaaaatgcgaactagaactacatgagacactatctatgtcgttacgaacctaacactttctaccaagcttaatcggaataagacctcacaaacactcacaagttatatagggcttgaaagaaagtctaggtttgggtatgggttaactgctctaataaggagagtcagctacttggattaa

SEQ ID NO: 1788 - DNA, 526 bp, Triticum aestivum
  Clone ID: uC-tsfl9316001f03b1
tgttctccgacctcttcccgcacctagcaaatggtaagccaagaaagccaactgacggcattgcacatgagcagacaaagaaatgctgctgctgctattcaacgagatcgattctaacctcaaagcgcccagatcccaatgacgagctcgtcgacgatgtccaccacgttgcagtcgcgccatgggccccgaatgcgaaccccgtcgacatggcctggtccgttgtgccggtactgcgatccggcgacttgtcccattcgaccatccagttctcgccctcctcgtcggcgcttcagagcttcgccgtgaccctgcaacaggtggccccttcgaagctgtccagccacagccgcagcggcattgagatcctcgttctcgacgttgctccccttgcgctagacacggtgttcgtcaacctggagagcgaattgacaaaacggctggagagcggtgagggcaccttttacaaggaccatacgacaagccccaatgccaaggacgttgccaacatgacgcccgaggagcg

SEQ ID NO: 1789 - DNA, 537 bp, Triticum aestivum
  Clone ID: uC-tsfl9316001f05b1
acactttgttacatctagcggatttggatttctttaacaactaaggttcctgtttttaacattttaaagccaagggcttttgcccatctccaatagctaacaagaactctttcttttctttacaaatcccaaaacctttactagactttttctgcttctttagcttacttcacctagagtcttctaccttttcttatcattgaatcaacccctttttttttttcttttaaacacatcccaacccaaagtataagcgcccacctagtcctatctagtccgaaaaatgcgaactagaactacatgagacactatctatgtcgttacgaacctaacactttctaccaagcttaatcggaataagacctcacaaacactcacaagttatatagggcttgaaagaaagtctaggtttgggtttgggttaactgctctaataaggagagtcagctacttggattaaaaagagtgatcaaaatgaataagaaaatccatgtattttacggtatgcatgagttcaaatttgatgcagacatgata

SEQ ID NO: 1790 - DNA, 356 bp, Triticum aestivum
  Clone ID: uC-tsfl9316001g01b1
cttcccgcacctagcaaatggtaagccaagaaagccaactgacggcattgcacatgtgcagacaaagaaatgctgctgctgctattcaacgagatcgattctaacctcaaagcgcccagatcccaatgacgagctcgtcgacgatgtccaccacgttgcagtcgcgccatgggccccgaatgcgaaccccgtcgacatggcctggtccgttgtgccggtactgcgatccggcgacttgtcccattcgaccatccagttctagccctcctcgagggcgctacagagctctagccggaccctgcaacaggtggccccttcgaagctgctcagccacagccgcagcggcattgagatcc

SEQ ID NO: 1791 - DNA, 365 bp, Triticum aestivum
  Clone ID: uC-tsfl9316001g02b1
tctccgacctcttcccgcacctagcaaatggtaagccaagaaagccaactgactgtattgcacatgtgcagacaaagaaatgctgctgctgctattcaacgagatcgattctaacctcaaagcgcccagatcccaatgacgagctcgttgacgatgtccaccacgttgcagtcgcgccatgggccccgaatgcgaaccccgtcgacatggcctggtccgttgtgccggtactgcgatccggcgacttgacccattcgaccatacagttctcgccctcctcgtcggcgcttcagagctttgccgtgaccctgcaacaggtggccccttcgaagctgttcagtcacagtcgcagcggcattgagatc

SEQ ID NO: 1792 - DNA, 455 bp, Triticum aestivum
  Clone ID: uC-tsfl9316001g05b1
cactttgttacatctagcggatttggatttctttaacaactaaggttcctgtttttaacattttataagccaagggcttttgcccatctccaatagctaacaagaactctttcttttctttacaaatcccaaaacctttactagactttttctgcttctttagcttacttcacctagagtcttctaccttttcttatcattgaatcaacccctttttttttttcttttaaacacatcccaacccaaagtataagcgcccacctagtcctatctagtccgaaaaatgcgaactagaactacatgagacactatctctgtcgttacgaacctaacactttctaccaagcttaatcggaataagacctcacaaacactcacaagttatatagggcttgaaagaaagtctaggtttgggtttgggttaactgctctaaaaggagagtcagctacttgga

SEQ ID NO: 1793 - DNA, 360 bp, Triticum aestivum
  Clone ID: uC-tsfl9316001g06b1
ctcttcccgcacctagcaaatggtaagccaagaaagccaactgacggcattgcacatttgcagacaaagaaatgctgctgctgctattcaacgagatcgattctaacctcaaagcgcccagatcccaatgacgagctcgtcgacgatgtccaccacgttgcagtcgcgccatgggccccgaatgcgaaccccgtcgacatggcctggtccgttgtgccggtactgcgatccggcgacttgtcccattcgaccatccagttctcgccctcctcgtcggcgcttcagagcttcgccgtgaccctgcaacaggtggccccttcgaagctgttcagccacagccgcagcggcattgagatcctc

SEQ ID NO: 1794 - DNA, 489 bp, Triticum aestivum
  Clone ID: uC-tsfl9316001h01b1
tcttcccgcacctagcaaatggtaagccaagaaagccaactgacggcattgcacatgttcagacaaagaaatgctgctgctgctattcaacgagatcgattctaacctcaaagcgcccagatcccaatgacgagctcgtcgacgatgtccaccacgttgcagtcgcgccatgggccccgaatgcgaaccccgtcgacatggcctggtccgttgtgccggtactgcgatccggcgacttgtcccattcgaccatccagttctcgccctcctcgtcggcgcttcagagctctgccgtgaccctgcaacaggtggccccttcgaagctgttcagccacagccgcagcggcattgagatcctcgtcctcgacgttgctacccttccgctagacacggtgttcgtcaacctggagagcgaattgacaaaacggctggagagcggcgagggcaccttttacaaggaccatacgacaagccccaatgccaaggacg

SEQ ID NO: 1795 - DNA, 524 bp, Triticum aestivum
  Clone ID: uC-tsfl9316001h02b1
cactttgttcatctagcggagttggatttctttaacaactaaggttcctgtttttaacatttttaagccaagggcttttgcccatctgcaatagctaacaagaactctttcttttctttacaaatcccaaaacctttactagactttttctgcttctttagcttacttcacctagagtcttctaccttttcttatcattgaatcaacccctttttttttttcttttaaacacatcccaacccaaagtataagcgcccacctagtcctatctagtccgaaaaatgcgaactagaactacatgagacactatctatgtcgttacgaacctaacactttctaccaagcttaatcggaataagacctcacaaacactcacaagttatatagggcttgaaagaaagtctaggtttgggtttgggttaactgctctaataaggagagtcagctacttggattaaaaagagtgatcaaaatgaataagaaaatccaagtattttacggtatccatgagttcaaatttgatg

SEQ ID NO: 1796 - DNA, 551 bp, Triticum aestivum
  Clone ID: uC-tsfl9316001h03b1
ctcaacactttgttacatctagcggatttggatttctttaacaactaaggttcctgtttttaacattttataagccaagggcttttgcccatctccaatagctaacaagaactctttcttttctttacaaatcccaaaacctttactagactttttctgcttctttagcttacttcacctagagtcttctaccttttcttatcattgaatcaacccctttttttttttcttttaaacacatcccaacccaaagtataagcgcccacctagtcctatctagtccgaaaaatgcgaactagaactacatgagacactatctctgtcgttacgaacctaacactttctaccaagcttaatcggaataagacctcacaaacactcacaagttatatagggcttgaaagaaagtctaggtttgggtttgggttaactgctctaataaggagagtcagctacttggattaaaaagagtgatcaaaatgaataagaaaatccaagtattttacggtatccatgagttcaaatttgatgcagacatgataattaaagat

SEQ ID NO: 1797 - DNA, 474 bp, Triticum aestivum
  Clone ID: uC-tsfl9316001h04b1
tgttctccgtcctcttcccgcacctagcaaatggtaagccaagaaagccaactgacggcattgcacatttgcagacaaagaaatgctgctgctgctattcaacgagatcgattctaacctcaaagcgcccagatcccaatgacgagctcgtcgacgatgtccaccacgttgcagtcgcgccatgggccccgaatgcgaaccccgtcgacatggcctggtccgttgtgccggtactgcgatccggcgacttgtcccattcgaccatccagttctcgccctcctcgtcggcgcttcagagcttcgccgtgaccctgcaacaggtggccccttcgaagctgtccagccacagccgcagcggcattgagatcctcgtcctcgacgttgctccccttccgctagacacggtgttcgtcaacctggagagcgaattgacaaaacggctggagagcggcgagggcaccttttacaaggacc

SEQ ID NO: 1798 - DNA, 469 bp, Triticum aestivum
  Clone ID: uC-tsfl9316002a02b1
gttctccgacctcttcccgcacctagcaaatggtaagccaagaaagccaactgacggcattgcacatgagcagacaaagaaatgctgctgctgctattcaacgagatcgattctaacctcaaagcgcccagatcccaatgacgagctcgtcgacgatgtccaccacgttgcagtcgcgccatgggccccgaatgcgaaccccgtcgacatggcctggtccgttgtgccggtactgcgatccggcgacttgtcccattcgaccatccagttctcgccctcctcgtcggcgcttcagagcttcgccgtgaccctgcaacaggtggccccttcgaagctgtccagccacagccgcagcggcattgagatcctcgtcctcgacgttgctccccttccgctagacacggtgttcgtcaacctggagagcgaattgacaaaacggctggagagcggcgagggcaccttttacaag

SEQ ID NO: 1799 - DNA, 120 bp, Triticum aestivum
  Clone ID: uC-tsfl9316002a04b1
acactttgttacatctagcggatttggatttctttaacaactaaggttcctgtttttaacattttaaagccaagggcttttgcccatctccaatagctaacaagaactctttcttttctt

SEQ ID NO: 1800 - DNA, 556 bp, Triticum aestivum
  Clone ID: uC-tsfl9316002a05b1
tcaacactttgttacatctagcggatttggatttctttaacaactaaggttcctgtttttaacattttaaagccaagggcttttgcccatctccaatagctaacaagaactctttcttttctttacaaatcccaaaacctttactagactttttctgcttctttagcttacttcacctagagtcttctaccttttcttatcattgaatcaacccctttttttttttcttttaaacacatcccaacccaaagtataagcgcccacctagtcctatctagtccgaaaaatgcgaactagaactacatgagacactatctctgtcgttacgaacctaacactttctaccaagcttaatcggaataagacctcacaaacactcacaagttatatagggcttgaaagaaagtctaggtttgggtttgggttaactgctctaataaggagagtcagctacttggattaaaaagagtgatcaaaatgaataagaaaatccaagtattttacggtatccatgagttcaaatttgatgcagacatgataattaaagattagattc

SEQ ID NO: 1801 - DNA, 491 bp, Triticum aestivum
  Clone ID: uC-tsfl9316002a06b1
ttctccgactctcttcccgcacctagcaaatggtaagccaagaaagccaactgacggcattgcacatgagcttacaaatttaatgctgctgctgctattcaacgagatcgattctaacctcaaagcgcccagatcccaatgacgagctcgtcgacgatgtccaccacgttgcagtcgcgccatgggccccgaatgcgaaccccgtcgacatggcctggtccgttgtgccggtactgcgatccggcgacttgtcccattcgaccatccagttctcgccctcctcgtcggcgcttcagagcttcgccgtgaccctgcaacaggtggccccttcgaagctgtccagccacagccgcagcggcattgagatcctcgtcctcgacgttgctccccttccgctagacacggtgttcgtcaacctggagagcgaattgacaaaacggctggagagcggcgagggcaccttttacaaggaccatccgacaagccccaat

SEQ ID NO: 1802 - DNA, 567 bp, Triticum aestivum
  Clone ID: uC-tsfl9316002a07b1
gttctccgactctcttcccgcacctagcaaatggtaagccaagaaagccaactgacggcattgcacatgagcttacaaagaaatgctgctgctgctattcaacgagatcgattctaacctcaaagcgcccagatcccaatgacgagctcgtcgacgatgtccaccacgttgcagtcgcgccatgggccccgaatgcgaaccccgtcgacatggcctggtccgttgtgccggtactgcgatccggcgacttgtcccattcgaccatccagttctcgccctcctcgtcggcgcttcagagcttcgccgtgaccctgcaacaggtggccccttcgaagctgtccagccacagccgcagcggcattgagatcctcgtcctcgacgttgctccccttccgctagacacggtgttcgtcaacctggagagcgaattgacaaaacggctggagagcggcgagggcaccttttacaaggaccatccgacaagccccaatgccaaggacgttgccaacatgacgcccgaggagcgtctagccacggcgctcagggcagctctcagcaccctcaaga

SEQ ID NO: 1803 - DNA, 348 bp, Triticum aestivum
  Clone ID: uC-tsfl9316002a11b1
gttctccgactctcttcccgcacctagcaaatggtaagccaagaaagccaactgacggcattgcacatgagcagacaaagaaatgctgctgctgctattcaacgagatcgattctaacctcaaagcgcccagatcccaatgacgagctcgtcgacgatgtccaccacgttgcagtcgcgccatgggccccgaatgcgaaccccgtcgacatggcctggtccgttgtgccggtactgcgatccggcgacttgtcccattcgaccatccagttctcgccctcctcgtcggcgcttcagagcttcgccgtgaccctgcaacaggtggccccttcgaagctgtccagccaca

SEQ ID NO: 1804 - DNA, 464 bp, Triticum aestivum
  Clone ID: uC-tsfl9316002a12b1
ttctccgactctcttcccgcacctagcaaatggtaagccaagaaagccaactgacggcattgcacatgagcttacaaagaaatgctgctgctgctattcaacgagatcgattctaacctcaaagcgcccagatcccaatgacgagctcgtcgacgatgtccaccacgttgcagtcgcgccatgggccccgaatgcgaaccccgtcgacatggcctggtccgttgtgccggtactgcgatccggcgacttgtcccattcgaccatccagttctcgccctcctcgtcggcgcttcagagcttcgccgtgaccctgcaacaggtggccccttcgaagctgtccagccacagccgcagcggcattgagatcctcgtcctcgacgttgctccccttccgctagacacggtgttcgtcaacctggagagcgaattgacaaacggctggagagcggcgagggcacctttta

SEQ ID NO: 1805 - DNA, 380 bp, Triticum aestivum
  Clone ID: uC-tsfl9316002b02b1
gttctccgatctcttcccgcacctagcaaatggtaagccaagaaagccaactgacggcattgcacatgattagacaaagaaatgctgctgctgctattcaacgagatcgattctaacctcaaagcgcccagatcccaatgacgagctcgtcgacgatgtccaccacgttgcagtcgcgccatgggccccgaatgcgaaccccgtcgacatggcctggtccgttgtgccggtactgcgatccggcgacttgtcccattcgaccatccagttctcgccctcctcgtcggcgcttcagagcttcgccgtgaccctgcaacaggtggccccttcgaagctgtccagccacagccgcagcggcattgagatcctcgtcctcgacg

SEQ ID NO: 1806 - DNA, 428 bp, Triticum aestivum
  Clone ID: uC-tsfl9316002b03b1
aacactttgttacatctagcggatttggatttctttaacaactaaggttcctgtttttaacattttaatgccaagggcttttgcccatctccaatagctaacaagaactctttcttttctttacaaatcccaaaacctttactagactttttctgcttctttagcttacttcacctagagtcttctaccttttcttatcattgaatcaacccctttttttttttcttttaaacacatcccaacccaaagtataagcgcccacctagtcctatctagtccgaaaaatgcgaactagaactacatgagacactatctctgtcgttacgaacctaacactttctaccaagcttaatcggaataagacctcacaaacactcacaagttatatagggcttgaaagaaagtctaggtttgggtttgggttaact

SEQ ID NO: 1807 - DNA, 471 bp, Triticum aestivum
  Clone ID: uC-tsfl9316002b05b1
ttctccgacctcttcccgcacctagcaaatggtaagccaagaaagccaactgacggcattgcacatgagcttacaaagaaatgctgctgctgctattcaacgagatcgattctaacctcaaagcgcccagatcccaatgacgagctcgtcgacgatgtccaccacgttgcagtcgcgccatgggccccgaatgcgaaccccgtcgacatggcctggtccgttgtgccggtactgcgatccggcgacttgtcccattcgaccatccagttctcgccctcctcgtcggcgcttcagagcttcgccgtgaccctgcaacaggtggccccttcgaagctgtccagccacagccgcagcggcattgagatcctcgtcctcgacgttgctccccttccgctagacacggtgttcgtcaacctggagagcgaattgacaaaacggctggagagcggcgagggcaccttttacaaggac

SEQ ID NO: 1808 - DNA, 519 bp, Triticum aestivum
  Clone ID: uC-tsfl9316002b07b1
tcttcccgcacctagcaaatggtaagccaagaaagccaactgacggtattgcacatgagcttacaatgtaatgctgctgctgctattcaacgagatcgattctaacctcaaagcgcccagatcccaatgacgagctcgtcgacgatgtccaccacgttgcagtcgcgccatgggccccgaatgcgaaccccgtcgacatggcctggtccgttgtgccggtactgcgatccggcgacttgtcccattcgaccatccagttctcgccctcctcgtcggcgcttcagagcttcgccgtgaccctgcaacaggtggccccttcgaagctgtccagccacagccgcagcggcattgagatcctcgtcctcgacgttgctccccttccgctagacacggtgttcgtcaacctggagagcgaattgacaaaacggctggagagcggcgagggcaccttttacaaggaccatccgacaagccccaatgccaaggacgttgccaacatgacgcccgaggagcgtctag

SEQ ID NO: 1809 - DNA, 564 bp, Triticum aestivum
  Clone ID: uC-tsfl9316002b08b1
gttctccgactctcttcccgcacctagcaaatggtaagccaagaaatgccaactgacggcattgcacatgagctgacaaagaaatgctgctgctgctattcaacgagatcgattctaacctcaaagcgcccagatcccaatgacgagctcgtcgacgatgtccaccacgttgcagtcgcgccatgggccccgaatgcgaaccccgtcgacatggcctggtccgttgtgccggtactgcgatccggcgacttgtcccattcgaccatccagttctcgccctcctcgtcggcgcttcagagcttcgccgtgaccctgcaacaggtggccccttcgaagctgtccagccacagccgcagcggcattgagatcctcgtcctcgacgttgctccccttccgctagacacggtgttcgtcaacctggagagcgaattgacaaaacggctggagagcggcgagggcaccttttacaaggaccatccgacaagccccaatgccaaggacgttgccaacatgacgcccgaggagcgtctagccacggcgctcagggcagctctcagcaccctc

SEQ ID NO: 1810 - DNA, 565 bp, Triticum aestivum
  Clone ID: uC-tsfl9316002b09b1
ttctccgacctcttcccgcacctagcaaatggtaagccaagaaagccaactgacggcattgcacatgagctgacaaagaaatgctgctgctgctattcaacgagatcgattctaacctcaaagcgcccagatcccaatgacgagctcgtcgacgatgtccaccacgttgcagtcgcgccatgggccccgaatgcgaaccccgtcgacatggcctggtccgttgtgccggtactgcgatccggcgacttgtcccattcgaccatccagttctcgccctcctcgtcggcgcttcagagcttcgccgtgaccctgcaacaggtggccccttcgaagctgtccagccacagccgcagcggcattgagatcctcgtcctcgacgttgctccccttccgctagacacggtgttcgtcaacctggagagcgaattgacaaaacggctggagagcggcgagggcaccttttacaaggaccatccgacaagccccaatgccaaggacgttgccaacatgacgcccgaggagcgtctagccacggcgctcagggcagctctcagcaccctcaaga

SEQ ID NO: 1811 - DNA, 448 bp, Triticum aestivum
  Clone ID: uC-tsfl9316002c01b1
gttctccgacctcttcccgcacctagcaaatggtaagccaagaaagccaactgacggcattgcacatgagcagacaaagaaatgctgctgctgctattcaacgagatcgattctaacctcaaagcgcccagatcccaatgacgagctcgtcgacgatgtccaccacgttgcagtcgcgccatgggccccgaatgcgaaccccgtcgacatggcctggtccgttgtgccggtactgcgatccggcgacttgtcccattcgaccatccagttctcgccctcctcgtcggcgcttcagagcttcgccgtgaccctgcaacaggtggccccttcgaagctgtccagccacagccgcagcggcattgagatcctcgtcctcgacgttgctccccttccgctagacacggtgttcgtcaacctggagagcgaattgacaaaacggctggagagc

SEQ ID NO: 1812 - DNA, 615 bp, Triticum aestivum
  Clone ID: uC-tsfl9316002c07b1
aacactttgttacatctagcggatttggatttctttaacaactaaggttcctgtttttaacattttaaagtcaagggcttttgcccatctccaatagctaacaagaactctttcttttctttacaaatcccaaaacctttactagactttttctgcttctttagcttacttcacctagagtcttctaccttttcttatcattgaatcaacccctttttttttttcttttaaacacatcccaacccaaagtataagcgcccacctagtcctatctagtccgaaaaatgcgaactagaactacatgagacactatctctgtcgttacgaacctaacactttctaccaagcttaatcggaataagacctcacaaacactcacaagttatatagggcttgaaagaaagtctaggtttgggttcgggttaactgctctaataaggagagtcagctacttggattaaaaagagtgatcaaaatgaataagaaaatccaagtattttacggtatccatgagttcaaatttgatgcagacatgataattaaagattagattcaggttcaaattgatagggaatggatcagatcatgacagtgtggccgagtagagcaatctaa

SEQ ID NO: 1813 - DNA, 556 bp, Triticum aestivum
  Clone ID: uC-tsfl9316002c08b1
aacactttgttacatctagcggatttggatttctttaacaactaaggttcctgtttttaacattttaaatttcaagggcttttgcccatctccaatagctaacaagaactctttcttttctttacaaatcccaaaacctttactagactttttctgcttctttagcttacttcacctagagtcttctaccttttcttatcattgaatcaacccctttttttttttcttttaaacacatcccaacccaaagtataagcgcccacctagtcctatctagtccgaaaaatgcgaactagaactacatgagacactatctctgtcgttacgaacctaacactttctaccaagcttaatcggaataagacctcacaaacactcacaagttatatagggcttgaaagaaagtctaggtttgggtttgggttaactgctctaataaggagagtcagctacttggattaaaaagagtgatcaaaatgaataagaaaatccaagtattttacggtatccatgagttcaaatttgatgcagacatgataattaaagattagattca

SEQ ID NO: 1814 - DNA, 542 bp, Triticum aestivum
  Clone ID: uC-tsfl9316002c11b1
tcaacactttgttacatctagcggatttggatttctttaacaactaaggttcctgtttttaacattttaaagccaagggcttttgcccatctccaatagctaacaagaactctttcttttctttacaaatcccaaaacctttactagactttttctgcttctttagcttacttcacctagagtcttctaccttttcttatcattgaatcaacccctttttttttttcttttaaacacatcccaacccaaagtataagcgcccacctagtcctatctagtccgaaaaatgcgaactagaactacatgagacactatctctgtcgttacgaacctaacactttctaccaagcttaatcggaataagacctcacaaacactcacaagttatatagggcttgaaagaaagtctaggtttgggtttgggctaactgctctaataaggagagtcagctacttggattaaaaagagtgatcaaaatgaataagacaatccaagtattttacggtatccatgagttcaaatttgatgcagacatgataat

SEQ ID NO: 1815 - DNA, 550 bp, Triticum aestivum
  Clone ID: uC-tsfl9316002d01b1
aacactttgttacatctagcggatttggatttctttaacaactaaggttcctgtttttaacattttaatgccaagggcttttgcccatctccaatagctaacaagaactctttcttttctttacaaatcccaaaacctttactagactttttctgcttctttagcttacttcacctagagtcttctaccttttcttatcattgaatcaacccctttttttttttcttttaaacacatcccaacccaaagtataagcgcccacctagtcctatctagtccgaaaaatgcgaactagaactacatgagacactatctctgtcgttacgaacctaacactttctaccaagcttaatcggaataagacctcacaaacactcacaagttatatagggcttgaaagaaagtctaggtttgggtttgggttaactgctctaataaggagagtcagctacttggattaaaagagtgatcaaaatgaataagaaaatccaagtattttacggtatccatgagttcaaatttgatgcagacatgataattaaagattaga

SEQ ID NO: 1816 - DNA, 423 bp, Triticum aestivum
  Clone ID: uC-tsfl9316002d02b1
tctaacgctcaacactttgttacatctagcggatttggatttctttaacaactaaggttcctgtttttaacattttaatgccaagggcttttgcccatctccaatagctaacaagaactctttcttttctttacaaatcccaaaacctttactagactttttctgcttctttagcttacttcacctagagtcttctaccttttcttatcattgaatcaacccctttttttttttcttttaaacacatcccaacccaaagtataagcgcccacctagtcctatctagtccgaaaaatgcgaactagaactacatgagacactatctctgtcgttacgaacctaacactttctaccaagcttaatcggaataagacctcacaaacactcacaagttatatagggcttgaaagaaagtctaggttt

SEQ ID NO: 1817 - DNA, 450 bp, Triticum aestivum
  Clone ID: uC-tsfl9316002d03b1
caacactttgttacatctagcggatttggatttctttaacaactaaggttcctgtttttaacattttaatgccaagggcttttgcccatctccaatagctaacaagaactctttcttttctttacaaatcccaaaacctttactagactttttctgcttctttagcttacttcacctagagtcttctaccttttcttatcattgaatcaacccctttttttttttcttttaaacacatcccaacccaaagtataagcgcccacctagtcctatctagtccgaaaaatgcgaactagaactacatgagacactatctctgtcgttacgaacctaacactttctaccaagcttaatcggaataagacctcacaaacactcacaagttatatagggcttgaaagaaagtctaaggtttgggtttgggttaactgctctaataaggagagtcag

SEQ ID NO: 1818 - DNA, 477 bp, Triticum aestivum
  Clone ID: uC-tsfl9316002d04b1
tttgttacatctagcggatttggatttctttaacaactaaggttcctgtttttaacattttaaagccaagggcttttgcccatctccaatagctaacaagaactctttcttttctttacaaatcccaaaacctttactagactttttctgcttctttagcttacttcacctagagtcttctaccttttcttatcattgaatcaacccctttttttttttcttttaaacacatcccaacccaaagtataagcgcccacctagtcctatctagtccgaaaaatgcgaactagaactacatgagacactatctctgtcgttacgaacctaacactttctaccaagcttaatcggaataagacctcacaaacactcacaagttatatagggcttgaaagaaagtctaggtttgggcttgggctaactgctctaataaggagagtcagctacttggattaaaaagagtgatcaaaatgaata

SEQ ID NO: 1819 - DNA, 487 bp, Triticum aestivum
  Clone ID: uC-tsfl9316002d08b1
ttctccgacctcttcccgcacctagcaaatggtaagccaagaaagccaactgacggcattgcacatgagcttacaaagtaatgctgctgctgctattcaacgagatcgattctaacctcaaagcgcccagatcccaatgacgagctcgtcgacgatgtccaccacgttgcagtcgcgccatgggccccgaatgcgaaccccgtcgacatggcctggtccgttgtgccggtactgcgatccggcgacttgccccattcgtccatgcccacctagtcctatttagtgcggctaaagagatctagcgcgaccctggaacaggtggccccttcgaagctgtccagccacagccgcagcggcattgagatcctcgtcctcgacgttgctccccttccgctagacacggtgttcgtcaacctggagagcgaattgacaaaacggctggagagcggcgagggcaccttttacaaggaccatccgacaagcccca

SEQ ID NO: 1820 - DNA, 553 bp, Triticum aestivum
  Clone ID: uC-tsfl9316002d09b1
cactttgttacatctagcggatttggatttctttaacaactaaggttcctgtttttaacattttaatttcaagggcttttgcccatctccaatagctaacaagaactctttcttttctttacaaatcccaaaacctttactagactttttctgcttctttagcttacttcacctagagtcttctaccttttcttatcattgaatcaacccctttttttttttcttttaaacacatcccaacccaaagtataagcgcccacctagtcctatctagtccgaaaaatgcgaactagaactacatgagacactatctctgtcgttacgaacctaacactttctaccaagcttaatcggaataagacctcacaaacactcacaagttatatagggctcgaaagaaagtctaggtttgggtttgggttaactgctctaataaggagagtcagctacttggattaaaaagagtgatcaaaatgaataagaaaatccaagtattttacggtatccatgagttcaaatttgatgcagacatgataattaaagattagattca

SEQ ID NO: 1821 - DNA, 530 bp, Triticum aestivum
  Clone ID: uC-tsfl9316002d12b1
gttctccgactctcttcccgcacctagcaaatggtaagccaagaaagccaactgacggcattgctcatgagctgacaaagaaatgctgctgctgctattcaacgagatcgattctaacctcaaagcgcccagatcccaatgacgagctcgtcgacgatgtccaccacgttgcagtcgcgccatgggccccgaatgcgaaccccgtcgacatggcctggtccgttgtgccggtactgcgatccggcgacttgtcccattcgaccatccagttctcgccctcctcgtcggcgcttcagagcttcgccgtgaccctgcaacaggtggccccttcgaagctgtccagccacagccgcagcggcattgagatcctcgtcctcgacgttgctccccttccgctagacacggtgttcgtcaacctggagagcgaattgacaaaacggctggagagcggcgagggcaccttttacaaggaccatccgacaagccccaatgccaaggacgttgccaacatgacgcccgaggagcgtcta

SEQ ID NO: 1822 - DNA, 449 bp, Triticum aestivum
  Clone ID: uC-tsfl9316002e01b1
aacactttgttacatctagcggatttggatttctttaacaactaaggttcctgtttttaacattttaatgccaagggcttttgcccatctccaatagctaacaagaactctttcttttctttacaaatcccaaaacctttactagactttttctgcttctttagcttacttcacctagagtcttctaccttttcttatcattgaatcaacccctttttttttttcttttaaacacatcccaacccaaagtataagcgcccacctagtcctatctagtccgaaaaatgcgaactagaactacatgagacactatctctgtcgttacgaacctaacactttctaccaagcttaatcggaataagacctcacaaacactcacaagttatatagggcttgaaagaaagtctaggtttgggtttgggttaactgctctaataaggagagtcagc

SEQ ID NO: 1823 - DNA, 422 bp, Triticum aestivum
  Clone ID: uC-tsfl9316002e04b1
gttctccgacctcttcccgcacctagcaaatggtaagccaagaaagccaactgacggcattgcacatgagctgacaaagaaatgctgctgctgctattcaacgagatcgattctaacctcaaagggcccagatcccaatgacgagctcgtcgacgatgtccaccacgttgcagtcgcgccatgggccccgaatgcgaaccccgtcgacatggcctggtccgttgtgccggtactgcgatccggcgacttgtcccattcgaccatccagttctcgccctcctcgtcggcgcttcagagcttcgccgtgaccctgcaacaggtggccccttcgaagctgtccagccacagccgcagcggcattgagatcctcgtcctcgacgttgctccccttccgctagacacggtgttcgtcaacctggaga

SEQ ID NO: 1824 - DNA, 479 bp, Triticum aestivum
  Clone ID: uC-tsfl9316002e05b1
gttctccgactctcttcccgcacctagcaaatggtaagccaagaaagccaactgacggcattgcacatgagcttacaaagaaatgctgctgctgctattcaacgagatcgattctaacctcaaagcgcccagatcccaatgacgagctcgtcgacgatgtccaccacgttgcagtcgcgccatgggccccgaatgcgaaccccgtcgacatggcctggtccgttgtgccggtactgcgatccggcgacttgtcccattcgaccatccagttctcgccctcctcgtcggcgcttcagagcttcgccgtgaccctgcaacaggtggccccttcgaagctgtccagccacagccgcagcggcattgagatcctcgtcctcgacgttgctccccttccgctagacacggtgttcgtcaacctggagagcgaattgacaaaacggctggagagcggcgagggcaccttttacaaggaccatccg

SEQ ID NO: 1825 - DNA, 152 bp, Triticum aestivum
  Clone ID: uC-tsfl9316002e06b1
ccaagaaatgccaactgacggcattgcacatgagcttacaaatttatgctgctgctgctattcaacgagatcgagttctaacctcaaagcgcccagatcccaatgacgagctcgtcgacgatgtccaccacgttgcagtcgcgccatgggcc

SEQ ID NO: 1826 - DNA, 490 bp, Triticum aestivum
  Clone ID: uC-tsfl9316002e07b1
ttctccgacctcttcccgcacctagcaaatggtaagccaagaaagccaactgacggcattgcacatgagcttacaaatataatgctgctgctgctattcaacgagatcgattctaacctcaaagcgcccagatcccaatgacgagctcgtcgacgatgtccaccacgttgcagtcgcgccatgggccccgaatgcgaaccccgtcgacatggcctggtccgttgtgccggtactgcgatccggcgacttgtcccattcgaccatccagttctcgccctcctcgtcggcgcttcagagcttcgccgtgaccctgcaacaggtggccccttcgaagctgtccagccacagccgcagcggcattgagatcctcgatctcgacgttgctccccttccgctagacacggtgttcgtcaacctggagagcgaattgacaaaacggctggagagcggcgagggcaccttttacaaggaccatccgacaagccccaat

SEQ ID NO: 1827 - DNA, 286 bp, Triticum aestivum
  Clone ID: uC-tsfl9316002e08b1
ttctccgactctcttcccgcacctagcaaatggtaagccaagaaagccaactgacggcattgcacatgagcttacaaagaaatgctgctgctgctattcaacgagatcgattctaacctcaaagggcccagatcccaatgacgagctcgtcgacgatgtccaccacgttgcagtcgcgccatgggccccgaatgcgaaccccgtcgacatggcctggtccgttgtgccggtactgcgatccggcgacttgtcccattcgaccatccagttctcgccctcctcgtcg

SEQ ID NO: 1828 - DNA, 550 bp, Triticum aestivum
  Clone ID: uC-tsfl9316002e09b1
cactttgttacatctagcggatttggatttctttaacaactaaggttcctgtttttaacattttaaatttcaagggcttttgcccatctccaatagctaacaagaactctttcttttctttacaaatcccaaaacctttactagactttttctgcttctttagcttacttcacctagagtcttctaccttttcttatcattgaatcaacccctttttttttttcttttaaacacatcccaacccaaagtataagcgcccacctagtcctatctagtccgaaaaatgcgaactagaactacatgagacactatctctgtcgttacgaacctaacactttctaccaagcttaatcggaataagacctcacaaacactcacaagttatatagggctcgaaagaaagtctaggtttgggtttgggttaactgctctaataaggagagtcagctacttggattaaaaagagtgatcaaaatgaataagaaaatccaagtattttacggtatccatgagttcaaatttgatgcagacatgataattaaagattaga

SEQ ID NO: 1829 - DNA, 435 bp, Triticum aestivum
  unsure (1)..(435): unsure at all n locations
  Clone ID: uC-tsfl9316002e10b1
cttgcttgctccggccatcgaccatggagggcgaggcgccgcagtcgcaccagctgctcctgcacggcgtcagcctggacctgcgcctcgacacggccacggccacgcaccagctgcgcggcgcccggcgcccggcgtcccctgcgcctactcccgtggccttcgaccaggccggcaaggaggccttctcctgcaactactgccaccgcaagttcctcagctcgcaggcgctcagcggccaccagaacgcccacaagctcgagcgcaccctcgccaagcgcagccgcgacgcctcctccaccgccgccacggcagctcaaactgccacgccttcctctcactggccccacgccggcggcggngagctctgggcgtactctgcttcggccgctgccccggattccacgacgatggcgcccctgatgggcatgggct

SEQ ID NO: 1830 - DNA, 554 bp, Triticum aestivum
  Clone ID: uC-tsfl9316002e11b1
aacactttgttacatctagcggatttggatttctttaacaactaaggttcctgtttttaacattttaaatccaagggcttttgcccatctccaatagctaacaagaactctttcttttctttacaaatcccaaaacctttactagactttttctgcttctttagcttacttcacctagagtcttctaccttttcttatcattgaatcaacccctttttttttttcttttaaacacatcccaacccaaagtataagcgcccacctagtcctatctagtccgaaaaatgcgaactagaactacatgagacactatctctgtcgttacgaacctaacactttctaccaagcttaatcggaataagacctcacaaacactcacaagttatatagggcttgaaagaaagtctaggtttgggtttgggctaactgctctaataaggagagtcagctacttggattaaaaagagtgatcaaaatgaataagaaaatccaagtattttacggtatccatgagttcaaatttgatgcagacatgataattaaagattagattc

SEQ ID NO: 1831 - DNA, 449 bp, Triticum aestivum
  Clone ID: uC-tsfl9316002f02b1
gttctccgacctcttcccgcacctagcaaatggtaagccaagaaagccaactgacggcattgcacatgagcagacaaagaaatgctgctgctgctattcaacgagatcgattctaacctcaaagcgcccagatcccaatgacgagctcgtcgacgatgtccaccacgttgcagtcgcgccatgggccccgaatgcgaaccccgtcgacatggcctggtccgttgtgccggtactgcgatccggcgacttgtcccattcgaccatccagttctcgccctcctcgtcggcgcttcagagcttcgccgtgaccctgcaacaggtggccccttcgaagctgtccagccacagccgcagcggcattgagatcctcgtcctcgacgttgctccccttccgctagaacacggtgttcgtcaacctggagagcgaattgacaaaacggctggagagc

SEQ ID NO: 1832 - DNA, 471 bp, Triticum aestivum
  Clone ID: uC-tsfl9316002f05b1
tccgactctcttcccgcacctagcaaatggtaagccaagaaagccaactgacggcattgcacatgagcttacaattataatgctgctgctgctattcaacgagatcgattctaacctcaaagcgcccagatcccaatgacgagctcgtcgacgatgtccaccacgttgcagtcgcgccatgggccccgaatgcgaaccccgtcgacatggcctggtccgttgtgccggtactgcgatccggcgacttgtcccattcgaccatccagttctcgccctcctcgtcggcgcttcagagcttcgccgtgaccctgcaacaggtggccccttcgaagctgtccagccacagccgcagcggcattgagatcctcgtcctcgacgttgctccccttccgctagacacggtgttcgtcaacctggagagcgaattgacaaaacggctggagagcggcgagggcaccttttacaaggacc

SEQ ID NO: 1833 - DNA, 470 bp, Triticum aestivum
  Clone ID: uC-tsfl9316002f06b1
gctgctgctgctattcaacgagatcgagttctaacctcaaagcgcccagatcccaatgacgagctcgtcgacgatgtccaccacgttgcagtcgcgccatgggccccgaatgcgaaccccgtcgacatggcctggtccgttgtgccggtactgcgatccggcgacttgtcccattcgaccatccagttctcgccctcctcgtcggcgcttcagagcttcgccgtgaccctgcaacaggtggccccttcgaagctgtccagccacagccgcagcggcattgagatcctcgtcctcgacgttgctccccttccgctagacacggtgttcgtcaacctggagagcgaattgacaaaacggctggagagcggcgagggcaccttttacaaggaccatccgacatgccccaatgccaaggacgttgccaacatgacgcccgaggagcgcctagccacggcgctcagggcagctct

SEQ ID NO: 1834 - DNA, 172 bp, Triticum aestivum
  Clone ID: uC-tsfl9316002f09b1
gttctccgacctcttcccgcacctagcaaatggtaagccaagaaagccaactgacggcattgcttatgagcttacaaagaaatgctgctgctgctgttcaacgagatcgattctaacggcaaagcgcccagatcccaatgacgagctcgtcgacgatgtccaccacgttgca

SEQ ID NO: 1835 - DNA, 614 bp, Triticum aestivum
  Clone ID: uC-tsfl9316002f12b1
tttagatcatgtggctggatttcatcattaaaacctcactgcttgtttcctgaaaccacaggtgttgaacatatggggatactatccactcattctaataggatcatgggcattcggcactattaaccgtatccatgatttcatcgagccagggcataagatcttctggctctcagttcttgacgttgggacagctgcactaatggtagcaaacctatcaaataaataagttataaaattcgccatagatcatctttgctcttcccgagtcgatgttctgaatgttgtattttcagggcttgttcaattcaatagcctatggtttcaacagctcagtgcgtcgagcaatccatgagagactggagctgtaagtcaccaccgatctctttggtttgctatattattcccaataatcaatgaagcttgatttttatgaaacccttggtctgctagattcttgccagaacggctatatcgatggcttccaagcaatttcagaccaaaaaaccatctgattctacatcagcaacaacaacagcgaagcgaaatggtatcactcaagaccgaggaccagcaatgacactaactttcaactaatacattggaccgataac

SEQ ID NO: 1836 - DNA, 408 bp, Triticum aestivum
  Clone ID: uC-tsfl9316002g02b1
ctagcggatttggatttctttaacaactaaggttcctgtttttaacattttaaagccaagggcttttgcccatctccagatagctaacaagaactctttcttttctttacaaatcccaaaacctttactagactttttctgcttctttagcttacttcacctagagtcttctaccttttcttatcattgaatcaacccctttttttttttcttttaaacacatcccaacccaaagtataagcgcccacctagtcctatctagtccgaaaaatgcgaactagaactacatgagacactatctctgtcgttacgaacctaacactttctaccaagcttaatcggaataagacctcacaaacactcacaagttatatagggcttgaaagaaagtctaggtttgggtttggg

SEQ ID NO: 1837 - DNA, 444 bp, Triticum aestivum
  unsure (1)..(444): unsure at all n locations
  Clone ID: uC-tsfl9316002g03b1
gttctccgacctcttcccgcacctagcaaatggtaagccaagaaagccaactgacggcattgctcatgagcagacaaagaaatgctgctgctgctattcaacgagatcgattctaacctcaaagcgcccagatcccaatgacgagctcgtcgacgatgtccaccacgttgcagtcgcgccatgggccccgaatgcgaaccccgtcgacatggcctggtccgttgtgccggtactgcgatccggcgacttgtcccattcgaccatccagttctcgccctcctcgtcggcgcttcagagcttcgccgtgaccctgcaacaggtggccccttcgaagctgtccagccacagccgcagcggcattgagatcctncgtctcgacgttgctccccttccgctagacacggtgttcgtcaacctggagagcgaattgacaaaacggctgga

SEQ ID NO: 1838 - DNA, 554 bp, Triticum aestivum
  Clone ID: uC-tsfl9316002g07b1
cactttgttacatctagcggatttggatttctttaacaactaaggttcctgtttttaacattttaaatgttcaagggcttttgcccatctccaatagctaacaagaactctttcttttctttacaaatcccaaaacctttactagactttttctgcttctttagcttacttcacctagagtcttctaccttttcttatcattgaatcaacccctttttttttttcttttaaacacatcccaacccaaagtataagcgcccacctagtcctatctagtccgaaaaatgcgaactagaactacatgagacactatctctgtcgttacgaacctaacactttctaccaagcttaatcggaataagacctcacaaacactcacaagttatatagggcttgaaagaaagtctaggtttgggtttgggctaactgctctaataaggagagtcagctacttggattaaaaagagtgatcaaaatgaataagaaaatccaagtattttacggtatccatgagttcaaatttgatgcagacatgataattaaagattagattc

SEQ ID NO: 1839 - DNA, 511 bp, Triticum aestivum
  Clone ID: uC-tsfl9316002g08b1
cactttgttacatctagcggatttggatttctttaacaactaaggttcctgtttttaacattttaaatccaagggcttttgcccatctccaagagctaacaagaactctttcttttctttacaaatcccaaaacctttactagactttttctgcttctttagcttacttcacctagagtcttctaccttttcttatcattgaatcaacccctttttttttttcttttaaacacatcccaacccaaagtataagcgcccacctagtcctatctagtccgaaaaatgcgaactagaactacatgagacactatctctgtcgttacgaacctaacactttctaccaagcttaatcggaataagacctcacaaacactcacaagttatatagggctcgaaagaaagtctaggtttgggttcgggttaactgctctaataaggagagtcagctacttggattaaaaagagtgatcaaaatgaataagaaaatccaagtattttacggtatccatga

SEQ ID NO: 1840 - DNA, 60 bp, Triticum aestivum
  Clone ID: uC-tsfl9316002g10b1
cactttgttacatctagcggatttggatttctttaacaactaaggttcctgtttttaaca

SEQ ID NO: 1841 - DNA, 555 bp, Triticum aestivum
  Clone ID: uC-tsfl9316002g11b1
aacactttgttacatctagcggatttggatttctttaacaactaaggttcctgtttttaacattttaaagccaagggcttttgcccatctccaatagctaacaagaactctttcttttctttacaaatcccaaaacctttactagactttttctgcttctttagcttacttcacctagagtcttctaccttttcttatcattgaatcaacccctttttttttttcttttaaacacatcccaacccaaagtataagcgcccacctagtcctatctagtccgaaaaatgcgaactagaactacatgagacactatctctgtcgttacgaacctaacactttctaccaagcttaatcggaataagacctcacaaacactcacaagttatatagggctcgaaagaaagtctaggtttgggtttgggctaactgctctaataaggagagtcagctacttggattaaaaagagtgatcaaaatgaataagaaaatccaagtattttacggtatccatgagttcaaatttgatgcagacatgataattaaagattagattca

SEQ ID NO: 1842 - DNA, 516 bp, Triticum aestivum
  Clone ID: uC-tsfl9316002g12b1
acactttgttacatctagcggatttggatttctttaacaactaaggttcctgtttttaacattttaaagccaagggcttttgcccatctccaatagctaacaagaactctttcttttctttacaaatcccaaaacctttactagactttttctgcttctttagcttacttcacctagagtcttctaccttttcttatcattgaatcaacccctttttttttttcttttaaacacatcccaacccaaagtataagcgcccacctagtcctatctagtccgaaaaatgcgaactagaactacatgagacactatctctgtcgttacgaacctaacactttctaccaagcttaatcggaataagacctcacaaacactcacaagttatatagggcttgaaagaaagtctaggtttgggtttgggctaactgctctaataaggagagtcagctacttggattaaaaagagtgatcaaaatgaataagaaaatccaagtattttacggtatccatgagttc

SEQ ID NO: 1843 - DNA, 488 bp, Triticum aestivum
  Clone ID: uC-tsfl9316002h01b1
aacactttgttacatctagcggatttggatttctttaacaactaaggttcctgtttttaacattttaaagccaagggcttttgcccatctccaatagctaacaagaactctttcttttctttacaaatcccaaaacctttactagactttttctgcttctttagcttacttcacctagagtcttctaccttttcttatcattgaatcaacccctttttttttttcttttaaacacatcccaacccaaagtataagcgcccacctagtcctatctagtccgaaaaatgcgaactagaactacatgagacactatctctgtcgttacgaacctaacactttctaccaagcttaatcggaataagacctcacaaacactcacaagttatatagggcttgaaagaaagtctaggtttgggtttgggttaactgctctaataaggagagtcagctacttggataaaaagagtgatcaaaatgaataagaaaat

SEQ ID NO: 1844 - DNA, 371 bp, Triticum aestivum
  Clone ID: uC-tsfl9316002h02b1
gttctccgacctcttcccgcacctagcaaatggtaagccaagaaagccaactgacggcattgcacatgagcagacaaagaaatgctgctgctgctattcagcgagatcgattctaacctcaaggcgcccagatcccaatgacgagctcgtcgacgatgtccaccacgttgcagtcgcgccatgggccccgaatgcgaaccccgtcgacatggcctggtccgttgtgccggtactgcgatccggcgacttgtcccattcgaccatccagttctcgccctcctcgtcggcgcttcagagcttcgccgggaccctgcaacaggtggccccttcgaagctgtccagccacagccgcagcggcattgagatcctcg

SEQ ID NO: 1845 - DNA, 391 bp, Triticum aestivum
  Clone ID: uC-tsfl9316002h03b1
cactttgttacatctagcggatttggatttctttaacaactaaggttcctgtttttaacattttaaagccaagggcttttgcccatctccaatagctaacaagaactctttcttttctttacaaatcccaaaacctttactagactttttctgcttctttagcttacttcacctagagtcttctaccttttcttatcattgaatcaacccctttttttttttcttttaaacacatcccaacccaaagtataagcgcccacctagtcctatctagtccgaaaaatgcgaactagaactacatgagacactatctctgtcgttacgaacctaacactttctaccaagcttaatcggaataagacctcacaaacactcacaagttatatagggc

SEQ ID NO: 1846 - DNA, 315 bp, Triticum aestivum
  Clone ID: uC-tsfl9316002h05b1
tttggatttctttaacaactaaggttcctgtttttaacattttaaattcaaggttttttgcccatctccaatagctaacaagaactctttcttttctttacaaatcccaaaacctttactagactttttctgcttctttagcttacttcacctagagtcttctaccttttcttatcattgaatcaacccctttttttttttcttttaaacacatcccaacccaaaagataagcgcccacctagtcctatctagtccgaaaaatgcgaactagaactacatgagacactatctctgtcgttacgaacctaacactt

SEQ ID NO: 1847 - DNA, 553 bp, Triticum aestivum
  Clone ID: uC-tsfl9316002h07b1
cactttgttacatctagcggatttggatttctttaacaactaaggttcctgtttttaacattttaaagccaagggcttttgcccatctccaatagctaacaagaactctttcttttctttacaaatcccaaaacctttactagactttttctgcttctttagcttacttcacctagagtcttctaccttttcttatcattgaatcaacccctttttttttttcttttaaacacatcccaacccaaagtataagcgcccacctagtcctatctagtccgaaaaatgcgaactagaactacatgagacactatctctgtcgttacgaacctaacactttctaccaagcttaatcggaataagacctcacaaacactcacaagttatatagggcttgaaagaaagtctaggtttgggtttgggttaactgctctaataaggagagtcagctacttggattaaaaagagtgatcaaaatgaataagaaaatccaagtattttacggtatccatgagttcaaatttgatgcagacatgataattaaagattagattca

SEQ ID NO: 1848 - DNA, 513 bp, Triticum aestivum
  Clone ID: uC-tsfl9316002h08b1
gttctccgacctcttcccgcacctagcaaatggtaagccaagaaagccaactgacggcattgctcatgagctgacaaagaaatgctgctgctgctattcaacgagatcgattctaacctcaaagcgcccagatcccaatgacgagctcgtcgacgatgtccaccacgttgcagtcgcgccatgggccccgaatgcgaaccccgtcgacatggcctggtccgttgtgccggtactgcgatccggcgacttgtcccattcgaccatccagttctcgccctcctcgtcggcgcttcagagcttcgccgtgaccctgcaacaggtggccccttcgaagctgtccagccacagccgcagcggcattgagatcctcgtcctcgacgttgctccccttccgctagacacggtgttcgtcaacctggagagcgaattgacaaaacggctggagagcggcgagggcaccttttacaaggaccatccgacaagccccaatgccaaggacgttgccaacatgac

SEQ ID NO: 1849 - DNA, 524 bp, Triticum aestivum
  Clone ID: uC-tsfl9316002h11b1
cactttgttacatctagcggatttggatttctttaacaactaaggttcctgtttttaacattttaaagccaagggcttttgcccatctccaatagctaacaagaactctttcttttctttacaaatcccaaaacctttactagactttttctgcttctttagcttacttcacctagagtcttctaccttttcttatcattgaatcaacccctttttttttttcttttaaacacatcccaacccaaagtataagcgcccacctagtcctatctagtccgaaaaatgcgaactagaactacatgagacactatctctgtcgttacgaacctaacactttctaccaagcttaatcggaataagacctcacaaacactcacaagttatatagggcttgaaagaaagtctaggtttgggtttgggttaactgctctaataaggagagtcagctacttggattaaaaagagtgatcaaaatgaataagaaaatccaagtattttacggtatccatgagttcaaatttgat

SEQ ID NO: 1850 - DNA, 405 bp, Triticum aestivum
  Clone ID: uC-tsfl9316002h12b1
tcaacactttgttacatctagcggatttggatttctttaacaactaaggttcctgtttttaacattttaaagccaagggcttttgcccatctccaatagctaacaagaactctttcttttctttacaaatcccaaaacctttactagactttttctgcttctttagcttacttcacctagagtcttctaccttttcttatcattgaatcaacccctttttttttttcttttaaacacatcccaacccaaagtataagcgcccacctagtcctatctagtccgaaaaatgcgaactagaactacatgagacactatctctgtcgttacgaacctaacactttctaccaagcttaatcggaataagacctcacaaacactcacaagttatatagggcttgaaagaaa

SEQ ID NO: 1851 - DNA, 501 bp, Triticum aestivum
  Clone ID: uC-tsfl9316003a01b1
cactttgttacatctagcggatttggatttctttaacaactaaggttcctgtttttaacattttaaagccaagggcttttgcccatctccaatagctaacaagaactctttcttttctttacaaatcccaaaacctttactagactttttctgcttctttagcttacttcacctagagtcttctaccttttcttatcattgaatcaacccctttttttttttcttttaaacacatcccaacccaaagtataagcgcccacctagtcctatctagtccgaaaaatgcgaactagaactacatgagacactatctctgtcgttacgaacctaacactttctaccaagcttaatcggaataagacctcacaaacactcacaagttatatagggcttgaaagaaagtctaggtttgggtttgggctaactgctctaataaggagagtcagctacttggattaaaaagagtgatcaaaatgaataagaaaatccaagtattttacg

SEQ ID NO: 1852 - DNA, 568 bp, Triticum aestivum
  Clone ID: uC-tsfl9316003a02b1
acactttgttacatctagcggatttggatttctttaacaactaaggttcctgtttttaacattttaatgccaagggcttttgcccatctccaatagctaacaagaactctttcttttctttacaaatcccaaaacctttactagactttttctgcttctttagcttacttcacctagagtcttctaccttttcttatcattgaatcaacccctttttttttttcttttaaacacatcccaacccaaagtataagcgcccacctagtcctatctagtccgaaaaatgcgaactagaactacatgagacactatctctgtcgttacgaacctaacactttctaccaagcttaatcggaataagacctcacaaacactcacaagttatatagggcttgaaagaaagtctaggtttgggtttgggttaactgctctaataaggagagtcagctacttggattaaaaagagtgatcaaaatgaataagaaaatccaagtattttacggtatccatgagttcaaatttgatgcagacatgataattaaagattagattcaggttcaaattgata

SEQ ID NO: 1853 - DNA, 556 bp, Triticum aestivum; identical to SEQ ID NO: 1800
  Clone ID: uC-tsfl9316003a06b1

SEQ ID NO: 1854 - DNA, 522 bp, Triticum aestivum
  Clone ID: uC-tsfl9316003a07b1
acactttgttacatctagcggatttggatttctttaacaactaaggttcctgtttttaacattttaaagccaagggcttttgcccatctccaatagctagcaagaactctttcttttctttacaaatcccaaaacctttactagactttttctgcttctttagcttacttcacctagagtcttctaccttttcttatcattgaatcaacccctttttttttttcttttaaacacatcccaacccaaagtataagcgcccacctagtcctatctagtccgaaaaatgcgaactagaactacatgagacactatctctgtcgttacgaacctaacactttctaccaagcttaatcggaataagacctcacaaacactcacaagttatatagggcttgaaagaaagtctaggtttgggtttgggttaactgctctaataaggagagtcagctacttggattaaaaagagtgatcaaaatgaataagaaaatccaagtattttacggtatccatgagttcaaattt

SEQ ID NO: 1855 - DNA, 438 bp, Triticum aestivum
  Clone ID: uC-tsfl9316003a08b1
gccaagaaagccaactgacggcattgcacatgatttgacaatgaaatgctgctgctgctattcaacgagatcgattctaacctcaaggcgcccagatcccaatgacgagctcgtcgacgatgtccaccacgttgcagtcgcgccatgggccccgaatgcgaaccccgtcgacatggcctggtccgttgtgccggtactgcgatccggcgacttgtcccattcgaccatccagttctcgccctcctcgtcggcgcttcagagcttcgccgtgaccctgcaacaggtggccccttcgaagctgtccagccacagccgcagcgggattgagatcctcgtcctcgacgttgctccccttccgctagacacggtgttcgtcaacctggagagcgaattgacaaaacggctggagagcggcgagggcaccttttacaaggacca

SEQ ID NO: 1856 - DNA, 391 bp, Triticum aestivum
  Clone ID: uC-tsfl9316003a09b1
tttgttacatctagcggatttggatttctttaacaactaaggttcctgtttttaacattttaaatccaagggcttttgcccatctccaatagctaacaagaactctttcttttctttacaaatcccaaaacctttactagactttttctgcttctttagcttacttcacctagagtcttctaccttttcttatcattgaatcaacccctttttttttttcttttaaacacatcccaacccaaagtataagcgcccacctagtcctatctagtccgaaaaatgcgaactagaactacatgagacactatctctgtcgttacgaacctaacactttctaccaagcttaatcggaataagacctcacaaacactcacaagttatatagggcttg

SEQ ID NO: 1857 - DNA, 429 bp, Triticum aestivum
  Clone ID: uC-tsfl9316003a10b1
cacctagcaaatggtaagccaagaaagccaactgacggcattgcacatgatttgacatttaaatgctgctgctgctattcaacgagatcgattctaacctcaaagcgcccagatcccaatgacgagctcgtcgacgatgtccaccacgttgcagtcgcgccatgggccccgaatgcgaaccccgtcgacatggcctggtccgttgtgccggtactgcgatccggcgacttgttccattcgaccatccagttctcgccctcctcgtcggcgcttcacagcttagccgcgaccctgcaacaggtggccccttcgaagctgtccagccacagccgcagcggcattgagatcctcgtcctcgacgttgctccccttgcgctagacacggtgttcgtcaacctggagagcgaattgacaaaacagctggagagc

SEQ ID NO: 1858 - DNA, 539 bp, Triticum aestivum
  Clone ID: uC-tsfl9316003a11b1
caacactttgttacatctagcggatttggatttctttaacaactaaggttcctgtttttaacattttaatgccaagggcttttgcccatctccaatagctaacaagaactctttcttttctttacaaatcccaaaacctttactagactttttctgcttctttagcttacttcacctagagtcttctaccttttcttatcattgaatcaacccctttttttttttcttttaaacacatcccaacccaaagtataagcgcccacctagtcctatctagtccgaaaaatgcgaactagaactacatgagacactatctctgtcgttacgaacctaacactttctaccaagcttaatcggaataagacctcacaaacactcacaagttatatagggcttgaaagaaagtctaggtttgggtttgggttaactgctctaataaggagagtcagctacttggattaaaaagagtgatcaaaatgaataagaaaatccaagtattttacggtatccatgagttcaaatttgatgcagacatgata

SEQ ID NO: 1859 - DNA, 555 bp, Triticum aestivum
  Clone ID: uC-tsfl9316003a12b1
aacactttgttacatctagcggatttggatttctttaacaactaaggttcctgtttttaacattttaatgccaagggcttttgcccatctccaatagctaacaagaactctttcttttctttacaaatcccaaaacctttactagactttttctgcttctttagcttacttcacctagagtcttctaccttttcttatcattgaatcaacccctttttttttttcttttaaacacatcccaacccaaagtataagcgcccacctagtcctatctagtccgaaaaatgcgaactagaactacatgagacactatctctgtcgttacgaacctaacactttctaccaagcttaatcggaataagacctcacaaacactcacaagttatatagggcttgaaagaaagtctaggtttgggtttgggttaactgctctaataaggagagtcagctacttggattaaaaagagtgatcaaaatgaataagaaaatccaagtattttacggtatccatgagttcaaatttgatgcagacatgataattaaagattagattca

SEQ ID NO: 1860 - DNA, 538 bp, Triticum aestivum
  Clone ID: uC-tsfl9316003b01b1
tgttacatctagcggatttggatttctttaacaactaaggttcctgtttttaacattttaaagccaaggtcttttgcccatctccaatagctaacaagaactctttcttttctttacaaatcccaaaacctttactagactttttctgcttctttagcttacttcacctagagtcttctaccttttcttatcattgaatcaacccctttttttttttcttttaaacacatcccaacccaaagtataagcgcccacctagtcctatctagtccgaaaaatgcgaactagaactacatgagacactatctctgtcgttacgaacctaacactttctaccaagcttaatcggaataagacctcacaaacactcacaagttatatagggcttgaaagaaagtctaggtttgggtttgggttaactgctctaataaggagagccagctacttggattaaaaagagtgatcaaaatgaataagaaaatccaagtattttacggtatccatgagttcaaatttgatgcagacatgataattaaag

SEQ ID NO: 1861 - DNA, 502 bp, Triticum aestivum
  Clone ID: uC-tsfl9316003b02b1
acactttgttacatctagcggatttggatttctttaacaactaaggttcctgtttttaacattttaaagccaagggcttttgcccatctccaatagctaacaagaactctttcttttctttacaaatcccaaaacctttactagactttttctgcttctttagcttacttcacctagagtcttctaccttttcttatcattgaatcaacccctttttttttttcttttaaacacatcccaacccaaagtataagcgcccacctagtcctatctagtccgaaaaatgcgaactagaactacatgagacactatctctgtcgttacgaacctaacactttctaccaagcttaatcggaataagacctcacaaacactcacaagttatatagggcttgaaagaaagtctaggtttgggtttgggttaactgctctaataaggagagtcagctacttggattaaaaagagtgatcaaaatgaataagaaaatccaagtattttacg

SEQ ID NO: 1862 - DNA, 514 bp, Triticum aestivum
  Clone ID: uC-tsfl9316003b03b1
cactttgttacatctagcggatttggatttctttaacaactaaggttcctgtttttaacattttaattccaagggcttttgcccatctccaatagctaacaagaactctttcttttctttacaaatcccaaaacctttactagactttttctgcttctttagcttacttcacctagagtcttctaccttttcttatcattgaatcaacccctttttttttttcttttaaacacatcccaacccaaagtataagcgcccacctagtcctatctagtccgaaaaatgcgaactagaactacatgagacactatctctgtcgttacgaacctaacactttctaccaagcttaatcggaataagacctcacaaacactcacaagttatatagggcttgaaagaaagtctaggtttgggtttgggttaactgctctaataaggagagtcagctacttggattaaaaagagtgatcaaaatgaataagaaaatccaagtattttacggtatccatgagtt

SEQ ID NO: 1863 - DNA, 412 bp, Triticum aestivum
  Clone ID: uC-tsfl9316003b04b1
cttacgcgtgcggcaccttgagcttgaggtcagtggcaggcaggcaagcaagaaagtaagaagaagaagaagataggacatggcatctgctactctcctcaagtcctacttgctccccaagaaggccgaatggggcgtcgcgcgccaggtcgccgccccgagggtgtccatggtcgtccgcgccggcgcctacgacgatgagctcgtcaagaccgcgaaaaccatcgcgtcgccggggcgcgggatcctggccatggacgagtgcaacgccacctgcgggaagcgcctcgactcgatcggcctggagaacacagaggcgaaccggcaggcgttccgcacgctgctggtcttcgtccctggcctcggcaaccacatcttcggcgccatgctcttcgaggagacgctctaccag

SEQ ID NO: 1864 - DNA, 464 bp, Triticum aestivum
  Clone ID: uC-tsfl9316003b05b1
gttctccgatctcttcccgcacctagcaaatggtaagccaagaaagccaactgacggcattgctcatgagttgacaaagaaatgctgctgctgctattcaacgagatcgattctaacctcaaagggcccagatcccaatgacgagctcgtcgacgatgtccaccacgttgcagtcgcgccatgggccccgaatgcgaaccccgtcgacatggcctggtccgttgtgccggtactgcgatccggcgacttgtcccattcgaccatccagttctcgccctcctcgtcggcgcttcagagcttcgccgtgaccctgcaacaggtggccccttcgaagctgtccagccacagccgcagcggcattgagatcctcgtcctcgacgttgctccccttccgctagacacggtgtttcgtaacctggagagcgaattgacaaaacggctggagagcggcgagggcacctttt

SEQ ID NO: 1865 - DNA, 513 bp, Triticum aestivum
  Clone ID: uC-tsfl9316003b06b1
gttctccgacctcttcccgcacctagcaaatggtaagccaagaaagccaactgacggcattgttcatgagctgacaaagaaatgctgctgctgctattcaacgagatcgattctaacctcaaagcgcccagatcccaatgacgagctcgtcgacgatgtccaccacgttgcagtcgcgccatgggccccgaatgcgaaccccgtcgacatggcctggtccgttgtgccggtactgcgatccggcgacttgtcccattcgaccatccagttctcgccctcctcgtcggcgcttcagagcttcgccgtgaccctgcaacaggtggccccttcgaagctgtccagccacagccgcagcgggattgagatcctcgtcctcgacgttgctccccttccgctagacacggtgttcgtcaacctggagagcgaattgacaaaacggctggagagcggcgagggcaccttttacaaggaccatccgacaagccccaatgccaaggacgttgccaacatgac

SEQ ID NO: 1866 - DNA, 551 bp, Triticum aestivum
  Clone ID: uC-tsfl9316003b07b1
actttgttacatctagcggatttggatttctttaacaactaaggttcctgtttttaacattttaaatccaagggcttttgcccatctccaatagctaacaagaactctttcttttctttacaaatcccaaaacctttactagactttttctgcttctttagcttacttcacctagagtcttctaccttttcttatcattgaatcaacccctttttttttttcttttaaacacatcccaacccaaagtataagcgcccacctagtcctatctagtccgaaaaatgcgaactagaactacatgagacactatctctgtcgttacgaacctaacactttctaccaagcttaatcggaataagacctcacaaacactcacaagttatatagggcttgaaagaaagtctaggtttgggtttgggttaactgctctaataaggagagtcagctacttggattaaaaagagtgatcaaaatgaataagaaaatccaagtattttacggtatccatgagttcaaatttgatgcagacatgataattaaagattagattc

SEQ ID NO: 1867 - DNA, 515 bp, Triticum aestivum
  Clone ID: uC-tsfl9316003b09b1
tcaacactttgttacatctagcggatttggatttctttaacaactaaggttcctgtttttaacattttaattccaagggcttttgcccatctccaatagctaacaagaactctttcttttctttacaaatcccaaaacctttactagactttttctgcttctttagcttacttcacctagagtcttctaccttttcttatcattgaatcaacccctttttttttttcttttaaacacatcccaacccaaagtataagcgcccacctagtcctatctagtccgaaaaatgcgaactagaactacatgagacactatctctgtcgttacgaacctaacactttctaccaagcttaatcggaataagacctcacaaacactcacaagttatatagggcttgaaagaaagtctaggtttgggtttgggttaactgctctaataaggagagtcagctacttggattaaaaagagtgatcaaaatgaataagaaaatccaagtattttacggtatccatga

SEQ ID NO: 1868 - DNA, 466 bp, Triticum aestivum
  Clone ID: uC-tsfl9316003b10b1
tttgttacatctagcggatttggatttctttaacaactaaggttcctgtttttaacattttaattccaagggcttttgcccatctccaatagctaacaagaactctttcttttctttacaaatcccaaaacctttactagactttttctgcttctttagcttacttcacctagagtcttctaccttttcttatcattgaatcaacccctttttttttttcttttaaacacatcccaacccaaagtataagcgcccacctagtcctatctagtccgaaaaatgcgaactagaactacatgagacactatctctgtcgttacgaacctaacactttctaccaagcttaatcggaataagacctcacaaacactcacaagttatatagggcttgaaagaaagtctaggtttgggtttgggttaactgctctaataaggagagtcagctacttggattaaaaagagtgat

SEQ ID NO: 1869 - DNA, 227 bp, Triticum aestivum
  Clone ID: uC-tsfl9316003b11b1
ttgcacatgagttgacattgaaatgctgctgctgctattcaacgagatcgattctaacctcaaggcgcccagatcccaatgacgagctcgtcgacgatgtccaccacgttgcagtcgcgccatgggccccgaatgcgaaccccgtcgacatggcctggtccgttgtgccggtactgcgatccggcgacttgtcccattcgaccatccagttctcgccctcctcgtcg

SEQ ID NO: 1870 - DNA, 488 bp, Triticum aestivum
  Clone ID: uC-tsfl9316003b12b1
ttctccgttctcttcccgcacctagcaaatggtaagccaagatagccaactgactgcattgttcatgagtttgacaaagaaatgctgctgctgctattcaacgagatcgattctaacctcaaagcgcccagatcccaatgacgagctcgtcgacgatgtccaccacgttgcagtcgcgccatgggccccgaatgcgaaccccgtcgacatggcctggtccgttgtgccggtactgcgatccggcgacttgtcccattcgaccatccagttctcgccctcctcgtcggcgcttcagagcttcgccgtgaccctgcaacaggtggccccttcgaagctgtccagccacagccgcagcggcattgagatcctcgtcctcgacgttgctccccttccgctagacacggtgttcgtcaacctggagagcgaattgacaaaacggctggagagcggcgagggcaccttttacaaggaccatccgacaagcccca

SEQ ID NO: 1871 - DNA, 405 bp, Triticum aestivum
  Clone ID: uC-tsfl9316003c01b1
gatttaccgatccaaagggtttcaagcttgagttccacttcaataccaatccattcttcaagaatgaagtgcttacgaaaacgtaccacatgatcgatgaagatgaaccaatccttgagaaggccattggtactgaaattgaatggtgccctggaaagagcttgacacaaaaggtgctaaagaagaagccaaagaaggggtcaaagaacactaaacctatcacgaagattgaaaattgcgagagcttctttaatttcttcagtccacctcaagttcctgatgatgatgaggaaattgatgaggatacagctgaacagttgcagaaccaaatggagcaagattatgatattggatctaccatcagagacaagattattccacatgctgtttcatggttcactggag

SEQ ID NO: 1872 - DNA, 499 bp, Triticum aestivum
  Clone ID: uC-tsfl9316003c02b1
cactttgtacatctagcggatttggatttctttaacaactaaggttcctgtttttaacattttaaagccaagggcttttgcccatctccaatagctaacaagaactctttcttttctttacaaatcccaaaacctttactagactttttctgcttctttagcttacttcacctagagtcttctaccttttcttatcattgaatcaacccctttttttttttcttttaaacacatcccaacccaaagtataagcgcccacctagtcctatctagtccgaaaaatgcgaactagaactacatgagacactatctctgtcgttacgaacctaacactttctaccaagcttaatcggaataagacctcacaaacactcacaagttatatagggcttgaaagaaagtctaggtttgggtttgggttaactgctctaataaggagagtcagctacttggattaaaaagagtgatcaaaatgaataagaaaatccaagtattttac

SEQ ID NO: 1873 - DNA, 343 bp, Triticum aestivum
  Clone ID: uC-tsfl9316003c06b1
ccatctaatgtctttattaatatgaactagaatcctgcgccatgcaggattttgtttacctgctgctacgatagtcacacctactgcatgcgcaaaggcaagtgtcgagatcacatttggttgctgagtgttgggagtcaaaaattgatgttggggatttgtatttttaccgtgtaagagtagggtcggcatctatctatctatagaataaggcctccagttgcaatctgatggttgtatcatctccacactggagcatgtacttgtatccccgtggcgcaaatttgtgcaacctatctatattgtacttatttgtccccaaacattgtgatgataattttta

SEQ ID NO: 1874 - DNA, 592 bp, Triticum aestivum
  Clone ID: uC-tsfl9316003c07b1
tcaacactttgttacatctagcggatttggatttctttaacaactaaggttcctgtttttaacattttaaagccaagggcttttgcccatctccaatagctaacaagaactctttcttttctttacaaatcccaaaacctttactagactttttctgcttctttagcttacttcacctagagtcttctaccttttcttatcattgaatcaacccctttttttttttcttttaaacacatcccaacccaaagtataagcgcccacctagtcctatctagtccgaaaaatgcgaactagaactacatgagacactatctctgtcgttacgaacctaacactttctaccaagcttaatcggaataagacctcacaaacactcacaagttatatagggcttgaaagaaagtctaggtttgggtttgggttaactgctctaataaggagagtcagctacttggattaaaaagagtgatcaaaatgaataagaaaatccaagtattttacggtatccatgagttcaaatttgatgcagacatgataattaaagattagattcaggttcaaattgatagggaatggtatcagatcatga

SEQ ID NO: 1875 - DNA, 437 bp, Triticum aestivum
  Clone ID: uC-tsfl9316003c08b1
tcttcccgcacctagcaaatggtaagccaagaaagccaactgacggcattgcacatgagtagacaatgaaatgctgctgctgctattcaacgagatcgattctaacctcaaagcgcccagatcccaatgacgagctcgtcgacgatgtccaccacgttgcagtcgcgccatgggccccgaatgcgaaccccgtcgacatggcctggtccgttgtgccggtactgcgatccggcgacttgtcccattcgaccatccagttctcgccctcctcgtcggcgcttcagagcttcgccgtgaccctgcaacaggtggccccttcgaagctgtccagccacagccgcagcggcattgagatcctcgtcctcgacgttgctccccttccgctagacacggtgttcgtcaacctggagagcgaattgacaaaacggctggagagc

SEQ ID NO: 1876 - DNA, 408 bp, Triticum aestivum
  Clone ID: uC-tsfl9316003c10b1
atctagcggatttggatttctttaacaactaaggttcctgtttttaacattttaaatccaagggcttttgcccatctccaatagctgacaagaactctttcttttctttacaaatcccaaaacctttactagactttttctgcttctttagcttacttcacctagagtcttctaccttttcttatcattgaatcaacccctttttttttttcttttaaacacatcccaacccaaagtataagcgcccacctagtcctatctagtccgaaaaatgcgaactagaactacatgagacactatctctgtcgttacgaacctaacactttctaccaagcttaatcggaataagacctcacaaacactcacaagttatatagggcttgaaagaaagtctaggtttgggtttgg

SEQ ID NO: 1877 - DNA, 229 bp, Triticum aestivum
  Clone ID: uC-tsfl9316003c11b1
tgcacatgagttttcattgaaatgctgctgctgctattcaacgagagcgattctaacctcaaagcgcccagatcccaatgacgagctcgtcgacgttgtccaccacgttgcagtcgcgccatgggccccgaatgcgaaccccgtcgacatggcctggtccgttgtgccggtactgcgatccggcgacttgttccattcgaccatccagttctcgccctcctcgtcggcg

SEQ ID NO: 1878 - DNA, 490 bp, Triticum aestivum
  Clone ID: uC-tsfl9316003c12b1
aacactttgttacatctagcgcgatttggatttctttaacaactaaggttcctgtttttaacattttatttccaagggcttttgcccatctccaatagctaacaagaactctttcttttctttacaaatcccaaaacctttactagactttttctgcttctttagcttacttcacctagagtcttctaccttttcttatcattgaatcaacccctttttttttttcttttaaacacatcccaacccaaagtataagcgcccacctagtcctatctagtccgaaaaatgcgaactagaactacatgagacactatctctgtcgttacgaacctaacactttctaccaagcttaatcggaataagacctcacaaacactcacaagttatatagggcttgaaagaaagtctaggtttgggtttgggttaactgctctaataaggagagtcagctacttggattaaaaagagtgatcaaaatgaataagaaaat

SEQ ID NO: 1879 - DNA, 507 bp, Triticum aestivum
  Clone ID: uC-tsfl9316003d01b1
cttcccgcacctagcaaatggtaagccaagaaagccaactgacggcattgcacatgagttgacaatgtaatgctgctgctgctattcaacgagatcgattctaacctcaaagcgcccagatcccaatgacgagctcgtcgacgatgtccaccacgttgcagtcgcgccatgggccccgaatgcgaaccccgtcgacatggcctggtccgttgtgccggtactgcgatccggcgacttgtcccattcgaccatccagttctcgccctcctcgtcggcgcttcagagcttcgccgtgaccctgcaacaggtggccccttcgaagctgttcagccacagccgcagcggcattgagatcctcgtcctcgacgttgctccccttccgctagacacggtgttcgtcaacctggagagcgaattgacaaaacggctggagagcggcgagggcaccttttacaaggaccatccgacaagccccaatgccaaggacgttgccaacatgacgcccga

SEQ ID NO: 1880 - DNA, 306 bp, Triticum aestivum
  Clone ID: uC-tsfl9316003d02b1
gctgctgctgctattcaacgagatcgattttaaccttaaagcgcccagatcccaatgacgagctcgtcgacgatgttcaccacgttgcagtcgcgccatgggccccgaatgcgaaccccgtcgacatggcctggtccgttgtgccggtactgcgatccggcgacttgtcccattcgaccatccagttctcgccctcctcgtcggcgcttcagagcttcgccgtgaccctgctacaggtggccccttcgaagctgttcagtcacagccgtagtggcattgagatcctcgacctcgacgttgctcccc

SEQ ID NO: 1881 - DNA, 514 bp, Triticum aestivum
  Clone ID: uC-tsfl9316003d03b1
ttctccgttctcttcccgcacctagcaaatggtaagccaagaaagccaactgacggcattgctcatgagttgacaaagaaatgctgctgctgctattcaacgagatcgattctaacctcaaagcgcccagatcccaatgacgagctcgtcgacgatgtccaccacgttgcagtcgcgccatgggccccgaatgcgaaccccgtcgacatggcctggtccgttgtgccggtactgcgatccggcgacttgtcccattcgaccatccagttctcgccctcctcgtcggcgcttcagagcttcgccgtgaccctgcaacaggtggccccttcgaagctgtccagccacagccgcagcggcattgagatcctcgtcctcgacgttgctccccttccgctagacacggtgttcgtcaacctggagagcgaattgacaaaacggctggagagcggcgagggcaccttttacaaggaccatccgacaagccccaatgccaaggacgttgccaacatgacgc

SEQ ID NO: 1882 - DNA, 541 bp, Triticum aestivum
  Clone ID: uC-tsfl9316003d04b1
tcaacactttgttacatctagcggatttggatttctttaacaactaaggttcctgtttttaacattttaattccaagggcttttgcccatctccaatagctaacaagaactctttcttttctttacaaatcccaaaacctttactagactttttctgcttctttagcttacttcacctagagtcttctaccttttcttatcattgaatcaacccctttttttttttcttttaaacacatcccaacccaaagtataagcgcccacctagtcctatctagtccgaaaaatgcgaactagaactacatgagacactatctctgtcgttacgaacctaacactttctaccaagcttaatcggaataagacctcacaaacactcacaagttatatagggcttgaaagaaagtctaggtttgggttctgggttaactgctctaataaggagagtcagctacttggattaaaaagagtgatcaaaatgaataagaaaatccaagtattttacggtatccatgagttcaaatttgatgcagacatgata

SEQ ID NO: 1883 - DNA, 466 bp, Triticum aestivum
  Clone ID: uC-tsfl9316003d05b1
ttctccgatctcttcccgcacctagcaaatggtaagccaagaaagccaactgacggcattgctcatgatttgacaaagaaatgctgctgctgctattcaacgagatcgattctaacctcaaagcgcccagatcccaatgacgagctcgtcgacgatgtccaccacgttgcagtcgcgccatgggccccgaatgcgaaccccgtcgacatggcctggtccgttgtgccggtactgcgatccggcgacttgtcccattcgaccatccagttctcgccctcctcgtcggcgcttcagagcttcgccgtgaccctgcaacaggtggccccttcgaagctgtccagccacagccgcagcggcattgagatcctcgtcctcgacgttgctccccttccgctagacacggtgttcgtcaacctggagagcgaattgacaaaacggctggagagcggcgagggcaccttttaca

SEQ ID NO: 1884 - DNA, 521 bp, Triticum aestivum
  Clone ID: uC-tsfl9316003d07b1
tttgttacatctagcggatttggatttctttaacaactaaggttcctggttttaacattttaatgccaagggcttttgcccatctccaatagctaacaagaactctttcttttctttacaaatcccaaaacctttactagactttttctgcttctttagcttacttcacctagagtcttctaccttttcttatcattgaatcaacccctttttttttttcttttaaacacatcccaacccaaagtataagcgcccacctagtcctatctagtccgaaaaatgcgaactagaactacatgagacactatctctgtcgttacgaacctaacactttctaccaagcttaatcggaataagacctcacaaacactcacaagttatatagggcttgaaagaaagtctaggtttgggtttgggttaactgctctaataaggagagtcagctacttggattaaaaagagtgatcaaaatgaataagaaaatccaagtattttacggtatccatgagttcaaatttgat

SEQ ID NO: 1885 - DNA, 484 bp, Triticum aestivum
  Clone ID: uC-tsfl9316003d08b1
tttgttacatctagcggatttggatttctttaacaactaaggttcctgtttttaacattttaatgccaagggcttttgcccatctccaatagctaacaagaactctttcttttctttacaaatcccaaaacctttactagactttttctgcttctttagcttacttcacctagagtcttctaccttttcttatcattgaatcaacccctttttttttttcttttaaacacatcccaacccaaagtataagcgcccacctagtcctatctagtccgaaaaatgcgaactagaactacatgagacactatctctgtcgttacgaacctaacactttctaccaagcttaatcggaataagacctcacaaacactcacaagttatatagggcttgaaagaaagtctaggtttgggtttgggttaactgctctaataaggagagtcagctacttggattaaaaagagtgatcaaaatgaataagaaaat

SEQ ID NO: 1886 - DNA, 479 bp, Triticum aestivum
  Clone ID: uC-tsfl9316003d10b1
aacctcactgcttgtttcctgaaaccacaggtgttgaacttatggggatactatccactcattctaataggatcatgggcattcggcactattaaccgtatccatgatttcatcgagccagggcataagatcttctggctctcagttcttgacgttgggacagctgcactaatggtagcaaacctatcaaataaataagttataaaattcgccatagatcatctttgctcttcccgagtcgatgttctgaatgttgtattttcagggcttgttcaattcaatagcctatggtttcaacagctcagtgcgtcgagcaatccatgagagactggagctgtaagtcaccaccgatctctttggtttgctatattattcccaataatcaatgaagcttgatttttatgaaacccttggtctgctagattcttgccagaacggctatatcgatggcttccaagcaatttcagaccaaaaaacca

SEQ ID NO: 1887 - DNA, 502 bp, Triticum aestivum
  Clone ID: uC-tsfl9316003e01b1
cttcccgcacctagcaaatggtaagccaagaaagccaactgacggcattgcacatgagctgacaaagaaatgctgctgctgctattcaacgagatcgattctaacctcaaagcgcccagatcccaatgacgagctcgtcgacgatgtccaccacgttgcagtcgcgccatgggccccgaatgcgaaccccgtcgacatggcctggtccgttgtgccggtactgcgatccggcgacttgtcccattcgaccatccagttctcgccctcctcgtcggcgcttcagagcttcgccgtgaccctgcaacaggtggccccttcgaagctgtccagccacagccgcagcggcattgagatcctcgtcctcgacgttgctccccttccgctagacacggtgttcgtcaacctggagagcgaattgacaaaacggctggagagcggcgagggcaccttttacaaggaccatccgacaagccccaatgccaaggacgttgccaacatgacg

SEQ ID NO: 1888 - DNA, 420 bp, Triticum aestivum
  Clone ID: uC-tsfl9316003e03b1
aacactttgttacatctagcggatttggatttctttaacaactaaggttcctgtttttaacattttaatgccaagggcttttgcccatctccaatagctaacaagaactctttcttttctttacaaatcccaaaacctttactagactttttctgcttctttagcttacttcacctagagtcttctaccttttcttatcattgaatcaacccctttttttttttcttttaaacacatcccaacccaaagtataagcgcccacctagtcctatctagtccgaaaaatgcgaactagaactacatgagacactatctctgtcgttacgaacctaacactttctaccaagcttaatcggaataagacctcacaaacactcacaagttatatagggcttgaaagaaagtctaggtttgggtttg

SEQ ID NO: 1889 - DNA, 429 bp, Triticum aestivum
  Clone ID: uC-tsfl9316003e05b1
tcttcccgcacctagcaaatggtaagccaagaaagccaactgacggcattgttcatgatttgacaaagaaatgctgctgctgctattcaacgagatcgattctaacctcaaagcgcccagatcccaatgacgagctcgtcgacgatgtccaccacgttgcagtcgcgccatgggccccgaatgcgaaccccgtcgacatggcctggtccgttgtgccggtactgcgatccggcgacttgtcccattcgaccatccagttctcgccctcctcgtcggcgcttcagagcttcgccgtgaccctgcaacaggtggccccttcgaagctgtccagccacagccgcagcggcattgagatcctcgacctcgacgttgctccccttccgttagacacggtgttcgtcaacctggagagcgaattgacaaaacggc

SEQ ID NO: 1890 - DNA, 154 bp, Triticum aestivum
  Clone ID: uC-tsfl9316003e09b1
tgcacatgagttgacaatgaaatgctgctgctgctattcaacgagagcgattttaacctcaaagcgcccagatcccaatgacgagctcgtcgtcgatgtccaccacgttgcagtcgcgccatgggcctcgaatgcgaaccccgtcgacatggcc

SEQ ID NO: 1891 - DNA, 436 bp, Triticum aestivum
  Clone ID: uC-tsfl9316003e10b1
tagatcatgtggctggatttcatcattaaaacctcactgcttgtttcctgaaaccacaggtgttgaattgatggggatactatccactcattctaataggatcatgggcattcggcactattaaccgtatccatgatttcatcgagccagggcataagatcttctggctctcagttcttgacgttgggacagctgcactaatggtagcaaacctatcaaataaataagttataaaattcgccatagatcatctttgctcttcccgagtcgatgttctgaatgttgtattttcagggcttgttcaattcaatagcctatggtttcaacagctcagtgcgtcgagcaatccatgagagactggagctgtaagtcaccaccgatctctttggtttgctatattattcccaataatcaatgaagcttgatttttatgaaa

SEQ ID NO: 1892 - DNA, 553 bp, Triticum aestivum
  Clone ID: uC-tsfl9316003f01b1
acactttgttacatctagcggatttggatttctttaacaactaaggttcctgtttttaacattttaatgccaagggcttttgcccatctccaatagctaacaagaactctttcttttctttacaaatcccaaaacctttactagactttttctgcttctttagcttacttcacctagagtcttctaccttttcttatcattgaatcaacccctttttttttttcttttaaacacatcccaacccaaagtataagcgcccacctagtcctatctagtccgaaaaatgcgaactagaactacatgagacactatctctgtcgttacgaacctaacactttctaccaagcttaatcggaataagacctcacaaacactcacaagttatatagggcttgaaagaaagtctaggtttgggtttgggttaactgctctaataaggagagtcagctacttggattaaaaagagtgatcaaaatgaataagaaaatccaagtattttacggtatccatgagttcaaatttgatgcagacatgataattaaagattagattc

SEQ ID NO: 1893 - DNA, 306 bp, Triticum aestivum
  Clone ID: uC-tsfl9316003f02b1
tcttcccgcacctagcaaatggtaagccaagaaagccaactgacggcattgtacatgagctgacaaagaaatgctgctgctgctattcaacgagatcgattctaacctcaaagcgcccagatcccaatgacgagctcgtcgacgatgtccaccacgttgcagtcgcgccatgggccccgaatgcgaaccccgtcgacatggcctggtccgttgtgccggtactgcgatccggcgacttgtcccattcgaccatccagttctcgccctcctcgtcggcgcttcagagcttcgccgtgaccctgcaac

SEQ ID NO: 1894 - DNA, 465 bp, Triticum aestivum
  Clone ID: uC-tsfl9316003f04b1
aacactttgttacatctagcggatttggatttctttaacaactaaggttcctgtttttaacattttaaagccaagggcttttgcccatctccaatagctaacaagaactctttcttttctttacaaatcccaaaacctttactagactttttctgcttctttagcttacttcacctagagtcttctaccttttcttatcattgaatcaacccctttttttttttcttttaaacacatcccaacccaaagtataagcgcccacctagtcctatctagtccgaaaaatgcgaactagaactacatgagacactatctctgtcgttacgaacctaacactttctaccaagcttaatcggaataagacctcacaaacactcacaagttatatagggcttgaaagaaagtctaggtttgggtttgggttaactgctctaataaggagagtcagctacttggattaaaaag

SEQ ID NO: 1895 - DNA, 388 bp, Triticum aestivum
  Clone ID: uC-tsfl9316003f06b1
ttctccgactctcttcccgcacctagcaaatggtaagccaagaaagccaactgactgcattgcacatgagttgacaaagaaatgctgctgctgctattcaacgagatcgattctaacctcaaagcgcccagatcccaatgacgagctcgtcgacgatgtccaccacgttgcagtcgcgccatgggccccgaatgcgaaccccgtcgacatggcctggtccgttgtgccggtactgcgatccggcgacttgtcccattcgaccatccagttctcgccctcctcgtcggcgcttcagagcttcgccgtgaccctgcaacaggtggccccttcgaagctgtccagccacagccgcagcggcattgagatcctcgtcctcgacgttgctccc

SEQ ID NO: 1896 - DNA, 543 bp, Triticum aestivum
  Clone ID: uC-tsfl9316003f07b1
catctagcggatttggatttctttaacaactaaggttcctgtttttaacattttattgccaagggcttttgcccatctccaatagctaacaagaactctttcttttctttacaaatcccaaaacctttactagactttttctgcttctttagcttacttcacctagagtcttctaccttttcttatcattgaatcaacccctttttttttttcttttaaacacatcccaacccaaagtataagcgcccacctagtcctatctagtccgaaaaatgcgaactagaactacatgagacactatctctgtcgttacgaacctaacactttctaccaagcttaatcggaataagacctcacaaacactcacaagttatatagggcttgaaagaaagtctaggtttgggtttgggttaactgctctaataaggagagtcagctacttggattaaaaagagtgatcaaaatgaataagaaaatccaagtattctacggtatccatgagttcaaatttgatgcagacatgataattaaagattagattca

SEQ ID NO: 1897 - DNA, 362 bp, Triticum aestivum
  Clone ID: uC-tsfl9316003f08b1
tttgttacatctagcggatttggatttctttaacaactaaggttcctgtttttaacattttaatgccaagtgcttttgcccatctccaatagctgacaagaactctttcttttctttacaaatcccaaaacctttactagactttttctgcttctttagcttacttcacctagagtcttctaccttttcttatcattgaatcaacccctttttttttttcttttaaacacatcccaacccaaagtataagcgcccacctagtcctatctagtccgaaaaatgcgaactagaactacatgagacactatctctgtcgttacgaacctaacactttctaccaagcttaatcggaataagacctc

SEQ ID NO: 1898 - DNA, 445 bp, Triticum aestivum
  Clone ID: uC-tsfl9316003f09b1
ggctggatttcatcattaaaacctcactgcttgtttcctgaaaccacaggtgttgaacttatggtgttactatccactcattctaataggatcatgggcattcggcactattaaccgtatccatgatttcatcgagccagggcataagatcttctggctctcagttcttgacgttgggacagctgcactaatggtagcaaacctatcaaataaataagttataaaattcgccatagatcatctttgctcttcccgcgtcgatgttctgaatgttgtattttcagggcttgttcaattcaatagcctatggtttcaacagcttagtgcgttgagcaatccatgagagactggagctgtaagtcaccaccgatctctttggttcgctatattattcccaataatcaatgaagcttgatttttatgaaaccctcggtctgctagattc

SEQ ID NO: 1899 - DNA, 395 bp, Triticum aestivum
  Clone ID: uC-tsfl9316003f10b1
cgactctcttcccgcacctagcaaatggtaagccaagaaagccaactgacggcattgcacatgatctgacattgaaatgctgctgctgctattcaacgagatcgattctaacctcaaagcgcccagatcccaatgacgagctcgtcgacgatgtccaccacgttgcagtcgcgccatgggccccgaatgcgaaccccgtcgacatggcctggtccgttgtgccggtactgcgatccggcgacttgtcccattcgaccatccagttctcgccctcctcgtcggcgcttcagagcttcgccgtgaccctgcaacaggtggccccttcgaagctgtccagccacagccgcagcggcattgagatcctcgtcctcgacgttgctcccctttcgctagac

SEQ ID NO: 1900 - DNA, 464 bp, Triticum aestivum
  Clone ID: uC-tsfl9316003f12b1
cactttgttacatctagcggatttggatttctttaacaactaaggttcctgtttttaacattttaattccaagggcttttgcccatctccaatagctaacaagaactctttcttttctttacaaatcccaaaacctttactagactttttctgcttctttagcttacttcacctagagtcttctaccttttcttatcattgaatcaacccctttttttttttcttttaaacacatcccaacccaaagtataagcgcccacctagtcctatctagtccgaaaaatgcgaactagaactacatgagacactatctctgtcgttacgaacctaacactttctaccaagcttaatcggaataagacctcacaaacactcacaagttatatagggcttgaaagaaagtctaggtttgggtttgggttaactgctctaataaggagagtcagctacttggattaaaaaga

SEQ ID NO: 1901 - DNA, 513 bp, Triticum aestivum
  Clone ID: uC-tsfl9316003g01b1
gttctccgacctcttcccgcacctagcaaatggtaagccaagaaagccaactgacggcattgcacatgagctgacaaagaaatgctgctgctgctattcaacgagatcgattctaacctcaaagcgcccagatcccaatgacgagctcgtcgacgatgtccaccacgttgcagtcgcgccatgggccccgaatgcgaaccccgtcgacatggcctggtccgttgtgccggtactgcgatccggcgacttgtcccattcgaccatccagttctcgccctcctcgtcggcgcttcagagcttcgccgtgaccctgcaacaggtggccccttcgaagctgtccagccacagccgcagcggcattgagatcctcgtcctcgacgttgctccccttccgctagacacggtgttcgtaacctggagagcgaattgacaaaacggctggagagcggcgagggcaccttttacaaggaccatccgacaagccccaatgccaaggacgttgccaacatgacg

SEQ ID NO: 1902 - DNA, 549 bp, Triticum aestivum
  Clone ID: uC-tsfl9316003g02b1
cactttgttacatctagcggatttggatttctttaacaactaaggttcctgtttttaacattttaaagccaagggcttttgcccatctccaatagctaacaagaactctttcttttctttacaaatcccaaaacctttactagactttttctgcttctttagcttacttcacctagagtcttctaccttttcttatcattgaatcaacccctttttttttttcttttaaacacatcccaacccaaagtataagcgcccacctagtcctatctagtccgaaaaatgcgaactagaactacatgagacactatctctgtcgttacgaacctaacactttctaccaagcttaatcggaataagacctcacaaacactcacaagttatatagggcttgaaagaaagtctaggtttgggtttgggttaactgctctaataaggagagtcagctacttggattaaaaagagtgatcaaaatgaataagaaaatccaagtattttacggtatccatgagttcaaatttggtgcagacatgataattaaagattaga

SEQ ID NO: 1903 - DNA, 463 bp, Triticum aestivum
  Clone ID: uC-tsfl9316003g06b1
actttgttacatgtagcggatttggatttctttaacaactaaggttcctgtttttaactttttaaagccaagggcttttgcccatctccaatagctaacaagaactctttcttttctttacaaatcccaaaacctttactagactttttctgcttctttagcttacttcacctagagtcttctaccttttcttatcattgaatcaacccctttttttttttcttttaaacacatcccaacccaaagtataagcgcccacctagtcctatctagtccgaaaaatgcgaactagaactacatgagacactatctctgtcgttacgaacctaacactttctaccaagcttaatcggaataagacctcacaaacactcacaagttatatagggcttgaaagaaagtctaggcttgggcttgggttaactgctctaatacggagagtcagctacttggattaaaaaga

SEQ ID NO: 1904 - DNA, 303 bp, Triticum aestivum
  Clone ID: uC-tsfl9316003g07b1
caagaactctttcttttcttgtacaaatcccaaaacctttactagactttttctgcttctttagcttacttcacctagagtcttttaccttttcttatcattgaatcaacccctttttttttttgttttaaacacatcccaacccaaagggtaagcgcccacctagtcctatctagttcgaaaaatgcgaactagaactacatgagacactatctctgtcgttacgaacctaacactatctaccaagcttaatcggaataagagctcacaaacactcacaagttatatagggcattgaagaaa

SEQ ID NO: 1905 - DNA, 491 bp, Triticum aestivum
  Clone ID: uC-tsfl9316003g08b1
gttctccgatctcttcccgcacctagcaaatggtaagccaagaaagccaactgacggcattgcacatgatcagacaatgaaatgctgctgctgctattcaacgagatcgattctaacctcaaagcgcccagatcccaatgacgagctcgtcgacgatgtccaccacgttgcagtcgcgccatgggccccgaatgcgaaccccgtcgacatggcctggtccgttgtgccggtactgcgatccggcgacttgtcccattcgaccatccagttctcgccctcctcgtcggcgcttcagagcttcgccgtgaccctgcaacaggtggccccttcgaagctgtccagccacagccgcagcggcattgagatcctcgtcctcgacgttgctccccttccgctagacacggtgttcgtcaacctggagagcgaattgacaaaacggctggagagcggcgagggcaccttttacaaggaccatccgacaagccccaatg

SEQ ID NO: 1906 - DNA, 508 bp, Triticum aestivum
  Clone ID: uC-tsfl9316003g09b1
tttgttacatctagcggatttggatttctttaacaactaaggttcctgtttttaacattttaatgccaatggcttttgcccatctccaatagctaacaagaactctttcttttctttacaaatcccaaaacctttactagactttttctgcttctttagcttacttcacctagagtcttctaccttttcttatcattgaatcaacccctttttttttttcttttaaacacatcccaacccaaagtataagcgcccacctagtcctatctagtccgaaaaatgcgaactagaactacatgagacactatctctgtcgttacgaacctaacactttctaccaagcttaatcggaataagacctcacaaacactcacaagttatatagggcttgaaagaaagtctaggtttgggtttgggttaactgctctaataaggagagtcagctacttggattaaaaagagtgatcaaaatgaataagaaaatccaagtattttacggtatccatga

SEQ ID NO: 1907 - DNA, 564 bp, Triticum aestivum
  Clone ID: uC-tsfl9316003g10b1
tacatctagcggatttggatttctttaacaactaaggttcctgtttttaacattttaattccaatggcttttgcccatctccaatagctaacaagaactctttcttttctttacaaatcccaaaacctttactagactttttctgcttctttagcttacttcacctagagtcttctaccttttcttatcattgaatcaacccctttttttttttcttttaaacacatcccaacccaaagtataagcgcccacctagtcctatctagtccgaaaaatgcgaactagaactacatgagacactatctctgtcgttacgaacctaacactttctaccaagcttaatcggaataagacctcacaaacactcacaagttatatagggcttgaaagaaagtctaggtttgggtttgggttaactgctctaataaggagagtcagctacttggattaaaaagagtgatcaaaatgaataagaaaatccaagtattttacggtatccatgagttcaaatttgatgcagacatgataattaaagattagattcaggttcaaattgatagggaa

SEQ ID NO: 1908 - DNA, 545 bp, Triticum aestivum
  Clone ID: uC-tsfl9316003h01b1
cactttgttacatctagcggatttggatttctttaacaactaaggttcctgtttttaacattttaatgccaagggcttttgcccatctccaatagctaacaagaactctttcttttctttacaaatcccaaaacctttactagactttttctgcttctttagcttacttcacctagagtcttctaccttttcttatcattgaatcaacccctttttttttttcttttaaacacatcccaacccaaagtataagcgcccacctagtcctatctagtccgaaaaatgcgaactagaactacatgagacactatctctgtcgttacgaacctaacactttctaccaagcttaatcggaataagacctcacaaacactcacaagttatatagggcttgaaagaaagtctaggtttgggtttgggttaactgctctaataaggagagtcagctacttggattaaaaagagtgatcaaaatgaataagaaaatccaagtattttacggtatccatgagttcaaatttgatgcagacatgataattaaagat

SEQ ID NO: 1909 - DNA, 461 bp, Triticum aestivum
  Clone ID: uC-tsfl9316003h03b1
cggatttggatttctttaacaactaaggttcctgtttttaactttttaaagccaagggcttttgcccatctccaatagctaacaagaactctttcttttctttacaaatcccaaaacctttactagactttttctgcttctttagcttacttcacctagagactgctaccttttcttatcattgaatcaacccctttttttttttcttttaaacacatcccaacccaaagtataagcgcccacctagtcctatctagtccgaaaaatgcgaactagaactacatgagacactatctctgtcgttacgaacctaacactttctaccaagcttaatcggaataagacctcacaaacactcacaagttatatagggcttgaaagaaagtctaggtttgggtttgggttaactgctctaataaggagagtcagctacttggattaaaaagagtgatcaaaatgaa

SEQ ID NO: 1910 - DNA, 349 bp, Triticum aestivum
  unsure (1)..(349): unsure at all n locations
  Clone ID: uC-tsfl9316003h04b1
ggctcaggcggtgcctagaggggaagaaatgatgacgaacaagagaagtctgttcccagtcctgcccttcaaggatctggcgaacttttatctttttaacgttggaaggcaataatttctgtagagggtggattttcccaacattcgtttttggtggaggcatcgaactccagaggttgtcgtaggttggcggcagcgttctcaaaacatttactatcataggggttgagtttgagttcgagtatgtgccctgaatcgttactgggcaattttccttaaatacattgtcctccaatcctactgagattattatggtccaagttnaaaaaaaaaaaaaacccaacatcat

SEQ ID NO: 1911 - DNA, 541 bp, Triticum aestivum
  Clone ID: uC-tsfl9316003h05b1
tcaacactttgttacatctagcggatttggatttctttaacaactaaggttcctgtttttaacattttaaagccaagggcttttgcccatctccaatagctaacaagaactctttcttttctttacaaatcccaaaacctttactagactttttctgcttctttagcttacttcacctagagtcttctaccttttcttatcattgaatcaacccctttttttttttcttttaaacacatcccaacccaaagtataagcgcccacctagtcctatctagtccgaaaaatgcgaactagaactacatgagacactatctctgtcgttacgaacctaacactttctaccaagcttaatcggaataagacctcacaaacactcacaagttatatagggcttgaaagaaagtctaggtttgggtttgggttaactgctctaataaggagagtcagctacttggattaaaaagagtgatcaaaatgaataagaaaatccaagtattttacggtatccatgagttcaaatttgatgcagacatgataa

SEQ ID NO: 1912 - DNA, 546 bp, Triticum aestivum
  Clone ID: uC-tsfl9316003h08b1
tttgttacatctagcggatttggatttctttaacaactaaggttcctgtttttaacattttaaagccaagggcttttgcccatctccaatagctgacaagaactctttcttttctttacaaatcccaaaacctttactagactttttctgcttctttagcttacttcacctagagtcttctaccttttcttatcattgaatcaacccctttttttttttcttttaaacacatcccaacccaaagtataagcgcccacctagtcctatctagtccgaaaaatgcgaactagaactacatgagacactatctctgtcgttacgaacctaacactttctaccaagcttaatcggaataagacctcacaaacactcacaagttatatagggcttgaaagaaagtctaggtttgggtttgggttaactgctctaataaggagagtcagctacttggattaaaaagagtgatcaaaatgaataagaaaatccaagtattttacggtatccatgagttcaaatttgatgcagacatgataattaaagattaga

SEQ ID NO: 1913 - DNA, 491 bp, Triticum aestivum
  Clone ID: uC-tsfl9316003h09b1
tcaacactttgttacatctagcggatttggatttctttaacaactaaggttcctgtttttaacattttaatgccaagggcttttgcccatctccaatagctaacaagaactctttcttttctttacaaatcccaaaacctttactagactttttctgcttctttagcttacttcacctagagtcttctaccttttcttatcattgaatcaacccctttttttttttcttttaaacacatcccaacccaaagtataagcgcccacctagtcctatctagtccgaaaaatgcgaactagaactacatgagacactatctctgtcgttacgaacctaacactttctaccaagcttaatcggaataagacctcacaaacactcacaagttatatagggcttgaaagaaagtctaggtttgggtttgggttaactgctctaataaggagagtcagctacttggattaaaaagagtgatcaaaatgaataagaaaat

SEQ ID NO: 1914 - DNA, 412 bp, Triticum aestivum
  Clone ID: uC-tsfl9316003h10b1
tttgttacatctagcgcatttggatttctttaacaactaaggttcctgtttttaacattttaaagccaagggcttttgcccatctccaatagctgacaagaactctttcttttctttacaaatcccaaaacctttactagactttttctgcttctttagcttacttcacctagagtcttctaccttttcttatcattgaatcaacccctttttttttttcttttaaacacatcccaacccaaagtataagcgcccacctagtcctatctagtccgaaaaatgcgaactagaactacatgagacactatctctgtcgttacgaacctaacactttctaccaagcttaatcggaataagacctcacaaacactcacaagttatatagggcttgaaagaaagtctaggtttgggt

SEQ ID NO: 1915 - DNA, 475 bp, Triticum aestivum
  Clone ID: uC-tsfl9316003h11b1
cactttgttacatctagcggatttggatttctttaacaactaaggttcctgtttttaacattttaaagccaagggcttttgcccatctccaatagctaacaagaactctttcttttctttacaaatcccaaaacctttactagactttttctgcttctttagcttacttcacctagagtcttctaccttttcttatcattgaatcaacccctttttttttttcttttaaacacatcccaacccaaagtataagcgcccacctagtcctatctagtccgaaaaatgcgaactagaactacatgagacactatctctgtcgttacgaacctaacactttctaccaagcttaatcggaataagacctcacaaacactcacaagttatatagggcttgaaagaaagtctaggtttgggtttgggttaactgctctaataaggagagtcagctacttggattaaaagagtgatcaaaatg

SEQ ID NO: 1916 - DNA, 491 bp, Triticum aestivum
  Clone ID: uC-tsfl9316004a02b1
tcaacactttgttacatctagcggatttggatttctttaacaactaaggttcctgtttttaacattttaaagccaagggcttttgcccatctccaatagctaacaagaactctttcttttctttacaaatcccaaaacctttactagactttttctgcttctttagcttacttcacctagagtcttctaccttttcttatcattgaatcaacccctttttttttttcttttaaacacatcccaacccaaagtataagcgcccacctagtcctatctagtccgaaaaatgcgaactagaactacatgagacactatctctgtcgttacgaacctaacactttctaccaagcttaatcggaataagacctcacaaacactcacaagttatatagggcttgaaagaaagtctaggtttgggtttgggttaactgctctaataaggagagtcagctacttggattaaaaagagtgatcaaaatgaataagaaaat

SEQ ID NO: 1917 - DNA, 365 bp, Triticum aestivum
  Clone ID: uC-tsfl9316004a04b1
gtcaaatcttagcttgctacgctgcaagaggcagatacgtgatctcagcaagcgagaactcccatgtgtacgtgtggagaaacgacgacagccctgagcaaagaagcagcagcagcaagggcgtcgtgtctgtcgcaaactcctacgagtacttctactgccgggacgtgacggtggccgctgccttgccatccacggcggggtcagcggcgacgtcccggaccaactccaggaggaagcaccaggagctggattgtgtgtccgagtatcctctgccgcacgcaggagacggagattcctctgatttccagcggcagcagagccgcaatgacctaagcaacggttcgaaccacagcggcggtgac

SEQ ID NO: 1918 - DNA, 407 bp, Triticum aestivum
  Clone ID: uC-tsfl9316004a05b1
gtgagcgagaaatccccaatccccaccaaaccctaacccaaaccctaaccctgattgaaacgaccaggagaggagaggagaggagcggatccggcgatggccgtcgagaagatgcacttgtccatgccgttgcccgccggcttggagggtttccccttcaccacgttccaggcggagctggaggccttcaccgtcaagttgagggcggaggcgaagaaggccaaggccaagccggaggtcaaggaggccaaggccaaggaggagaaggccaagccggaggtcaaggccaaggtgaagaaggccaaggcgaaggaggccaagccggaggtcgaggccaaggcaaaggaggccaaggcaaaggaggccaaggcgaaggaggccaagccggaggtcgaggccaagtcaaa

SEQ ID NO: 1919 - DNA, 380 bp, Triticum aestivum
  Clone ID: uC-tsfl9316004a08b1
agcggatgtggattcctttaacaactaagggtcctgttcttaacattctaaagccaagggctttggtccatctccaatagctaacacgaactctttctttgctttacaaatcccaaaacctttactagactttatctgcttctttagcttacttaacctagagtcttctaccttttcttatgattgaatcaaccaccttgtttttttttctgttaaacacataccaacccaaaggataagcgcccacctagtgctatctagtccgaaaaatgcgaactagaactacaggagacactatctctgttgttacgaacctaacactttctaccaagcttaatcggaataagacctcacaaacactcacaagttatatagggctt

SEQ ID NO: 1920 - DNA, 541 bp, Triticum aestivum
  Clone ID: uC-tsfl9316004a11b1
cactttgttacatctagcggatttggatttctttaacaactaaggttcctgtttttaacattttaaagccaagggcttttgcccatctccaatagctaacaagaactctttcttttctttacaaatcccaaaacctttactagactttttctgcttctttagcttacttcacctagagtcttctaccttttcttatcattgaatcaacccctttttttttttcttttaaacacatcccaacccaaagtataagcgcccacctagtcctatctagtccgaaaaatgcgaactagaactacatgagacactatctctgtcgttacgaacctaacactttctaccaagcttaatcggaataagacctcacaaacactcacaagttatatagggcttgaaagaaagtctaggtttgggtttgggttaactgctctaataaggagagtcagctacttggattaaaaagagtgatcaaaatgaataagaaaatccaagtattttacggtatccatgagttcaaatttgatgcagacatgataattaa

SEQ ID NO: 1921 - DNA, 552 bp, Triticum aestivum
  Clone ID: uC-tsfl9316004a12b1
cactttgttacatctagcggatttggatttctttaacaactaaggttcctgtttttaacattttaatgccaagggcttttgcccatctccaatagctaacaagaactctttcttttctttacaaatcccaaaacctttactagactttttctgcttctttagcttacttcacctagagtcttctaccttttcttatcattgaatcaacccctttttttttttcttttaaacacatcccaacccaaagtataagcgcccacctagtcctatctagtccgaaaaatgcgaactagaactacatgagacactatctctgtcgttacgaacctaacactttctaccaagcttaatcggaataagacctcacaaacactcacaagttatatagggcttgaaagaaagtctaggtttgggtttgggttaactgctctaataaggagagtcagctacttggattaaaaagagtgatcaaaatgaataagaaaatccaagtattttacggtatccatgagttcaaatttgatgcagacatgataattaaagattagattc

SEQ ID NO: 1922 - DNA, 313 bp, Triticum aestivum
  Clone ID: uC-tsfl9316004b02b1
acactttgttacatctagcggatttggatttctttaacaactaaggttcctgtttttaacattttaaagccaagggcttttgcccatctccaatagctaacaagaactctttcttttctttacaaatgccaaaacctttactagactttttctgcttctttagcttacttcacctagagtcttctaccttttcttatcattgaatcaacccctttttttttttcttttaaacacatcccaacccaaagtataagcgcccacctagtcctatctagtccgaaaaatgcgaactagaactacatgagacactatc

SEQ ID NO: 1923 - DNA, 409 bp, Triticum aestivum
  Clone ID: uC-tsfl9316004b03b1
tcaacactttgttacatctagcggatttggatttctttaacaactaaggttcctgtttttaacattttattgccaagggcttttgcccatctccaatagctaacaagaactctttcttttctttacaaatcccaaaacctttactagactttttctgcttctttagcttacttcacctagagtcttctaccttttcttatcattgaatcaacccctttttttttttcttttaaacacatcccaacccaaagtataagcgcccacctagtcctatctagtccgaaaaatgcgaactagaactacatgagacactatctctgtcgttacgaacctaacactttctaccaagcttaatcggaataagacctcacaaacactcacaagttatatagggcttgaaagaaagtct

SEQ ID NO: 1924 - DNA, 245 bp, Triticum aestivum
  Clone ID: uC-tsfl9316004b04b1
gactttttctggttctttagcttacttcacctagaggcttctaccttgtcttatcagtgaatcaaccccttttttttttgcttttaaacacatcccaacccaaagtataatgcgcccacctagtcctatgctagtccgaaaaatgcgaactagaactacatgagacactatctatgtggttacgaacctaacactctctaccaagcttaatgggaataagaccttacaaacactcacaagttata

SEQ ID NO: 1925 - DNA, 318 bp, Triticum aestivum
  Clone ID: uC-tsfl9316004b07b1
ttctccgacctcttcccgcacctagcaaatggtaagccaagaaagccaactgacggcattgcacatgtgcagacaaagaaatgctgctgctgctattcaacgagatcgattctaacctcaaagcgcccagatcccaatgacgagctcgtcgacgatgtccaccacgttgcagtcgcgccatgggccccgaatgcgaaccccgtcgacatggcctggtccgttgtgccggtactgcgatccggcgacttgtcccattcgaccatccagttctcgccctcctcgtcggcgcttcagagcttcgccgtgaccctgcaacag

SEQ ID NO: 1926 - DNA, 462 bp, Triticum aestivum
  Clone ID: uC-tsfl9316004c03b1
cttcccgcacctagcaaatggtgagccaagaaagccaactgacggcattgcacatgagtcagacaattaaatgctgctgctgctattcagcgagatcgattctaacctcaaggcgcccagatcccaatgacgagctcgtggacgatgtccaccacgttgcagtcgcgccatgggccccgaatgcgaaccccgtcgacatggcctggtccgttgtgccggtactgcgatccggcgacttgtcccattcgaccatccagttctcgccctcctcgtgggcgcttcagagcttcgccgtgaccctgcaacaggtggccccttcgaagctgtccagccacagccgcagcggcattgagatcctcgtgctcgacgttgctccccttccgctagacacggtgttcgtcaacctggagagcgaattgacaaaacggttggagagcggcgagggcaccttttacaaggacc

SEQ ID NO: 1927 - DNA, 523 bp, Triticum aestivum
  Clone ID: uC-tsfl9316004c04b1
aacactttgttacatctagcggatttggatttctttaacaactaaggttcctgtttttaacattttattgccaagggcttttgcccatctccaatagctaacaagaactctttcttttctttacaaatcccaaaacctttactagactttttctgcttctttagcttacttcacctagagtcttctaccttttcttatcattgaatcaacccctttttttttttcttttaaacacatcccaacccaaagtataagcgcccacctagtcctatctagtccgaaaaatgcgaactagaactacatgagacactatctctgtcgttacgaacctaacactttctaccaagcttaatcggaataagacctcacaaacactcacaagttatatagggcttgaaagaaagtctaggtttgggtttgggttaactgctctaataaggagagtcagctacttggattaaaaagagtgatcaaaatgaataagaaaatccaagtattttacggtatccatgagttcaaattt

SEQ ID NO: 1928 - DNA, 380 bp, Triticum aestivum
  Clone ID: uC-tsfl9316004c05b1
tttcgagcgcctcctcctgtctcgtcctcgtgccccgtcccctcgtcggcgcccgatctaagtcaagatgagtcgtggcgggagtgctggtggtggtcaaagttctctgggttacctgtttggagatggcgagcctgcaaagcctgctgcagcaccagctgcgaagcccgcacctgctgagaaaccagcaccggcagctgctgatgtagccaagcagattccagctggcattccaggtagccgggcgaacaactattaccgtgcagatggccagaacacgggcaacttgcttacggaccgtgcttcaaccaaggttcatgctgctcctggcggtggctcgtccctgggctacttgtttggcggaaagtgatgttaatgat

SEQ ID NO: 1929 - DNA, 535 bp, Triticum aestivum
  Clone ID: uC-tsfl9316004c08b1
tttagatcttgtggctggatttcatcattaaaacctcactgcttgtttcctgaaaccacatgtgttgaacagatggggatactatccactcattctaataggatcatgggcattcggcactattaaccgtatccatgatttcatcgagccagggcataagatcttctggctctcagttcttgacgttgggacagctgcactaatggtagcaaacctatcaaataaataagttataaaattcgccatagatcatctttgctcttcccgagtcgatgttctgaatgttgtattttcagggcttgttcaattcaatagcctatggtttcaacagctcagtgcgtcgagcaatccatgagagactggagctgtaagtcaccaccgatctctttggtttgctatattattcccaataatcaatgaagcttgatttttatgaaacccttggtctgctagattcttgccagaacggctatatcgatggcttccaagcaatttcagaccaaaaaaccatctgattctacatcagcaacaacaa

SEQ ID NO: 1930 - DNA, 475 bp, Triticum aestivum
  Clone ID: uC-tsfl9316004c09b1
tgttctccgacctcttcccgcacctagcaaatggtaagccaagaaagccaactgacggcattgcacatgatcagacaaagaaatgctgctgctgctattcaacgagatcgattctaacctcaaagcgcccagatcccaatgacgagctcgtcgacgatgtccaccacgttgcagtcgcgccatgggccccgaatgcgaaccccgtcgacatggcctggtccgttgtgccggtactgcgatccggcgacttgtcccattcgaccatccagttctcgccctcctcgtcggcgcttcagagcttcgccgtgaccctgcaacaggtggccccttcgaagctgtccagccacagccgcagcggcattgagatcctcgtcctcgacgttgctccccttccgctagacacggtgttcgtcaacctggagagcgaattgacaaaacggctggagagcggcgagggcacctttttacaggacca

SEQ ID NO: 1931 - DNA, 348 bp, Triticum aestivum
  Clone ID: uC-tsfl9316004c12b1
gctgctgctgctattcaacgagatcgattctaacctcaaagcgcccagatcccaatgacgagctcgtcgacgatgtccaccacgttgcagtcgcgccatgggccccgaatgcgaaccccgttgacatggcctggtccgctgtgccggtactgtgatccggcgacttgtcccattcgaccatccagttctcgcccttctcgtgggcgcttcagagcttcgccgtgaccctgcaacaggtggtcccttcgaagctgctcagccacagccgcagcggcattgagatcctcgacctcgacgttgctccccttccgctagacacggtgttcgacaacctggagagcgaattga

SEQ ID NO: 1932 - DNA, 558 bp, Triticum aestivum
  Clone ID: uC-tsfl9316004d04b1
tcaacactttgttacatctagcggatttggatttctttaacaactaaggttcctgtttttaacattttaaagccaagggcttttgcccatctccaatagctaacaagaactctttcttttctttacaaatcccaaaacctttactagactttttctgcttctttagcttacttcacctagagtcttctaccttttcttatcattgaatcaacccctttttttttttcttttaaacacatcccaacccaaagtataagcgcccacctagtcctatctagtccgaaaaatgcgaactagaactacatgagacactatctctgtcgttacgaacctaacactttctaccaagcttaatcggaataagacctcacaaacactcacaagttatatagggcttgaaagaaagtctaggtttgggtttgggttaactgctctaataaggagagtcagctacttggattaaaaagagtgatcaaaatgaataagaaaatccaagtattttacggtatccatgagttcaaatttgatgcagacatgataattaaagattagattcag

SEQ ID NO: 1933 - DNA, 526 bp, Triticum aestivum
  Clone ID: uC-tsfl9316004d05b1
ctctaacactttgttcatctagcggatttggatttctttaacaactaaggttcctgtttttaacattttaatgccaagggcttttgcccatctccaatagctaacaagaactctttcttttctttacaaatcccaaaacctttactagactttttctgcttctttagcttacttcacctagagtcttctaccttttcttatcattgaatcaacccctttttttttttcttttaaacacatcccaacccaaagtataagcgcccacctagtcctatctagtccgaaaaatgcgaactagaactacatgagacactatctctgtcgttacgaacctaacactttctaccaagcttaatcggaataagacctcacaaacactcacaagttatatagggcttgaaagaaagtctaggtttgggtttgggttaactgctctaataaggagagtcagctacttggattaaaaagagtgatcaaaatgaataagaaaatccaagtattttacggtatccatgagttcaaattt

SEQ ID NO: 1934 - DNA, 473 bp, Triticum aestivum
  Clone ID: uC-tsfl9316004d06b1
gttctccgtcctcttcccgcacctagcagatggtaagccaagaaagccaactgactgcattgcacatgttcagacaaagaaatgctgctgctgctattcaacgagatcgattctaacctcaaagcgcccagatcccaatgacgagctcgtcgacgatgtccaccacgttgcagtcgcgccatgggccccgaatgcgaaccccgtcgacatggcctggtccgttgtgccggtactgcgatccggcgacttgtcccattcgaccatccagttctcgccctcctcgtcggcgcttcagagcttcgccgtgaccctgcaacaggtggccccttcgaagctgtccagccacagccgcagcggcattgagatcctcgtcctcgacgttgctccccttgcgctagacacggtgttcgtcaacctggagagcgaattgacaaaacggctggagagcggcgagggcaccttttacaaggacc

SEQ ID NO: 1935 - DNA, 186 bp, Triticum aestivum
  Clone ID: uC-tsfl9316004d12b1
tgctgctgctgctattcaacgagatcggttctaacctcaaagcgcccagagcccaatgacgagctcgccgacgatgtccaccacgttgtagtcgcgccatgggccccgaatgcgaaccccgaagacatggcctggtacgatgtgccggtactgcgatccacctacttggcccattcgaccatccag

SEQ ID NO: 1936 - DNA, 192 bp, Triticum aestivum
  Clone ID: uC-tsfl9316004e02b1
acactttgttacatctagcggatttggatttctttaacaactaaggttcctgtttttaacattttaaagccaagggcttttgcccatctccaatagctaacaagaactctttcttttctttacaaatgccaaaacctttactagactttttctgcttctttagcttacttcacctagagtcttctacctttt

SEQ ID NO: 1937 - DNA, 463 bp, Triticum aestivum
  Clone ID: uC-tsfl9316004e03b1
cctcttcccgcacctagcaaatggtaagccaagaaagccaactgacggcattgcacatgatcagacaatgaaatgctgctgctgctattcaacgagatcgattctaacctcaaagcgcccagatcccaatgacgagctcgtcgacgatgtccaccacgttgcagtcgcgccatgggccccgaatgcgaaccccgtcgacatggcctggtccgttgtgccggtactgcgatccggcgacttgtcccattcgaccatccagttctcgccctcctcgtcggcgcttcagagcttcgccgtgaccctgcaacaggtggccccttcgaagctgtccagccacagcctgagcggcattgagatcctagtcctcgacgttgctccccttccgctagacacggtgttcgtcaacctggagagcgaattgacaaaacggctggagagcggcgagggcaccttttacaaggac

SEQ ID NO: 1938 - DNA, 468 bp, Triticum aestivum
  Clone ID: uC-tsfl9316004e08b1
gttctccgtcctcttcccgcacctagcaaatggtaagccaagaaagccaactgacggcattgcacatgttcagacaaagaaatgctgctgctgctattcaacgagatcgattctaacctcaaagcgcccagatcccaatgacgagctcgtcgacgatgtccaccacgttgcagtcgcgccatgggccccgaatgcgaaccccgtcgacatggcctggtccgttgtgccggtactgcgatccggcgacttgtcccattcgaccatccagttctcgccctcctcgtcggcgcttcagagcttcgccgtgaccctgcaacaggtggccccttcgaagctgtccagccacagccgcagcggcattgagatcctcgtcctcgacgttgctccccttccgctagacacggtgttcgtcaacctggagagcgaattgacaaaacggctggagagcggcgagggcaccttttacaa

SEQ ID NO: 1939 - DNA, 309 bp, Triticum aestivum
  Clone ID: uC-tsfl9316004f01b1
cctcttcccgcacctagcaaatggtaagccaagaaagccaactgacggcattgcacatgatcagacaatgaaatgctgctgctgctattcaacgagatcgattctaacctcaaagcgcccagatcccaatgacgagctcgtcgacgatgtccaccacgttgcagtcgcgccatgggccccgaatgcgaaccccgtcgacatggcctggtccgttgtgccggtactgcgatccggcgacttgtcccattcgaccatccagttctcgccctcctcgtcggcgcttcagagcttcgccgtgaccctgcaaca

SEQ ID NO: 1940 - DNA, 406 bp, Triticum aestivum
  Clone ID: uC-tsfl9316004f02b1
ctcttcccgcacctagcaaatggtaagccaagaaagccaactgacggcattgcacatgagcagacaatgaaatgctgctgctgctattcaacgagatcgattctaacctcaaagcgcccagatcccaatgacgagctcgtcgacgatgtccaccacgttgcagtcgcgccatgggccccgaatgcgaaccccgtcgacatggcctggtccgttgtgccggtactgcgatccggcgacttgtcccattcgaccatccagttctcgccctcctcgtcggcgcttcagagcttcgccgtgaccctgcaacaggtggccccttcgaagctgtccagccacagccgcagcggcattgagatcctcgtcctcgacgttgctccccttccgctagacacggtgttcgtcaacc

SEQ ID NO: 1941 - DNA, 322 bp, Triticum aestivum
  Clone ID: uC-tsfl9316004f03b1
cttcccgcacctagcaaatggtaagccaagaaagccaactgacggcattgcacatgattcagacaattaaatgctgctgctgctattcaacgagatcgattctaacctcaaagcgcccagatcccaatgacgagctcgtcgacgatgtccaccaccttgcagtcgcgccatgggccccgaatgccaaccccgtcgacatggcctggtccgttgtgccggtactgcgatccggcgacttgtcccattcgaccatccagttctcgcccttctcgtgggtgcttgagagcttcgacgagaccctgctacaggtggcccctttgaa

SEQ ID NO: 1942 - DNA, 539 bp, Triticum aestivum
  Clone ID: uC-tsfl9316004f04b1
cactttgttacatctagcggatttggatttctttaacaactaaggttcctgtttttaacattttaaagccaaggtcttttgcccatctccaatagctaacaagaactctttcttttctttacaaatgccaaaacctttactagactttttctgcttctttagcttacttcacctagagtcttctaccttttcttatcattgaatcaacccctttttttttttcttttaaacacatcccaacccaaagtataagcgcccacctagtcctatctagtccgaaaaatgcgaactagaactacatgagacactatctctgtcgttacgaacctaacactttctaccaagcttaatcggaataagacctcacaaacactcacaagttatatagggcttgaaagaaagtctaggtttgggtttgggttaactgctctaataaggagagtcagctacttggattaaaaagagtgatcaaaatgaataagaaaatccaagtattttacggtatccatgagttcaaatttgatgcagacatgataatt

SEQ ID NO: 1943 - DNA, 388 bp, Triticum aestivum
  Clone ID: uC-tsfl9316004f05b1
acaacccactctttaacaaatttcacacgctccctgcatttcgtgttctccccaaatatattactgcatcttcacttccacccccaccatattatcaccgcaaaaatggtggaccacggtatatcctcacagctactcctatcacacaggttatcatagagccattcaaacagagatttcgaaaagaacccctgctgcctccttcgcggcacaaatctgacccaaatccccaattgagctggacagtctctaagcacgtgaagcacagattcaactccacctttacaaacctgagacacattcgaggcgctaagatgtcttcgatgccgttcctcatctgtcataactatgtccagtttggttatatatattttctggttatacttat

SEQ ID NO: 1944 - DNA, 310 bp, Triticum aestivum
  Clone ID: uC-tsfl9316004f07b1
cactttgttacatctagcggatttggatttctttaacaactaaggttcctgtttttaacattttatagccaagggcttttgcccatctgcaatagctaacaagaactctttcttttctttacaaatcccaaaacctttactagactttttctgcttctttagcttacttcacctagagtcttctaccttttcttatcattgaatcaacccctttttttttttcttttaaacacatcccaacccaaagtataagcgcccacctagtcctatctagtccgaaaaatgcgaactagaactacatgagacacta

SEQ ID NO: 1945 - DNA, 485 bp, Triticum aestivum
  Clone ID: uC-tsfl9316004f08b1
cactttgttacatctagcggatttggatttctttaacaactaaggttcctgtttttaacattttaatagccaagggcttttgcccatctgcaatagctaacaagaactctttcttttctttacaaatcccaaaacctttactagactttttctgcttctttagcttacttcacctagagtcttctaccttttcttatcattgaatcaacccctttttttttttcttttaaacacatcccaacccaaagtataagcgcccacctagtcctatctagtccgaaaaatgcgaactagaactacatgagacactatctctgtcgttacgaacctaacactttctaccaagcttaatcggaataagacctcacaaacactcacaagttatatagggcttgaaagaaagtctaggtttgggtttgggttaactgctctaataaggagagtcagctacttggattaaaaagagtgatcaaaatgaataagaa

SEQ ID NO: 1946 - DNA, 169 bp, Triticum aestivum
  Clone ID: uC-tsfl9316004f09b1
caaagaaatgctgctgctgctattcaacgagatcgattctaacctcaaagcgcccagatcccaatgacgagctcgtcgacgatgtccaccacgttgcagttcgcgccatgggccccgaatgcgaaccccgtcgatatggcctgggccgttgtgccggtactgccatccg

SEQ ID NO: 1947 - DNA, 552 bp, Triticum aestivum
  Clone ID: uC-tsfl9316004f11b1
cactttgttacatctagcggatttggatttctttaacaactaaggttcctgtttttaacattttaatgccaagggcttttgcccatctccaatagctaacaagaactctttcttttctttacaaatcccaaaacctttactagactttttctgcttctttagcttacttcacctagagtcttctaccttttcttatcattgaatcaacccctttttttttttcttttaaacacatcccaacccaaagtataagcgcccacctagtcctatctagtccgaaaaatgcgaactagaactacatgagacactatctctgtcgttacgaacctaacactttctaccaagcttaatcggaataagacctcacaaacactcacaagttatatagggcttgaaagaaagcctaggtttgggtttgggttaactgctctaataaggagagtcagctacttggattaaaaagagtgatcaaaatgaataagaaaatccaagtattttacggtatccatgaggtcaaatttgatgcagacatgataattaaagattagattc

SEQ ID NO: 1948 - DNA, 420 bp, Triticum aestivum
  Clone ID: uC-tsfl9316004f12b1
ccgcacctagcaaatggtaagccaagaatgccaactgacggtattgcacatgattttacaattaaatgctgctgctgctattcaacgagatcgattctaacctcaaagcgcccagatcccaatgacgagctcgtcgacgatgtccaccacgttgcagtcgcgccatgggccccgaatgcgaaccccgtcgacatggcctggtccgttgtgccggtactgcgatccggcgacttgtcccattcgaccatccagttctcgccctcctcgtcggcgcttcagagctttgccgtgaccctgcaacaggtggccccttcgaagctgttcagccacagccgtagcggcattgagatcctcgacctcgacgttgctcccctttcgctagacacggtgttcgtcaacctggagagcgaattgacaaaa

SEQ ID NO: 1949 - DNA, 538 bp, Triticum aestivum
  Clone ID: uC-tsfl9316005a02b1
cactttgttacatctagcggatttggatttctttaacaactaaggttcctgtttttaacattttaatgccaagggcttttgcccatctccaatagctaacaagaactctttcttttctttacaaatcccaaaacctttactagactttttctgcttctttagcttacttcacctagagtcttctaccttttcttatcattgaatcaacccctttttttttttcttttaaacacatcccaacccaaagtataagcgcccacctagtcctatctagtccgaaaaatgcgaactagaactacatgagacactatctctgtcgttacgaacctaacactttctaccaagcttaatcggaataagacctcacaaacactcacaagttatatagggcttgaaagaaagtctaggtttgggtttgggttaactgctctaataaggagagtcagctacttggattaaaaagagtgatcaaaatgaataagaaaatccaagtattttacggtatccatgagttcaaatttgatgcagacatgataat

SEQ ID NO: 1950 - DNA, 542 bp, Triticum aestivum
  Clone ID: uC-tsfl9316005a03b1
tcaacactttgttacatctagcggatttggatttctttaacaactaaggttcctgtttttaacattttaaagccaagggcttttgcccatctccaatagctaacaagaactctttcttttctttacaaatcccaaaacctttactagactttttctgcttctttagcttacttcacctagagtcttctaccttttcttatcattgaatcaacccctttttttttttcttttaaacacatcccaacccaaagtataagcgcccacctagtcctatctagtccgaaaaatgcgaactagaactacatgagacactatctctgtcgttacgaacctaacactttctaccaagcttaatcggaataagacctcacaaacactcacaagttatatagggcttgaaagaaagtctaggtttgggtttgggttaactgctctaataaggagagtcagctacttggattaaaaagagtgatcaaaatgaataagaaaatccaagtattttacggtatccatgagttcaaatttgatgcagacatgataat

SEQ ID NO: 1951 - DNA, 474 bp, Triticum aestivum
  Clone ID: uC-tsfl9316005a08b1
gttctccgactctcttcccgcacctagcaaatggtaagccaagaaagccaactgacggcattgcacatgatctagacatagaaatgctgctgctgctattcaacgagatcgattctaacctcaaagcgcccagatcccaatgacgagctcgtcgacgatgtccaccacgttgcagtcgcgccatgggccccgaatgcgaaccccgtcgacatggcctggtccgttgtgccggtactgcgatccggcgacttgtcccattcgaccatccagttctcgccctcctcgtcggcgcttcagagcttcgccgtgaccctgcaacaggtggccccttcgaagctgtccagccacagccgcagcggcattgagatcctcgtcctcgacgttgctccccttccgctagacacggtgttcgtcaacctggagagcgaattgacacaacggctggagagcggcgagggcaccttttacaaggac

SEQ ID NO: 1952 - DNA, 518 bp, Triticum aestivum
  Clone ID: uC-tsfl9316005a09b1
tcttcccgcacctagcaaatggtaagccaagaaagccaactgacggcattgcacatgatttgacaaagaaatgctgctgctgctattcaacgagatcgattctaacctcaaagcgcccagatcccaatgacgagctcgtcgacgatgtccaccacgttgcagtcgcgccatgggccccgaatgcgaaccccgtcgacatggcctggtccgttgtgccggtactgcgatccggcgacttgtcccattcgaccatccagttctcgccctcctcgtcggcgcttcagagctttgccgtgaccctgcaacaggtggccccttcgaagctgtccagccacagccgcagcggcattgagatcctcgtcctcgacgttgctccccttccgctagacacggtgttcgtcaacctggagagcgaattgacaaaacggctggagagcggcgagggcaccttttacaaggaccatccgacaagccccaatgccaaggacgttgtcaacatgacgcccgaggagcgtcta

SEQ ID NO: 1953 - DNA, 528 bp, Triticum aestivum
  Clone ID: uC-tsfl9316005a10b1
tcaacactttgttacatctagcggatttggatttctttaacaactaaggttcctgtttttaacattttaatgccaagggcttttgcccatctccaatagctaacaagaactctttcttttctttacaaatcccaaaacctttactagactttttctgcttctttagcttacttcacctagagtcttctaccttttcttatcattgaatcaacccctttttttttttcttttaaacacatcccaacccaaagtataagcgcccacctagtcctatctagtccgaaaaatgcgaactagaactacatgagacactatctctgtcgttacgaacctaacactttctaccaagcttaatcggaataagacctcacaaacactcacaagttatatagggcttgaaagaaagtctaggtttgggtttgggttaactgctctaataaggagagtcagctacttggattaaaaagagtgatcaaaatgaataagaaaatccaagtattttacggtatccatgagttcaaatttgat

SEQ ID NO: 1954 - DNA, 524 bp, Triticum aestivum
  Clone ID: uC-tsfl9316005a12b1
gttctccgacctcttcccgcacctagcaaatggtaagccaagaaagccaactgacggcattgcacatgagcagacaaagaaatgctgctgctgctattcaacgagatcgattctaacctcaaagcgcccagatcccaatgacgagctcgtcgacgatgtccaccacgttgcagtcgcgccatgggccccgaatgcgaaccccgtcgacatggcctggtccgttgtgccggtactgcgatccggcgacttgtcccattcgaccatccagttctcgccctcctcgtcggcgcttcagagcttcgccgtgaccctgcaacaggtggccccttcgaagctgtccagccacagccgcagcggcattgagatcctcgtcctcgacgttgctccccttccgctagacacggtgttcgtcaacctggagagcgaattgacaaaacggctggagagcggcgagggcaccttttacaaggaccatccgacaagccccaatgccaaggacgttgccaacatgacgcccgaggagc

SEQ ID NO: 1955 - DNA, 434 bp, Triticum aestivum
  Clone ID: uC-tsfl9316005b01b1
ggttaagcgaagatgtcggggcgcggcaagggaggcaagggtctgggcaagggcggcgccaagcgccaccggaaggtgctgcgggacaacatccagggcatcaccaagccggcgatccggcgcctggcgcggcggggcggcgtgaagcgcatctcggggctcatctacgaggagacccgcggcgtgctcaagatcttcctcgagaacgtcatccgcgacgccgtcacctacaccgagcacgcccgccgcaagaccgtcaccgccatggacgtcgtctacgccctcaagcgccagggacgcaccctctacggattcgggggctaggctccggcgaggcgaatcgagctcgcaccacttgatcagatgttcagattagcagtagctaggcgttgttcagtgttcacggtgatcgatgtaatttatgatgtatggtg

SEQ ID NO: 1956 - DNA, 514 bp, Triticum aestivum
  Clone ID: uC-tsfl9316005b04b1
cacctagcaaatggtaagccaagaaagccaactgacggcattgcacatgagttgacaaagaaatgctgctgctgctattcaacgagatcgattctaacctcaaagcgcccagatcccaatgacgagctcgtcgacgatgtccaccacgttgcagtcgcgccatgggccccgaatgcgaaccccgtcgacatggcctggtccgttgtgccggtactgcgatccggcgacttgtcccattcgaccatccagttctcgccctcctcgtcggcgcttcagagcttcgccgtgaccctgcaacaggtggccccttcgaagctgtccagccacagccgcagcggcattgagatcctcgtcctcgacgttgctccccttccgctagacacggtgttcgtcaacctggagagcgaattgacaaaacggctggagagcggcgagggcaccttttacaaggaccatccgacaagccccaatgccaaggacgttgccaacatgacgcccgaggagcgtctagcca

SEQ ID NO: 1957 - DNA, 553 bp, Triticum aestivum
  Clone ID: uC-tsfl9316005b07b1
cactttgttacatctagcggatttggatttctttaacaactaaggttcctgtttttaacattttaatgccaagggcttttgcccatctccaatagctaacaagaactctttcttttctttacaaatcccaaaacctttactagactttttctgcttctttagcttacttcacctagagtcttctaccttttcttatcattgaatcaacccctttttttttttcttttaaacacatcccaacccaaagtataagcgcccacctagtcctatctagtccgaaaaatgcgaactagaactacatgagacactatctctgtcgttacgaacctaacactttctaccaagcttaatcggaataagacctcacaaacactcacaagttatatagggcttgaaagaaagtctaggtttgggtttgggttaactgctctaataaggagagtcagctacttggattaaaaagagtgatcaaaatgaataagaaaatccaagtattttacggtatccatgagttcaaatttgatgcagacatgataattaaagattagattca

SEQ ID NO: 1958 - DNA, 536 bp, Triticum aestivum
  Clone ID: uC-tsfl9316005b08b1
cactttgttacatctagcggatttggatttctttaacaactaaggttcctgtttttaacattttaatgccaagggcttttgcccatctccaatagctaacaagaactctttcttttctttacaaatcccaaaacctttactagactttttctgcttctttagcttacttcacctagagtcttctaccttttcttatcattgaatcaacccctttttttttttcttttaaacacatcccaacccaaagtataagcgcccacctagtcctatctagtccgaaaaatgcgaactagaactacatgagacactatctctgtcgttacgaacctaacactttctaccaagcttaatcggaataagacctcacaaacactcacaagttatatagggcttgaaagaaagtctaggtttgggtttgggttaactgctctaataaggagagtcagctacttggattaaaaagagtgatcaaaatgaataagaaaatccaagtattttacggtatccatgagttcaaatttgatgcagacatgata

SEQ ID NO: 1959 - DNA, 555 bp, Triticum aestivum
  Clone ID: uC-tsfl9316005b10b1
tcaacactttgttacatctagcggatttggatttctttaacaactaaggttcctgtttttaacattttaatgccaagggcttttgcccatctccaatagctaacaagaactctttcttttctttacaaatcccaaaacctttactagactttttctgcttctttagcttacttcacctagagtcttctaccttttcttatcattgaatcaacccctttttttttttcttttaaacacatcccaacccaaagtataagcgcccacctagtcctatctagtccgaaaaatgcgaactagaactacatgagacactatctctgtcgttacgaacctaacactttctaccaagcttaatcggaataagacctcacaaacactcacaagttatatagggcttgaaagaaagtctaggtttgggtttgggttaactgctctaataaggagagtcagctacttggattaaaaagagtgatcaaaatgaataagaaaatccaagtattttacggtatccatgagttcaaatttgatgcagacatgataattaaagattagatt

SEQ ID NO: 1960 - DNA, 569 bp, Triticum aestivum
  Clone ID: uC-tsfl9316005b11b1
aacactttgttacatctagcggatttggatttctttaacaactaaggttcctgtttttaacattttaatgccaagggcttttgcccatctccaatagctaacaagaactctttcttttctttacaaatcccaaaacctttactagactttttctgcttctttagcttacttcacctagagtcttctaccttttcttatcattgaatcaacccctttttttttttcttttaaacacatcccaacccaaagtataagcgcccacctagtcctatctagtccgaaaaatgcgaactagaactacatgagacactatctctgtcgttacgaacctaacactttctaccaagcttaatcggaataagacctcacaaacactcacaagttatatagggcttgaaagaaagtctaggtttgggtttgggttaactgctctaataaggagagtcagctacttggattaaaaagagtgatcaaaatgaataagaaaatccaagtattttacggtatccatgagttcaaatttgatgcagacatgataattaaagattagattcaggttcaaattgata

SEQ ID NO: 1961 - DNA, 537 bp, Triticum aestivum
  Clone ID: uC-tsfl9316005c01b1
aacactttgttacatctagcggatttggatttctttaacaactaaggttcctgtttttaacattttaatgccaagggcttttgcccatctccaatagctaacaagaactctttcttttctttacaaatcccaaaacctttactagactttttctgcttctttagcttacttcacctagagtcttctaccttttcttatcattgaatcaacccctttttttttttcttttaaacacatcccaacccaaagtataagcgcccacctagtcctatctagtccgaaaaatgcgaactagaactacatgagacactatctctgtcgttacgaacctaacactttctaccaagcttaatcggaataagacctcacaaacactcacaagttatatagggcttgaaagaaagtctaggtttgggtttgggttaactgctctaataaggagagtcagctacttggattaaaaagagtgatcaaaatgaataagaaaatccaagtattttacggtatccatgagttcaaatttgatgcagacatgat

SEQ ID NO: 1962 - DNA, 523 bp, Triticum aestivum
  Clone ID: uC-tsfl9316005c03b1
ttctccgacctcttcccgcacctagcaaatggtaagccaagaaagccaactgacggcattgcacttgagctgacaaagaaatgctgctgctgctattcaacgagatcgattctaacctcaaagcgcccagatcccaatgacgagctcgtcgacgatgtccaccacgttgcagtcgcgccatgggccccgaatgcgaaccccgtcgacatggcctggtccgttgtgccggtactgcgatccggcgacttgtcccattcgaccatccagttctcgccctcctcgtcggcgcttcagagcttcgccgtgaccctgcaacaggtggccccttcgaagctgtccagccacagccgcagcggcattgagatcctcgtcctcgacgttgctccccttccgctagacacggtgttcgtcaacctggagagcgaatcgacaaaacggctggagagcggtgagggcaccttttacaaggaccatccgacaagccccaatgccaaggacgttgccaacatgacgcccgaggagc

SEQ ID NO: 1963 - DNA, 539 bp, Triticum aestivum
  Clone ID: uC-tsfl9316005c06b1
acactttgttacatctagcggatttggatttctttaacaactaaggttcctgtttttaacattttaatgccaatggcttttgcccatctccaatagctaacaagaactctttcttttctttacaaatcccaaaacctttactagactttttctgcttctttagcttacttcacctagagtcttctaccttttcttatcattgaatcaacccctttttttttttcttttaaacacatcccaacccaaagtataagcgcccacctagtcctatctagtccgaaaaatgcgaactagaactacatgagacactatctctgtcgttacgaacctaacactttctaccaagcttaatcggaataagacctcacaaacactcacaagttatatagggcttgaaagaaagtctaggtttgggtttgggttaactgctctaataaggagagtcagctacttggattaaaaagagtgatcaaaatgaataagaaaatccaagtattttacggtatccatgagttcaaatttgatgcagacatgataat

SEQ ID NO: 1964 - DNA, 456 bp, Triticum aestivum
  Clone ID: uC-tsfl9316005c07b1
caaatttacacgctccctgcatttcgtgttctccccaaatatattactgcatcttcactttcacccccaccatattatcaccgcaaaaatggtggaccacggtatatcctcacagctactcctatcacacaggttatcatagagccattcaaacagagatttcgaaaagaacccctgctgcctccttcgcggcacaaatctgacccaaatccccaattgagctggacagtctctaagcacgtgaagcacagattcaactccacctttacaaacctgagacacattcgaggcgctaagatgtcttcgatgccgttcctcatctgtcataactatgtccagtttggttatatatattttctgtttatacttatatttatatatatttttcctaaatataactattacttttgattatttgttaaacatgtccatggatttaactcaatctcaataaat

SEQ ID NO: 1965 - DNA, 422 bp, Triticum aestivum
  Clone ID: uC-tsfl9316005c11b1
cttcccgcacctagcaaatggtaagccaagaaagccaactgacggcattgcacatgatctgacaaagaaatgctgctgctgctattcaacgagatcgattctaacctcaaagcgcccagatcccaatgacgagctcgtcgacgatgtccaccacgttgcagtcgcgccatgggccccgaatgcgaaccccgtcgacatggcctggtccgttgtgccggtactgcgatccggcgacttgtcccattcgaccatccagttctcgccctcctcgtcggcgcttcagagctttgccgtgaccctgcaacaggtggccccttcgaagctgtccagccacagccgcagcggcattgagatcctcgtcctcgacgttgctccccttccgctagacacggtgttcgacaacctggagagcgaattgacaa

SEQ ID NO: 1966 - DNA, 588 bp, Triticum aestivum
  Clone ID: uC-tsfl9316005c12b1
acactttgttacatctagcggatttggatttctttaacaactaaggttcctgtttttaacattttaatgccaagggcttttgcccatctccaatagctaacaagaactctttcttttctttacaaatcccaaaacctttactagactttttctgcttctttagcttacttcacctagagtcttctaccttttcttatcattgaatcaacccctttttttttttcttttaaacacatcccaacccaaagtataagcgcccacctagtcctatctagtccgaaaaatgcgaactagaactacatgagacactatctctgtcgttacgaacctaacactttctaccaagcttaatcggaataagacctcacaaacactcacaagttatatagggcttgaaagaaagtctaggtttgggtttgggttaactgctctaataaggagagtcagctacttggattaaaaagagtgatcaaaatgaataagaaaatccaagtattttacggtatccatgagttcaaatttgatgcagacatgataattaaagattagattcaggttcaaattgatagggaatggtatcagatcatg

SEQ ID NO: 1967 - DNA, 553 bp, Triticum aestivum
  Clone ID: uC-tsfl9316005d01b1
aacactttgttacatctagcggatttggatttctttaacaactaaggttcctgtttttaacattttaattccaagggcttttgcccatctccaatagctaacaagaactctttcttttctttacaaatcccaaaacctttactagactttttctgcttctttagcttacttcacctagagtcttctaccttttcttatcattgaatcaacccctttttttttttcttttaaacacatcccaacccaaagtataagcgcccacctagtcctatctagtccgaaaaatgcgaactagaactacatgagacactatctctgtcgttacgaacctaacactttctaccaagcttaatcggaataagacctcacaaacactcacaagttatatagggcttgaaagaaagtctaggtttgggtttgggttaactgctctaataaggagagtcagctacttggattaaaaagagtgatcaaaatgaataagaaaatccaagtattttacggtatccatgagttcaaatttgatgcagacatgataattaaagattagatt

SEQ ID NO: 1968 - DNA, 546 bp, Triticum aestivum
  Clone ID: uC-tsfl9316005d02b1
aacactttgttacatctagcggatttggatttctttaacaactaaggttcctgtttttaacattttaattccaagggcttttgcccatctccaatagctaacaagaactctttcttttctttacaaatcccaaaacctttactagactttttctgcttctttagcttacttcacctagagtcttctaccttttcttatcattgaatcaacccctttttttttttcttttaaacacatcccaacccaaagtataagcgcccacctagtcctatctagtccgaaaaatgcgaactagaactacatgagacactatctctgtcgttacgaacctaacactttctaccaagcttaatcggaataagacctcacaaacactcacaagttatatagggcttgaaagaaagtctaggtttgggtttgggttaactgctctaataaggagagtcagctacttggattaaaaagagtgatcaaaatgaataagacaatccaagtattttacggtatccatgagttcaaatttgatgcagacatgataattaaaga

SEQ ID NO: 1969 - DNA, 546 bp, Triticum aestivum
  Clone ID: uC-tsfl9316005d03b1
tcaacactttgttacatctagcggatttggatttctttaacaactaaggttcctgtttttaacattttaaagccaagggcttttgcccatctccaatagctaacaagaactctttcttttctttacaaatcccaaaacctttactagactttttctgcttctttagcttacttcacctagagtcttctaccttttcttatcattgaatcaacccctttttttttttcttttaaacacatcccaacccaaagtataagcgcccacctagtcctatctagtccgaaaaatgcgaactagaactacatgagacactatctctgtcgttacgaacctaacactttctaccaagcttaatcggaataagacctcacaaacactcacaagttatatagggcttgaaagaaagtctaggtttgggtttgggttaactgctctaataaggagagtcagctacttggattaaaaagagtgatcaaaatgaataagaaaatccaagtattttacggtatccatgagttcaaatttgatgcagacatgataattaaa

SEQ ID NO: 1970 - DNA, 544 bp, Triticum aestivum
  Clone ID: uC-tsfl9316005d04b1
cactttgttacgtctagcggatttggatttctttaacaactaaggttcctgtttttaacattttaatgccaagggcttttgcccatctccaatagctaacaagaactctttcttttctttacaaatcccaaaacctttactagactttttctgcttctttagcttacttcacctagagtcttctaccttttcttatcattgaatcaacccctttttttttttcttttaaacacatcccaacccaaagtataagcgcccacctagtcctatctagtccgaaaaatgcgaactagaactacatgagacactatctctgtcgttacgaacctaacactttctaccaagcttaatcggaataagacctcacaaacactcacaagttatatagggcttgaaagaaagtctaggtttgggtttgggttaactgctctaataaggagagtcagctacttggattaaaaagagtgatcaaaatgaataagaaaatccaagtattttacggtatccatgagttcaaatttgatgcagacatgataattaaaga

SEQ ID NO: 1971 - DNA, 474 bp, Triticum aestivum
  Clone ID: uC-tsfl9316005d06b1
gttctccgactctcttcccgcacctagcaaatggtaagccaagaaagccaactgacggcattgcacatgagcttgacatagaaatgctgctgctgctattcaacgagatcgattctaacctcaaagcgcccagatcccaatgacgagctcgtcgacgatgtccaccacgttgcagtcgcgccatgggccccgaatgcgaaccccgtcgacatggcctggtccgttgtgccggtactgcgatccggcgacttgtcccattcgaccatccagttctcgccctcctcgtcggcgcttcagagcttcgccgtgaccctgcaacaggtggccccttcgaagctgtccagccacagccgcagcggcattgagatcctcgtcctcgacgttgctccccttccgctagacacggtgttcgtcaacctggagagcgaattgacaaaacggctggagagcggcgagggcaccttttacaaggac

SEQ ID NO: 1972 - DNA, 588 bp, Triticum aestivum
  Clone ID: uC-tsfl9316005d07b1
cactttgttacatctagcggatttggatttctttaacaactaaggttcctgtttttaacattttaatgccaagggcttttgcccatctccaatagctaacaagaactctttcttttctttacaaatcccaaaacctttactagactttttctgcttctttagcttacttcacctagagtcttctaccttttcttatcattgaatcaacccctttttttttttcttttaaacacatcccaacccaaagtataagcgcccacctagtcctatctagtccgaaaaatgcgaactagaactacatgagacactatctctgtcgttacgaacctaacactttctaccaagcttaatcggaataagacctcacaaacactcacaagttatatagggcttgaaagaaagtctaggtttgggtttgggttaactgctctaataaggagagtcagctacttggattaaaaagagcgatcaaaatgaataagaaaatccaagtattttacggtatccatgagttcaaatttgatgcagacatgataattaaagattagattcaggttcaaattgatagggaatggtatcagatcatga

SEQ ID NO: 1973 - DNA, 464 bp, Triticum aestivum
  Clone ID: uC-tsfl9316005d12b1
gttctccgacctcttcccgcacctagcaaatggtaagccaagaaagccaactgacggcattgcacatgatcagacaaagaaatgctgctgctgctattcaacgagatcgattctaacctcaaagcgcccagatcccaatgacgagctcgtcgacgatgtccaccacgttgcagtcgcgccatgggccccgaatgcgaaccccgtcgacatggcctggtccgttgtgccggtactgcgatccggcgacttgtcccattcgaccatccagttctcgccctcctcgtcggcgcttcagagcttcgccgtgaccctgcaacaggtggccccttcgaagctgtccagccacagccgcagcggcattgagatcctcgtcctcgacgttgctccccttccgctagacacggtgttcgtcaacctggagagcgaattgacaaaacggctggagagcggcgagggcacctttt

SEQ ID NO: 1974 - DNA, 517 bp, Triticum aestivum
  Clone ID: uC-tsfl9316005e02b1
cttcccgcacctagcaaatggtaagccaagaaagccaactgacggcattgcacttgagtttacaaagaaatgctgctgctgctattcaacgagatcgattctaacctcaaagcgcccagatcccaatgacgagctcgtcgacgatgtccaccacgttgcagtcgcgccatgggccccgaatgcgaaccccgtcgacatggcctggtccgttgtgccggtactgcgatccggcgacttgtcccattcgaccatccagttctcgccctcctcgtcggcgcttcagagcttcgccgtgaccctgcaacaggtggccccttcgaagctgtccagccacagccgcagcggcattgagatcctcgtcctcgacgttgctccccttccgctagacacggtgttcgtcaacctggagagcgaattgacaaaacggctggagagcggcgagggcaccttttacaaggaccatccgacaagccccaatgccaaggacgttgccaacatgacgcccgaggagcgtcta

SEQ ID NO: 1975 - DNA, 397 bp, Triticum aestivum
  Clone ID: uC-tsfl9316005e05b1
cgactctctgcccgcacctagcaaatggtgagccaagaaagccaactgacggcattgcacatgagtagacttagaaatgctgctgctgctattcagcgagatcgattctaacctcaaggggcccagatcccaatgacgagctcgtcgacgatgtccaccacgttgcagtcgcgccatgggccccgaatgcgaaccccgtcgacatggcctggtccgttgtgccggtactgcgatccggcgacttgtcccattcgaccatccagttctcgccctcctcgtcggcgcttcagagctttgccgtgaccctgcaacaggtggccccttcgaagctgtccagccacagccgcagcggcattgagatcctcgttctcgacgttgctccccttccggtagacac

SEQ ID NO: 1976 - DNA, 552 bp, Triticum aestivum; identical to SEQ ID NO: 1921
  Clone ID: uC-tsfl9316005e06b1

SEQ ID NO: 1977 - DNA, 519 bp, Triticum aestivum
  Clone ID: uC-tsfl9316005e07b1
cgacctcttcccgcacctagcaaatggtaagccaagaaagccaactgacggcattgcacatgagtctgacaaagaaatgctgctgctgctattcaacgagatcgattctaacctcaaagcgcccagatcccaatgacgagctcgtcgacgatgtccaccacgttgcagtcgcgccatgggccccgaatgcgaaccccgtcgacatggcctggtccgttgtgccggtactgcgatccggcgacttgtcccattcgaccatccagttctcgccctcctcgtcggcgcttcagagcttcgccgtgaccctgcaacaggtggccccttcgaagctgtccagccacagccgcagcggcattgagatcctcgtcctcgacgttgctccccttccgctagacacggtgttcgtcaacctggagagcgaattgacaaaacggctggagagcggtgagggcaccttttacaaggaccatccgacaagccccaatgccaaggacgttgccaacatgacgcccgaggagc

SEQ ID NO: 1978 - DNA, 524 bp, Triticum aestivum
  Clone ID: uC-tsfl9316005e08b1
gttctccgacctcttcccgcacctagcaaatggtaagccaagaaagccaactgacggcattgcacatgagttgacaaagaaatgctgctgctgctattcaacgagatcgattctaacctcaaagcgcccagatcccaatgacgagctcgtcgacgatgtccaccacgttgcagtcgcgccatgggccccgaatgcgaaccccgtcgacatggcctggtccgttgtgccggtactgcgatccggcgacttgtcccattcgaccatccagttctcgccctcctcgtcggcgcttcagagcttcgccgtgaccctgcaacaggtggccccttcgaagctgtccagccacagccgcagcggcattgagatcctcgtcctcgacgttgctccccttccgctagacacggtgttcgtcaacctggagagcgaattgacaaaacggctggagagcggcgagggcaccttttacatggaccatccgacaagccccaatgccaaggacgttgccaacatgacgcccgaggagc

SEQ ID NO: 1979 - DNA, 558 bp, Triticum aestivum
  Clone ID: uC-tsfl9316005e11b1
aacgctcaacactttgttacatctagcggatttggatttctttaacaactaaggttcctgtttttaacattttaatgccaagggcttttgcccatctccaatagctaacaagaactctttcttttctttacaaatcccaaaacctttactagactttttctgcttctttagcttacttcacctagagtcttctaccttttcttatcattgaatcaacccctttttttttttcttttaaacacatcccaacccaaagtataagcgcccacctagtcctatctagtccgaaaaatgcgaactagaactacatgagacactatctctgtcgttacgaacctaacactttctaccaagcttaatcggaataagacctcacaaacactcacaagttatatagggcttgaaagaaagtctaggtttgggtttgggttaactgctctaataaggagagtcagctacttggattaaaaagagtgatcaaaatgaataagaaaatccaagtattttacggtatccatgagttcaaatttgatgcagacatgataattaaagattaga

SEQ ID NO: 1980 - DNA, 543 bp, Triticum aestivum
  Clone ID: uC-tsfl9316005e12b1
tcaacactttgttacatctagcggatttggatttctttaacaactaaggttcctgtttttaacattttaatgccaagggcttttgcccatctccaatagctaacaagaactctttcttttctttacaaatcccaaaacctttactagactttttctgcttctttagcttacttcacctagagtcttctaccttttcttatcattgaatcaacccctttttttttttcttttaaacacatcccaacccaaagtataagcgcccacctagtcctatctagtccgaaaaatgcgaactagaactacatgagacactatctctgtcgttacgaacctaacactttctaccaagcttaatcggaataagacctcacaaacactcacaagttatatagggcttgaaagaaagtctaggtttgggtttgggttaactgctctaataaggagagtcagctacttggattaaaaagagtgatcaaaatgaataagaaaatccaagtattttacggtatccatgagttcaaatttgatgcagacatgataatt

SEQ ID NO: 1981 - DNA, 494 bp, Triticum aestivum
  Clone ID: uC-tsfl9316005f01b1
gttctccgactctcttcccgcacctagcaaatggtaagccaagaaagccaactgacggcattgcacatgagttgacaaagaaatgctgctgctgctattcaacgagatcgattctaacctcaaagcgcccagatcccaatgacgagctcgtcgacgatgtccaccacgttgcagtcgcgccatgggccccgaatgcgaaccccgtcgacatggcctggtccgttgtgccggtactgcgatccggcgacttgtcccattcgaccatccagttctcgccctcctcgtcggcgcttcagagcttcgccgtgaccctgcaacaggtggccccttcgaagctgtccagccacagccgcagcggcattgagatcctcgtcctcgacgttgctccccttccgctagacacggtgttcgtcaacctggagagcgaattgacaaaacggctggagagcggcgagggcaccttttacaaggaccatccgacaagccccaatgcc

SEQ ID NO: 1982 - DNA, 473 bp, Triticum aestivum
  Clone ID: uC-tsfl9316005f02b1
gttctccgactctcttcccgcacctagcaaatggtaagccaagaaagccaactgacggcattgcacatgagttgacaaagaaatgctgctgctgctattcaacgagatcgattctaacctcaaagcgcccagatcccaatgacgagctcgtcgacgatgtccaccacgttgcagtcgcgccatgggccccgaatgcgaaccccgtcgacatggcctggtccgttgtgccggtactgcgatccggcgacttgtcccattcgaccatccagttctcgccctcctcgtcggcgcttcagagcttcgccgtgaccctgcaacaggtggccccttcgaagctgtccagccacagccgcagcggcattgagatcctcgtcctcgacgttgctccccttccgctagacacggtgttcgtcaacctggagagcgaattgacaaaacggctggagagcggcgagggcaccttttacaaggac

SEQ ID NO: 1983 - DNA, 469 bp, Triticum aestivum
  Clone ID: uC-tsfl9316005f05b1
cgacctcttcccgcacctagcaaatggtaagccaagaaagccaactgacggcattgcacatgatcttgactttgaaatgctgctgctgctattcaacgagatcgattctaacctcaaagcgcccagatcccaatgacgagctcgtcgacgatgtccaccacgttgcagtcgcgccatgggccccgaatgcgaaccccgtcgacatggcctggtccgttgtgccggtactgcgatccggcgacttgtcccattcgaccatccagttctcgccctcctcgtcggcgcttcagagcttcgccgtgaccctgcaacaggtggccccttcgaagctgtccagccacagccgcagcggcattgagatcctcgtcctcgacgttgctccccttccgctagacacggtgttcgtcaacctggagagcgaattgacaaaacggctggagagcggcgagggcaccttttacaaggacca

SEQ ID NO: 1984 - DNA, 553 bp, Triticum aestivum; identical to SEQ ID NO: 1957
  Clone ID: uC-tsfl9316005f07b1

SEQ ID NO: 1985 - DNA, 526 bp, Triticum aestivum
  Clone ID: uC-tsfl9316005f08b1
acatctagcggatttggatttctttaacaactaaggttcctgtttttaacattttaatgccaagggcttttgcccatctccaatagctaacaagaactctttctgttctttacaaatcccaaaacctttactagactttttctgcttctttagcttacttcacctagagtcttctaccttttcttatcattgaatcaacccctttttttttttcttttaaacacatcccaacccaaagtataagcgcccacctagtcctatctagtccgaaaaatgcgaactagaactacatgagacactatctctgtcgttacgaacctaacactttctaccaagcttaatcggaataagacctcacaaacactcacaagttatatagggcttgaaagaaagtctaggtttgggtttgggttaactgctctaataaggagagtcagctacttggattaaaaagagtgatcaaaatgaataagaaaatccaagtattttacggtatccatgagttcaaatttgatgcagacatgat

SEQ ID NO: 1986 - DNA, 535 bp, Triticum aestivum
  Clone ID: uC-tsfl9316005f09b1
acatctagcggatttggatttctttaacaactaaggttcctgtttttaacattttaatgccaagggcttttgcccatctccaatagctaacaagaactctttcttttctttacaaatcccaaaacctttactagactttttctgcttctttagcttacttcacctagagtcttctaccttttcttatcattgaatcaacccctttttttttttcttttaaacacatcccaacccaaagtataagcgcccacctagtcctatctagtccgaaaaatgcgaactagaactacatgagacactatctctgtcgttacgaacctaacactttctaccaagcttaatcggaataagacctcacaaacactcacaagttatatagggcttgaaagaaagtctaggtttgggtttgggttaactgctctaataaggagagtcagctacttggattaaaaagagtgatcaaaatgaataagaaaatccaagtattttacggtatccatgagttcaaatttgatgcagacatgataattaaaga

SEQ ID NO: 1987 - DNA, 297 bp, Triticum aestivum
  Clone ID: uC-tsfl9316005f12b1
acgcttgcatcgtgctcgacctcgaccccctccctcccccggccggcaatccatggcgctgcgcaacctggccgggaaggtgcggatccccacctctgctgctgcccggctcccgatgccccccacccgtgctgctttccggctcccatcggaccctagcgttccgccggcgaccgtttctcgggtcgagagcgccagagactggtaccagttccagcgggcacgttatgatgatgtgacaagagagtttagaaacttcaggcttgaggttgtgcggtctgaaaaggaggctaacct

SEQ ID NO: 1988 - DNA, 521 bp, Triticum aestivum
  Clone ID: uC-tsfl9316006a01b1
cttcccgcacctagcaaatggtaagccaagaaagccaactgacggcattgcacatgagctgacaaagtaatgctgctgctgctattcaacgagatcgattctaacctcaaagcgcccagatcccaatgacgagctcgtcgacgatgtccaccacgttgcagtcgcgccatgggccccgaatgcgaaccccgtcgacatggcctggtccgttgtgccggtactgcgatccggcgacttgtcccattcgaccatccagttctcgccctcctcgtcggcgcttcagagcttcgccgtgaccctgcaacaggtggccccttcgaagctgtccagccacagccgcagcggcattgagatcctcgtcctcgacgttgctccccttccgctagacacggtgttcgtcaacctggagagcgaattgacaaaacggctggagagcggcgagggcaccttttacaaggaccatccgacaagccccaatgccaaggacgttgccaacatgacgcccgaggagcgtctagcca

SEQ ID NO: 1989 - DNA, 512 bp, Triticum aestivum
  Clone ID: uC-tsfl9316006a02b1
cttcccgcacctagcaaatggtaagccaagaaagccaactgacggcattgcacatgagttgacaaagaaatgctgctgctgctattcaacgagatcgattctaacctcaaagcgcccagatcccaatgacgagctcgtcgacgatgtccaccacgttgcagtcgcgccatgggccccgaatgcgaaccccgtcgacatggcctggtccgttgtgccggtactgcgatccggcgacttgtcccattcgaccatccagttctcgccctcctcgtcggtgcttcagagcttcgccgtgaccctgcaacaggtggccccttcgaagctgtccagccacagccgcagcggcattgagatcctcgtcctcgacgttgctccccttccgctagacacggtgttcgtcaacctggagagcgaattgacaaaacggctggagagcggcgagggcaccttttacaaggaccatccgacaagccccaatgccaaggacgttgccaacatgacgcccgaggagc

SEQ ID NO: 1990 - DNA, 514 bp, Triticum aestivum
  Clone ID: uC-tsfl9316006a03b1
actttgttacatctagcggatttggatttctttaacaactaaggttcctgtttttaacattttattgccaagggcttttgcccatctccaatagctaacaagaactctttcttttctttacaaatcccaaaacctttactagactttttctgcttctttagcttacttcacctagagtcttctaccttttcttatcattgaatcaacccctttttttttttcttttaaacacatcccaacccaaagtataagcgcccacctagtcctatctagtccgaaaaatgcgaactagaactacatgagacactatctctgtcgttacgaacctaacactttctaccaagcttaatcggaataagacctcacaaacactcacaagttatatagggcttgaaagaaagtctaggtttgggtttgggttaactgctctaataaggagagtcagctacttggattaaaaagagtgatcaaaatgaataagaaaatccaagtattttacggtatccatgagttc

SEQ ID NO: 1991 - DNA, 415 bp, Triticum aestivum
  Clone ID: uC-tsfl9316006a04b1
ctcaacactttgttacatctagcggatttggatttctttaacaactaaggttcctgtttttaacattttaatgccaagggcttttgcccatctccaatagctaacaagaactctttcttttctttacaaatcccaaaacctttactagactttttctgcttctttagcttacttcacctagagtcttctaccttttcttatcattgaatcaacccctttttttttttcttttaaacacatcccaacccaaagtataagcgcccacctagtcctatctagtccgaaaaatgcgaactagaactacatgagacactatctctgtcgttacgaacctaacactttctaccaagcttaatcggaataagacctcacaaacactcacaagttatatagggcttgaaagaaagtctaggtt

SEQ ID NO: 1992 - DNA, 227 bp, Triticum aestivum
  Clone ID: uC-tsfl9316006a06b1
gttctccgacctcttcccgcacctagcaaatggtaagccaagaaagccaactgacggcattgcacatgagctgacaaagaaatgctgctgctggtattcaacgagatcgattctaacctcaaagcgcccagatcccaatgacgagctcgtcgacgatgtccaccacgttgcagtcgcgccatgggccccgaatgcgaaccccgtcgacatggcctggtccgttgtgc

SEQ ID NO: 1993 - DNA, 507 bp, Triticum aestivum
  Clone ID: uC-tsfl9316006a08b1
cgactctcttcccgcacctagcaaatggtaagccaagaaagccaactgacggcattgcacatgagttgacaaagaaatgctgctgctgctattcaacgagatcgattctaacctcaaagcgcccagatcccaatgacgagctcgtcgacgatgtccaccacgttgcagtcgcgccatgggccccgaatgcgaaccccgtcgacatggcctggtccgttgtgccggtactgcgatccggcgacttgtcccattcgaccatccagttctcgccctcctcgtcggcgcttcagagcttcgccgtgaccctgcaacaggtggccccttcgaagctgtccagccacagccgcagcggcattgagatcctcgtcctcgacgttgctccccttccgctagacacggtgttcgtcaacctggagagcgaattgacaaaacggctggagagcggcgagggcaccttttacaaggaccatccgacaagccccaatgccaaggacgttgccaacatga

SEQ ID NO: 1994 - DNA, 540 bp, Triticum aestivum
  Clone ID: uC-tsfl9316006a10b1
acatctagcggatttggatttctttaacaactaaggttcctgtttttaacattttaaatccaagggcttttgcccatctccaatagctaacaagaactctttcttttctttacaaatcccaaaacctttactagactttttctgcttctttagcttacttcacctagagtcttctaccttttcttatcattgaatcaacccctttttttttttcttttaaacacatcccaacccaaagtataagcgcccacctagtcctatctagtccgaaaaatgcgaactagaactacatgagacactatctctgtcgttacgaacctaacactttctaccaagcttaatcggaataagacctcacaaacactcacaagttatatagggcttgaaagaaagtctaggtttgggtttgggttaactgctctaataaggagagtcagctacttggattaaaaagagtgatcaaaatgaataagaaaatccaagtattttacggtatccatgagttcaaatttgatgcagacatgataattaaagattaga

SEQ ID NO: 1995 - DNA, 521 bp, Triticum aestivum
  Clone ID: uC-tsfl9316006a11b1
tttgttacatctagcggatttggatttctttaacaactaaggttcctgtttttaacattttaaagccaagggcttttgcccatctccaatagctaacaagaactctttcttttctttacaaatcccaaaacctttactagactttttctgcttctttagcttacttcacctagagtcttctaccttttcttatcattgaatcaacccctttttttttttcttttaaacacatcccaacccaaagtataagcgcccacctagtcctatctagtccgaaaaatgcgaactagaactacatgagacactatctctgtcgttacgaacctaacactttctaccaagcttaatcggaataagacctcacaaacactcacaagttatatagggcttgaaagaaagtctaggtttgggtttgggttaactgctctaataaggagagtcagctacttggattaaaaagagtgatcaaaatgaataagaaaatccaagtattttacggtatccatgagttcaaatttgat

SEQ ID NO: 1996 - DNA, 406 bp, Triticum aestivum
  Clone ID: uC-tsfl9316006a12b1
atttacgtcgcgcaccggcgctccgacctcttccgcgacccctccgcggtcggcaagatcaccgcgatggcctcggcgtgcagggcgcaggtggaggcggaggagaggaaggccagggatgccaagaggaaggcggcggagctggagaaggcagcggcggccgagaaggagagggtggtcaaggccgcggccgagaaggagaagcgggagagctcggtggtgacggaggagcggggtgcagggagctcggcggagaaggatggcagcacggaggtggagaagaaggagagcaaggcgaacaaaccaaatgctggcaatggtcttgatatggagaagtattcctggactcagcagttaccagaggttaatgtcaatgttcctgttcctgaaggaacaaagtcaaggt

SEQ ID NO: 1997 - DNA, 553 bp, Triticum aestivum; identical to SEQ ID NO: 1847
  Clone ID: uC-tsfl9316006b01b1

SEQ ID NO: 1998 - DNA, 407 bp, Triticum aestivum
  Clone ID: uC-tsfl9316006b02b1
ctctgtcctcctcctgcccctcccttctctcccctccgctcctcctcgcgcgcgcgcgtttttataagggtttcggggcgcgggatggccgacgacgacagcgggagcccccggggcggcggcggggtcagggagcaggaccgcttcctccccatcgccaacatcagccgcatcatgaagaaggccgtgccggccaacggcaagatcgccaaggacgccaaggagaccctgcaggagtgcgtctccgagttcatctccttcgtcaccagcgaggccagcgacaagtgccagaaggagaagcgcaagaccatcaacggggacgatctgctctgggccatggccacgctcggattcgaggagtacgtagaccccctcaagatctacctgcaaaagtacagagatatgga

SEQ ID NO: 1999 - DNA, 468 bp, Triticum aestivum
  Clone ID: uC-tsfl9316006b03b1
atctagcggatttggacttctttaacaactaaggttcctgtttttaacattttaatgccaagggcttttgcccatctccaatagctaacaagaactctttcttttctttacaaatcccaaaacctttactagactttttctgcttctttagcttacttcacctagagtcttctaccttttcttatcattgaatcaacccctttttttttttcttttaaacacatcccaacccaaagtataagcgcccacctagtcctatctagtccgaaaaatgcgaactagaactacatgagacactatctctgtcgttacgaacctaacactttctaccaagcttaatcggaataagacctcacaaacactcacaagttatatagggcttgaaagaaagtctaggtttgggttcgggttaactgctctaataaggagagtcagctacttggattaaaaagagtgatcaaaatgaat

SEQ ID NO: 2000 - DNA, 352 bp, Triticum aestivum
  Clone ID: uC-tsfl9316006b05b1
cactttgttacatctagcggatttggatttctttaacaactaaggttcctgtttttatcattttaatgccaagggcttttgcccatctgcaatagctaacaagaactctttcttttctttacaaatcccaaaacctttactagactttttctgcttctttagcttacttcacctagagtcttctaccttttcttatcattgaatcaacccctttttttttttcttttaaacacatcccaacccaaagtataagcgcccacctagtcctatctagtccgaaaaatgcgaactagaactacatgagacactatctctgtcgttacgaacctaacactttctaccaagcttaatc

SEQ ID NO: 2001 - DNA, 475 bp, Triticum aestivum
  Clone ID: uC-tsfl9316006b07b1
actttgttacatctagcggatttggatttctttaacaactaaggttcctgtttttaacattttaaagccaagggcttttgcccatctccaatagctaacaagaactctttcttttctttacaaatcccaaaacctttactagactttttctgcttctttagcttacttcacctagagtcttctaccttttcttatcattgaatcaacccctttttttttttcttttaaacacatcccaacccaaagtataagcgcccacctagtcctatctagtccgaaaaatgcgaactagaactacatgagacactatctctgtcgttacgaacctaacactttctaccaagcttaatcggaataagacctcacaaacactcacaagttatatagggcttgaaagaaagtctaggtttgggtttgggttaactgctctaataaggagagtcagctacttggattaaaaagagtgatcaaaatg

SEQ ID NO: 2002 - DNA, 467 bp, Triticum aestivum
  Clone ID: uC-tsfl9316006b08b1
cgacctcttcccgcacctagcaaatggtaagccaagaaagccaactgacggcattgcacatgagctgacaatgaaatgctgctgctgctattcaacgagatcgattttaaccttaaagcgcccagatcccaatgacgagctcgtcgacgatgtccaccacgttgcagtcgcgccatgggccccgaatgcgaaccccgtcgacatggcctggtccgttgtgccggtactgcgatccggcgacttgtcccattcgaccatccagttctcgccctcctcgtcggcgcttcagagcttcgccgtgaccctgcaacaggtggccccttcgaagctgttcagccacagccgcagcggcattgagatcctcgtcctcgacgttgctccccttccgctagacacggtgttcgtcaacctggagagcgaattgacaaaacggctggagagcggcgagggcaccttttacaaggacc

SEQ ID NO: 2003 - DNA, 533 bp, Triticum aestivum
  Clone ID: uC-tsfl9316006b09b1
actttgttacatctagcggatttggatttctttaacaactaaggttcctgtttttaacattttaaagccaagggcttttgcccatctccaatagctaacaagaactctttcttttctttacaaatcccaaaacctttactagactttttctgcttctttagcttacttcacctagagtcttctaccttttcttatcattgaatcaacccctttttttttttcttttaaacacatcccaacccaaagtataagcgcccacctagtcctatctagtccgaaaaatgcgaactagaactacatgagacactatctctgtcgttacgaacctaacactttctaccaagcttaatcggaataagacctcacaaacactcacaagttatatagggcttgaaagaaagtctaggtttgggtttgggttaactgctctaataaggagagtcagctacttggattaaaaagagtgatcaaaatgaataagaaaatccaagtattttacggtatccatgagttcaaatttgatgcagacatga

SEQ ID NO: 2004 - DNA, 454 bp, Triticum aestivum
  Clone ID: uC-tsfl9316006b11b1
tttgttacatctagcggatttggatttctttaacaactaaggttcctgtttttaacattttaaagccaagggcttttgcccatctccaatagctaacaagaactctttcttttctttacaaatcccaaaacctttactagactttttctgcttctttagcttacttcacctagagtcttctaccttttcttatcattgaatcaacccctttttttttttcttttaaacacatcccaacccaaagtataagcgcccacctagtcctatctagtccgaaaaatgcgaactagaactacatgagacactatctctgtcgttacgaacctaacactttctaccaagcttaatcggaataagacctcacaaacactcacaagttatatagggcttgaaagaaagtctaggtttgggtttgggttaactgctctaataaggagagtcagctacttggatt

SEQ ID NO: 2005 - DNA, 355 bp, Triticum aestivum
  Clone ID: uC-tsfl9316006c05b1
ttaaaacctcactgcttgtttcctgaaaccacaggtgttgaatttatggggatactatccactcagtgtaataggatcatgggcattcggcactattaaccgtatccatgatttcatcgagccagggcatacgatcttctggctctcagttcttgacgttgggacagctgctctaatggtagcaaacctatcaaataaataagttatacaactcgccatagatcatctttgctcttcccgagtcgatgttctgaatgttgaattttcagggcttgttcaattcaatagcctatgggttcaacagctcagtgcgcttagcaatccatgagagactggagctgtaagtcaccaccga

SEQ ID NO: 2006 - DNA, 457 bp, Triticum aestivum
  Clone ID: uC-tsfl9316006c08b1
cttcccgcacctagcaaatggtaagccaagaaagccaactgacggcattgcacatgagcttacattgaaatgctgctgctgctattcaacgagatcgattctaacctcaaagcgcccagatcccaatgacgagctcgtcgacgatgtccaccacgttgcagtcgcgccatgggccccgaatgcgaaccccgtcgacatggcctggtccgttgtgccggtactgcgatccggcgacttgtcccattcgaccatccagttctcgccctcctcgtcggcgcttcagagcttcgccgtgaccctgcaacaggtggccccttcgaagctgtccagccacagccgcagcggcattgagatcctcgtcctcgacgttgctccccttccgctagacacggtgttcgtcaacctggagagcgaattgacaaaacggctggagagcggcgagggcaccttttacaag

SEQ ID NO: 2007 - DNA, 498 bp, Triticum aestivum
  Clone ID: uC-tsfl9316006d01b1
tagcggatttggatttctttaacaactaaggttcctgtttttaacattttaaagccaagggcttttgcccatctccaatagctgacaagaactctttcttttctttacaaatcccaaaacctttactagactttttctgcttctttagcttacttcacctagagtcttctaccttttcttatcattgaatcaacccctttttttttttcttttaaacacatcccaacccaaagtataagcgcccacctagtcctatctagtccgaaaaatgcgaactagaactacatgagacactatctctgtcgttacgaacctaacactttctaccaagcttaatcggaataagacctcacaaacactcacaagttatatagggctcgaaagaaagtctaggtttgggtttgggttaactgctctaataaggagagtcagctacttggattaaaaagagtgatcaaaatgaataagaaaatgcaagtattttacgggtatcatgag

SEQ ID NO: 2008 - DNA, 484 bp, Triticum aestivum
  Clone ID: uC-tsfl9316006d07b1
cgacctcttcccgcacctagcaaatggtaagccaagaaagccaactgacggcattgcacatgagctgacaatgaaatgctgctgctgctattcaacgagatcgattctaacctcaaagcgcccagatcccaatgacgagctcgtcgacgatgtccaccacgttgcagtcgcgccatgggccccgaatgcgaaccccgtcgacatggcctggtccgttgtgccggtactgcgatccggcgacttgtcccattcgaccatccagttctcgccctcctcgtcggcgcttcagagcttcgccgtgaccctgcaacaggtggccccttcgaagctgtccagccacagccgcagcggcattgagatcctcgtcctcgacgttgctccccttccgctagacacggtgttcgtcaacctggagagcgaattgacaaaacggctggagagcggcgagggcaccttttacaaggaccatccgacaagccccaat

SEQ ID NO: 2009 - DNA, 498 bp, Triticum aestivum
  Clone ID: uC-tsfl9316006d10b1
actttgttacatctagcggatttggatttctttaacaactaaggttcctgtttttaacattttaaagccaagggcttttgcccatctccaatagctaacaagaactctttcttttctttacaaatcccaaaacctttactagactttttctgcttctttagcttacttcacctagagtcttctaccttttcttatcattgaatcaacccctttttttttttcttttaaacacatcccaacccaaagtataagcgcccacctagtcctatctagtccgaaaaatgcgaactagaactacatgagacactatctctgtcgttacgaacctaacactttctaccaagcttaatcggaataagacctcacaaacactcacaagttatatagggcttgaaagaaagtctaggtttgggtttgggttaactgctctaataaggagagtcagctacttggattaaaaagagtgatcaaaatgaataagaaaatccaagtatttta

SEQ ID NO: 2010 - DNA, 388 bp, Triticum aestivum
  Clone ID: uC-tsfl9316006e02b1
ctccgactctcttcccgcacctagcaaatggtgagccaagatagcctactgacggcattgctcatgagctgacaaagaaatgctgctgctggtattcaacgagatcgattctaacctcaaagcgcccagatcccaatgtcgagctcgtcgacgatgtccaccacgttgcagtcgcgccatgggccccgattgcgaaccccgtcgacatggcctggtccgttgtgccggtactgcgatccggcgacttgtcccattcgaccatccagttctcgccctcctcgtgggcgcttcagagcttcgccgtgaccctgcaacaggtggccccttcgaagctgtccagccacagccgcagcggcattgagatcctcgtcctcgacgttgctcccct

SEQ ID NO: 2011 - DNA, 414 bp, Triticum aestivum
  Clone ID: uC-tsfl9316006e04b1
gatgctcttgccttcagactcccgattaaggcccgacagatatgcccttgagaagggcgacatgtctaaatctggggcacacaagagcaggcttgaagaacaacaaagagctgagaagaaaattcgggacaccaagggggagcaatttactccaaaatggttcaagatgacggaagacatctcccctaccccgtggggcgacctggaggtgtatgaatacaatggcagatacgccgagcaccgggctgcgatagacagctctagcgtcgctgccaaggagaaggacgtcagctccatcgagttcaacccgtggcagtatggcgacttgccttcccaatgatttcaatgggtctgaaaccacccatatattattttctcatcgaaaaagctatcaggccttgtgctgatgcatac

SEQ ID NO: 2012 - DNA, 454 bp, Triticum aestivum
  Clone ID: uC-tsfl9316006e05b1
ctcttcccgcacctagcaaatggtatgccaagaaagccaactgacggcatttttcatgatcttgacaaagaaatgctgctgctgctattcaacgagatcgattctaacctcaaagcgcccagatcccaatgacgagctcgtcgacgatgtccaccacgttgcagtcgcgccatgggccccgaatgcgaaccccgtcgacatggcctggtccgttgtgccggtactgcgatccggcgacttgtcccattcgaccatccagttctcgccctcctcgtcggcgcttcagagcttcgccgtgaccctgcaacaggtggccccttcgaagctgtccagccacagccgcagcggcattgagatcctcgtcctcgacgttgctccccttccgctagacacggtgttcgtcaacctggagagcgaattgacataacggttggagagcggcgagggcaccttt

SEQ ID NO: 2013 - DNA, 318 bp, Triticum aestivum
  Clone ID: uC-tsfl9316006e06b1
tctccgacctcttcccgcacctagcaaatggtatgccaagaaagccaactgacggcattgtacatgagcagacaaagaaatgctgctgctggtattcaaggagatcgattctaacctcaaagcgcccagatcccaatgacgagctcgtcgacgatgtccaccacgttgcagtcgcgccatgggccccgaatgcgaaccccgtcgacatggcctggtccgttgtgccggtactgcgatccggcgacttgtcccattcgaccatccagttctcgccctcctcgtcggcgcttcagagcttcgccgtgaccctgcaacagg

SEQ ID NO: 2014 - DNA, 301 bp, Triticum aestivum
  Clone ID: uC-tsfl9316006e07b1
acctagcaaatggtaagccaagaaagccaactgacggtattgtacatgagctgacatttaaatgctgctgctgctattcaacgagatcgattctaaccttaaagcgcccagatcccaatgacgagctcgttgacgatgtccaccacgttgcagtcgcgccatgggccccgaatgccaaccccgtcgacatggcctggtccgatgtgccggtactgcgatccggcgacttgttccattcgaccatccagttctcgccctcctcgtcggcgcttcagagcttcgccgtgaccctgcaacaggt

SEQ ID NO: 2015 - DNA, 466 bp, Triticum aestivum
  Clone ID: uC-tsfl9316006e11b1
ttctccgactctcttcccgcacctagcaaatggtaagccaagaaagccaactgacggcattgcacatgagctgacaaagaaatgctgctgctgctattcaacgagatcgattctaacctcaaagcgcccagatcccaatgacgagctcgtcgacgatgtccaccacgttgcagtcgcgccatgggccccgaatgcgaaccccgtcgacatggcctggtccgttgtgccggtactgcgatccggcgacttgtcccattcgaccatccagttctcgccctcctcgtcggcgcttcagagcttcgccgtgaccctgcaacaggtggccccttcgaagctgtccagccacagccgcagcggcattgagatcctcgtcctcgacgttgctccccttccgctagacacggtgttcgtcaacctggagagcgaattgacaaaaccgctggagagcggcgagggcaccttttac

SEQ ID NO: 2016 - DNA, 253 bp, Triticum aestivum
  Clone ID: uC-tsfl9316006f01b1
tcttcccgtacctagcaaatggtaagccaagaaagccaactgacggcattgcacatgagctgacaaagtaatgctgctgctgctattcaacgagatcgattgtaacctcaaagcgcccagatcccaatgactagctcgtcgacgatgtccaccaccttgcagtcgcgccatgggccccgaatgccaaccccgtctacatggcctggtccgttgtgccggtactgcgatccggcgacttgtctcattcgaccat

SEQ ID NO: 2017 - DNA, 320 bp, Triticum aestivum
  Clone ID: uC-tsfl9316006f02b1
gttctccgtctctcttcccgcacctagcaaatggtaagccaagaaagccaactgacggcattgcacatgagctgacaaagaaatgctgctgctgctattcaacgagatcgattctaacctcaaagcgcccagatcccaatgacgagctcgtcgacgatgtccaccacgttgcagtcgcgccatgggccccgaatgcgaaccccgtcgacatggcctggtccgttgtgccggtactgcgatccggcgacttgtcccattcgaccatccagttctcgccctcctcgtcggcgctttagagcttcgccgtgaccctgcaacag

SEQ ID NO: 2018 - DNA, 298 bp, Triticum aestivum
  Clone ID: uC-tsfl9316006f04b1
atctagcggatttggatttctttaacaactaagggccctgtttttaacattgtatttccaagggcttttgcccatctccaatagctaacatgaactctttcttttctttacaaattccaaaacctttactagactttttctgcttctttagcttacttcacctagagtcttctaccttttcttatcattgaatcaacccctttttttttttcttttaaacacatcccaacccaaagtataagcgcccacctagtcctatttagcccgaaaaatgcgaactagaactacatgagacact

SEQ ID NO: 2019 - DNA, 464 bp, Triticum aestivum
  Clone ID: uC-tsfl9316006f05b1
cactttgttacatctagcggatttggatttctttaacaactaaggttcctgtttttaacattttaatgccaagggcttttgcccatctgcaatagctaacaagaactctttcttttctttacaaatcccaaaacctttactagactttttctgcttctttagcttacttcacctagagtcttctaccttttcttatcattgaatcaacccctttttttttttcttttaaacacatcccaacccaaagtataagcgcccacctagtcctatctagtccgaaaaatgcgaactagaactacatgagacactatctctgtcgttacgaacctaacactttctaccaagcttaatcggaataagacctcacaaacactcacaagttatatagggcttgaaagaaagtctaggtttgggtttgggttaactgctctaataaggagagtcagctacttggattaaaaaga

SEQ ID NO: 2020 - DNA, 510 bp, Triticum aestivum
  Clone ID: uC-tsfl9316006f07b1
cgacctcttcccgcacctagcaaatggtaagccaagaaagccaactgacggcattgcacatgagctgacaattgaaatgctgctgctgctattcaacgagatcgattctaacctcaaagcgcccagatcccaatgacgagctcgtcgacgatgtccaccacgttgcagtcgcgccatgggccccgaatgcgaaccccgtcgacatggcctggtccgttgtgccggtactgcgatccggcgacttgtcccattcgaccatccagttctcgccctcctcgtcggcgcttcagagcttcgccgtgaccctgcaacaggtggccccttcgaagctgtccagccacagccgtagcggcattgagatcctcgtcctcgacgttgctccccttccgctagacacggtgttcgtcaacctggagagcgaattgacaaaacggctggagagcggcgagggcaccttttacaaggaccattcgacaagccccaatgccaaggacgttgccaacatgacgc

SEQ ID NO: 2021 - DNA, 509 bp, Triticum aestivum
  Clone ID: uC-tsfl9316006f09b1
cgacctcttcccgcacctagcaaatggtaagccaagaaagccaactgacggcattgcacatgagctgacattgaaatgctgctgctgctattcaacgagatcgattctaacctcaaagcgcccagatcccaatgacgagctcgtcgacgatgtccaccacgttgcagtcgcgccatgggccccgaatgcgaaccccgtcgacatggcctggtccgttgtgccggtactgcgatccggcgacttgtcccattcgaccatccagttctcgccctcctcgtcggcgcttcagagcttcgccgtgaccctgcaacaggtggccccttcgaagctgctcagccacagccgcagcggcattgagatcctcgtcctcgacgttgctccccttccgctagacacggtgttcgtcaacctggagagcgaattgacaaaacggctggagagcggcgagggcaccttttacaaggaccatccgacaagccccaatgccaaggacgttgccaacatgacgc

SEQ ID NO: 2022 - DNA, 394 bp, Triticum aestivum
  Clone ID: uC-tsfl9316006f10b1
gatttctttaacaactaaggttcctgtttttaacattttaatttcaatttctttcgcccatctccaatagctaacaagaactctttcttttctttacaaatcccaaaacctttactagactttttctgcttctttagcttacttcacctagagtcttctaccttttcttatcattgaatcaacccctttttttttttcttttaaacacatcccaacccaaagtataagcgcccacctagtcctatctagtccgaaaaatgcgaactagaactacatgagacactatctttgtcgttacgaacctaacactttctaccaagcttaatcggaataagaccttacacacactcacaagttatatagggcttgaaagaaagtctaggtttgggtttgg

SEQ ID NO: 2023 - DNA, 418 bp, Triticum aestivum
  Clone ID: uC-tsfl9316006f11b1
actttgttacatctagcggatttggatttctttaacaactaaggttcctgtttttaacattttaatgtcaagggctttggcccatctgcaatagctaacaagaactctttcttttctttacaaatcccaaaacctttactagactttttctgcttctttagcttacttcacctagagtcttctaccttgtcttatcattgaatcaacccctttttttttttcttttaaacacatcccaacccaaagtataagcgcccacctagtcctatctagtccgaaaaatgcgaactagaactacatgagacactatctctgtggttacgaacctaacactttctaccaagcttaatcggaataagaccttacaaacactcacaagttatatagggcttgaaagaaagtctaggtttgggtttgg

SEQ ID NO: 2024 - DNA, 335 bp, Triticum aestivum
  Clone ID: uC-tsfl9316006g02b1
agatgttcgtgttcgagaacctgctggagctcgaggatcgcgcgatccatatggtgctgaaggaagtcgaatcggaaacgctcatcatcgcgctgaagggcgcaccgcccgcgctgcgccagaagttcctcgcgaacatgtcgcagcgtgcggccgaactgctcgccgaggatctcgacgcgcgcggcccggtgcgcgtatccgaagtcgagacgcagcagcgccgcatcctgcagatcgtgcgcaacctcgccgagagcggccagatcgtgatcggcggcaaggcggaagacgcgtatgtctgattcggcgagcgatcgcgcgggcaccctcac

SEQ ID NO: 2025 - DNA, 403 bp, Triticum aestivum
  Clone ID: uC-tsfl9316006g03b1
aacactttgttacatctagcggatttggatttctttaacaactaaggttcctgtttttaacattttaatgccaagggcttttgcccatctccaatagctgacaagaactctttcttttctttacaaatcccaaaacctttactagactttttctgcttctttagcttacttcacctagagtcttctaccttttcttatcattgaatcaacccctttttttttttcttttaaacacatcccaacccaaagtataagcgcccacctagtcctatctagtccgaaaaatgcgaactagaactacatgagacactatctctgtcgttacgaacctaacactttctaccaagcttaatcggaataagacctcacaaacactcacaagttatatagggcttgaaagaaa

SEQ ID NO: 2026 - DNA, 121 bp, Triticum aestivum
  Clone ID: uC-tsfl9316006g04b1
gttctccgtctctcttcccgcacctagcaaatggtaagccaagaaagccaactgacggcattgcacatgatctgacaaagaaatgctgctgctgctattcaaggagatcgattctaacctc

SEQ ID NO: 2027 - DNA, 563 bp, Triticum aestivum
  Clone ID: uC-tsfl9316006g06b1
ctaacgctaacactttgttacatctagcggatttggatttctttaacaactaaggttcctgtttttaacattttaaagccaagggcttttgcccatctccaatagctaacaagaactctttcttttctttacaaatcccaaaacctttactagactttttctgcttctttagcttacttcacctagagtcttctaccttttcttatcattgaatcaacccctttttttttttcttttaaacacatcccaacccaaagtataagcgcccacctagtcctatctagtccgaaaaatgcgaactagaactacatgagacactatctctgtcgttacgaacctaacactttctaccaagcttaatcggaataagacctcacaaacactcacaagttatatagggcttgaaagaaagtctaggtttgggtttgggttaactgctctaataaggagagtcagctacttggattaaaaagagtgatcaaaatgaataagaaaatccaagtattttacggtatccatgagttcaaatttgatgcagacatgataattaaagattagattca

SEQ ID NO: 2028 - DNA, 414 bp, Triticum aestivum
  Clone ID: uC-tsfl9316006g07b1
gcgggctgtttgcgcaatggcggcgggtcccttcgcgctccgcctagggccgcgcctcgcggcgccggccgtggcgagtgcgactaggggaggaggacggggaagtgaccgccctacggccagccgagcgctggtgtcaaagaagtcaaacaaggaccaccgtttgtggattaggaaagacttggctgggtcagggaagaaggctctttgtcttgttaatactgtaaccaagtggctgatgagtaaaggtcaggtgctgacatggacaacgtacgatacactgctgttggctctttctatggatggaagagtagatgaggctgagtcaatttggaatactatcttacaaacttatacacgctcagtgcccaagaagttgttctctcggatgatccagatttacaacacgcgcca

SEQ ID NO: 2029 - DNA, 429 bp, Triticum aestivum
  Clone ID: uC-tsfl9316006g08b1
ttgttacatttagcggatttggatttctttaacaactaaggttcctgtttttaacattttaatgtccagtttcttttgcccatctccaatagctaacaagaactctttcttttctttacaaatcccaaaacctttactagactttttctgcttctttagcttacttcacctagagtcttctaccttttcttatcattgaatcaacccctttttttttttcttttaaacacatcccaacccaaagtataagcgcccacctagtcctatctagtccgaaaaatgcgaactagaactacatgagacactatctttgtcgttacgaacctaacactttctaccaagcttaatcggaataagacctcacaaacactcacaagttatatagggcttgaaagaaagtctaggttcgggtttgggttaactgctcta

SEQ ID NO: 2030 - DNA, 522 bp, Triticum aestivum
  Clone ID: uC-tsfl9316006g09b1
acactttgttacatctagcggatttggatttctttaacaactaaggttcctgtttttaacattttaatgccaagggcttttgcccatctccaatagctaacaagaactctttcttttctttacaaatcccaaaacctttactagactttttctgcttctttagcttacttcacctagagtcttctaccttttcttatcattgaatcaacccctttttttttttcttttaaacacatcccaacccaaagtataagcgcccacctagtcctatctagtccgaaaaatgcgaactagaactacatgagacactatctctgtcgttacgaacctaacactttctaccaagcttaatcggaataagacctcacaaacactcacaagttatatagggcttgaaagaaagtctaggtttgggtttgggttaactgctctaataaggagagtcagctacttggattaaaaagagtgatcaaaatgaataagaaaatccaagtattttacggtatccatgagttcaaattt

SEQ ID NO: 2031 - DNA, 500 bp, Triticum aestivum
  Clone ID: uC-tsfl9316006g10b1
actttgttacatctagcggatttggatttctttaacaactaaggttcctgtttttaacattttaaagccaagggcttttgcccatctccaatagctaacaagaactctttcttttctttacaaatcccaaaacctttactagactttttctgcttctttagcttacttcacctagagtcttctaccttttcttatcattgaatcaacccctttttttttttcttttaaacacatcccaacccaaagtataagcgcccacctagtcctatctagtccgaaaaatgcgaactagaactacatgagacactatctctgtcgttacgaacctaacactttctaccaagcttaatcggaataagacctcacaaacactcacaagttatatagggcttgaaagaaagtctaggtttgggtttgggttaactgctctaataaggagagtcagctacttggattaaaaagagtgatcaaaatgaataagaaaatccaagtattttacg

SEQ ID NO: 2032 - DNA, 371 bp, Triticum aestivum
  Clone ID: uC-tsfl9316006g12b1
tcggttttgcacaactcaagaaactacaccaacaaaccggacatggctagaaagaataacatggcgtccaagtctagcatctcccccctcctcttggccaccgtcctggtctccgtcttcgccgccgtcacagccacaggtccatattgctacgccgggatgggcctttcgatcaacccgtttgaaggctgccgggagtatgtcgcacagcaaacctgtggcatcagcatatccgggtcggcggtgtccaccgagccggggaacaccccaagggatcggtgctgcaaggagctttacgacgcctcgcagcattgccggtgcgaggcagtgcgctacttcatagggcggaggtctgatcccaattccagcgt

SEQ ID NO: 2033 - DNA, 393 bp, Triticum aestivum
  Clone ID: uC-tsfl9316006h01b1
ctagcggatttggatttctttaacaactaaggttcctgtttttaacattttaaagccaagggcttttgcccatctccaatagctaacaagaactctttcttttctttacaaatcccaaaacctttactagactttttctgcttctttagcttacttcacctagagtcttctaccttttcttatcattgaatcaacccctttttttttttcttttaaacacatcccaacccaaagtataagcgcccacctagtcctatctagtccgaaaaatgcgaactagaactacatgagacactatctctgtcgttacgaacctaacactttctaccaagcttaatcggaataagacctcacaaacactcacaagttatatagggcttgaaagaaagtcta

SEQ ID NO: 2034 - DNA, 403 bp, Triticum aestivum
  Clone ID: uC-tsfl9316006h03b1
aacactttgttacatctagcggatttggatttctttaacaactaaggttcctgtttttaacattttaaagccaagggcttttgcccatctgcaatagctgacaagaactctttcttttctttacaaatcccaaaacctttactagactttttctgcttctttagcttacttcacctagagtcttctaccttttcttatcattgaatcaacccctttttttttttcttttaaacacatcccaacccaaagtataagcgcccacctagtcctatctagtccgaaaaatgcgaactagaactacatgagacactatctctgtcgttacgaacctaacactttctaccaagcttaatcggaataagacctcacaaacactcacaagttatatagggcttgaaagaaa

SEQ ID NO: 2035 - DNA, 367 bp, Triticum aestivum
  Clone ID: uC-tsfl9316006h04b1
gttctccgacctcttcccgcacctagcaaatggtaagccaagaaagccaactgacggcattgcacatgagctgacaaagaaatgctgctgctgctattcaacgagatcgattctaacctcaaagcgcccagatcccaatgacgagctcgtcgacgatgtccaccacgttgcagtcgcgccatgggccccgaatgcgaaccccgtcgacatggcctggtccgttgtgccggtactgcgatccggcgacttgtcccattcgaccatccagttctcgccctcctcgtcggcgcttcagagcttcgccgtgaccctgcaacaggtggccccttcgaagctgtccagccacagccgcagcggcattgagatc

SEQ ID NO: 2036 - DNA, 309 bp, Triticum aestivum
  Clone ID: uC-tsfl9316006h05b1
acactttgttacatctagcggatttggatttctttaacaactaaggttcctgtttttatcattagattgtcaagggcttctgcccatctggaatagctgacaagatctctttggttttctttacaaatcccaaaacctttactagactttttctgcttctttagcttacttcacctagagtcttctaccttttcttatcattgaatcaacccctttttttttttcttttaaacacatcccaacccaaagtataagcgcccacctaggcctatctagtccgaaaaatgcgaactagaactacatgagaca

SEQ ID NO: 2037 - DNA, 501 bp, Triticum aestivum
  Clone ID: uC-tsfl9316006h06b1
cactttgttacatctagcggatttggatttctttaacaactaaggttcctgtttttaacattttaaagccaagggcttttgcccatctccaatagctaacaagaactctttcttttctttacaaatcccaaaacctttactagactttttctgcttctttagcttacttcacctagagtcttctaccttttcttatcattgaatcaacccctttttttttttcttttaaacacatcccaacccaaagtataagcgcccacctagtcctatctagtccgaaaaatgcgaactagaactacatgagacactatctctgtcgttacgaacctaacactttctaccaagcttaatcggaataagacctcacaaacactcacaagttatatagggcttgaaagaaagtctaggtttgggtttgggttaactgctctaataaggagagtcagctacttggattaaaaagagtgatcaaaatgaataagaaaatccaagtattttacg

SEQ ID NO: 2038 - DNA, 449 bp, Triticum aestivum
  Clone ID: uC-tsfl9316006h07b1
acctagcagatggtaagccaagaaagccaactgacggcattgcacatgagctgacattgaaatgctgctgctgctattcaacgagatcgattttaacctcaaagcgcccagatcccaatgacgagctcgtcgacgatgtccaccacgttgcagtcgcgccatgggccccgaatgcgaaccccgtcgacatggcctggtccgttgtgccggtactgcgatccggcgacttgtcccattcgaccatccagttctcgccctcctcgtcggcgcttcagagctttgccgtgaccctgcaacaggtggccccttcgaagctgttcagccacagccgcagcgggattgagatcctcgtactcgacgttgctccccttccgctagacacggtgttcgtcaacctggagagcgaattgacaaaacggatggagagcggcgagggcaccttttacaag

SEQ ID NO: 2039 - DNA, 486 bp, Triticum aestivum
  Clone ID: uC-tsfl9316006h08b1
cgactctcttcccgcacctagcaaatggtaagccaagaaagccaactgacggtattgcacatgagctgacaattaaatgctgctgctgctattcaacgagatcgattctaacctcaaagcgcccagatcccaatgacgagctcgtcgacgatgtccaccacgttgcagtcgcgccatgggccccgaatgcgaaccccgtcgacatggcctggtccgttgtgccggtactgcgatccggcgacttgtcccattcgaccatccagttctcgccctcctcgtcggcgcttcagagcttcgccgtgaccctgcaacaggtggccccttcgaagctgtccagccacagccgcagcggcattgagatcctcgtcctcgacgttgctccccttccgctagacacggtgttcgtcaacctggagagcgaattgacaaaacggctggagagcggcgagggcaccttttacaaggaccatccgacaagccccaatg

SEQ ID NO: 2040 - DNA, 458 bp, Triticum aestivum
  Clone ID: uC-tsfl9316006h09b1
ccgcacctagcaaatggtgagccaagaaagccaactgacggtattgcacatgatctgacaaagaaatgctgctggtgctattcaacgagatcgattctaacctcaaagcgcccagatcccaatgacgagctcgtcgacgatgtccaccacgttgcagatcgcgccatgggccccgaatgcgaaccccgtcgacatggactggtccgatgtgccggtactgcgatccggcgacttgtcccattcgaccatccagttctggccctcctcgtgggcgcttcagagctttgccgtgaccctgcaacaggtggccccttcgaagctgtccagccacagccgcagcggcattgagatcctcgtcctcgacgttgctacctttacgctagacacggtgatcgacaacctggagagcgaattgacaaaacggttggagagcggcgagggcaccttttacaaggacc

SEQ ID NO: 2041 - DNA, 538 bp, Triticum aestivum
  Clone ID: uC-tsfl9316006h10b1
actttgttacatctagcggatttggatttctttaacaactaaggttcctgtttttaacattttaaagccaagggcttttgcccatctccaatagctaacaagaactctttcttttctttacaaatcccaaaacctttactagactttttctgcttctttagcttacttcacctagagtcttctaccttttcttatcattgaatcaacccctttttttttttcttttaaacacatcccaacccaaagtataagcgcccacctagtcctatctagtccgaaaaatgcgaactagaactacatgagacactatctctgtcgttacgaacctaacactttctaccaagcttaatcggaataagacctcacaaacactcacaagttatatagggcttgaaagaaagtctaggtttgggtttgggttaactgctctaataaggagagtcagctacttggattaaaaagagtgatcaaaatgaataagaaaatccaagtattttacggtatccatgagttcaaatttgatgcagacatgataatt

SEQ ID NO: 2042 - DNA, 551 bp, Triticum aestivum
  Clone ID: uC-tsfl9316006h11b1
ctctaacgctcaacactttgttacatctagcggatttggatttctttaacaactaaggttcctgtttttaacattttaaagccaagggcttttgcccatctccaatagctaacaagaactctttcttttctttacaaatcccaaaacctttactagactttttctgcttctttagcttacttcacctagagtcttctaccttttcttatcattgaatcaacccctttttttttttcttttaaacacatcccaacccaaagtataagcgcccacctagtcctatctagtccgaaaaatgcgaactagaactacatgagacactatctctgtcgttacgaacctaacactttctaccaagcttaatcggaataagacctcacaaacactcacaagttatatagggcttgaaagaaagtctaggtttgggtttgggttaactgctctaataaggagagtcagctacttggattaaaaagagtgatcaaaatgaataagaaaatccaagtattttacggtatccatgagtttcaaattgatgcagacatgataat

SEQ ID NO: 2043 - DNA, 498 bp, Triticum aestivum
  Clone ID: uC-tsfl9316006h12b1
gttctccgactctcttcccgcacctagcaaatggtaagccaagaaagccaactgacggcattgcacatgagttgacaaagaaatgctgctgctgctattcaacgagatcgattctaacctcaaagcgcccagatcccaatgacgagctcgtcgacgatgtccaccacgttgcagtcgcgccatgggccccgaatgcgaaccccgtcgacatggcctggtccgttgtgccggtactgcgatccggcgacttgtcccattcgaccatccagttctcgccctcctcgtcggcgcttcagagcttcgccgtgaccctgcaacaggtggccccttcgaagctgtccagccacagccgcagcggcattgagatcctcgtcctcgacgttgctccccttccgctagacacggtgttcgtcaacctggagagcgaattgacaaaacggctggagagcggcgagggcaccttttacaaggaccatccgacaagccccaatgccaagg

SEQ ID NO: 2044 - DNA, 574 bp, Triticum aestivum
  Clone ID: uC-tsfl9316007a03b1
cttcccgcacctagcaaatggtcagccaagaaagccaactgacggcattgcacatgagcagactaagaaatgctgctgctgctattcagcgagagcgattctaacctcaaggcgcccagatcccaatgacgagctcgtcgacgatgtccaccacgttgcagtcgcgccatgggccccgaatgcgaaccccgtcgacatggcctggtccgttgtgccggtactgcgatccggcgacttgtcccattcgaccatccagttctcgccctcctcgtcggcgcttcagagcttcgccgtgaccctgcaacaggtggccccttcgaagctgttcagccacagccgcagcgggattgagatcctcgtcctcgacgttgctccccttccgctagacacggtgttcgtcaacctggagagcgaattgacaaaacggctggagagcggcgagggcaccttttacaaggaccattcgacaagccccaatgccaaggacgttgccaacatgacgcccgaggagcgcctagccacggcgctcagggcagctctcagcaccctcaagattgtccattccggcgatttg

SEQ ID NO: 2045 - DNA, 524 bp, Triticum aestivum
  Clone ID: uC-tsfl9316007a04b1
cactttgttacatctagcggatttggatttctttaacaactaaggttcctgtttttaacattttaatgccaagggcttttgcccatctccaatagctaacaagaactctttcttttctttacaaatcccaaaacctttactagactttttctgcttctttagcttacttcacctagagtcttctaccttttcttatcattgaatcaacccctttttttttttcttttaaacacatcccaacccaaagtataagcgcccacctagtcctatctagtccgaaaaatgcgaactagaactacatgagacactatctctgtcgttacgaacctaacactttctaccaagcttaatcggaataagacctcacaaacactcacaagttatatagggcttgaaagaaagtctaggtttgggtttgggttaactgctctaataaggagagtcagctacttggattaaaaagagtgatcaaaatgaataagaaaatccaagtattttacggtatccatgagttcaaatttgat

SEQ ID NO: 2046 - DNA, 576 bp, Triticum aestivum
  Clone ID: uC-tsfl9316007a05b1
tgtggctggatttcatcattaaaacctcactgcttgtttcctgaaaccacaggtgttgaacagatggggatactatccactcattctaataggatcatgggcattcggcactattaaccgtatccatgatttcatcgagccagggcataagatcttctggctctcagttcttgacgttgggacagctgcactaatggtagcaaacctatcaaataaataagttataaaattcgccatagatcatctttgctcttcccgagtcgatgttctgaatgttgtattttcagggcttgttcaattcaatagcctatggtttcaacagctcagtgcgtcgagcaatccatgagagactggagctgtaagtcaccaccgatctctttggtttgctatattattcccaataatcaatgaagcttgatttttatgaaacccttggtctgctagattcttgccagaacggctatatcgatggcttccaagcaatttcagaccaaaaaaccatctgattctacatcagcaacaacaacagcgaagcgaaatggtatcactcaagaccgaggaccagcaatgacacta

SEQ ID NO: 2047 - DNA, 479 bp, Triticum aestivum
  Clone ID: uC-tsfl9316007a07b1
cactttgttacatctagcggatttggatttctttaacaactaaggttcctgtttttaacattttaaagccaagggcttttgcccatctccaatagctaacaagaactctttcttttctttacaaatcccaaaacctttactagactttttctgcttctttagcttacttcacctagagtcttctaccttttcttatcattgaatcaacccctttttttttttcttttaaacacatcccaacccaaagtataagcgcccacctagtcctatctagtccgaaaaatgcgaactagaactacatgagacactatctctgtcgttacgaacctaacactttctaccaagcttaatcggaataagacctcacaaacactcacaagttatatagggcttgaaagaaagtctaggtttgggtttgggctaactgctctaataaggagagtcagctacttggattaaaaagagtgatcaaaatgaat

SEQ ID NO: 2048 - DNA, 537 bp, Triticum aestivum
  Clone ID: uC-tsfl9316007a08b1
ctctaacgctcaacactttgttacatctagcggatttggatttctttaacaactaaggttcctgtttttaacattttaatgccaagggcttttgcccatctccaatagctaacaagaactctttcttttctttacaaatcccaaaacctttactagactttttctgcttctttagcttacttcacctagagtcttctaccttttcttatcattgaatcaacccctttttttttttcttttaaacacatcccaacccaaagtataagcgcccacctagtcctatctagtccgaaaaatgcgaactagaactacatgagacactatctctgtcgttacgaacctaacactttctaccaagcttaatcggaataagacctcacaaacactcacaagttatatagggcttgaaagaaagtctaggtttgggtcttgggctaactgctctaataaggagagtcagctacttggattaaaagagtgatcaaaatgaataagaaaatccaagtattttacggtatccatgagttcaaatttgat

SEQ ID NO: 2049 - DNA, 533 bp, Triticum aestivum
  Clone ID: uC-tsfl9316007a09b1
ccgacctcttcccgcacctagcaaatggtaagccaagaaagccaactgacggcattgcacatgatcagacaaagaaatgctgctgctgctattcaacgagatcgattctaacctcaaggcgcccagatcccaatgacgagctcgtcgacgatgtccaccacgttgcagtcgcgccatgggccccgaatgcgaaccccgtcgacatggcctggtccgttgtgccggtactgcgatccggcgacttgtcccattcgaccatccagttctcgccctcctcgtcggcgcttcagagcttcgccgtgaccctgcaacaggtggccccttcgaagctgtccagccacagccgcagcggcattgagatcctcgtcctcgacgttgctccccttccgctagacgagcggtgttcgtcaaccttggagagcgaattgacaaaacggctggagagcggcgagggcaccttttacaaggaccatccgacaagccccaatgccaaggacgttgccaacatgacgcccgaggagcgtctagccacg

SEQ ID NO: 2050 - DNA, 447 bp, Triticum aestivum
  Clone ID: uC-tsfl9316007a11b1
cggatttggattcctttaacaactaaggttcctgtttttaacattttaaagccaagggcttttgcccatctccaatagctaacaagaactctttcttttctttacaaatcccaaaacctttactagactttgtgtgcttctttagcttacttcacctagagtcttctacctttgcttatgattgaatcaacccgtgtttttttttcttttaaacacatccgaacccacagtgtaagcgcccacctagtcctatctagtccgaaaaatgcgaactagaactacatgagacactatctctgtcgttacgaacctaacactttctaccaagcttaaggggaataagacctcacaaacactcacaagctatatagggcttgaaagaaagcctaggtttgggttcggggtaactgctctaataaggagagtcagctacttggattaaaaaga

SEQ ID NO: 2051 - DNA, 307 bp, Triticum aestivum
  Clone ID: uC-tsfl9316007b01b1
tcttcccgcacctagcaaatggtaagccaagaaagccaactgacggcattgcacatgatcagacaaagaaatgctgctgctgctattcaaggagatcgattctaacctcaaagcgcccagatcccaatgacgagctcgtcgacgatgtccaccacgttgcagtcgcgccatgggccccgaatgcgaaccccgtcgacatggcctggtccgttgtgccggtactgcgatccggcgacttgtcccattcgaccatccagttctcgccctcctcgtcggcgcttcagagcttcgccgtgaccctgcaaca

SEQ ID NO: 2052 - DNA, 582 bp, Triticum aestivum
  Clone ID: uC-tsfl9316007b02b1
actttgttacatctagcggatttggatttctttaacaactaaggttcctgtttttaacattttaatgccaagggcttttgcccatctccaatagctaacaagaactctttcttttctttacaaatcccaaaacctttactagactttttctgcttctttagcttacttcacctagagtcttctaccttttcttatcattgaatcaacccctttttttttttcttttaaacacatcccaacccaaagtataagcgcccacctagtcctatctagtccgaaaaatgcgaactagaactacatgagacactatctctgtcgttacgaacctaacactttctaccaagcttaatcggaataagacctcacaaacactcacaagttatatagggcttgaaagaaagtctaggtttgggtttgggttaactgctctaataaggagagtcagctacttggattaaaaagagtgatcaaaatgaataagaaaatccaagtattttacggtatccatgagttcaaatttgatgcagacatgataattaaagattagattcaggttcacactgatagggaatggtatcagat

SEQ ID NO: 2053 - DNA, 585 bp, Triticum aestivum
  Clone ID: uC-tsfl9316007b05b1
tttgttacatctagcggatttggatttctttaacaactaaggttcctgtttttaacattttaatgccaagggcttttgcccatctccaatagctaacaagaactctttcttttctttacaaatcccaaaacctttactagactttttctgcttctttagcttacttcacctagagtcttctaccttttcttatcattgaatcaacccctttttttttttcttttaaacacatcccaacccaaagtataagcgcccacctagtcctatctagtccgaaaaatgcgaactagaactacatgagacactatctctgtcgttacgaacctaacactttctaccaagcttaatcggaataagacctcacaaacactcacaagttatatagggcttgaaagaaagtctaggtttgggtttgggctaactgctctaataaggagagtcagctacttggattaaaaagagtgatcaaaatgaataagaaaatccaagtattttacggtatccatgagttcaaatttgatgcagacatgataattaaagattagattcaggttcaaactgatagggaatggtatcagatcatga

SEQ ID NO: 2054 - DNA, 267 bp, Triticum aestivum
  Clone ID: uC-tsfl9316007b06b1
tcccgcacctagcaaatggtcagccaagaaagccagctgacggcattgcacatgatcggacaaagaaatgctgctgctgctattcagcgagatcgattctaacctcaaagcgcccagatcccaatgacgagctcgtggacgatgtccaccacgtagcagacgcgccatgggctcccgaatgcgaaccccgacgacatggtctggttcgttgtgccggcactgcgatccggcgacttggcccattcgaccatccagttatcgccctcc

SEQ ID NO: 2055 - DNA, 514 bp, Triticum aestivum
  Clone ID: uC-tsfl9316007b07b1
gctaacactttgtacatctagcggatttggatttctttaacaactaaggttcctgtttttaacattttaaagccaagggcttttgcccatctccaatagctaacaagaactctttcttttctttacaaatcccaaaacctttactagactttttctgcttctttagcttacttcacctagagtcttctaccttttcttatcattgaatcaacccctttttttttttcttttaaacacatcccaacccaaagtataagcgcccacctagtcctatctagtccgaaaaatgcgaactagaactacatgagacactatctgtgccgttacgaacctaacactttctaccaagcttaatcggaatctgacctcacatacactcacaagttatatagggctagaaagaaagtctaggtttgggttagggttaactgctctgataaggagagtcagctacttggattaaagagagtgatcaaaatgaataagaaaatccaagtattttacggtatccatg

SEQ ID NO: 2056 - DNA, 446 bp, Triticum aestivum
  Clone ID: uC-tsfl9316007b09b1
gtgacaggagaacattttatggcgactgacatcatgtgggatcctactggaagatttctcgcgactgcagttacctcggttcatgagatggaaaatggtttccaaatttggtccttcaatgggaagctaatttacaagatttcaaaggatcacttctatcagttccaatggcgcccgaggccaccatcactacttactcctgagaaggaggaggacatctcaaagaacctcaagcggtacagcaagaagtatgaacaagaggatctggacgtgtccaaccaggtgggtgagctagagcgcaagagacggacgcagcttcaagaggaatggcaaggatgggtggccaagtggaagcagctgcacgaggaggagcgtgcataccggatggagctgagaggcggggaggagagcgacaaggaagaagaggcggagtacaaggagattga

SEQ ID NO: 2057 - DNA, 473 bp, Triticum aestivum
  Clone ID: uC-tsfl9316007b10b1
tgttacatctagcggatttggatttctttaacaactaaggttcctgtttttaacattttaaagccaagggcttttgcccatctccaatagctgacaagaactctttcttttctttacaaatcccaaaacctttactagactttttctgcttctttagcttacttcacctagagtcttctaccttttcttatcattgaatcaacccctttttttttttcttttaaacacatcccaacccaaagtataagcgcccacctagtcctatctagtccgaaaaatgcgaactagaactacatgagacactatctctgtcgttacgaacctaacactttctaccaagcttaatcggaataagacctcacaaacactcacaagttatatagggcttgaaagaaagtctaggtttgggtttgggttaactgctctaataaggagagtcagctacttggattaaaaagagtgatcaaaatgaa

SEQ ID NO: 2058 - DNA, 363 bp, Triticum aestivum
  Clone ID: uC-tsfl9316007b11b1
tcgtttatatacatttggacctgataaagtggctggatttcttgagaagcatgatttagacctcatctgccgagcccaccaggtcggtgaggatggcttcgagttctttgctgatcgtcagctagtaacaatattgtcggcacctaattactgtggagaattcgataatgctggtgccatgatgagtgtagacgagacgctgatgtgctccttccaaatactcaaacctgcaaggaaaatgttgcctggttcaactaataacaagtctggcttcaagtcaatgagaggatggtgacggtggcacggcgattggtgagcaagctgtggtctcatttgcgggcaggcacgtgcctaccacgagcg

SEQ ID NO: 2059 - DNA, 53 bp, Triticum aestivum
  Clone ID: uC-tsfl9316007b12b1
tcttcccgtacctagcaaatggtaagccaagaaagccaactgtcggcattgca

SEQ ID NO: 2060 - DNA, 441 bp, Triticum aestivum
  Clone ID: uC-tsfl9316007c02b1
cgacctcttcccgcacctagcaaatggtaagccaagaaagccaactgacggcattgcacatgagcagacaaagaaatgctgctgctgctattcagcgagatcgattctaacctcaaagcgcccagatcccaatgacgagctcgtcgacgatgtccaccacgttgcagtcgcgccatgggccccgaatgcgaaccccgtcgacatggcctggtccgttgtgccggtactgcgatccggcgacttgtcccattcgaccatccagttctcgccctcctcgtcggcgcttcagagcttcgccgtgaccctgcaacaggtggccccttcgaagctgtccagccacagccgcagcggcattgagatcctcgttctcgacgttgctccccttccgctagacacggtgttcgtcaacctggagagcgaattgacaaaacggctggagag

SEQ ID NO: 2061 - DNA, 526 bp, Triticum aestivum
  Clone ID: uC-tsfl9316007c03b1
cactttgttacatctagcggatttggatttctttaacaactaaggttcctgtttttaacattttaatgccaagggcttttgcccatctccaatagctaacaagaactctttcttttctttacaaatcccaaaacctttactagactttttctgcttctttagcttacttcacctagagtcttctaccttttcttatcattgaatcaacccctttttttttttcttttaaacacatcccaacccaaagtataagcgcccacctagtcctatctagtccgaaaaatgcgaactagaactacatgagacactatctctgtcgttacgaacctaacactttctaccaagcttaatcggaataagacctcacaaacactcacaagttatatagggcttgaaagaaagtctaggttctggctctcgggttaactgctctaataaggagagtcagctacttggattaaaaagagtgatcaaaatgaataagaaaatccaagtattttacggtatccatgagttcaaatttgat

SEQ ID NO: 2062 - DNA, 362 bp, Triticum aestivum
  Clone ID: uC-tsfl9316007c04b1
gttgttgcaggttgcaactgacaaatgcatcatggggtttctgtttttgatagtttgtggtgtgattgccatcattgttgtcaagatcgtcaacccgcataacaagagcatcccagacatcccgggactggcgcctcctgcacctcctgcgcagaaccggaagctgctatccgtagatcctttcagaatgctctgagcattcgggaatggaagtctcgtgccatgcaggtctctcgctctgaagccaaaacacacgatgtcaactgttccattggtgcttgcttgtacattatacccgtatgtaattttctttgattggttcattctttccacactggctgctgttagcttcggattgttag

SEQ ID NO: 2063 - DNA, 618 bp, Triticum aestivum
  Clone ID: uC-tsfl9316007c06b1
ctctaacgctcaacactttgttacatctagcggatttggatttctttaacaactaaggttcctgtttttaacattttaatgccaagggcttttgcccatctccaatagctaacaagaactctttcttttctttacaaatcccaaaacctttactagactttttctgcttctttagcttacttcacctagagtcttctaccttttcttatcattgaatcaacccctttttttttttcttttaaacacatcccaacccaaagtataagcgcccacctagtcctatctagtccgaaaaatgcgaactagaactacatgagacactatctctgtcgttacgaacctaacactttctaccaagcttaatcggaataagacctcacaaacactcacaagttatatagggcttgaaagaaagtctaggtttgggtttgggttaactgctctaataaggagagtcagctacttggataaaaagagtgatcaaaatgaataagaaaatccaagtattttacggtatccatgagttcaaatttgatgcagacatgataattaaagattagattcaggttcaaattgatagggaatggtatcagatcatgacagtgtggtcgagtagag

SEQ ID NO: 2064 - DNA, 551 bp, Triticum aestivum
  Clone ID: uC-tsfl9316007c07b1
aacactttgttacatctagcggatttggatttctttaacaactaaggttcctgtttttaacattttaaagccaagggcttttgcccatctccaatagctaacaagaactctttcttttctttacaaatcccaaaacctttactagactttttctgcttctttagcttacttcacctagagtcttctaccttttcttatcattgaatcaacccctttttttttttcttttaaacacatcccaacccaaagtataagcgcccacctagtcctatctagtccgaaaaatgcgaactagaactacatgagacactatctctgtcgttacgaacctaacactttctaccaagcttaatcggaataagacctcacaaacactcacaagttatatagggcttgaaagaaagtctaggtttgggtttgggttaactgctctaataaggagagtcagctacttggataaaaagagtgatcaaaatgaataagaaaatccaagtattttacggtatccatgagttcaaatttgatgcagacatgataattaaagattagat

SEQ ID NO: 2065 - DNA, 553 bp, Triticum aestivum; identical to SEQ ID NO: 1957
  Clone ID: uC-tsfl9316007c08b1

SEQ ID NO: 2066 - DNA, 483 bp, Triticum aestivum
  Clone ID: uC-tsfl9316007c10b1
cggatttggatttctttaacaactaaggttcctgtttttaacattttaatgccaagggcttttgcccatctccaatagctaacaagaactctttcttttctttacaaatcccaaaacctttactagactttttctgcttctttagcttacttcacctagagtcttctaccttttcttatcattgaatcaaccccttttttttttttttttaaacacatcccaacccaaagtataagcgcccacctagtcctatctagtccgaaaaatgcgaactagaactacatgagacactatctctgtcgttacgaacctaacactttctaccaagcttaatcggaataagacctcacaaacactcacaagttatatagggcttgaaagaaagtctaggtttgggtttgggttaactgctctaataaggagagtcagctacttggattaaaaagagtgatcaaaatgaataagaaaatccaagtattttac

SEQ ID NO: 2067 - DNA, 432 bp, Triticum aestivum
  Clone ID: uC-tsfl9316007d02b1
cttattttgagcacttggccatggcgttcagcggcgcccagatgctcgctgccttcaccatgggctttctactcatggccttctgtgtggaggctcgggtatgcatgtcccctagcaagtcgtacaaaaggagcccttgcaagaacgtgcgctgcaccgcggcctgtcacaaagaacacttcaagggtgggtactgctccagtaagaagtcaattgttggcgatgacctcaacgaagacaacgaggagaacttctataagaaacgtcctaagaaaaagacgtgcatgtgtacatatgaatgcagtaaagccccgccaccaccgtcagaacctgatgtgccagagccaccgggtgaacccgtggtgccggatcctcagaagaagccgccaccgccatatgaacgtgacgtgccggagccgcccttgggagaac

SEQ ID NO: 2068 - DNA, 528 bp, Triticum aestivum
  Clone ID: uC-tsfl9316007d03b1
tagaggcattcgagcgatactctgtcaaagcagaaaatatcaccgttgttagtgttcctggcagctttgaaattcctgttgcagcacagaagcttgggaagtctggaaagtatgatgcaattttgtgcattggggctgtgattagaggtgacacaacccactatgatgctgttgcaaactctgctgcttcaggtgtactcaatgctggattgtctgctggcgtcccctgcgtatttggtgttctgacctgtgatgacatggaccaggcgctaaatcgtgctggtggcaaggctggaaacaaaggtgctgagaccgccataactgctattgagatggcctcgctgtttcggcatcacttagcctgatgacaccgaatgctatggtcggcgagccagcaagattttctcccctgttcgcggctatcggagtttttcccccacatttgttttaaaatttcttttttattgctgcaggctagtgtttgacatgtcgtttctaaattattttggtctgtacgtatgtactctg

SEQ ID NO: 2069 - DNA, 554 bp, Triticum aestivum
  Clone ID: uC-tsfl9316007d04b1
cactttgttacatctagcggatttggatttctttaacaactaaggttcctgtttttaacattttaaagccaagggcttttgcccatctccaatagctaacaagaactctttcttttctttacaaatcccaaaacctttactagactttttctgcttctttagcttacttcacctagagtcttctaccttttcttatcattgaatcaacccctttttttttttcttttaaacacatcccaacccaaagtataagcgcccacctagtcctatctagtccgaaaaatgcgaactagaactacatgagacactatctctgtcgttacgaacctaacactttctaccaagcttaatcggaataagacctcacaaacactcacaagttatatagggcttgaaagaaagtctaggtttgtgctctgggttaactgctctaataaggagagtcagctacttggattaaaaagagtgatcaaaatgaataagaaaatccaagtattttacggtatccatgagttcaaatttgatgcagacatgataattaaagattagattca

SEQ ID NO: 2070 - DNA, 484 bp, Triticum aestivum
  Clone ID: uC-tsfl9316007d05b1
cgacctcttcccgcacctagcaaatggtaagccaagaaagccaactgacggcattgcacatgagcagacaaagaaatgctgctgctgctattcaacgagatcgattctaacctcaaagcgcccagatcccaatgacgagctcgtcgacgatgtccaccacgttgcagtcgcgccatgggccccgaatgcgaaccccgtcgacatggcctggtccgttgtgccggtactgcgatccggcgacttgtcccattcgaccatccagttctcgccctcctcgtcggcgcttcagagcttcgccgtgaccctgcaacaggtggccccttcgaagctgtccagccacagccgcagcggcattgagatccttcgtctcgacgttgctccccttccgctagacacggtgttcgtcaacctggagagcgaattgacaaaacggctggagagcggcgagggcaccttttacaaggaccatccgacaagccccaat

SEQ ID NO: 2071 - DNA, 553 bp, Triticum aestivum
  Clone ID: uC-tsfl9316007d07b1
acactttgttacatctagcggatttggatttctttaacaactaaggttcctgtttttaacattttatagccaagggcttttgcccatctccaatagctaacaagaactctttcttttctttacaaatcccaaaacctttactagactttttctgcttctttagcttacttcacctagagtcttctaccttttcttatcattgaatcaacccctttttttttttcttttaaacacatcccaacccaaagtataagcgcccacctagtcctatctagtccgaaaaatgcgaactagaactacatgagacactatctctgtcgttacgaacctaacactttctaccaagcttaatcggaataagacctcacaaacactcacaagttatatagggcttgaaagaaagtctaggtttgggtttgggttaactgctctaataaggagagtcagctacttggattaaaaagagtgatcaaaatgaataagaaaatccaagtattttacggtatccatgagttcaaatttgatgcagacatgataattaaagattagattc

SEQ ID NO: 2072 - DNA, 522 bp, Triticum aestivum
  Clone ID: uC-tsfl9316007d10b1
ggtggatttcatattaaaacctcactgcttgtttcctgaaaccacaggtgttgaacttatggggatactatccactcattctaataggagcatgggcattcggcactatgaaccgtatccatgatttcatcgagccagggcataagatcttctggctctcagttcttgacgttgggacagctgcactaatggtagcaaacctatcaaataaataagttataaaattcgccatagatcatctttgctcttcccgagtcgatgttctgaatgttgtattttcagggcttgttcaattcaatagcctatggtttcaacagctcagggcgtcgagcaatccatgagagactggagctgtaagtcaccaccgatctctttggtttgctatattattcccaataatcaatgaagcttgatttttatgaaacccttggtctgctagattcttgccagaacggctatatcgatggcttccaagcaatttcagaccaaaaaaccatctgattctacatgagcaacaacaac

SEQ ID NO: 2073 - DNA, 523 bp, Triticum aestivum
  Clone ID: uC-tsfl9316007d12b1
ttctccgacctcttcccgcacctagcaaatggtaagccaagaaagccaactgacggcattgcacatgagctgacaaagaaatgctgctgctgctattcaacgagatcgattctaacctcaaagcgcccagatcccaatgacgagctcgtcgacgatgtccaccacgttgcagtcgcgccatgggccccgaatgcgaaccccgtcgacatggcctggtccgttgtgccggtactgcgatccggcgacttgtcccattcgaccatccagttctcgccctcctcgtcggcgcttcagagcttcgccgtgaccctgcaacaggtggccccttcgaagctgtccagccacagccgcagcggcattgagatcctcgtcctcgacgttgctccccttccgctagacacggtgttcgtcaacctggagagcgaattgacaaaacggctggagagcggcgagggcaccttttacaaggaccatccgacaagccccaatgccaaggacgttgccaacatgacgcccgaggagc

SEQ ID NO: 2074 - DNA, 523 bp, Triticum aestivum
  Clone ID: uC-tsfl9316007e04b1
ttctccgacctcttcccgcacctagcaaatggtaagccaagaaagccaactgacggcattgcacatgagcagacaaagaaatgctgctgctgctattcaacgagatcgattctaacctcaaagcgcccagatcccaatgacgagctcgtcgacgatgtccaccacgttgcagtcgcgccatgggccccgaatgcgaaccccgtcgacatggcctggtccgttgtgccggtactgcgatccggcgacttgtcccattcgaccatccagttctcgccctcctcgtcggcgcttcagagcttcgccgtgaccctgcaacaggtggccccttcgaagctgtccagccacagccgcagcggcattgagatcctcgtcctcgacgttgctccccttccgctagacacggtgttcgtcaacctggagagcgaattgacaaaacggctggagagcggcgagggcaccttttacaaggaccatccgacaagccccaatgccaaggacgttgccaacatgacgcccgaggagc

SEQ ID NO: 2075 - DNA, 554 bp, Triticum aestivum
  Clone ID: uC-tsfl9316007e05b1
gctaacactttgttcatctagcggatttggatttctttaacaactaaggttcctgtttttaacattttaaagccaagggcttttgcccatctccaatagctaacaagaactctttcttttctttacaaatcccaaaacctttactagactttttctgcttctttagcttacttcacctagagtcttctaccttttcttatcattgaatcaacccctttttttttttcttttaaacacatcccaacccaaagtataagcgcccacctagtcctatctagtccgaaaaatgcgaactagaactacatgagacactatctctgtcgttacgaacctaacactttctaccaagcttaatcggaataagacctcacaaacactcacaagttatatagggcttgaaagaaagtctaggtttgggtttgggttaactgctctaataaggagagtcagctacttggataaaaagagtgatcaaaatgaataagaaaaccaagtattttacggtatgcatgagttcaaatttgatgcacacatgataattaaagattagattc

SEQ ID NO: 2076 - DNA, 535 bp, Triticum aestivum
  Clone ID: uC-tsfl9316007e06b1
cactttgttacatctagcggatttggatttctttaacaactaaggttcctgtttttaacattttaaagccaagggcttttgcccatctccaatagctaacaagaactctttcttttctttacaaatcccaaaacctttactagactttttctgcttctttagcttacttcacctagagtcttctaccttttcttatcattgaatcaacccctttttttttttcttttaaacacatcccaacccaaagtataagcgcccacctagtcctatctagtccgaaaaatgcgaactagaactacatgagacactatctctgtcgttacgaacctaacactttctaccaagcttaatcggaataagacctcacaaacactcacaagttatatagggcttgaaagaaagtctaggtttgggtctgggttaactgctctaataaggagagtcagctacttggattaaaaagagtgatcaaaatgaataagaaaatccaagtattttacggtatccatgagttcaaatttgatgcagacatgat

SEQ ID NO: 2077 - DNA, 351 bp, Triticum aestivum
  Clone ID: uC-tsfl9316007e07b1
tgttctccgacctcttcccgcacctagcgcatggtcagccaagaaagccaactgacggcattgcatctatgagcagacaaagaaatgctgctgctgctattcaacgagatcgattctaacctcaaggcgcccagatcccaatgacgagctcgtcgacgatgtccaccacgttgcagccgcgccatgggccccgaatgcgaaccccgtccacatggcctggtccgctgtgccgccactgcgatccggtgacttgacccattcgaccatgcagttctcgccctcctcgccggcgcttaacagcttctccgtgaccctgcaacaggtgggcccttcgaagctgcccagccacag

SEQ ID NO: 2078 - DNA, 568 bp, Triticum aestivum
  Clone ID: uC-tsfl9316007e08b1
tgttctccgacctcttcccgcacctagcaaatggtaagccaagaaagccaactgacggcattgcacatgatcagacaaagaaatgctgctgctgctattcaacgagatcgattctaacctcaaagcgcccagatcccaatgacgagctcgtcgacgatgtccaccacgttgcagtcgcgccatgggccccgaatgcgaaccccgtcgacatggcctggtccgttgtgccggtactgcgatccggcgacttgtcccattcgaccatccagttctcgccctcctcgtcggcgcttcagagcttcgccgtgaccctgcaacaggtggccccttcgaagctgtccagccacagccgcagcggcattgagatcctcgtcctcgacgttgctccccttccgctagacacggtgttcgtcaacctggagagcgaattgacaaaacggctggagagcggcgagggcaccttttacaaggaccatccgacaagccccaatgccaaggacgttgccaacatgacgcccgaggagcgtctagccacggcgctcagggcagctctcagcaccctcaagat

SEQ ID NO: 2079 - DNA, 386 bp, Triticum aestivum
  Clone ID: uC-tsfl9316007e10b1
ttacatctagcggatttggatttctttaacaactaaggctcctgttgttaacattttaaagccaagggcttttgcccatctccaatagctaacaagaactctttcttttcttgacaaatcccaaaacctttactagactttttgtgcttctttagcttacttcacctagagtcttctaccttttcttatcattgaatcaacccctttctttttttcttttaaacacatcccaacccaaagtatcagcgcccacctagtcctatatagctcgaaaaatgcgaactagaactacatgagacactatgtctgtcgttacgaacctaacactctataccaagcttactcggaatatgacctcacaaacactcacacgctatctagggctt

SEQ ID NO: 2080 - DNA, 392 bp, Triticum aestivum
  Clone ID: uC-tsfl9316007e12b1
tctccgacctcttcccgcacctagcaaatggtaagccaagaaagccaactgacggcattgcacatgagctgacaaagaaatgctgctgctgctattcaacgagatcgattctaacctcaaagcgcccagatcccaatgacgagctcgtcgacgatgtccaccacgttgcagtcgcgccatgggccccgaatgcgaaccccgtcgacatggcctggtccgttgtgccggtactgcgatccggcgacttgtcccattcgaccatccagttctcgccctcctcgtcggcgcttcagagcttcgccgtgaccctgcaacaggtggccccttcgaagctgtccagccacagccgcagcggcattgagatcctcgtcctcgacgttgctccccttccg

SEQ ID NO: 2081 - DNA, 550 bp, Triticum aestivum
  Clone ID: uC-tsfl9316007f01b1
actttgttacatctagcggatttggatttctttaacaactaaggttcctgtttttaacattttaaagccaagggcttttgcccatctccaatagctaacaagaactctttcttttctttacaaatcccaaaacctttactagactttttctgcttctttagcttacttcacctagagtcttctaccttttcttatcattgaatcaacccctttttttttttcttttaaacacatcccaacccaaagtataagcgcccacctagtcctatctagtccgaaaaatgcgaactagaactacatgagacactatctctgtcgttacgaacctaacactttctaccaagcttaatcggaataagacctcacaaacactcacaagttatatagggcttgaaagaaagtctaggtttgggtttgggttaactgctctaataaggagagtcagctacttggattaaaagagtgatcaaaatgaataagaaaatccaagtattttacggtatccatgagttcaaatttgatgcagacatgataattaaagattagattc

SEQ ID NO: 2082 - DNA, 553 bp, Triticum aestivum; identical to SEQ ID NO: 1847
  Clone ID: uC-tsfl9316007f04b1

SEQ ID NO: 2083 - DNA, 566 bp, Triticum aestivum
  Clone ID: uC-tsfl9316007f07b1
gctctaacgctcaacactttgttacatctagcggatttggatttctttaacaactaaggttcctgtttttaacattttaaagccaagggcttttgcccatctccaatagctaacaagaactctttcttttctttacaaatcccaaaacctttactagactttttctgcttctttagcttacttcacctagagtcttctaccttttcttatcattgaatcaacccctttttttttttcttttaaacacatcccaacccaaagtataagcgcccacctagtcctatctagtccgaaaaatgcgaactagaactacatgagacactatctctgtcgttacgaacctaacactttctaccaagcttaatcggaataagacctcacaaacactcacaagttatatagggcttgaaagaaagtctaggtttgggtttgggttaactgctctaataaggagagtcagctacttggattaaaaagagtgatcaaaatgaataagaaaatccaagtattttacggtatccatgagttcaaatttgatgcagacatgataattaaagattagattc

SEQ ID NO: 2084 - DNA, 536 bp, Triticum aestivum
  Clone ID: uC-tsfl9316007f08b1
cactttgttacatctagcggatttggatttctttaacaactaaggttcctgtttttaacattttaaagccaagggcttttgcccatctccaatagctaacaagaactctttcttttctttacaaatcccaaaacctttactagactttttctgcttctttagcttacttcacctagagtcttctaccttttcttatcattgaatcaacccctttttttttttcttttaaacacatcccaacccaaagtataagcgcccacctagtcctatctagtccgaaaaatgcgaactagaactacatgagacactatctctgtcgttacgaacctaacactttctaccaagcttaatcggaataagacctcacaaacactcacaagttatatagggcttgaaagaaagtctaggtttgggtttgggttaactgctctaataaggagagtcagctacttggattaaaaagagtgatcaaaatgaataagaaaatccaagtattttacggtatccatgagttcaaatttgatgcagacatgata

SEQ ID NO: 2085 - DNA, 436 bp, Triticum aestivum
  Clone ID: uC-tsfl9316007f10b1
ttacatctagcggatttggatttctttaacaactaaggctcctgttgttaacattttaaagccaagggcttttgcccatctccaatagctgacaagaactctttcttttctttacaaatcccaaaacctttactagactttttgtgcttctttagcttacttcacctagagtcttctaccttttcttatcattgaatcaacccctttttttttttcttttaaacacatcccaacccatagtataagcgcccacctagccctatctagtccgaaaaatgcgaactagaactacatgagacactatctctgtggttacgaacctaacactttctaccaagcttaatcggaataagacctcacaaacactcacaagctatatagggcttgaaagaaagcctaggtttgggttcgggttaactgctctaataaggagagt

SEQ ID NO: 2086 - DNA, 336 bp, Triticum aestivum
  Clone ID: uC-tsfl9316007f12b1
acactttgttacatctagcggatttggatttctttaacaactaaggttcctgtttttaacattttaaagccaagggcttttgcccatctccaatagctaacaagaactctttcttttctttacaaatcccaaaacctttactagactttttctgcttctttagcttacttcacctagagtcttctaccttttcttatcattgaatcaacccctttttttttttcttttaaacacatcccaacccaaagtataagcgcccacctagtcctatctagtccgaaaaatgcgaactagaactacatgagacactatctctgtcgttacgaacctaacact

SEQ ID NO: 2087 - DNA, 585 bp, Triticum aestivum
  Clone ID: uC-tsfl9316007g01b1
actttgttacatctagcggatttggatttctttaacaactaaggttcctgtttttaacattttaatgccaagggcttttgcccatctccaatagctaacaagaactctttcttttctttacaaatcccaaaacctttactagactttttctgcttctttagcttacttcacctagagtcttctaccttttcttatcattgaatcaacccctttttttttttcttttaaacacatcccaacccaaagtataagcgcccacctagtcctatctagtccgaaaaatgcgaactagaactacatgagacactatctctgtcgttacgaacctaacactttctaccaagcttaatcggaataagacctcacaaacactcacaagttatatagggcttgaaagaaagtctaggcttgggtttgggttaactgctctaataaggagagtcagctacttggattaaaaagagtgatcaaaatgaataagaaaatccaagtattttacggtatccatgagttcaaatttgatgcagacatgatcattaaagattagattcaggttcaaattgatagggaatggtatcagatcat

SEQ ID NO: 2088 - DNA, 578 bp, Triticum aestivum
  Clone ID: uC-tsfl9316007g02b1
actttgttcatctagcggatttggatttctttaacaactaaggttcctgtttttaacattttaatgccaagggcttttgcccatctccaatagctaacaagaactctttcttttctttacaaatcccaaaacctttactagactttttctgcttctttagcttacttcacctagagtcttctaccttttcttatcattgaatcaacccctttttttttttcttttaaacacatcccaacccaaagtataagcgcccacctagtcctatctagtccgaaaaatgcgaactagaactacatgagacactatctctgtcgttacgaacctaacactttctaccaagcttaatcggaataagacctcacaaacactcacaagttatatagggcttgaaagaaagtctaggtttgggtttgggttaactgctctaataaggagagtcagctacttggattaaaagagtgatcaaaatgaataagaaaatccaagtattttacggtatccatgagttcaaatttgatgcagacatgataattaaagattagattcaggttcaaattgatagggaatggtatcag

SEQ ID NO: 2089 - DNA, 553 bp, Triticum aestivum; identical to SEQ ID NO: 1847
  Clone ID: uC-tsfl9316007g04b1

SEQ ID NO: 2090 - DNA, 400 bp, Triticum aestivum
  Clone ID: uC-tsfl9316007g06b1
actttgttcatctagcggatttggatttctttaacaactaaggttcctgtttttaacattttaaagccaagggcttttgcccatctccagatagctaacaagaactctttcttttctttacaaatcccaaaacctttactagactttttctgcttctttagcttacttcacctagagtcttctaccttttcttatcattgaatcaacccctttttttttttcttttaaacacatcccaacccaaagtataagcgcccacctagtcctatctagtccgaaaaatgcgaactagaactacatgagacactatctctgtggttacgaacctaacactttgtaccaagcttaatcggaataagacctcacaaacactcacaagttatatagggcttgaaagaaa

SEQ ID NO: 2091 - DNA, 512 bp, Triticum aestivum
  Clone ID: uC-tsfl9316007g08b1
cactttgttacatctagcggatttggatttctttaacaactaaggttcctgtttttaacattttaaagccaagggcttttgcccatctccaatagctaacaagaactctttcttttctttacaaatcccaaaacctttactagactttttctgcttctttagcttacttcacctagagtcttctaccttttcttatcattgaatcaacccctttttttttttcttttaaacacatcccaacccaaagtataagcgcccacctagtcctatctagtccgaaaaatgcgaactagaactacatgagacactatctctgtcgttacgaacctaacactttctaccaagcttaatcggaataagacctcacaaacactcacaagttatatagggcttgaaagaaagtctaggtttgggtttgggttaactgctctaataaggagagtcagctacttggattaaaaagagtgatcaaaatgaataagaaaatccaagtattttacggtatccatgag

SEQ ID NO: 2092 - DNA, 518 bp, Triticum aestivum
  Clone ID: uC-tsfl9316007h01b1
cgacctcttcccgcacctagcaaatggtaagccaagaaagccaactgacggcattgcacatgagcagacaaagaaatgctgctgctgctattcagcgagatcgattctaacctcaaagcgcccagatcccaatgacgagctcgtcgacgatgtccaccacgttgcagtcgcgccatgggccccgaatgcgaaccccgtcgacatggcctggtccgttgtgccggtactgcgatccggcgacttgtcccattcgaccatccagttctcgccctcctcgtcggcgcttcagagcttcgccgtgaccctgcaacaggtggccccttcgaagctgtccagccacagccgcagcggcattgagatcctcgatctcgacgttgctccccttccgctagacacggtgttcgtcaacctggagagcgaatcgacaaaacggctggagagcggcgagggcaccttttacaaggaccatccgacaagccccaatgccaaggacgttgccaacatgacgcccgaggagc

SEQ ID NO: 2093 - DNA, 577 bp, Triticum aestivum
  Clone ID: uC-tsfl9316007h02b1
cactttgtacatctagcggatttggatttctttaacaactaaggttcctgtttttaacattttaaagccaagggcttttgcccatctccaatagctaacaagaactctttcttttctttacaaatcccaaaacctttactagactttttctgcttctttagcttacttcacctagagtcttctaccttttcttatcattgaatcaacccctttttttttttcttttaaacacatcccaacccaaagtataagcgcccacctagtcctatctagtccgaaaaatgcgaactagaactacatgagacactatctctgtcgttacgaacctaacactttctaccaagcttaatcggaataagacctcacaaacactcacaagttatatagggcttgaaagaaagtctaggtttgggtctgggttaactgctctaataaggagagtcagctacttggattaaaagagtgatcaaaatgaataagaaaatccaagtattttacggtattcatgagttcaaatttgatgcagacatgataattaaagattagattcaggttcaaattgatagggaatggtatc

SEQ ID NO: 2094 - DNA, 554 bp, Triticum aestivum
  Clone ID: uC-tsfl9316007h04b1
cgacctcttcccgcacctagcaaatggtaagccaagaaagccaactgacggcattgcacatgagcagacaaagaaatgctgctgctgctattcaaggagatcgattctaacctcaaggcgcccagatcccaatgacgagctcgtcgacgatgtccaccacgttgcagtcgcgccatgggccccgaatgcgaaccccgtcgacatggcctggtccgttgtgccggtactgcgatccggcgacttgtcccattcgaccatccagttctcgccctcctcgtcggcgcttcagagcttcgccgtgaccctgcaacaggtggccccttcgaagctgtccagccacagccgcagcggcattgagatcctcgtcctcgacgttgctccccttccgctagacacggtgttcgtcaacctggagagcgaattgacaaaacggctggagagcggcgagggcaccttttacaaggaccatccgacaagccccaatgccaaggacgttgccaacatgacgcccgaggagcgtctagccacggcgctcagggcagctctcagcaccc

SEQ ID NO: 2095 - DNA, 553 bp, Triticum aestivum
  Clone ID: uC-tsfl9316007h05b1
cactttgttacatctagcggatttggatttctttaacaactaaggttcctgtttttaacattttaaagccaagggcttttgcccatctccaatagctaacaagaactctttcttttctttacaaatcccaaaacctttactagactttttctgcttctttagcttacttcacctagagtcttctaccttttcttatcattgaatcaacccctttttttttttcttttaaacacatcccaacccaaagtataagcgcccacctagtcctatctagtccgaaaaatgcgaactagaactacatgagacactatctctgtcgttacgaacctaacactttctaccaagcttaatcggaataagacctcacaaacactcacaagttatatagggcttgaaagaaagtctaggtttgggtttgggttaactgctctaataaggagagtcagctacttggattaaaaagagtgatcaaaatgaataagaaaatccaagtattttacggtatccatgagttcaaatctgatgcagacatgataattaaagattagattca

SEQ ID NO: 2096 - DNA, 552 bp, Triticum aestivum
  Clone ID: uC-tsfl9316007h06b1
actttgttacatctagcggatttggatttctttaacaactaaggttcctgtttttaacattttaatgccaagggcttttgcccatctccagatagctaacaagaactctttcttttctttacaaatcccaaaacctttactagactttttctgcttctttagcttacttcacctagagtcttctaccttttcttatcattgaatcaacccctttttttttttcttttaaacacatcccaacccaaagtataagcgcccacctagtcctatctagtccgaaaaatgcgaactagaactacatgagacactatctctgtcgttacgaacctaacactttgtaccaagcttaatcggaataagacctcacaaacactcacaagttatatagggcttgaaagaaagtctaggtttgggtttgggttaactgctctaataaggagagtcagctacttggattaaaaagagtgatcaaaatgaataagaaaatccaagtattttacggtatgcatgagttcaaatttgatgcagacatgataattaaagattagattc

SEQ ID NO: 2097 - DNA, 490 bp, Triticum aestivum
  Clone ID: uC-tsfl9316007h08b1
cttgaagagaaaggttgatgctggcgctgacggtatagtcactcagcttttctatgataccgatatctttctcaagtttgtgaacgactgccgtcaaattggtataacatgccctattgttcctggcataatgccaataaataactacaaaggatttgtgcgcatgactggattctgcaaaactaagattccagctgagattactgctgccttggatcctattaaagacaatgaggaggctgtgaaagcatatggaatccaccttggtactgagatgtgcaagaaaattttggctagtgggatcaagactttgcacctttacacactaaacatggaaaagactgctttagcaattttgatgaatcttggattaatagaggagtccaagctttcaagaacattaccttggaggcctccaactaatgttttccgtgtcaaagaagatgttcgccctatattctgggccaacagaccaaagagttacatctca

SEQ ID NO: 2098 - DNA, 479 bp, Triticum aestivum
  Clone ID: uC-tsfl9316007h09b1
cactttgttacatctagcggatttggatttctttaacaactaaggttcctgtttttaacattttaaagccaagggcttttgcccatctccaatagctaacaagaactctttcttttctttacaaatcccaaaacctttactagactttttctgcttctttagcttacttcacctagagtcttctaccttttcttatcattgaatcaacccctttttttttttcttttaaacacatcccaacccaaagtataagcgcccacctagtcctatctagtccgaaaaatgcgaactagaactacatgagacactatctctgtcgttacgaacctaacactttctaccaagcttaatcggaataagacctcacaaacactcacaagttatatagggctcgaaagaaagtctaggtttgggtttgggttaactgctctaataaggagagtcagctacttggattaaaaagagtgatcaaaatgaat

SEQ ID NO: 2099 - DNA, 422 bp, Triticum aestivum
  Clone ID: uC-tsfl9316007h11b1
atctagcggatttggatttctttaacaactaaggctcctgtttttaacattgtaaagccaagggcttttgcccatctccaatagctgacaagaactctttcttttctttacaaatgccaaaacctttactagactttgtgtgcttgtttagcttacttcacctagagggttctaccttttcttatgattgaatcaacccgtttttttttttcttgtaaacacatcccaacccataggataagcgcccacctagtcctatctagtccgcagaatgcgaactagaactacatgagacactatctgtgtggttacgaacctaacactttctaccaagcttaatcggaataagacctcacaaacactcacatgctatatagggcttgaaagaaagtctaggtttgggttcgggttaactgctctaa

SEQ ID NO: 2100 - DNA, 481 bp, Triticum aestivum
  Clone ID: uC-tsfl9316007h12b1
tcttcccgcacctagcaaatggtaagccaagaaagccaactgacggcattgcacatgagctgacaaagaaatgctgctgctgctattcaacgagatcgattctaacctcaaagcgcccagatcccaatgacgagctcgtcgacgatgtccaccacgttgcagtcgcgccatgggccccgaatgcgaaccccgtcgacatggcctggtccgttgtgccggtactgcgatccggcgacttgtcccattcgaccatccagttctcgccctcctcgtcggcgcttcagagcttcgccgtgaccctgcaacaggtggccccttcgaagctgtccagccacagccgcagcggcattgagatcctcgtcctcgacgttgctccccttccgctagacacggtgttcgtcaacctggagagcgaattgacaaaacggctggagagcggcgagggcaccttttacaaggaccatccgacaagccccaatgc

SEQ ID NO: 2101 - DNA, 403 bp, Triticum aestivum
  Clone ID: uC-tsfl9316009a05b1
cactttgttacatctagcggatttggatttctttaacaactaaggttcctgtttttaacattttaaagccaagggcttttgcccatctccaatagctaacaagaactctttcttttctttacaaatcccaaaacctttactagactttttctgcttctttagcttacttcacctagagtcttctaccttttcttatcattgaatcaacccctttttttttttcttttaaacacatcccaacccaaagtataagcgcccacctagtcctatctagtccgaaaaatgcgaactagaactacatgagacactatctctgtcgttacgaacctaacactttctaccaagcttaatcggaataagacctcacaaacactcacaagttatatagggcttgaaagaaagt

SEQ ID NO: 2102 - DNA, 403 bp, Triticum aestivum; identical to SEQ ID NO: 2101
  Clone ID: uC-tsfl9316009b01b1

SEQ ID NO: 2103 - DNA, 307 bp, Triticum aestivum
  Clone ID: uC-tsfl9316009b02b1
actttgttacatctagcggatttggatttctttaacaactaaggttcctgtttttaacattttaaagccaagggcttttgcccatctccaatagctaacaagaactctttcttttctttacaaatcccaaaacctttactagactttttctgcttctttagcttacttcacctagagtcttctaccttttcttatcattgaatcaacccctttttttttttcttttaaacacatcccaacccaaagtataagcgcccacctagtcctatctagtccgaaaaatgcgaactagaactacatgagacac

SEQ ID NO: 2104 - DNA, 515 bp, Triticum aestivum
  Clone ID: uC-tsfl9316009b06b1
gtgttctccgacctcttcccgcacctagcaaatggtaagccaagaaagccaactgacggcattgcacatgagcagacaaagaaatgctgctgctgctattcaacgagatcgattctaacctcaaagcgcccagatcccaatgacgagctcgtcgacgatgtccaccacgttgcagtcgcgccatgggccccgaatgcgaaccccgtcgacatggcctggtccgttgtgccggtactgcgatccggcgacttgtcccattcgaccatccagttctcgccctcctcgtcggcgcttcagagcttcgccgtgaccctgcaacaggtggccccttcgaagctgtccagccacagccgcagcggcattgagatcctcgtcctcgacgttgctccccttccgctagacacggtgttcgtcaacctggagagcgaattgacaaaacggctggagagcggcgagggcaccttttacaaggaccatccgacaagccccaatgccaaggacgttgccaacatgac

SEQ ID NO: 2105 - DNA, 367 bp, Triticum aestivum
  Clone ID: uC-tsfl9316009c01b1
tcgttcctcgggctcctcgaccgggtcctgctcccgctctggaggcgggtgaccggccacacgccgacgccgctgcagtgcgtgggcgcgggccaggcgctcaccgtgctgagcatggccgcgtcgtccctcgtggagcgcgagcgcaccgccaccgtgcgcgcgcacggtcaggagggcgatccggcgtgggtgtcgccgctgtcggccatgtggctggtgctgccgttcgccgtggccggggccggggaggcgctgcactttccggcgcaggtgacgctgtactaccaggagttcccgccgtcgctcaagaacacggccacgggcatgatggccatgatcgtcgcgctggggttctacctgagca

SEQ ID NO: 2106 - DNA, 308 bp, Triticum aestivum
  Clone ID: uC-tsfl9316009c02b1
ctcttcccgcacctagcaaatggtaagccatgaaagccaactgacggcattgcacttgagcagacaaagaaatgctgctgctgctattcaacgagatcgattctaacctcaaagcgcccagatcccaatgacgagctcgtcgacgatgtccaccacgttgcagtcgcgccatgggccccgaatgcgaaccccgtcgacatggcctggtccgttgtgccggtactgcgatccggcgacttgtcccattcgaccatccagttctcgccctcctcgtcggcgcttcagagcttcgccgtgaccctgcaaca

SEQ ID NO: 2107 - DNA, 547 bp, Triticum aestivum
  Clone ID: uC-tsfl9316009c06b1
gctcaacactttgttacatctagcggatttggatttctttaacaactaaggttcctgtttttaacattttaaagccaagggcttttgcccatctccaatagctaacaagaactctttcttttctttacaaatcccaaaacctttactagactttttctgcttctttagcttacttcacctagagtcttctaccttttcttatcattgaatcaacccctttttttttttcttttaaacacatcccaacccaaagtataagcgcccacctagtcctatctagtccgaaaaatgcgaactagaactacatgagacactatctctgtcgttacgaacctaacactttctaccaagcttaatcggaataagacctcacaaacactcacaagttatatagggcttgaaagaaagtctaggtttgggtttgggttaactgctctaataaggagagtcagctacttggattaaaaagagtgatcaaaatgaataagaaaatccaagtattttacggtatccatgagttcaaatttgatgcagacatgataattaa

SEQ ID NO: 2108 - DNA, 466 bp, Triticum aestivum
  Clone ID: uC-tsfl9316009d03b1
gtgttctccgacctcttcccgcacctagcaaatggtaagccaagaaagccaactgacggcattgcacatgagcagacaaagaaatgctgctgctgctattcaacgagatcgattctaacctcaaagcgcccagatcccaatgacgagctcgtcgacgatgtccaccacgttgcagtcgcgccatgggccccgaatgcgaaccccgtcgacatggcctggtccgttgtgccggtactgcgatccggcgacttgtcccattcgaccatccagttctcgccctcctcgtcggcgcttcagagcttcgccgtgaccctgcaacaggtggccccttcgaagctgtccagccacagccgcagcggcattgagatcctcgtcctcgacgttgctccccttccgctagacacggtgtttgtcaacctggagagcgaattgacaaaacggctggagagcggcgagggcacctttt

SEQ ID NO: 2109 - DNA, 493 bp, Triticum aestivum
  Clone ID: uC-tsfl9316009d05b1
agctcaacactttgttacatctagcggatttggatttctttaacaactaaggttcctgtttttaacattttaaagccaagggcttttgcccatctccaatagctaacaagaactctttcttttctttacaaatcccaaaacctttactagactttttctgcttctttagcttacttcacctagagtcttctaccttttcttatcattgaatcaacccctttttttttttcttttaaacacatcccaacccaaagtataagcgcccacctagtcctatctagtccgaaaaatgcgaactagaactacatgagacactatctctgtcgttacgaacctaacactttctaccaagcttaatcggaataagacctcacaaacactcacaagttatatagggcttgaaagaaagtctaggtttgggtttgggttaactgctctaataaggagagtcagctacttggattaaaaagagtgatcaaaatgaataagaaaa

SEQ ID NO: 2110 - DNA, 475 bp, Triticum aestivum
  Clone ID: uC-tsfl9316009d06b1
gtgttctccgacctcttcccgcacctagcaaatggtaagccaagaaagccaactgacggcattgcacatgagcagacaaagaaatgctgctgctgctattcaacgagatcgattctaacctcaaagcgcccagatcccaatgacgagctcgtcgacgatgtccaccacgttgcagtcgcgccatgggccccgaatgcgaaccccgtcgacatggcctggtccgttgtgccggtactgcgatccggcgacttgtcccattcgaccatccagttctcgccctcctcgtcggcgcttcagagcttcgccgtgaccctgcaacaggtggccccttcgaagctgtccagccacagccgcagcggcattgagatcctcgtcctcgacgttgctccccttccgctagacacggtgttcgtcaacctggagagcgaattgacaaaacggctggagagcggcgagggcaccttttacaaggacc

SEQ ID NO: 2111 - DNA, 552 bp, Triticum aestivum
  Clone ID: uC-tsfl9316009e01b1
cactttgttacatctagcggatttggatttctttaacaactaaggttcctgtttttaacattttaaagccaagggcttttgcccatctccaatagctaacaagaactctttcttttctttacaaatcccaaaacctttactagactttttctgcttctttagcttacttcacctagagtcttctaccttttcttatcattgaatcaacccctttttttttttcttttaaacacatcccaacccaaagtataagcgcccacctagtcctatctagtccgaaaaatgcgaactagaactacatgagacactatctctgtcgttacgaacctaacactttctaccaagcttaatcggaataagacctcacaaacactcacaagttatatagggcttgaaagaaagtctaggcttgggtttgggttaactgctctaataaggagagtcagctacttggattaaaaagagtgatcaaaatgaataagaaaatccaagtattttacggtatccatgagttcaaatttgatgcagacatgataattaaagattagattc

SEQ ID NO: 2112 - DNA, 476 bp, Triticum aestivum
  Clone ID: uC-tsfl9316009e03b1
gtgttctccgacctcttcccgcacctagcaaatggtaagccaagaaagccaactgacggcattgcacatgagcagacaaagaaatgctgctgctgctattcaacgagatcgattctaacctcaaagcgcccagatcccaatgacgagctcgtcgacgatgtccaccacgttgcagtcgcgccatgggccccgaatgcgaaccccgtcgacatggcctggtccgttgtgccggtactgcgatccggcgacttgtcccattcgaccatccagttctcgccctcctcgtcggcgcttcagagcttcgccgtgaccctgcaacaggtggccccttcgaagctgtccagccacagccgcagcggcattgagatcctcgtcctcgacgttgctccccttccgctagacacggtgttcgtcaacctggagagcgaattgacaaaacggctggagagcggcgagggcaccttttacaaggacca

SEQ ID NO: 2113 - DNA, 486 bp, Triticum aestivum
  Clone ID: uC-tsfl9316009f01b1
ccgacctcttcccgcacctagcaaatggtaagccaagaaagccaactgacggcattgcacatgagcttacaaagaaatgctgctgctgctattcaacgagatcgattctaacctcaaagcgcccagatcccaatgacgagctcgtcgacgatgtccaccacgttgcagtcgcgccatgggccccgaatgcgaaccccgtcgacatggcctggtccgttgtgccggtactgcgatccggcgacttgtcccattcgaccatccagttctcgccctcctcgtcggcgcttcagagcttcgccgtgaccctgcaacaggtggccccttcgaagctgtccagccacagccgcagcggcattgagatcctcgtcctcgacgttgctcccctttcgctagacacggtgttcgtcaacctggagagcgaattgacaaaacggctggagagcggcgagggcaccttttacaaggaccatccgacaagccccaatg

SEQ ID NO: 2114 - DNA, 337 bp, Triticum aestivum
  Clone ID: uC-tsfl9316009f04b1
tcgcccacgcgttcggtcaaactgggtctgatgtcttgctttgacaaggctgctgtttctggactgcataaccagtcaatcgtgaatgctgtcattgacggcgatgacatcatatacagagactatgtcgacgttagtgtagctgctggcacatccaagggtcttgtggtgccggttattcgagatgctgacacaatgaactttgctgacatcgagaaagggataaacaaccttgccaagaaggctactgagggggcgctgtcaattgacgagatggcgggaggaacattcaccatctccaacggtggtgcctacggaagccttattagcacgccca

SEQ ID NO: 2115 - DNA, 536 bp, Triticum aestivum
  Clone ID: uC-tsfl9316009g01b1
tgttctccgtcctcttcccgcacctagcaaatggtaagccaagaaagccaactgacggcattgcacttgagcagacaaagaaatgctgctgctgctattcaacgagatcgattctaacctcaaagcgcccagatcccaatgacgagctcgtcgacgatgtccaccacgttgcagtcgcgccatgggccccgaatgcgaaccccgtcgacatggcctggtccgttgtgccggtactgcgatccggcgacttgtcccattcgaccatccagttctcgccctcctcgtcggcgcttcagagcttcgccgtgaccctgcaacaggtggccccttcgaagctgtccagccacagccgcagcggcattgagatcctcgtcctcgacgttgctccccttccgctagacacggtgttcgtcaacctggagagcgaattgacaaaacggctggagagcggcgagggcaccttttacaaggaccatccgacaagccccaatgccaaggacgttgccaacatgacgcccgaggagcgtctagccacg

SEQ ID NO: 2116 - DNA, 463 bp, Triticum aestivum
  Clone ID: uC-tsfl9316009g05b1
cctcttgccgcacctagcaaatggtaagccaagaaagccaactgacggcattgcacatgagcagacaaagaaatgctgctgctgctattcaacgagatcgattctaacctcaaagcgcccagatcccaatgacgagctcgtcgacgatgtccaccacgttgcagtcgcgccatgggccccgaatgcgaaccccgtcgacatggcctggtccgttgtgccggtactgcgatccggcgacttgtcccattcgaccatccagttctcgccctcctcgtcggcgcttcagagcttcgccgtgaccctgcaacaggtggccccttcgaagctgtccagccacagccgcagcggcattgagatcctcgtcctcgacgttgctccccttccgctagacacggtgttcgtcaacctggagagcgaattgacaaaacggctggagagcggcgagggcaccttttacaaggac

SEQ ID NO: 2117 - DNA, 404 bp, Triticum aestivum
  Clone ID: uC-tsfl9316009h04b1
tcgggaatttgttaagacaattgatccacagttatccaattatgacgaagaaggtgcttggccctacctaattgatgaatttgtggagtacctaaccgagaatggatgcgttcagcgtaacaagtgaaccattcgaggctgcattctgacttggatatcatgatttggtggtacaaacatgattcatgtcgatcaatagaatatttatctttggatgtcggcattgttccagctccccttcacaaagcagatgatgtcgtttggcggaatctacttgcgcaggggtgatttcactggctaggattgcaaactatctatctggtttgtattttgtgctgcacctatctgctacagcatacccaaaatagttattggtttactgctgaatgggcgatgggtctata

SEQ ID NO: 2118 - DNA, 515 bp, Triticum aestivum; identical to SEQ ID NO: 2104
  Clone ID: uC-tsfl9316009h05b1

SEQ ID NO: 2119 - DNA, 454 bp, Triticum aestivum
  Clone ID: uC-tsfl9316010a08b1
gatttctttaacaactaaggttcctgtttttaacatttttatgccaagggcttttgcccatctccagtaggtaacatgaactctttcttttctttacaaatcccaaaacctttactagactttttctgcttctttagcttacttcacctagagtcttctaccttttcttatcattgaatcaacccctttttttttttcttttaaacacatcccaacccaaagtataagcgcccacctagtcctatctagtccgaaaaatgcgaactagaactacatgagacactatctctgtcgttacgaacctaacactttctaccaagcttaatcggaataagacctcacaaacactcacaagttatatagggcttgaaagaaagtctaggtttgggtttgggttaactgctctaataaggagagtcagctacttggattaaaagagtgatcaaaatgaata

SEQ ID NO: 2120 - DNA, 388 bp, Triticum aestivum
  Clone ID: uC-tsfl9316010a10b1
ggatttggatttctttaacaactaaggttcctgtttttaacatttttaagccaagggcttttgcccatctccaatagctaacatgaactctttcttttctttacaaatcccaaaacctttactagactttttctgcttctttagcttacttcacctagagtcttctaccttttcttatcattgaatcaacccctttttttttttcttttaaacacatcccaacccaaagtataagcgcccacctagtcctatctagtccgaaaaatgcgaactagaactacatgagacactatctctgtcgttacgaacctaacactttctaccaagcttaatcggaataagacctcacaaacactcacaagttatatagggcttgaaagaaagtcta

SEQ ID NO: 2121 - DNA, 357 bp, Triticum aestivum
  Clone ID: uC-tsfl9316010a11b1
ttatcattttcccttccgatgcagaaaggatttctgtctcagaagcacgaaagatgaatgaggttgttcatactcaagcaaagatcatagcagatcaagatgtgatgtataagtatttatcaaagaacttaatttttgttgctacggtgtctcctaaagctgctggtgaaattggatccgcggcacctgaagaagcttcactagtggcatatctcattgatgctgtcagcggacgcatactacaccgtgtgacccatcatggtgcacaaggccctgtacatgccgttgtcagcgagactggggttgtctatcattatttcaacctccgagcccacagatttgaaattgcagtgattg

SEQ ID NO: 2122 - DNA, 450 bp, Triticum aestivum
  Clone ID: uC-tsfl9316010b01b1
ggatttctttacaactaaggttcctgtttttaacattttttgttcaagggcttttgcccatctccaatagctaacaagaactctttcttttctttacaaatcccaaaacctttactagactttttctgcttctttagcttacttcacctagagtcttctaccttttcttatcattgaatcaacccctttttttttttcttttaaacacatcccaacccaaagtataagcgcccacctagtcctatctagtccgaaaaatgcgaactagaactacatgagacactatctctgtcgttacgaacctaacactttctaccaagcttaatcggaataagacctcacaaacactcacaagttatatagggcttgaaagaaagtctaggtttgggtttgggttaactgctctaataaggagagtcagctacttggattaaaagagtgatcaaaatg

SEQ ID NO: 2123 - DNA, 408 bp, Triticum aestivum
  Clone ID: uC-tsfl9316010b02b1
atggtaagccaagaaagccaactgacggcattgcacatgttcttacaaagaaatgctgctgctgctattcaacgagatcgattctaacctcaaagcgcccagatcccaatgacgagctcgtcgacgatgtccaccacgttgcagtcgcgccatgggccccgaatgcgaaccccgtcgacatggcctggtccgttgtgccggtactgcgatccggcgacttgtcccattcgaccatccagttctcgccctcctcgtcggcgcttcagagcttcgccgtgaccctgcaacaggtggccccttcgaagctgtccagccacagccgcagcggcattgagatcctcgtcctcgacgttgctccccttccgctagacacggtgttcgtcaacctggagagcgaattgacaaaac

SEQ ID NO: 2124 - DNA, 452 bp, Triticum aestivum
  Clone ID: uC-tsfl9316010b03b1
ggatttctttacaactaaggttcctgtttttaacattttttgttcaagggcttttgcccatctccaatagctaacaagaactctttcttttctttacaaatcccaaaacctttactagactttttctgcttctttagcttacttcacctagagtcttctaccttttcttatcattgaatcaacccctttttttttttcttttaaacacatcccaacccaaagtataagcgcccacctagtcctatctagtccgaaaaatgcgaactagaactacatgagacactatctctgtcgttacgaacctaacactttctaccaagcttaatcggaataagacctcacaaacactcacaagttatatagggcttgaaagaaagtctaggtttgggtttgggttaactgctctaataaggagagtcagctacttggattaaaaagaggtgatcaaaatg

SEQ ID NO: 2125 - DNA, 449 bp, Triticum aestivum
  Clone ID: uC-tsfl9316010b07b1
tagcaaatgtgtagccaagaaagccaactgacggcattgcatatgtgcagacaaagaaatgctgctgctgctattcaacgagatcgattctaacctcaaagcgcccagatcccaatgacgagctcgtcgacgatgtccaccacgttgcagtcgcgccatgggccccgaatgcgaaccccgtcgacatggcctggtccgttgtgccggtactgcgatccggcgacttgtcccattcgaccatccagttctcgccctcctcgtcggcgcttcagagcttcgccgtgaccctgcaacaggtggccccttcgaagctgtccagccacagccgcagcggcattgagatcctcgtcctcgacgttgctccccttccgctagacacggtgttcgtcaacctggagagcgaattgacaaaacggctggagagcggtgagggcaccttttacaaggac

SEQ ID NO: 2126 - DNA, 514 bp, Triticum aestivum
  Clone ID: uC-tsfl9316010b08b1
atttggatttctttaacaactaaggttcctgtttttaacatttttttgccaagggcttttgcccatctccaatagctaacaagaactctttcttttctttacaaatcccaaaacctttactagactttttctgcttctttagcttacttcacctagagtcttctaccttttcttatcattgaatcaacccctttttttttttcttttaaacacatcccaacccaaagtataagcgcccacctagtcctatctagtccgaaaaatgcgaactagaactacatgagacactatctctgtcgttacgaacctaacactttctaccaagcttaatcggaataagacctcacaaacactcacaagttatatagggcttgaaagaaagtctaggtttgggttttgggttaactgctctaataaggagagtcagctacttggataaaaagagtgatcaaaatgaataagaaaatccaagtattttacggtatccatgagttcaaatttgatgcagacatga

SEQ ID NO: 2127 - DNA, 394 bp, Triticum aestivum
  Clone ID: uC-tsfl9316010b11b1
agaaagccaactgacggcattgctttttatcagacaaagaaatgctgctgctgctattgaacgatatcgattctaacctcaatgcgcccagatcccaatgacgagctcgttgacgattttcaccacgttgcagtcgcgccatgggccccgaatgctaaccccgtcgacatggcctggtccgttgtgccggtactgcgatccggcgacttgtcccattcgaccatccagttctcgccctcctcgtcggcgcttcagagcttcgccgtgaccctgcaacaggtggccccttcgaagctgtccagccacagccgcagcggcattgagatcctcgttctcgacgttgctccccttccgctagacacggtgttcgtcaacctggagagcgaattgacaa

SEQ ID NO: 2128 - DNA, 341 bp, Triticum aestivum
  Clone ID: uC-tsfl9316010c01b1
ttaattctcaagaggcggcaccatgctcgtgtaccaggacaagctttccggcgacgagcttctgtcggattcgttcccgtacagggagctggagaacggcgtgctctgggaagtcgacggccattgggtcgttcaaggagcagttgatgtggacattggagccaatccctctgctgagggtggtggtgatgatgagggtgtcgatgaccaggccgagaaggtggttgacattgttgacaccttccgtcttcaggagcaacctgcttttgacaagaagcagtttatctctcacatgaagcgctacatcaagaacctctctgccaagcttgaaggggatgacc

SEQ ID NO: 2129 - DNA, 349 bp, Triticum aestivum
  Clone ID: uC-tsfl9316010c05b1
aaagccaactgacggcattgcacatgtgcttacaaagaaatgctgctgctgctattcaacgagatcgattctaacctcaaagtgcccagatcccaatgacgagctcgtcgacgatgtccaccacgttgcagtcgcgccatgggccccgaatgcgaaccccgtcgacatggcctggtccgttgtgccggtactgcgatccggcgacttgtcccattcgaccatccagttctcgccctcctcgtcggcgcttcagagcttcgccgtgaccctgcaacaggtggccccttcgaagctgtccagccacagccgcagcggcattgagatcctcgtactcgacgttgctcccctt

SEQ ID NO: 2130 - DNA, 423 bp, Triticum aestivum
  Clone ID: uC-tsfl9316010c11b1
aagaaagccaactgacggcattgcacttgtgcagacaaagaaatgctgctgctgctattgaacgtgatcgattctaacctcattgcgcccagatcccaatgacgagctcgtcgacgatggccaccacgttgcagtcgcgccatgggccccgaatgcgaaccccgtcgacatggcctggtccgttgtgccggtactgcgatccggcgacttgtcccattcgaccatccagttctcgccctcctcgtcggcgcttcagagcttcgtcgtgaccctgcaacaggtggtcccttcgaagctgtccagccacagccgcagtggcattgagatcctcgttctcgacgttgctacccttccgctagacacggtgttcgtcaacctggagagcgaattgacaaaacggctggagagcggtgagggcacctt

SEQ ID NO: 2131 - DNA, 428 bp, Triticum aestivum
  Clone ID: uC-tsfl9316010c12b1
aagaaagccaactgacggcattgcacatgagcagacaaagaaatgctgctgctgctatggaacgtgatcgattctaacctcaaagcgcccagatcccaatgacgagctcgtcgacgatgtccaccacgttgcagtcgcgccatgggccccgaatgcgaaccccgtcgacatggcctggtccgttgtgccggtactgcgatccggcgacttgtcccattcgaccatccagttctcgccctcctcgtcggcgcttcagagcttcgccgtgaccctgcaacaggtggccccttcgaagctgtccagccacagccgcagcggcattgagatcctcgttctcgacgttgctccccttccgctagacacggtgttcgtcaacctggagagcgaattgacaaaacggttggagagcggcgagggcacctttttac

SEQ ID NO: 2132 - DNA, 279 bp, Triticum aestivum
  Clone ID: uC-tsfl9316010d01b1
aaagccactgacggcattgcacatttttttcaaagaaatgctgctgctgctattcaacgagatctattctaacctcaaagcgcccagatcccaatgacgagctcgtcgactatgtccaccacgttgcagtcgcgccatgggccccgaatgcgaaccccgttgacatggcctggttcgttgtgccggtactgcgatccggcgacttgtcccattcgaccatccagttctcgccctcctcgtcggcgcttcagagcttcgccgtgaccctgcaacaggtgg

SEQ ID NO: 2133 - DNA, 394 bp, Triticum aestivum
  Clone ID: uC-tsfl9316010d03b1
aaagccaactgacggcattgcacatgtgcttacaaagaaatgctgctgctgctattcaacgagatcgattctaacctcaaagcgcccagatcccaatgacgagctcgtcgacgatgtccaccacgttgcagtcgcgccatgggccccgaatgcgaaccccgtcgacatggcctggtccgttgtgccggtactgcgatccggcgacttgtcccattcgaccatccagttctcgccctcctcgtcggcgcttcagagcttcgccgtgaccctgcaacaggtggccccttcgaagctgttcagccacagccgcagcggcattgagatccttgtcctcgacgttgctccccttccgctagacacggtgttcgtcaacctggagagcgaattgacaaaa

SEQ ID NO: 2134 - DNA, 416 bp, Triticum aestivum
  Clone ID: uC-tsfl9316010d08b1
atttggatttctttaacaactaaggttcctgtttttaacattttttagccaagggcttttgcccatctccaatagctaacaagaactctttcttttctttacaaatcccaaaacctttactagactttttctgcttctttagcttacttcacctagagtcttctaccttttcttatcattgaatcaacccctttttttttttcttttaaacacatcccaacccaaagtataagcgcccacctagtcctatctagtccgaaaaatgcgaactagaactacatgagacactatctctgtcgttacgaacctaacactttctaccaagcttaatcggaataagacctcacaaacactcacaagttatatagggcttgaaagaaagtctaggtttgggtatgggttaactgctctaataa

SEQ ID NO: 2135 - DNA, 534 bp, Triticum aestivum
  Clone ID: uC-tsfl9316010d10b1
ggatttggatttctttaacaactaaggttcctgtttttaacatttttaagccaagggcttttgcccatctccaatagctaacaagaactctttcttttctttacaaatcccaaaacctttactagactttttctgcttctttagcttacttcacctagagtcttctaccttttcttatcattgaatcaacccctttttttttttcttttaaacacatcccaacccaaagtataagcgcccacctagtcctatctagtccgaaaaatgcgaactagaactacatgagacactatctctgtcgttacgaacctaacactttctaccaagcttaatcggaataagacctcacaaacactcacaagttatatagggcttgaaagaaagtctaggtttgggtttgggttaactgctctaataaggagagtcagctacttggattaaaagagtgatcaaaatgaataagaaaatccaagtattttacggtatccatgagttcaaatttgatgcagacatgataattaaagattagattca

SEQ ID NO: 2136 - DNA, 345 bp, Triticum aestivum
  Clone ID: uC-tsfl9316010d12b1
cctagcaaatggtaagccaagaaagccaactgacggcattgcatatgttcagacaaagaaatgctgctgctgctattcaacgagatcgattctaacctcaaagcgcccagatcccaatgacgagctcgtcgacgatgtccaccacgttgcagtcgcgccatgggccccgaatgcgaaccccgtcgacatggcctggtccgttgtgccggtactgcgatccggcgacttgtcccattcgaccatccagttctcgccctcctcgtcggcgcttcagagcttcgccgtgaccctgcaacaggtggccccttcgaagctgtccagccacagccgcagcggcattgagat

SEQ ID NO: 2137 - DNA, 404 bp, Triticum aestivum
  Clone ID: uC-tsfl9316010e03b1
atttggatttctttacaactaaggttcctgtttttaacattttttgtcaagggcttttgcccatctccaatagctaacaagaactctttcttttctttacaaatcccaaaacctttactagactttttctgcttctttagcttacttcacctagagtcttctaccttttcttatcattgaatcaacccctttttttttttcttttaaacacatcccaacccaaagtataagcgcccacctagtcctatctagtccgaaaaatgcgaactagaactacatgagacactatctctgtcgttacgaacctaacactttctaccaagcttaatcggaataagacctcacaaacactcacaagttatatagggcttgaaagaaagtctaggtttgggtttgggttaact

SEQ ID NO: 2138 - DNA, 409 bp, Triticum aestivum
  Clone ID: uC-tsfl9316010e08b1
ctagcggatttggatttctttaacaactaaggttcctgtttttaacattttataagccaagggcttttgcccatctccaatagctaacaagaactctttcttttctttacaaatcccaaaacctttactagactttttctgcttctttagcttacttcacctagagtcttctaccttttcttatcattgaatcaacccctttttttttttcttttaaacacatcccaacccaaagtataagcgcccacctagtcctatctagtccgaaaaatgcgaactagaactacatgagacactatctctgtcgttacgaacctaacactttctaccaagcttaatcggaataagacctcacaaacactcacaagttatatagggcttgaaagaaagtctaggtttgggtttgggt

SEQ ID NO: 2139 - DNA, 388 bp, Triticum aestivum
  Clone ID: uC-tsfl9316010e09b1
agaaagccaactgacggcattgcttattttcagacaaagaaatgctgctgctgctattgaacgagatcgattctaacctcaaagcgcccagatcccaatgacgagctcgtcgacgatgttcaccacgttgcagtcgcgccatgggccccgaatgcgaaccccgtcgacatggcctggtccgttgtgccggtactgcgatccggcgacttgtcccattcgaccatccagttctcgccctcctcgtcggcgcttcagagctttgccgtgaccctgcaacaggtggccccttcgaagctgtccagccacagccgcagcggcattgagatcctcgtcctcgacgttgctccccttccgctagacacggtgttcgtcaacctggagagcgaat

SEQ ID NO: 2140 - DNA, 390 bp, Triticum aestivum
  Clone ID: uC-tsfl9316010e10b1
agaaagccaactgacggcattgcatttgtgcagacaaagaaatgctgctgctgctattgaacgagatcgattctaacctcatagcgcccagatcccaatgacgagctcgtcgacgatgttcaccacgttgcagtcgcgccatgggccccgaatgcgaaccccgtcgacatggcctggtccgttgtgccggtactgcgatccggcgacttgtcccattcgaccatccagttctcgccctcctcgtcggcgcttcagagcttcgccgtgaccctgcaacaggtggccccttcgaagctgtccagccacagccgcagcggcattgagatcctcgtcctcgacgttgctccccttccgctagacacggtgttcgtcaacctggagagcgaattg

SEQ ID NO: 2141 - DNA, 563 bp, Triticum aestivum
  Clone ID: uC-tsfl9316010e11b1
ggatttctttaacaactaaggttcctgtttttaacatttttaagccaagggcttttgcccatctccaatagctaacatgaactctttcttttctttacaaatcccaaaacctttactagactttttctgcttctttagcttacttcacctagagtcttctaccttttcttatcattgaatcaacccctttttttttttcttttaaacacatcccaacccaaagtataagcgcccacctagtcctatctagtccgaaaaatgcgaactagaactacatgagacactatctctgtcgttacgaacctaacactttctaccaagcttaatcggaataagacctcacaaacactcacaagttatatagggcttgaaagaaagtctaggtttgggtttgggttaactgctctaaaaggagagtcagctacttggattaaaagagtgatcaaaatgaataagaaaatccaagtattttacggtattcatgagttcaaatttgatgcagacatgataattaaagattagattcaggttcaaattgatagggaatggtatcagatcatgac

SEQ ID NO: 2142 - DNA, 213 bp, Triticum aestivum
  Clone ID: uC-tsfl9316010f02b1
cattgcacatgttcttacaaggaaatgctgctgctgctattcaacgagatcgattctaacctcaaagcgcccagatcccaatgacgagctcgttgacgatgtccaccacgttgcagtcgcgccatgggccccgaatgcgaaccccgtcgacatggcctggtccgttgtgccggtactgcgatccggcgacttgtcccattcgaccatccagtt

SEQ ID NO: 2143 - DNA, 432 bp, Triticum aestivum
  Clone ID: uC-tsfl9316010f04b1
gaaagccaactgacggcattgcacatgtgtttacaaagaaatgctgctgctgctattcaacgagatcgattctaacctcaaagcgcccagatcccaatgacgagctcgtcgacgatgtccaccacgttgcagtcgcgccatgggccccgaatgcgaaccccgtcgacatggcctggtccgttgtgccggtactgcgatccggcgacttgtcccattcgaccatccagttctcgccctcctcgtcggcgcttcagagcttcgccgtgaccctgcaacaggtggccccttcgaagctgtccagccacagccgcagcggcattgagatcctcgtcctcgacgttgctccccttccgctagacacggtgttcgtcaacctggagagcgaattgacaaaacggctggagagcggcgagggcaccttttacaaggacc

SEQ ID NO: 2144 - DNA, 248 bp, Triticum aestivum
  Clone ID: uC-tsfl9316010f05b1
aaagaaatgctgctgctgctattcaacgagatcgattctgacctcaaagcgcccagatcccaatgacgagctcgtcgacgatgaacaccacgttgcagacgcgccatgggccccgaatgcgaaccctgtcgacatggtctggtccgttgtgccggtactgcgatccggcgacttgtcccattcgaccattcagttctcgccctactcgtcggcgcttcagagcttcgccgtgaccctgcaacaggtgg

SEQ ID NO: 2145 - DNA, 378 bp, Triticum aestivum
  Clone ID: uC-tsfl9316010f06b1
ttctttaggtaatccaatccgcacagaaatccccgtctcaaaaccctagccctcatccccgatcccggcgagcgagatggccaacccgagggtgttcttcgacatgaccgtcggcggcgcgccggcggggcgcatcgtgatggagctgtacaaggacgcggtgccgcggacggtggagaacttccgcgcgctctgcaccggcgagaagggcgtcggcaagagcggcaagccgctgcactacaagggcagcgccttccaccgcgtgatccccgacttcatgtgccagggcggcgacttcaccaggggcaacggcaccggaggcgagtacatctacggcgagaagttcgccgacgagaagttcgtccacaagcacaccaa

SEQ ID NO: 2146 - DNA, 348 bp, Triticum aestivum
  Clone ID: uC-tsfl9316010f07b1
ttttatcttcttccatctctggatcctgaatctacagctctctaatctgcaaatacacgcagtagcgacgggtacaattgcatggttgtgactgccgaccagtacacgagtggggctgccgttctcctaccggtaatcagctgctccagtgccaccgcatatatactccgatgagtatccttgatatcttccctccacattgcatctaatgacacactaacacattgcatctgatgacacacttccaactggaatatatcaattacataccacggtgaaatttgaaacttcccttgagagatgctaaagtactatttatttgaccggcttggtgtacattgaccttta

SEQ ID NO: 2147 - DNA, 276 bp, Triticum aestivum
  Clone ID: uC-tsfl9316010f08b1
tcttcaaagctgcggcggcgcgcgcataggaggcgaatcagcagcggaaccaagccgccgacgccaccatgggtatctcgcgtgactccatgcacaagcgccgggccaccggtgggaagcagaaggcttggaggaagaagcgaaagtatgagctcggccgccagccagccaacactaagctttcaagcaacaagacagtgaggagggtccgtgttcgcggaggtaacgtgaagtggagggctctccgtcttgacactggtaacttctcatggggta

SEQ ID NO: 2148 - DNA, 324 bp, Triticum aestivum
  Clone ID: uC-tsfl9316010f10b1
actgcttgtttcctgaaaccacaggtgttgtttagatggggatactatccactcattctaataggatcatgggcattcggcactattaaccgtatccatgatttcatcgagccagggcataagatacttatggctctcagttcttgacgatgggacagctgcacttatgggagcaaacctatcaaataaataagttataaaattcgccatagatcatctttgctcttcccgagacgatgttctgaatgttgtattttcagggcttggtcaattcaatagcctatggtttcaacagctcaatgcgtcgagcaatccatgagagac

SEQ ID NO: 2149 - DNA, 516 bp, Triticum aestivum
  Clone ID: uC-tsfl9316010f11b1
ggatttggatttctttaacaactaaggttcctgtttttaacatttttatagccaagggcttttgcccatctccaatagctaacaagaactctttcttttctttacaaatcccaaaacctttactagactttttctgcttctttagcttacttcacctagagtcttctaccttttcttatcattgaatcaacccctttttttttttcttttaaacacatcccaacccaaagtataagcgcccacctagtcctatctagtccgaaaaatgcgaactagaactacatgagacactatctctgtcgttacgaacctaacactttctaccaagcttaatcggaataagacctcacaaacactcacaagttatatagggcttgaaagaaagtctaggtttgggtttgggttaactgctctaataggagagtcagctacttggattaaaagagtgatcaaaatgaataagaaaatccaagtattttacggtatccatgagttcaaatttgatgcagacatgat

SEQ ID NO: 2150 - DNA, 395 bp, Triticum aestivum
  Clone ID: uC-tsfl9316010g03b1
ggatttctttaacaactaaggttcctgtttttaacatttttagtcaagggcttttgcccatctccaatagctaacaagaactctttcttttctttacaaatcccaaaacctttactagactttttctgcttctttagcttacttcacctagagtcttctaccttttcttatcattgaatcaacccctttttttttttcttttaaacacatcccaacccaaagtataagcgcccacctagtcctatctagtccgaaaaatgcgaactagaactacatgagacactatctctgtcgttacgaacctaacactttctaccaagcttaatcggaataagacctcacaaacactcacaagttatatagggcttgaaagaaagtctaggtttgggtttggg

SEQ ID NO: 2151 - DNA, 440 bp, Triticum aestivum
  Clone ID: uC-tsfl9316010g04b1
acaactaaggttcctgtttttaacatttttatttcaagggcttttgcccatctccaatagctaacaagaactctttcttttctttacaaatcccaaaacctttactagactttttctgcttctttagcttacttcacctagagtcttctaccttttcttatcattgaatcaacccctttttttttttcttttaaacacatcccaacccaaagtataagcgcccacctagtcctatctagtccgaaaaatgcgaactagaactacatgagacactatctctgtcgttacgaacctaacactttctaccaagcttaatcggaataagacctcacaaacactcacaagttatatagggcttgaaagaaagtctaggtttgggtttgggttaactgctctaaaaggagagtcagctacttggattaaaagagtgatcaaatgaa

SEQ ID NO: 2152 - DNA, 391 bp, Triticum aestivum
  unsure (1)..(391): unsure at all n locations
  Clone ID: uC-tsfl9316010g06b1
ttctttaacaactaaggttcctgtttttaacattttttgttcaagggcttttgcccatctccaatagctgacaagaactctttcttttctttacaaatcccaaaacctttactagactttttctgcttctttagcttacttcacctagagtcttctaccttttcttatcattgaatcaacccctttttttttttcttttaaacacatcccaacccaaagtataagcgcccacctagtcctatctagtccgaaaaatgcgaactagaactacatgagacactatctctgtcgttacgaacctaacactttctaccaagcttaatcggaataagacctcacaaacactcacangttatatagggcttgaaagaaagtctaggtatgggtttgg

SEQ ID NO: 2153 - DNA, 468 bp, Triticum aestivum
  Clone ID: uC-tsfl9316010g10b1
ggatttggatttctttaacaactaaggttcctgtttttaacatttttatagccaagggcttttgcccatctccaatagctaacaagaactctttcttttctttacaaatcccaaaacctttactagactttttctgcttctttagcttacttcacctagagtcttctaccttttcttatcattgaatcaacccctttttttttttcttttaaacacatcccaacccaaagtataagcgcccacctagtcctatctagtccgaaaaatgcgaactagaactacatgagacactatctctgtcgttacgaacctaacactttctaccaagcttaatcggaataagacctcacaaacactcacaagttatatagggcttgaaagaaagtctaggtttgggtttgggttaactgctctaataaggagagtcagctacttggattaaaagagtgatcaaaatgaataagaaaa

SEQ ID NO: 2154 - DNA, 445 bp, Triticum aestivum
  Clone ID: uC-tsfl9316010g11b1
acctagcaaatggtaagccaagaaagccaactgacggcattgcatttgttcagacaaagaaatgctgctgctgctattcaacgagatcgattctaacctcaaagcgcccagatcccaatgacgagctcgtcgacgatgtccaccacgttgcagtcgcgccatgggccccgaatgcgaaccccgtcgacatggcctggtccgttgtgccggtactgcgatccggcgacttgtcccattcgaccatccagttctcgccctcctcgtcggcgcttcagagcttcgccgtgaccctgcaacaggtggccccttcgaagctgtccagccacagccgcagcggcattgagatcctcgtactcgacgttgctccccttccgctagacacggtgttcgtcaacctggagagcgaattgacaaaacggctggagagcggcgagggcacctttta

SEQ ID NO: 2155 - DNA, 305 bp, Triticum aestivum
  Clone ID: uC-tsfl9316010h01b1
gaaagccaactgacggcattgcacatgtgcttcaaagaaatgctgctgctgctattcaacgagatcgattctaacctcaaagcgcccagatcccaatgacgagctcgtcgacgatgtccaccacgttgcagtcgcgccatgggccccgaatgcgaaccccgtcgacatggcctggtccgttgtgccggtactgcgatccggcgacttgtcccattcgaccatccagttctcgccctcctcgtcggcgcttcagagcttcgccgtgaccctgcaacaggtggccccttcgaagctgtccagccaca

SEQ ID NO: 2156 - DNA, 243 bp, Triticum aestivum
  Clone ID: uC-tsfl9316010h02b1
aaacctttactagactttttctgtttgtttagcttacttcacctagagtcttctaccttttcttatcattgaatcaacccctttttttttttcttttaaacacatcccaacccaaagtataagcgcccacctagtcctatctagttcgaacaatgcgaactagaacgacatgagacactatctttgtcgttacgaacctaacactttctaccaagcttaatcggaataagaccttacaaacac

SEQ ID NO: 2157 - DNA, 387 bp, Triticum aestivum
  Clone ID: uC-tsfl9316010h05b1
ggatttctttacaactaaggttcctgttttaacattttttgttcaagggcttttgcccatctccaatagctgacaagaactctttcttttctttacaaatcccaaaacctttactagactttttctgcttctttagcttacttcacctagagtcttctaccttttcttatcattgaatcaacccctttttttttttcttttaaacacatcccaacccaaagtataagcgcccacctagtcctatctagtccgaaaaatgcgaactagaactacatgagacactatctctgtcgttacgaacctaacactttctaccaagcttaatcggaataagacctcacaaacactcacaagttatatagggcttgaaagaaagtctaggtttgg

SEQ ID NO: 2158 - DNA, 381 bp, Triticum aestivum
  Clone ID: uC-tsfl9316010h06b1
tggatttctttacaactaaggttcctgtttttaacatttttagttcaagggcttttgcccatctccaatagctaacaagaactctttcttttctttacaaatcccaaaacctttactagactttttctgcttctttagcttacttcacctagagtcttctaccttttcttatcattgaatcaacccctttttttttttcttttaaacacatcccaacccaaagtataagcgcccacctagtcctatctagtccgaaaaatgcgaactagaactacatgagacactatctctgtcgttacgaacctaacactttctaccaagcttaatcggaataagacctcacaaacactcacaagttatatagggcttgaaagaaagtct

SEQ ID NO: 2159 - DNA, 386 bp, Triticum aestivum
  unsure (1)..(386): unsure at all n locations
  Clone ID: uC-tsfl9316010h10b1
atttggatttctttaacaactaaggttcctgtttttaacatttttaagccaagggcttttgcccatctccaatagctaacaagaactctttcttttctttacaaatcccaaaacctttactagactttttctgcttctntagcttacttcacctagagtcttctaccttttcttatcattgaatcaacccctttttttttttcttttaaacacatcccaacccaaagtataagcgcccacctagtcctatctagtccgaaaaatgcgaactagaactacatgagacactatctctgtcgttacgaacctaacactttctaccaagcttaatcggaataagacctcacaaacactcacaagttatatagggcttgaaagaaagtcta

SEQ ID NO: 2160 - DNA, 367 bp, Triticum aestivum
  Clone ID: uC-tsfl9316010h12b1
tggtaagccaagaaagccaactgacggcattgcacttgttgtcagacaaagaaatgctgctgctgctattgaacgagatcgattctaacctcaaagcgcccagatcccaatgacgagctcgtcgacgatgtccaccacgttgcagtcgcgccatgggccccgaatgcgaaccccgtcgacatggcctggtccgttgtgccggtactgcgatccggcgacttgtcccattcgaccatccagttctcgccctcctcgtcggcgcttcagagcttcgccgtgaccctgcaacaggtggccccttcgaagctgtccagccacagccgcagcggcattgagatcctcgtctccgacgttgctccccttccgc

SEQ ID NO: 2161 - DNA, 266 bp, Triticum aestivum
  Clone ID: uC-tsfl9316018a07b1
catcactttgttacatctagcggatttggatttctttaacaactaaggttcctgtttttaacattttaaatttcaagggcttttgcccatctccaatagctaacaagaactctttcttttctttacaaatcccaaaacctttactagactttttctgcttctttagcttacttcacctagagtcttctaccttttcttatcattgaatcaacccctttttttttttcttttaaacacatcccaacccaaagtataagcgcccacct

SEQ ID NO: 2162 - DNA, 405 bp, Triticum aestivum; identical to SEQ ID NO: 1850
  Clone ID: uC-tsfl9316018a08b1

SEQ ID NO: 2163 - DNA, 474 bp, Triticum aestivum
  Clone ID: uC-tsfl9316018a10b1
gttctccgacctcttcccgcacctagcaaatggtaagccaagaaagccaactgacggcattgcacatgagctgacaaagaaatgctgctgctgctattcaacgagatcgattctaacctcaaggcgcccagatcccaatgacgagctcgtcgacgatgtccaccacgttgcagtcgcgccatgggccccgaatgcgaaccccgtcgacatggcctggtccgttgtgccggtactgcgatccggcgacttgtcccattcgaccatccagttctcgccctcctcgtcggcgcttcagagcttcgccgtgaccctgcaacaggtggccccttcgaagctgtccagccacagccgcagcggcattgagatcctcgtcctcgacgttgctccccttccgctagacacggtgttcgtcaacctggagagcgaattgacaaaacggctggagagcggcgagggcaccttttacaaggacca

SEQ ID NO: 2164 - DNA, 369 bp, Triticum aestivum
  Clone ID: uC-tsfl9316018a11b1
gctgcgtgggctcctatggggcccaagggcttcatccgcgaggaagccgggaagatactcaccgcatacctgaagggccgtccagcattcgaggctgacgaccagtctgcgttgatacacctcttgctctcgcagaaggagaagtggatggacaaggtgtatatagagaattcatactacttgcacggtttctgggctgggctggtggacaagtacgaggagatgatggagaaccaccatccagggcttggggatgagcggtggccatttgtgacacactttgttgggtgcaagccatgcggaagctatggtgattacccagtagaccggtgtctcaagagtatggagcgagcatttaattttgccgat

SEQ ID NO: 2165 - DNA, 503 bp, Triticum aestivum
  Clone ID: uC-tsfl9316018a12b1
tcaacactttgttacatctagcggatttggatttctttaacaactaaggttcctgtttttaacattttaaagccaagggcttttgcccatctccaatagctaacaagaactctttcttttctttacaaatcccaaaacctttactagactttttctgcttctttagcttacttcacctagagtcttctaccttttcttatcattgaatcaacccctttttttttttcttttaaacacatcccaacccaaagtataagcgcccacctagtcctatctagtccgaaaaatgcgaactagaactacatgagacactatctctgtcgttacgaacctaacactttctaccaagcttaatcggaataagacctcacaaacactcacaagttatatagggcttgaaagaaagtctaggtttgggtttgggttaactgctctaataaggagagtcagctacttggataaaaagagtgatcaaaatgaataagaaaatccaagtattttac

SEQ ID NO: 2166 - DNA, 301 bp, Triticum aestivum
  Clone ID: uC-tsfl9316018b07b1
gcccatctccaatagctgacaagaactctttcttttcttgtggaatcccaaaacctttactagactatttctgcttctttagcttacttctcccactgccttctaccttttcttatcattgaaacaacccctttttttttttctttttaacacatcccaacccaaagtataagcgcccacctagtcctatctagtccgaaaaatgcgaactaaaactacatgagacactatctctgtcgttacgaacctaacactttctaccaagcttaatcggaataagacctcacaaacactcacaagt

SEQ ID NO: 2167 - DNA, 472 bp, Triticum aestivum
  Clone ID: uC-tsfl9316018b08b1
gttctccgacctcttcccgcacctagcaaatggtaagccaagaaagccaactgacggcattgcacatgagttgacaaagaaatgctgctgctgctattcaacgagatcgattctaacctcaaagcgcccagatcccaatgacgagctcgtcgacgatgtccaccacgttgcagtcgcgccatgggccccgaatgcgaaccccgtcgacatggcctggtccgttgtgccggtactgcgatccggcgacttgtcccattcgaccatccagttctcgccctcctcgtcggcgcttcagagcttcgccgtgaccctgcaacaggtggccccttcgaagctgtccagccacagccgcagcggcattgagatcctcgtcctcgacgttgctccccttccgctagacacggtgttcgtcaacctggagagcgaattgacaaaacggctggagagcggcgagggcaccttttacaaggac

SEQ ID NO: 2168 - DNA, 246 bp, Triticum aestivum
  Clone ID: uC-tsfl9316018c07b1
ctccgacctcttcccgcacctagcaaatggtaagccaagaaagccaactgacggcattgcacatgagctgacaaagaaatgctgctgctgctattcaacgagatcgattctaacctcaaagcgcccagatcccaatgacgagctcgtcgacgatgtccaccacgttgcagtcgcgccatgggcccctaatgcgaaccccgtcgacatggcctggtccgttgtgccggtactgcgatccggcgactt

SEQ ID NO: 2169 - DNA, 526 bp, Triticum aestivum
  Clone ID: uC-tsfl9316018c08b1
tcaacactttgttacatctagcggatttggatttctttaacaactaaggttcctgtttttaacattttaaagccaagggcttttgcccatctccaatagctaacaagaactctttcttttctttacaaatcccaaaacctttactagactttttctgcttctttagcttacttcacctagagtcttctaccttttcttatcattgaatcaacccctttttttttttcttttaaacacatcccaacccaaagtataagcgcccacctagtcctatctagtccgaaaaatgcgaactagaactacatgagacactatctctgtcgttacgaacctaacactttctaccaagcttaatcggaataagacctcacaaacactcacaagttatatagggcttgaaagaaagtctaggtttgggtttgggttaactgctctaataaggagagtcagctacttggattaaaaagagtgatcaaaatgaataagaaaatccaagtattttacggtatccatgagttcaaatttg

SEQ ID NO: 2170 - DNA, 468 bp, Triticum aestivum
  Clone ID: uC-tsfl9316018d12b1
tccgactctcttcccgcacctagcaaatggtaagccaagaaagccaactgacggcattgcacatgagtttcaaagaaatgctgctgctgctattcaacgagatcgattctaacctcaaagcgcccagatcccaatgacgagctcgtcgacgatgtccaccacgttgcagtcgcgccatgggccccgaatgcgaaccccgtcgacatggcctggtccgttgtgccggtactgcgatccggcgacttgtcccattcgaccatccagttctcgccctcctcgtcggcgcttcagagcttcgccgtgaccctgcaacaggtggccccttcgaagctgtccagccacagccgcagcggcattgagatcctcgtcctcgacgttgctccccttccgctagacacggtgttcgtcaacctggagagcgaattgacaaaacggctggagagcggcgagggcaccttttacaaggac

SEQ ID NO: 2171 - DNA, 405 bp, Triticum aestivum; identical to SEQ ID NO: 1335
  Clone ID: uC-tsfl9316018e07b1

SEQ ID NO: 2172 - DNA, 295 bp, Triticum aestivum
  Clone ID: uC-tsfl9316018e08b1
ctccgacctcttcccgcacctagcaaatggtaagccaagaaagccaactgacggcattgcacatgagcagtcaaagaaatgctgctgctgctattcaacgagatcgattctaacctcaaagcgcccagatcccaatgacgagctcgtcgacgatgtccaccacgttgcagtcgcgccatgggccccgaatgcgaaccccgtcgacatggcctggtccgttgtgccggtactgcgatccggcgacttgtcccattcgaccatccagttctcgccctcctcgtcggcgcttcagagc

SEQ ID NO: 2173 - DNA, 383 bp, Triticum aestivum
  Clone ID: uC-tsfl9316018e09b1
ggatttggatttctttaacaactaaggttcctgcttttaacattgtaaagcctagggcttttgcccatctccaatagctaacaagaactctttcttttctttacaaatcccaaaacctttactagactttttctgcttctttagcttacttcacctagagtcttctaccttttcttatcattgaatcaacccctttttttttttcttttaaacacatcccaacccaatgtataagcgcccacctagtcctatctagtccgaaaaatgcgaactagaactacatgagacactatctctgtcgttacgaacctaacactttctaccaagcttaatcggaatatgacctcacaaacactcacaagttatatagggcttgaaagaaa

SEQ ID NO: 2174 - DNA, 441 bp, Triticum aestivum
  Clone ID: uC-tsfl9316018e11b1
cactttgttacatctagcggatttggatttctttaacaactaaggttcctgtttttaacattttaaagccaagggcttttgcccatctccaatagctaacaagaactctttcttttctttacaaatcccaaaacctttactagactttttctgcttctttagcttacttcacctagagtcttctaccttttcttatcattgaatcaacccctttttttttttcttttaaacacatcccaacccaaagtataagcgcccacctagtcctatctagtccgaaaaatgcgaactagaactacatgagacactatctctgtcgttacgaacctaacactttctaccaagcttaatcggaataagacctcacaaacactcacaagttatatagggcttgaaagaaagtctaggtttgggtttgggttaactgctctaataaggaga

SEQ ID NO: 2175 - DNA, 471 bp, Triticum aestivum
  Clone ID: uC-tsfl9316018e12b1
gttctccgacctcttcccgcacctagcaaatggtaagccaagaaagccaactgacggcattgcacatgagctgacaaagaaatgctgctgctgctattcaacgagatcgattctaacctcaaagcgcccagatcccaatgacgagctcgtcgacgatgtccaccacgttgcagtcgcgccatgggccccgaatgcgaaccccgtcgacatggcctggtccgttgtgccggtactgcgatccggcgacttgtcccattcgaccatccagttctcgccctcctcgtcggcgcttcagagcttcgccgtgaccctgcaacaggtggccccttcgaagctgtccagccacagccgcagcggcattgagatcctcgtcctcgacgttgctccccttccgctaacacggtgttcgtcaacctggagagcgaattgacaaaacggctggagagcggcgagggcaccttttacaaggac

SEQ ID NO: 2176 - DNA, 472 bp, Triticum aestivum
  Clone ID: uC-tsfl9316018f11b1
gttctccgacctcttcccgcacctagcaaatggtaagccaagaaagccaactgacggcattgcacatgagcagacaaagaaatgctgctgctgctattcaacgagatcgattctaacctcaaagcgcccagatcccaatgacgagctcgtcgacgatgtccaccacgttgcagtcgcgccatgggccccgaatgcgaaccccgtcgacatggcctggtccgttgtgccggtactgcgatccggcgacttgtcccattcgaccatccagttctcgccctcctcgtcggcgcttcagagcttcgccgtgaccctgcaacaggtggccccttcgaagctgtccagccacagccgcagcggcattgagatcctcgtcctcgacgttgctccccttccgctagacacggtgttcgtcaacctggagagcgaattgacaaaacggctggagagcggcgagggcaccttttacaaggac

SEQ ID NO: 2177 - DNA, 473 bp, Triticum aestivum
  Clone ID: uC-tsfl9316018f12b1
gttctccgacctcttcccgcacctagcaaatggtaagccaagaaagccaactgacggcattgcacatgagctgacaaagaaatgctgctgctgctattcaacgagatcgattctaacctcaaagcgcccagatcccaatgacgagctcgtcgacgatgtccaccacgttgcagtcgcgccatgggccccgaatgcgaaccccgtcgacatggcctggtccgttgtgccggtactgcgatccggcgacttgtcccattcgaccatccagttctcgccctcctcgtcggcgcttcagagcttcgccgtgaccctgcaacaggtggccccttcgaagctgtccagccacagccgcagcggcattgagatcctcgtcctcgacgttgctccccttccgctagacacgggtgttcgtcaacctggagagcgaattgacaaaacggctggagagcggcgagggcaccttttacaaggac

SEQ ID NO: 2178 - DNA, 102 bp, Triticum aestivum
  Clone ID: uC-tsfl9316018g07b1
gttctccgacctcttcccgcacctagcaaatggtaagccaagaaagccaactgacggcattgcacatgttcttacaaagaaatgctgctgctggtattcaac

SEQ ID NO: 2179 - DNA, 501 bp, Triticum aestivum
  Clone ID: uC-tsfl9316018g09b1
cactttgttacatctagcggatttggatttctttaacaactaaggttcctgtttttaacatttttaagccaagggcttttgcccatctccaatagctaacaagaactctttcttttctttacaaatcccaaaacctttactagactttttctgcttctttagcttacttcacctagagtcttctaccttttcttatcattgaatcaacccctttttttttttcttttaaacacatcccaacccaaagtataagcgcccacctagtcctatctagtccgaaaaatgcgaactagaactacatgagacactatctctgtcgttacgaacctaacactttctaccaagcttaatcggaataagacctcacaaacactcacaagttatatagggcttgaaagaaagtctaggtttgggtttgggttaactgctctaataaggagagtcagctacttggattaaaaagagtgatcaaaatgaataagaaaatccaagtattttacg

SEQ ID NO: 2180 - DNA, 246 bp, Triticum aestivum
  Clone ID: uC-tsfl9316018h08b1
tcaacactttgttacatctagcggatttggatttctttaacaactaaggttcctgtttttaacattttaaagccaagggcttttgcccatctccaatagctaacaagaactctttcttttctttacaaatcccaaaacctttactagactttttctgcttctttagcttacttcacctagagtcttctaccttttcttatcattgaatcaacccctttttttttttcttttaaacacatcccaacc

SEQ ID NO: 2181 - DNA, 169 bp, Triticum aestivum
  Clone ID: uC-tsfl9316018h10b1
gttctccgacctcttcccgcacctagcaaatggtaagccaagaaagccaactgacggcattgcacatgtgctgacaaagaaatgctgctgctgctattcaacgagatcgattctaacctcaaagcgcccagatcccaatgacgagctcgtcgacgatgtccaccacgtt

SEQ ID NO: 2182 - DNA, 433 bp, Triticum aestivum
  Clone ID: uC-tsfl9316018h12b1
tggcagttttacacgtacatgattcttatttcagaaacaaccacccctgaaatcaacatgagatggttccttgacaccgctggactgaagaagtcgagcgcctacctgatcaatggtattttgatatttgttgtatggctggcggcaaggatatttttgttcctgtatgtattttaccacatctatttgcactacagccagataatgaagatgcacgcatttggttattacctgacactgaccgtgccgtcggtgctctttgtcatgaacgcaatgtggtttacgaagattttgaaaggggtaatgaaaacactgtcgaaatggtcgtaaatcggattaggctctgcggaccagaagtacaacgtaactgggtgttcctgccgtgctgcactgcgtgtgacctgaatgtgtaaagttatgaatatatgaatta

SEQ ID NO: 2183 - DNA, 442 bp, Triticum aestivum
  Clone ID: uC-tsfl9316019a08b1
acctagcaaatggcaatgccaagaaagccactgacggatatacatgagctgttaagaaacgctgctgctgctatacatcgagatcgattctaacctcaaagcgcccagatcccaatgacgagctcgtcgacgatgtccaccacgttgcagtcgcgccatgggccccgaatgcgaaccccgtcgacatggcctggtccgttgtgccggtactgcgatccggcgacttgtcccattcgaccatccagttctcgccctcctcggcggcgcttcagagcttcgccgagaccctgcaacaggtggccccttcgaagctgtccagccacagccgcagcggcattgagatcctcgtcctcgacgttgctccccttccgctagacacggtgttcgtcaacctggagagcgaattgacaaaacggctggagagcggcgagggcacctttta

SEQ ID NO: 2184 - DNA, 302 bp, Triticum aestivum
  Clone ID: uC-tsfl9316019a11b1
aactctttcttttctttgcaaatcccaaaacctttactagactttttctgcttctttagcttacttcacctagagtcttctaccttttcttatcattgagtcaacccctttttttttttcttttaaacacatcccaacccaaagtgtaagcgcccacctagtcctatctagtccgaaaaatgcgaactagaactacatgagacactatctctgtcgttacgaacctaacactttctaccaagcttaatcggaataagacctcacaaacactcacaagttatatagggcttgaaagaaagtct

SEQ ID NO: 2185 - DNA, 543 bp, Triticum aestivum
  Clone ID: uC-tsfl9316019b09b1
actttcttacatctagcggatttggatttctttaacaactaaggttcctgtttttaacattttaaatttcagggcttttgcccatctccaatagctaacaagaactctttcttttctttacaaatcccaaaacctttactagactttttctgcttctttagcttacttcacctagagtcttctaccttttcttatcattgaatcaacccctttttttttttcttttaaacacatcccaacccaaagtataagcgcccacctagtcctatctagtccgaaaaatgcgaactagaactacatgagacactatctctgtcgttacgaacctaacactttctaccaagcttaatcggaataagacctcacaaacactcacaagttatatagggcttgaaagaaagtctaggtttgggtttgggttaactgctctaataaggagagtcagctacttggattaaaaagagtgatcaaaatgaataagaaaatccaagtattttacggtatccatgagttcaaatttgatgcagacatgataattaaaga

SEQ ID NO: 2186 - DNA, 491 bp, Triticum aestivum
  Clone ID: uC-tsfl9316019b10b1
tacatctagcggatttggatttctttaacaactaaggttcctgtttttaacattttaattttcagggctttttcccatctccaatagctaacaagaactctttcttttctttacaaatcccaaaacctttactagactttttctgcttctttagcttacttcacctagagtcttctaccttttcttatcattgaatcaacccctttttttttttcttttaaacacatcccaacccaaagtataagcgcccacctagtcctatctagtccgaaaaatgcgaactagaactacatgagacactatctctgtcgttacgaacctaacactttctaccaagcttaatcggaataagacctcacaaacactcacaagttatatagggcttgaaagaaagtctaggtttgggtttgggttaactgctctaataaggagagtcagctacttggattaaaaagagtgatcaaaatgaataagaaaatccaagtatttta

SEQ ID NO: 2187 - DNA, 346 bp, Triticum aestivum
  Clone ID: uC-tsfl9316019b11b1
cagtgccccagcttttgccgccaccgccgccgtccctgcccctctccgcctgctgccaccgtcacagacaccgccgtctacttcagctgctgccgaccccgagacggagaggctcaaggaggcagccgctcgacgcaaggcggagggcgcgacggcgtcggcggtgtacgcccgccagcgcgacgagtactggaccccgcagcggaaccttccgtacacggccatctttccgtagccggaggcccagagcgccgcgccgccgcggagacgggtgcgaagagcgtacggtggcgagaggccgaccgagaggagggcgaggatcgacctgacggtgccgatgctgatg

SEQ ID NO: 2188 - DNA, 499 bp, Triticum aestivum
  Clone ID: uC-tsfl9316019b12b1
atctagcgcatttggatttctttaacaactaaggttcctgtttttaacattgtaaatttcagggctatttcccatctccaatagctaacaagaactctttcttttctttacaaatcccaaaacctttactagactttttctgcttctttagcttacttcacctagagtcttctaccttttcttatcattgaatcaacccctttttttttttcttttaaacacatcccaacccaaagtataagcgcccacctagtcctatctagtccgaaaaatgcgaactagaactacatgagacactatctctgtcgttacgaacctaacactttctaccaagcttaatcggaataagacctcacaaacactcacaagttatatagggcttgaaagaaagtctaggtttgggtttgggttaactgctctaataaggagagtcagctacttggattaaaaagagtgatcaaaatgaataagaaaatccaagtattttacggtatccatg

SEQ ID NO: 2189 - DNA, 488 bp, Triticum aestivum
  unsure (1)..(488): unsure at all n locations
  Clone ID: uC-tsfl9316019c09b1
atctagcggatttggatttctttaacaactaaggttcctgtttttaacattttaaatttagggcnatagtccatctccaatagctaacaagaactctttcttttctttacaaatcccaaaacctttactagactttttctgcttctttagcttacttcacctagagtcttctaccttttcttatcattgaatcaacccctttttttttttcttttaaacacatcccaacccaaagtataagcgcccacctagtcctatctagtccgaaaaatgcgaactagaactacatgagacactatctctgtcgttacgaacctaacactttctaccaagcttaatcggaataagacctcacaaacactcacaagttatatagggcttgaaagaaagtctaggtttgggtttgggttaactgctctaataaggagagtcagctacttggattaaaaagagtgatcaaaatgaataagaaaatccaagtattttac

SEQ ID NO: 2190 - DNA, 466 bp, Triticum aestivum
  Clone ID: uC-tsfl9316019c11b1
catctagcggatttggatttctttaacaactaaggttcctgtttttaacattttaaattcaagggcttttgcccatctccaatagctaacaagaactctttcttttctttacaaatcccaaaacctttactagactttttctgcttctttagcttacttcacctagagtcttctaccttttcttatcattgaatcaacccctttttttttttcttttaaacacatcccaacccaaagtataagcgcccacctagtcctatctagtccgaaaaatgcgaactagaactacatgagacactatctctgtcgttacgaacctaacactttctaccaagcttaatcggaataagacctcacaaacactcacaagttatatagggcttgaaagaaagtctaggtttgggtttgggttaactgctctaataaggagagtcagctacttggattaaaaagagtgatcaaaatg

SEQ ID NO: 2191 - DNA, 515 bp, Triticum aestivum
  Clone ID: uC-tsfl9316019d07b1
ttcccgcacctagcaaatggtatgccaagaaagccaactgacggcattgcacatgagcttacaagatatgttgctgctgctattcaacgagatcgattctaaccttaaagcgcccagatcccaatgacgagctcgtcgacgatgtccaccacgttgcagtcgcgccatgggccccgaatgcgaaccccgtcgacatggcctggtccgttgtgccggtactgcgatccggcgacttgtcccattcgaccatccagttctcgccctcctcgtcggcgcttcagagcttcgccgtgaccctgcaacaggtggccccttcgaagctgtccagccacagccgcagcggcattgagatcctcgtcctcgacgttgctccccttccgctagacacggtgttcgtcaacctggagagcgaattgacaaaactgctggagagcggcgagggcaccttttacaaggaccatccgacatgccccaatgccaaggacgttgccaacatgacgcccgaggagcgtcta

SEQ ID NO: 2192 - DNA, 132 bp, Triticum aestivum
  Clone ID: uC-tsfl9316019d10b1
actcattctaataggagcatgggtattcggcactattgaccgtatccatgattgcatcgagccagggcatacgatcttctggctctcagttcttgacggtgggacagctgcactaatggtagccaacctatc

SEQ ID NO: 2193 - DNA, 491 bp, Triticum aestivum
  Clone ID: uC-tsfl9316019d12b1
tttggatttctttaacaactaaggttcctgtttttaacattttaaagtcaagggcttttgcccatctccaatagctaacaagaactctttcttttctttacaaatcccaaaacctttactagactttttctgcttctttagcttacttcacctagagtcttctaccttttcttatcattgaatcaacccctttttttttttcttttaaacacatcccaacccaaagtataagcgcccacctagtcctatctagtccgaaaaatgcgaactagaactacatgagacactatctctgtcgttacgaacctaacactttctaccaagcttaatcggaataagacctcacaaacactcacaagttatatagggcttgaaagaaagtctaggtttgggtttgggttaactgctctaataaggagagtcagctacttggattaaaaagagtgatcaaaatgaataagaaaatccaagtattttacggtatccatgag

SEQ ID NO: 2194 - DNA, 254 bp, Triticum aestivum
  Clone ID: uC-tsfl9316019e07b1
aaccttaaagcgcccagatcccaatgacgagctcgtcgacgatgtccaccacgttgcagtcgcgccatgggccccgaatgcgaaccccgtcgacatggcctggtccgttgtgccggtactgcgatccggcgacttgtcccattcgaccatccagttctcgccctcctcgtaggcgcttcagagcttcgccgtgaccctgcaacaggtggcccctaagaagctgttcagccacagccgtagcggcattgagatcc

SEQ ID NO: 2195 - DNA, 390 bp, Triticum aestivum
  Clone ID: uC-tsfl9316019f08b1
ttcccgcacctagcaaatggtaatgccaagaaagccaactgacggcatttttcatgagcatataaagaaatgctgctgctgctattcaacgagatcgattctaacctcaaagcgcccagatcccaatgacgagctcgttgacgatgtccaccacgttgcagtcgcgccatgggccccgaatgcgaaccccgtcgacatggcctggtccgttgtgccggtactgcgatccggcgacttgtcccattcgaccatccagttctcgccctcctcgtcggcgcttcagagctttgccgtgaccctgcaacaggtggccccttcgaagctgtccagccacagccgcagcggcattgagatcctcgtccttgacgttgctccccttacgctagacac

SEQ ID NO: 2196 - DNA, 277 bp, Triticum aestivum
  Clone ID: uC-tsfl9316019f12b1
aaatcccaaaacctttactagactttgtctgcttctttagcttacttcacctagagtcttctacctgttcttatgatggagtcaacccctttttttttttcttgtaaacacatcccaacccaaagtgtaagcgcccacctagtcctatctagtccgaaaaatgcgaactagaactacatgagacactatctctgtcgttacgaacctaacactttctaccaggcttaatcggaataagacctcacaaacactcacaagttatatagggcttgaaaga

SEQ ID NO: 2197 - DNA, 404 bp, Triticum aestivum
  Clone ID: uC-tsfl9316019g07b1
cccatctgcaatagctaacaagaactctttcttttctttacaaatcccaaaacctttactagactttgtctgcttctttagcttacttcacctagagtcttgtaccttttcttatcattgaatcaacccctttttttttttcttttaaacacatcccaacccaaagtataagcgcccacctagtcctatctagtccgaaaaatgcgaactagaactacatgagacactatctctgtcgttacgaacctaacactttctaccaagcttaatcggaataagacctcacaaacactcacaagttatatagggcttgaaagaaagactaggtttgggtttgggttaactgctctaataaggagagtcagctacttggattaaaaagagtgatcaaaatgaataagaaa

SEQ ID NO: 2198 - DNA, 462 bp, Triticum aestivum
  Clone ID: uC-tsfl9316020a03b1
cactttgttacatctagcggatttggatttctttaacaactaaggctcctgggtttattatttgaattttcagggcttttgcccatctgcaatagctaacaagaactctttcttttctttacaaatcccaaaacctttactagactttttctgcttctttagcttacttcacctagagtcttctaccttttcttatcattgaatcaacccctttttttttttcttttaaacacatcccaacccaaagtataagcgcccacctagtcctatctagtccgaaaaatgcgaactagaactacatgagacactatctctgtcgttacgaacctaacactttctaccaagcttaatcggaataagacctcacaaacactcacaagttatatagggcttgaaagaaagtctaggtttgggtttgggttaactgctctaataaggagagtcagctacttggattaaaaa

SEQ ID NO: 2199 - DNA, 385 bp, Triticum aestivum
  Clone ID: uC-tsfl9316020a04b1
cactttgttacatctagcggatttggatttctttaacaactaaggttcctgtttttaacattttaaattttagggcttttgcccatctccaatagctaacaagaactctttcttttctttacaaatcccaaaacctttactagactttttctgcttctttagcttacttcacctagagtcttctaccttttcttatcattgaatcaacccctttttttttttcttttaaacacatcccaacccaaagtataagcgcccacctagtcctatctagtccgaaaaatgcgaactagaactacatgagacactatctctgtcgttacgaacctaacactttctaccaagcttaatcggaataagacctcacaaacactcacaagttata

SEQ ID NO: 2200 - DNA, 455 bp, Triticum aestivum
  Clone ID: uC-tsfl9316020c02b1
tggattgctttaacaactaaggttcctgcttttaacattggaaagtcatagggcttttgcccatctgcgatagctaacaagaactctttcttttctttacaaatcccaaaacctttactagactttgtctgcttctttagcttacttcacctagagtcttgtacctgttcttatcattgagtcaaccccttttttgttttcttttaagcacatcccaacccagagtatagagcgcccacctagtcctatctagtccgaaaaatgcgaactagaactacatgagacactatctctgtcgttacgaacctaacactttctaccaagcttaatcggaataagacctcacaaacactcacaagttatatagggcttgaaagaaagtctaggtttgggtttgggttaactgctctaataaggagagtcagctacttggattaaaaagagtgatcaaaatg

SEQ ID NO: 2201 - DNA, 514 bp, Triticum aestivum
  Clone ID: uC-tsfl9316020c03b1
catctagcggatttggatttctttaacaactaaggtttctgtttttaacattttaaagtcaagggctatgttccatctccaatagctaacaagaactctttcttttctttacaaatcccaaaacctttactagactttttctgcttctttagcttacttcacctagagtcttctaccttttcttatcattgaatcaacccctttttttttttcttttaaacacatcccaacccaaagtataagcgcccacctagtcctatctagtccgaaaaatgcgaactagaactacatgagacactatctctgtcgttacgaacctaacactttctaccaagcttaatcggaataagacctcacaaacactcacaagttatatagggcttgaaagaaagtctaggtttgggtttgggttaactgctctaataaggagagtcagctacttggattaaaaagagtgatcaaaatgaataagaaaatccaagtattttacggtatccatgagttcaaatttgat

SEQ ID NO: 2202 - DNA, 361 bp, Triticum aestivum
  Clone ID: uC-tsfl9316020d01b1
tctaaccttaaagcgcccagatcccaatgacgagctcgtcgacgatgtccaccacgttgcagtcgcgccatgggccccgaatgcgaaccccgtcgacatggcctggtccgttgtgccggtactgcgatccggcgacttgtcccattcgaccatccagttctcgccctcctcgtcggcgctatagagctttgccgtgaccctgcaacaggtggccccttcgaagctgtccagccacagccgcagcggcattgagatcctcgtcctcgacgttgctccccttccgctagacacggtgttcgtcaacctggagagcgaattgacaaaactgctggagagcggcgagggcaccttttacaaggac

SEQ ID NO: 2203 - DNA, 487 bp, Triticum aestivum
  Clone ID: uC-tsfl9316020e01b1
acatctagcgcatttggatttctttaacaactaaggttcctgttttaacatttaaattaagggcttttgcccatctccaatagctaacaagaactctttcttttctttacaaatcccaaaacctttactagactttttctgcttctttagcttacttcacctagagtcttctaccttttcttatcattgaatcaacccctttttttttttcttttaaacacatcccaacccaaagtataagcgcccacctagtcctatctagtccgaaaaatgcgaactagaactacatgagacactatctctgtcgttacgaacctaacactttctaccaagcttaatcggaataagacctcacaaacactcacaagttatatagggcttgaaagaaagtctaggtttgggtttgggttaactgctctaataaggagagtcagctacttggattaaaaagagtgatcaaaatgaataagaaaatccaagtatttta

SEQ ID NO: 2204 - DNA, 360 bp, Triticum aestivum
  Clone ID: uC-tsfl9316020f02b1
cccatctccaatagctaacaagaactctttcttttctttacaaattccaaaacctttactagactttttctgcttctttagcttacttcacctagagtcttctaccttttcttatcattgaatcaacccctttttttttttcttttaaacacatcccaacccaaagtataagcgcccacctagtcctatctagtccgaaaaatgcgaactagaactacatgagacactatctctgtcgttacgaacctaacactttctaccaggcttaatcggaataagacctcacaaacactcacaagttatatagggcttgaaagaaagtctaggtttgggtttgggttaactgctctaataaggaga

SEQ ID NO: 2205 - DNA, 439 bp, Triticum aestivum
  Clone ID: uC-tsfl9316020g01b1
atctagcggatttggatttctttaacaactaaggttcctgggattatcattggaaatttctgggctttagcccatctccaatagctaacaagaactctttcttttctttacaaatcccaaaacctttactagactttttctgcttctttagcttacttcacctagagtcttctaccttttcttatcattgaatcaacccctttttttttttcttttaaacacatcccaacccaaagtataagcgcccacctagtcctatctagtccgaaaaatgcgaactagaactacatgagacactatctctgtcgttacgaacctaacactttctaccaagcttaatcggaataagacctcacaaacactcacaagttatatagggcttgaaagaaagtctaggtttgggtttgggttaactgctctaataaggagagtcagctac

SEQ ID NO: 2206 - DNA, 326 bp, Triticum aestivum
  Clone ID: uC-tsfl9316021a02b1
gattctaacctcaaagcgcccagatcccaatgacgagctcgtcgacgatgtccaccacgttgcagtcgcgccatgggccccgaatgcgaaccccgtcgacatggcctggtccgttgtgccggtactgcgatccggcgacttgtcccattcgaccatccagttctcgccctcctcgtcggcgcttcagagcttcgccgtgaccctgcaacaggtggccccttcgaagctgtgcagccacagccgcagcggcattgagatcctcgtactcgacgttgctccccttgcgctagacacggtgttcgtcaacctggagagcgaattgacaa

SEQ ID NO: 2207 - DNA, 379 bp, Triticum aestivum
  unsure (1)..(379): unsure at all n locations
  Clone ID: uC-tsfl9316021a05b1
ggatttggatttctttaacaactaaggttcccgcccctttcttgccttcncagggcgnangcccatctccaatagctgacaagaactctgtcttttctctacaaatcccaaaacctttactagactttttctgcttctttagcttacttcacctagagtcttgtaccttttcttatcattgaatcaacccctttttttttttcttttaaacacatcccaacccaatgtataagcgcccacctagtcctatctagtccgaaaaatgcgaactagaactacatgagacactatctctgtcgttacgaacctaacactttctaccaagcttaatcggaataagacctcacaaacactcacaagttatatagggcttgaaaga

SEQ ID NO: 2208 - DNA, 464 bp, Triticum aestivum
  Clone ID: uC-tsfl9316021a06b1
cactttgttcatctagcggatttggatttctttaacaactaaggttcctgcccgtttttattgaatgctcaagggcgattgcccatctccaatagctaacaagaactctttcttttctttacaaatcccaaaacctttactagactttttctgcttctttagcttacttcacctagagtcttctaccttttcttatcattgaatcaacccctttttttttttcttttaaacacatcccaacccaaagtataagcgcccacctagtcctatctagtccgaaaaatgcgaactagaactacatgagacactatctctgtcgttacgaacctaacactttctaccaagcttaatcggaataagacctcacaaacactcacaagttatatagggcttgaaagaaagtctaggtttgggtttgggctaactgctctaataaggagagtcagctacttggattaaaaaga

SEQ ID NO: 2209 - DNA, 409 bp, Triticum aestivum
  Clone ID: uC-tsfl9316021a08b1
cacagcgcgaaggcattaacgcctatgacgtgtactccccaaaaatatgctcgcaggtttacttccacccacaccatatgagcaccgcaaaaatggtggaccacggcatatcctcacagctactactatcacacaggttatcatagagccattcaaacagagatgtcgaaaagaacccctgctgcctccttggcggcacaaatctgacccaaatgcccaattgagctggacagtctctaagcacgtgaagcacagattcaactccacctttacaaacctgagacacattcgaggcgctaagatgtcttggatgccgatcctcatctgtcataactatgcccagcttggttatatacattttctggctatacttatacttatatatatctgtcctaaatataactattac

SEQ ID NO: 2210 - DNA, 387 bp, Triticum aestivum
  Clone ID: uC-tsfl9316021b01b1
cgtacgcgtgttttgctggcaagtcagttgctaaggacgcaattgtggatctcaagtctcctgaggtggcagtactagtggaggtgctccccatttctggggtgcctgttggatcttcagtcgccggggtgtctgttctcccagctgaactcgtctcggctaaaccccgtctttgtgtcaaggctttggtgtctgatacaaaaacaaagaacaagtgatgcgccaattcggctgcaaccagtcagagcacctgtaacggcaatatatggaggaaacgatcttgttgggcatgctcatgtcagccatgccgcagcttgagcattccacaaacaaagaaacggcatcgcagctgtcttgcctggctctgagtatgtcaatttgtaagct

SEQ ID NO: 2211 - DNA, 411 bp, Triticum aestivum
  unsure (1)..(411): unsure at all n locations
  Clone ID: uC-tsfl9316021b04b1
ggctggattccatcattaaaacctcactgcttgtttcctgaaaccacaggcgcagaactgatggggttcctatccacncancctaanaggagcatgggcattcggcactattaaccgnatccatgatttcatcgagccagggcataagatcttctggctctcagttcttgacgtcgggacagctgcactaatggtagcaaacctatcaaataaataagttataaaattcgccatagatcatctttgctcttcccgagtcgatgttctgaatgttgtattttcagggcttgttcaattcaatagcctatggtttcaacagctcagtgcgtcgagcaatccatgagagactggagctgtaagtcaccaccgatctctttggtttgctatattattcccaataatcaatgaagc

SEQ ID NO: 2212 - DNA, 389 bp, Triticum aestivum
  Clone ID: uC-tsfl9316021b07b1
tctagcggatttggatttctttaacaactaaggttcctgtttttaacattgtaatttccagggtgtttgcccatctccaatagctaacaagaactctttcttttctttacaaatcccaaaacctttactagactttttctgcttctttagcttacttcacctagagtcttctaccttttcttatcattgaatcaacccctttttttttttcttttaaacacatcccaacccaaagtataagcgcccacctagtcctatctagtccgaaaaatgcgaactagaactacatgagacactatctctgtcgttacgaacctaacactttctaccaagcttaatcggaataagacctcacaaacactcacaagttatatagggcttgaaagaaa

SEQ ID NO: 2213 - DNA, 450 bp, Triticum aestivum
  Clone ID: uC-tsfl9316021b12b1
ccgcacctagcaaatggtgagccaagaaagccaactgacggcattgcacatgagttgacaagtaatgctgctgctgctattcaacgagatcgattctaacctcaaagcgcccagatcccaatgacgagctcgtcgacgatgtccaccacgttgcagtcgcgccatgggccccgaatgcgaaccccgtcgacatggcctggtccgttgtgccggtactgcgatccggcgacttgtcccattcgaccatccagttctcgccctcctcgtcggcgcttcagagcttcgccgtgaccctgcaacaggtggccccttcgaagctgtccagccacagccgcagcggcattgagatcctcgtcctcgacgttgctccccttgcgctagacacggtgttcgtcaacctggagagcgaattgacaaaactgctggagagcggcgagggcaccttttaca

SEQ ID NO: 2214 - DNA, 381 bp, Triticum aestivum
  unsure (1)..(381): unsure at all n locations
  Clone ID: uC-tsfl9316021c02b1
aaatgccaactgacggcattgcacatgagctgacaaagtattgctgcnggtgctattcaacgagatcgattctaacctcaaagcgcccagatcccaatgacgagctcgtggacgatgtccaccacgttgcagtcgcgccatgggccccgaatgcgaaccccgtcgacatggcctggtccgttgtgccggtactgcgatccggcgacttgtgccattcgaccatccagttctcgccctcctcgtgggcgcttcagagctccgccgtgaccctgcaacaggtggccccttcgaagctgtccagccacagccgcagcggcattgagatcctcgtcctcgacgttgctccccttccgctagacacggtgttcgtcaacctggaga

SEQ ID NO: 2215 - DNA, 502 bp, Triticum aestivum
  Clone ID: uC-tsfl9316021c05b1
atctagcggatttggatttctttaacaactaaggttcctgtttttaacactggattctcagggtccttgcccatctgcaatagctaacaagaactctttcttttctttacaaatcccaaaacctttactagactttttctgcttctttagcttacttcacctagagtcttctaccttttcttatcattgaatcaacccctttttttttttcttttaaacacatcccaacccaaagtataagcgcccacctagtcctatctagtccgaaaaatgcgaactagaactacatgagacactatctctgtcgttacgaacctaacactttctaccaagcttaatcggaataagacctcacaaacactcacaagttatatagggctcgaaagaaagtctaggtttgggtttgggttaactgctctaataaggagagtcagctacttggattaaaaagagtgatcaaaatgaataagaaaatccaagtattttacggtatccatgagtt

SEQ ID NO: 2216 - DNA, 449 bp, Triticum aestivum
  Clone ID: uC-tsfl9316021c10b1
ccgcacctagcaaatggtaagccaagaaagccaactgacggcattgcacatgagttgacaagtaatgctgctgctgctattcaacgagatcgattctaacctcaaagcgcccagatcccaatgacgagctcgtcgacgatgtccaccacgttgcagtcgcgccatgggccccgaatgcgaaccccgtcgacatggcctggtccgttgtgccggtactgcgatccggcgacttgtcccattcgaccatccagttctcgccctcctcgtcggcgcttcagagcttcgccgtgaccctgcaacaggtggccccttcgaagctgtccagccacagccgcagcggcattgagatcctcgtcctcgacgttgctccccttccgctagacacggtgttcgtcaacctggagagcgaattgacaaaacggctggagagcggcgagggcaccttttac

SEQ ID NO: 2217 - DNA, 512 bp, Triticum aestivum
  Clone ID: uC-tsfl9316021c11b1
cttcccgcacctagcaaatggtatgccaagaaagccaactgacggcattgcacatgagctgacaaagtattgctgctgctgctattcaacgagatcgtttctaacctcaaagcgcccagatcccaatgacgagctcgtcgacgatgtccaccacgttgcagtcgcgccatgggccccgaatgcgaaccccgtcgacatggcctggtccgttgtgccggtactgcgatccggcgacttgtcccattcgaccatccagttctcgccctcctcgtcggcgcttcagagcttcgccgtgaccctgcaacaggtggccccttcgaagctgtccagccacagccgcagcggcattgagatcctcgtcctcgacgttgctccccttccgctagacacggtgttcgtcaacctggagagcgaattgacaaaacggctggagagcggcgagggcaccttttacaaggaccattcgacaagccccaatgccaaggacgttgccaacatgacgcccgaggagc

SEQ ID NO: 2218 - DNA, 401 bp, Triticum aestivum
  unsure (1)..(401): unsure at all n locations
  Clone ID: uC-tsfl9316021d01b1
cactctgttacatctagcggatttggatttctttaacaactaaggttcctgtttttaacattttaattcncagggtttttgcccatctccaatagctaacaagaactctttcttttctttacaaatcccaaaacctttactagactttttctgcttctttagcttacttcacctagagtcttctaccttttcttatcattgaatcaacccctttttttttttcttttaaacacatcccaacccaaagtataagcgcccacctagtcctatctagtccgaaaaatgcgaactagaactacatgagacactatctctgtcgttacgaacctaacactttctaccaagcttaatcggaataagacctcacaaacactcacaagttatatagggcttgaaagaaa

SEQ ID NO: 2219 - DNA, 454 bp, Triticum aestivum
  unsure (1)..(454): unsure at all n locations
  Clone ID: uC-tsfl9316021d03b1
catctagcggatttggatttctttaacaactaaggttcctgtttttaacattngattttccagggtttttgcccatctccaatagctaacaagatctctttcttttctttacaaatcccaaaacctttactagactttttctgcttctttagcttacttcacctagagtcttctaccttttcttatcattgaatcaacccctttttttttttcttttaaacacatcccaacccaaagtataagcgcccacctagtcctatctagtccgaaaaatgcgaactagaactacatgagacactatctctgtcgttacgaacctaacactttctaccaagcttaatcggaataagacctcacaaacactcacaagttatatagggcttgaaagaaagtctaggtttgggtttgggttaactgctctaataaggagagtcagctacttggattaaaaaga

SEQ ID NO: 2220 - DNA, 478 bp, Triticum aestivum
  Clone ID: uC-tsfl9316021d05b1
tacatctagcggatttggatttctttaacaactaaggttcctgtttttaacattttactgccaaggtttctttgcccatctccaatagctaacaagatctctttcttttctttacaaatcccaaaacctttactagactttttctgcttctttagcttacttcacctagagtcttctaccttttcttatcattgaatcaacccctttttttttttcttttaaacacatcccaacccaaagtataagcgcccacctagtcctatctagtccgaaaaatgcgaactagaactacatgagacactatctctgtcgttacgaacctaacactttctaccaagcttaatcggaataagacctcacaaacactcacaagttatatagggcttgaaagaaagtctaggtttgggtttgggttaactgctctaataaggagagtcagctacttggattaaaaagagtgatcaaaatgaataagaaa

SEQ ID NO: 2221 - DNA, 461 bp, Triticum aestivum
  Clone ID: uC-tsfl9316021d11b1
cttcccgcacctagcaaatggtaagccaagaaagccaactgacggcattgcacatgagttgacaaagtaatgctgctgctgctattcaacgagatcgattctaacctcaaagcgcccagatcccaatgacgagctcgtcgacgatgtccaccacgttgcagtcgcgccatgggccccgaatgcgaaccccgtcgacatggcctggtccgttgtgccggtactgcgatccggcgacttgtcccattcgaccatccagttctcgccctcctcgtcggcgcttcagagcttcgccgtgaccctgcaacaggtggccccttcgaagctgtccagccacagccgcagcggcattgagatcctcgtcctcgacgttgctccccttccgctagacacggtgttcgtcaacctggagagcgaattgacaaaacggctggagagcggtgagggcaccttttacaaggacc

SEQ ID NO: 2222 - DNA, 474 bp, Triticum aestivum
  Clone ID: uC-tsfl9316021d12b1
tgttacatctagcggatttggatttctttaacaactaaggttcctgtttttaacattttatttccaagggtttttgcccatctccaatagctaacaagaactctttcttttctttacaaatcccaaaacctttactagactttttctgcttctttagcttacttcacctagagtcttctaccttttcttatcattgaatcaacccctttttttttttcttttaaacacatcccaacccaaagtataagcgcccacctagtcctatctagtccgaaaaatgcgaactagaactacatgagacactatctctgtcgttacgaacctaacactttctaccaagcttaatcggaataagacctcacaaacactcacaagttatatagggcttgaaagaaagtctaggtttgggtttgggttaactgctctaataaggagagtcagctacttggattaaaaagagtgatcaaaatgaat

SEQ ID NO: 2223 - DNA, 475 bp, Triticum aestivum
  Clone ID: uC-tsfl9316021e03b1
cttcccgcacctagcaaatggtaagccaagaaagccaactgacggcattgcacatgagtgacaaagttttgctgctgctgctattcaacgagatcgattctaacctcaaagcgcccagatcccaatgacgagctcgtcgacgatgtccaccacgttgcagtcgcgccatgggccccgaatgcgaaccccgtcgacatggcctggtccgttgtgccggtactgcgatccggcgacttgtcccattcgaccatccagttctcgccctcctcgtcggcgcttcagagcttcgccgtgaccctgcaacaggtggccccttcgaagctgtccagccacagccgcagcggcattgagatcctcgtcctcgacgttgctccccttccgctagacacggtgttcgtcaacctggagagcgaattgacaaaacggctggagagcggcgagggcaccttttacaaggaccatccgacaagcccca

SEQ ID NO: 2224 - DNA, 449 bp, Triticum aestivum
  unsure (1)..(449): unsure at all n locations
  Clone ID: uC-tsfl9316021e05b1
ctagcaaatggcatgccaagagagccaactgacggcattgcacatgcgtgacaaagtaatgctgccgctgctatncaacgagancgattctaacctcaaagcgcccagatcccaatgacgagctcgtcgacgatgtccaccacgttgcagtcgcgccatgggccccgaatgcgaaccccgtcgacatggcctggtccgttgtgccggtactgcgatccggcgacttgtcccattcgaccatccagttctcgccctcctcgtcggcgcttcagagcttcgccgtgaccctgcaacaggtggccccttcgaagctgtccagccacagccgcagcggcattgagatcctcgtcctcgacgttgctccccttccgctagacacggtgttcgtcaacctggagagcgaattgacaaaacggctggagagcggcgagggcaccttttacaaggac

SEQ ID NO: 2225 - DNA, 494 bp, Triticum aestivum
  Clone ID: uC-tsfl9316021e07b1
cggatttggatttctttaacaactaaggttcctgtttttaacattttaattccaagggtctttgcccatctccaatagctaacaagaactctttcttttctttacaaatcccaaaacctttactagactttttctgcttctttagcttacttcacctagagtcttctaccttttcttatcattgaatcaacccctttttttttttcttttaaacacatcccaacccaaagtataagcgcccacctagtcctatctagtccgaaaaatgcgaactagaactacatgagacactatctctgtcgttacgaacctaacactttctaccaagcttaatcggaataagacctcacaaacactcacaagttatatagggcttgaaagaaagtctaggtttgggtttgggttaactgctctaataaggagagtcagctacttggattaaaaagagtgatcaaaatgaataagaaaatccaagtattttacggtatccatga

SEQ ID NO: 2226 - DNA, 380 bp, Triticum aestivum
  unsure (1)..(380): unsure at all n locations
  Clone ID: uC-tsfl9316021e10b1
tacatctagcggatttggatttctttaacaactaaggttcctgtttttaacattnnaaatcncaagggtttttgcccatctccaatagctaacaagaactctttcttttctttacaaatcccaaaacctttactagactttttctgcttctttagcttacttcacctagagtcttctaccttttcttatcattgaatcaacccctttttttttttcttttaaacacatcccaacccaaagtataagcgcccacctagtcctatctagtccgaaaaatgcgaactagaactacatgagacactatctctgtcgttacgaacctaacactttctaccaagcttaatcggaataagacctcacaaacactcacaagttatata

SEQ ID NO: 2227 - DNA, 230 bp, Triticum aestivum
  Clone ID: uC-tsfl9316021e11b1
cgattggcgttttttaccaccaccaacgcggatcagctgccttagcaattttgacacttaacgggaagcaaatttttgggctgactatcaaagttaattgggcatatgctatcggacagagggaggatacaacagaccatttccatattgatgctggtgatcttagccctgaggtcacggatgatgcattatttgcagtcttctcagcatattcccctaactgctctgat

SEQ ID NO: 2228 - DNA, 403 bp, Triticum aestivum
  Clone ID: uC-tsfl9316021f01b1
aacactttgttacatctagcggatttggatttctttaacaactaaggctcctgcccgtaatattgtaattctcagggctattgcccatctccaatagctaacaagaactctttcttttctttacaaatcccaaaacctttactagactttttctgcttctttagcttacttcacctagagtcttgtaccttttcttatcattgaatcaacccctttttttttttcttttaaacacatcccaacccaaagtataagcgcccacctagtcctatctagtccgaaaaatgcgaactagaactacatgagacactatctctgtcgttacgaacctaacactttctaccaagcttaatcggaataagacctcacaaacactcacaagttatatagggcttgaaagaaa

SEQ ID NO: 2229 - DNA, 485 bp, Triticum aestivum
  unsure (1)..(485): unsure at all n locations
  Clone ID: uC-tsfl9316021f03b1
tctccgacctcttcccgcacctagcaaatggttagccaagaaagccaactgacggcatttttcatgagtgataaagaaangctgctgctgctattcaacgagatcgattctaacctcaaagcgcccagatcccaatgacgagctcgtcgacgatgtccaccacgttgcagtcgcgccatgggccccgaatgcgaaccccgtcgacatggcctggtccgttgtgccggtactgcgatccggcgacttgtcccattcgaccatccagttctcgccctcctcgtcggcgcttcagagcttcgccgtgaccctgcaacaggtggccccttcgaagctgtccagccacagccgcagcggcattgagatcctcgtcctcgacgttgctccccttccgctagacacggtgttcgtcaacctggagagcgaattgacaaaacggctggagagcggcgagggcaccttttacaaggaccatccgacaagcccca

SEQ ID NO: 2230 - DNA, 321 bp, Triticum aestivum
  unsure (1)..(321): unsure at all n locations
  Clone ID: uC-tsfl9316021f07b1
agtagttacagntcccgctagaaggttaaagaccaccatctcctgctacaaagttaagaaacccaggtcatccgaccttgtttctagcctgcctggttttcgaagaacatgaagtggagctccttggccttgagtctaccctttcaggatattcattggcctaacttggagctcaaagttgatgaataactatgcatgcatggttaatagcttttcgtggcacaatgcctttgggtattgagtaatgcttacttttggcacatttaataactagctactgtacttcgttgccgtgcttcacattttgaactcaaaggaaca

SEQ ID NO: 2231 - DNA, 391 bp, Triticum aestivum
  Clone ID: uC-tsfl9316021f08b1
cctcctaggctatggctgacatcggggccaagctcgcgcgggcagccctcgcatcccgccccgttggagatattgctggtggcatctccccgtgtctctcccggctctatctggcggctggtaccagccgtcgcatgtttgcagctgcaggcggtcccaagtcaaaagaagcaccccgaatatttccccttgttgatgagaattccattaagtcgaaggaatccctatgggcctcgtatgaatgctggtgcaagtattggggggtatcccgtgaccgcgaagagatggtccgccggttcaagtcatttgaggctactgcacagtgggtttacaaaatgaacaactctgggtgttcgcaagtgtctcaactgggcccgcatgcagatttttc

SEQ ID NO: 2232 - DNA, 390 bp, Triticum aestivum
  unsure (1)..(390): unsure at all n locations
  Clone ID: uC-tsfl9316021f09b1
cactttgttacatctagcggatttggatttctttaacaactaaggttcctggcnctatttttggattttccagggctnangcccatctccaatagctaacaagaactctttcttttctttacaaatcccaaaacctttactagactttttctgcttctttagcttacttcacctagagtcttctaccttttcttatcattgaatcaacccctttttttttttcttttaaacacatcccaacccaaagtataagcgcccacctagtcctatctagtccgaaaaatgcgaactagaactacatgagacactatctctgtcgttacgaacctaacactttctaccaagcttaatcggaataagacctcacaaacactcacaagttatataggg

SEQ ID NO: 2233 - DNA, 220 bp, Triticum aestivum
  Clone ID: uC-tsfl9316021f10b1
aacgagagcgattctaacctcaaagcgcccagaccccaatgacgagctcgtcgacgatgtccaccacgttgcagtcgcgccatgggccccgaatgcgaaccccgtcgacatggcctggtccgttgtgccggtactgcgatccggcgacttgtcccattcgaccatccagttctcgccctcctcgtcggcgcttcagagattcgccgggaccctgcaacag

SEQ ID NO: 2234 - DNA, 456 bp, Triticum aestivum
  Clone ID: uC-tsfl9316021f11b1
ttagatcatgtggctggatttcatcattaaaacctcactgcttgtttcctgaaaccacaggttttgaacttatggggatactatccactcattctaataggatcatgggcattcggcactattaaccgtatccatgatttcatcgagccagggcataagatcttctggctctcagttcttgacgttgggacagctgcactaatggtagcaaacctatcaaataaataagttataaaattcgccatagatcatctttgctcttcccgagtcgatgttctgaatgttgtattttcagggcttgttcaattcaatagcctatggtttcaacagctcagtgcgtcgagcaatccatgagagactggagctgtaagtcaccaccgatctctttggtttgctatattattcccaataatcaatgaagcttgatttttatgaaacccttggtctgctagattc

SEQ ID NO: 2235 - DNA, 463 bp, Triticum aestivum
  unsure (1)..(463): unsure at all n locations
  Clone ID: uC-tsfl9316021f12b1
aacactttgttacatctagcggatttggatttctttaacaactaaggttcctgccntaattcttaattccagggctttngcccatctccaatagctaacaagaactctttcttttctttacaaatcccaaaacctttactagactttttctgcttctttagcttacttcacctagagtcttctaccttttcttatcattgaatcaacccctttttttttttcttttaaacacatcccaacccaaagtataagcgcccacctagtcctatctagtccgaaaaatgcgaactagaactacatgagacactatctctgtcgttacgaacctaacactttctaccaagcttaatcggaataagacctcacaaacactcacaagttatatagggcttgaaagaaagtctaggtttgggtttgggttaactgctctaataaggagagtcagctacttggattaaaaaga

SEQ ID NO: 2236 - DNA, 442 bp, Triticum aestivum
  unsure (1)..(442): unsure at all n locations
  Clone ID: uC-tsfl9316021g05b1
ggatttcatcattaaaacctcactgcttgtttcctgaaaccacagtcgcngaactgattgggatactatccactcattctaataggatcatgggcattcggcactattaaccgtatccatgatttcatcgagccagggcataagatcttctggctctcagttcttgacgttgggacagctgcactaatggtagcaaacctatcaaataaataagttataaaattcgccatagatcatctttgctcttcccgagtcgatgttctgaatgttgtattttcagggcttgttcaattcaatagcctatggtttcaacagctcagtgcgtcgagcaatccatgagagactggagctgtaagtcaccaccgatctctttggtttgctatattattcccaataatcaatgaagcttgatttttatgaaacccttggtctgctagattct

SEQ ID NO: 2237 - DNA, 535 bp, Triticum aestivum
  unsure (1)..(535): unsure at all n locations
  Clone ID: uC-tsfl9316021g06b1
actttgttacatctagcggatttggatttctttaacaactaaggttcctgggtttttttntaatctcagggcttttgcccatctccaatagctaacaagaactctttcttttctttacaaatcccaaaacctttactagactttttctgcttctttagcttacttcacctagagtcttctaccttttcttatcattgaatcaacccctttttttttttcttttaaacacatcccaacccaaagtataagcgcccacctagtcctatctagtccgaaaaatgcgaactagaactacatgagacactatctctgtcgttacgaacctaacactttctaccaagcttaatcggaataagacctcacaaacactcacaagttatatagggcttgaaagaaagtctaggtttgggtttgggttaactgctctaataaggagagtcagctacttggattaaaaagagtgatcaaaatgaataagaaaatccaagtattttacggtatccatgagttcaaatttgatgcagacatgataatt

SEQ ID NO: 2238 - DNA, 140 bp, Triticum aestivum
  Clone ID: uC-tsfl9316021g11b1
agaaatgctgctgctgctgttcaacgagatcgattctaacctcaaagcgcccagatcccaatgacgagctcgtcgacgatgtccaccacgttgcagtcgcgccatgggccccgaatgcgaaccccgtcgacatggcctgg

SEQ ID NO: 2239 - DNA, 351 bp, Triticum aestivum
  unsure (1)..(351): unsure at all n locations
  Clone ID: uC-tsfl9316021h02b1
cactttgttactgtagcggatttggatttctttaacaactaagggtccggcccntcttattggaattctcagggcgaangcccancnccaatagctaacaagaactctgcctttgctttacaaatcccaaaacctttactagactttttctgcttctttagcttacttcacctagagtcttctaccttttcttatcattgaatcaacccctttttttttttcttttaaacacatcccaacccaaagtataagcgcccacctagtcctatctagtccgaaaaatgcgaactagaactacatgagacactatctctgtcgttacgaacctaacactttctaccaagcttaatc

SEQ ID NO: 2240 - DNA, 358 bp, Triticum aestivum
  unsure (1)..(358): unsure at all n locations
  Clone ID: uC-tsfl9316021h03b1
cggatttggatttctttaacactaggtcctgccctatattngaatctcagggctattgcccatctccaatagctaacaagaactctttcttttctttacaaatcccaaaacctttactagactttgtctgctcctttagcttacttcacctagagtcttgtaccttttcttatgattgagtcaacccctttttttttttcttttaaacacatcccaacccaatgtataagcgcccacctagtcctatctagtccgaaaaatgcgaactagaactacatgagacactatctctgtcgttacgaacctaacactttctaccaagcttaatcggaataagacctcacaaacactcacaagt

SEQ ID NO: 2241 - DNA, 358 bp, Triticum aestivum
  Clone ID: uC-tsfl9316021h06b1
tcccgcacctagcaaatggtgatgccaagaaagccaactgacggcatctctcatgagtcgacaaagaaatgctgctgctgctattcaacgagatcgattctaacctcaaagcgcccagatcccaatgacgagctcgtcgacgatgtccaccacgttgcagtcgcgccatgggccccgaatgcgaaccccgtcgacatggcctggtccgttgtgccggtactgcgatccggcgacttgtgccattcgaccatccagttctcgccctcctcgtgggcgcttcagagctccgccgtgaccctgcaacaggtggccccttcgaagctgtccagccacagccgcagcggcattgagatcctcg

SEQ ID NO: 2242 - DNA, 205 bp, Triticum aestivum
  Clone ID: uC-tsfl9316021h07b1
aaagaaatgctgctgctgctattgaacgagatcgattctaacctcaaagcgcccagatcccaatgacgagctcgtctacgatgtccaccacgttgcagtcgcgccatgggccccgattgcgaaccccgtggacatggcctggtccgttgtgccggtactgcgatccggcgacttgtgccattcgaccatccagttctcgccctcc

SEQ ID NO: 2243 - DNA, 352 bp, Triticum aestivum
  Clone ID: uC-tsfl9316021h08b1
cacctagcaaatggtgagccacgaaagccaactgacggcattttacatgagttgtcaaagaaaagctgctgctgctattcaacgagatcgattctaacctcaaagcgcccatatcccaatgacgagctcgtcgacgatgtccaccacgttgcagtcgcgccatgggccccgaatgcgaaccccgtcgacatggcctggtccgatgtgccggtactgcgatccggcgacttgtgccattcagaccatacagttctcgccctcctcgtgggcgcttcagagcttcggcgcgaccctgcaacaggtggccccttcgaagctgtccagccacagccgcagcggcattgagatcctc

SEQ ID NO: 2244 - DNA, 322 bp, Triticum aestivum
  Clone ID: uC-tsfl9316023a03b1
tttgagtttctcgagacagttccttcccggcccgatcccggatcctctccgccggcaacgctcgtcgaagaagtgatgggggaggtgctcggcgtgttcttgtacatagtagatgtaggttcagtttccgttctggtgtgttgggcgtgatgcctaggactggcgatatgccgatgaggagcgcgccgcctgcgcgtacgagcagcgcatggtggctagcggcgatgctttggttggtggcggtggcgtggtgctactcgctgctgcgtgattcatcgtcggcgcatcctgcaataagctcggttgctgccatgatttggag

SEQ ID NO: 2245 - DNA, 175 bp, Triticum aestivum
  Clone ID: uC-tsfl9316023a07b1
tttctccttggtcctctctctctctctctgtgtgtgtctttttcaaccgctgccgcgagcccgtgtgagagagatggggaggcgccgagccggcggcggggggcgcggaggaggcataggtcgaggccgaggagaaggacggggtggaggagaggaggaggatctgcatgtgcac

SEQ ID NO: 2246 - DNA, 364 bp, Triticum aestivum
  Clone ID: uC-tsfl9316023a11b1
tttgcctgaatttcgacgcgtatcggtttgcaagcttatggtccaggatcttcccagatggggaggggaaagttaataaagaaggtgtcacgtattacaacaatctcatagactacgtccttaagcaagggctcactccttatgtcaatctcaaccactatgatatccctcttgcgcttcagaagaagtatgatggcttcttaagcccaaagatcgcgaacatatttgcggactatgctgaattttgtttcaagacttatggtgatcgaattaagaactggttcacattcaatgagccaaggatagtagcagcacttggctttgatactggaacgaatccccctaacaggtgcaccaaatgcgc

SEQ ID NO: 2247 - DNA, 333 bp, Triticum aestivum
  Clone ID: uC-tsfl9316023b02b1
tttttgtacgagtcgtgggctgaaggagcacaggacccccgcgtcgctcccaccgggcgactcgggggagaccaagctcgcaggcgccggtccccctccgtcggcgccctcctctccgccgctgccgccggctcggccgcggtggcggcggcccccgtctccaaaggcagcatggggagatccgcggtggacgctttgggcgctcgctgggcgtgggcgcgagatgcgccgttcgtggccgcgatgctggagcttggacgctggtgcgtgcgggctgcactcacctacctcgtgcgggagcggtggaagtgccagcagagctggatgcgtggc

SEQ ID NO: 2248 - DNA, 317 bp, Triticum aestivum
  Clone ID: uC-tsfl9316023b03b1
ttccctcctcctgcgctacaccgcacaggagggcattacacgagctgatcagctgaaggtgagttggcctatggcgaggtttgctgccctcgccgtgtgcgccgccgcgctcctgctcgccgtggcggcggggggtgccgcggcgcagggcgtgggctcggtcatcacgcggtcggggtacgcgagcatgctgcccaaccgcgacaactcgctgtgcccggccagagggttctacacgtacgacgccttcatcgccgccgtcaacaccttcccgggcttcggcaccaccggcagcgccgacgacatcaagcgcgacc

SEQ ID NO: 2249 - DNA, 338 bp, Triticum aestivum
  Clone ID: uC-tsfl9316023c06b1
tctatttaagccaacaccaatcaaggcctgcatacaatcccaagcaacctccaagatgtcttgctgcggaggaagctgcagctgcggcagcgcctgcaagtgtggcaacggctgctgcggctgcaacatgtaccccgagggagaggccgccggcgccaccctcctcgtggccgccaccgccacccacaaggcgagctccaccgggatggagatcgcaccggaggatggcagctgctgctgcacccagtgcaagagctgcaccagctgcgggtgctcctgctgcacctgctagatcattgatcatcgatcatgcatgcaccgcgcgcatgcatcatatc

SEQ ID NO: 2250 - DNA, 362 bp, Triticum aestivum
  Clone ID: uC-tsfl9316023c10b1
gccctggaagaggaggagggcaaggaagagggccgacccatcgtcgatgtcggaccgggagctcccgccgccgttgcgatccatccgaatcacaggggacgggagatgcctgttccggtccgtggcttacggcgcctgcataaggagaggcaagcagtcgccgagcgacagcgttcagaaggaactcgccgacgagcttcgagcaaaggttgcagatgagttcatcaagcgaagaggagataccgaatggttcctcgaaggcaatttcgagagctatgtgcgtaagatgagaaagcctcatgcctggggtggagaacctgagctgctcatgtgctcccacgttcttgggatgcccatcaccg

SEQ ID NO: 2251 - DNA, 389 bp, Triticum aestivum
  Clone ID: uC-tsfl9316023e02b1
gaattcttaattcaagagttatagggagggacttatgtcaccacaaacagaaactaaagcaggtgttggatttaaagctggtgttaaagattataaattgacttactacaccccagagtatgaaactaaggatactgatatcttggcagcattccgagtaagtcctcagcctggggttccgcccgaagaagcaggggctgcagtagctgccgaatcttctactggtacatggacaactgtttggactgatggacttaccagtcttgatcgttacaaaggacgatgctatcacatcgagcctgttgctggggaagacagccaatggatctgttatgtagcttatccattagacctatttgaagagggttccgttactaacatgtttactt

SEQ ID NO: 2252 - DNA, 120 bp, Triticum aestivum
  Clone ID: uC-tsfl9316023e03b1
tttttgagaattcttaattcaagagttagtagggagggacttatgtcaccacacacagaaactaaagcaggagttggatttaaagctggtgttaaagattataaattgactgactacacc

SEQ ID NO: 2253 - DNA, 377 bp, Triticum aestivum
  Clone ID: uC-tsfl9316023g08b1
tcttgattgtcggcaatcaagtagaggcgtgaatggggatatggagttttggaatgtcatatagaaggccaatgtcttttagaagatcagaattttgtttggcatgcgacatctaataacctggcgatccaggtgaatagagttatgcaccatctggctgctccgggtatgtactctatatttgtggggtggaagatgaaagcatgtcccatgctctgatggcttgccccgaggagagctctacgcatggagttgaaggaagtttggaatattctggggagtgaaatcttcaacttcttaaggctcgattggatgcttctcttgttggatcagttaacctcaacataccttattcatattctagggagcttggcact

SEQ ID NO: 2254 - DNA, 102 bp, Triticum aestivum
  Clone ID: uC-tsfl9316023g12b1
ttaaaaaaaaaaaaaaaaaaaaaaaaaaaggggaaaaaaaaaaaaaaaaaacaaaaaaaaaacaaaaaaaaaaaaaaaaaaaaaaaaaaaaaaaaggggggc

SEQ ID NO: 2255 - DNA, 253 bp, Triticum aestivum
  Clone ID: uC-tsfl9316023h01b1
ttaagctcttgccttcagactcccgattaaggcccgacagatatgcccttgagaagggcgacatgtctaaatctggggcacacaagagcaggcttgaagaacaacatagagctgagaagaaaattcgggacaccaagggggagcaatttactccaaaatggttcaagatgacggaagacatctcccctaccccgtggggcgacctggaggtgtatgaatacaatggcagatactccgagcaccgggctgcgat

SEQ ID NO: 2256 - DNA, 182 bp, Triticum aestivum
  Clone ID: uC-tsfl9316023h02b1
actcccgattaaggccggtcttttatgcccttgtgaagggcgacacgcctaaatctggggcacacaagagcaggcttgaagaacaacatagagctgagaagaaaattcgggacaccaagggggagcaatttacttcaaaatggttcaagatgacggaagacatctgccctaccccgtggggc

SEQ ID NO: 2257 - DNA, 272 bp, Triticum aestivum
  Clone ID: uC-tsfl9316088b04b2
gctcaaaaaagccagcagaccatggactgctgatcttccttactgcaggtgatgaatgctcgtacaagagagtggcgcctctacttgatggcatgggcaaggtgaacatctgtaatcacaaagaggcactagaataagaaaaatagtcgcgtgctgataagagaatgggcttacattttacctactctgaaagcaggcaagattttatctgggggatgtcgggaatggcacaacaatgaagctcgggggtaatatggcgacggggagcatga

SEQ ID NO: 2258 - DNA, 456 bp, Triticum aestivum
  Clone ID: uC-tsfl9316088b08b2
tttttcagcttcccattcctcgccgccgccgctccgtacccgctcgaagccaacccgaccatggcggacgtcgacgttgacacggaggtggccgcgggcgcgcagccgaagaagaggacgttccgcaagttcagctatcgcggcgtggatctcgatgccctcctggacatgtccaccgacgaccttgtccagatgttccccgctcgcgcccgcagaaggttcaagaggggtctcaagaggaagcccatggcgctcgtcaagaagctgcgcaaggcgaaaaaggacgctcctgctggtgagaagcctgagccagtgaggacacatctgcgtaacatgatcattgtccctgagatgattggcagccttatcggtgtctacaatggcaagacctttaaccaggttgagattaagcctgagatgattggccattaccttgcagagttctctatcttctac

SEQ ID NO: 2259 - DNA, 427 bp, Triticum aestivum
  Clone ID: uC-tsfl9316088f02b2
gtctgttagaagagttcggagcgaagctggccagcatttttgtatgtgacacaaatattgttgttcaagcacacaactgctgtatttcgtaaattgtgacgtgttcatatgattttttactgaaggtgcttgtcaattataggtgaaaaacttggcatggaggcgcataggattgctgcttctgtttttggattggcccttgcgagggagaccgaagcaaactccagcaggtttcagggataatacaaccaatccaactactacctttggtgtgctttttggatggactaatctgaagatgctgactagcttgcaccaccatcatatagtcacgaagcaagggcaaggattatagggaaaataaaggcaattcaccatccggaggaaatgccaactaatacatttttgtactttctctattactatt

SEQ ID NO: 2260 - DNA, 205 bp, Triticum aestivum
  Clone ID: uC-tsfl9316088f03b2
cttgttgccacctttaatttgcttacagctgcggagagcgccaattccgggggcggggggggtcaccatgctgggggtgaggaagggcgcggcgactgtggagctcgggtcgctgacgatgaggaggaagggcgccccgcctccggctcccccggtggtgccggtggaggaggggaagaaggcgccggcggtgggggcggggaag

SEQ ID NO: 2261 - DNA, 427 bp, Triticum aestivum
  Clone ID: uC-tsfl9316088f10b2
gttgttacgcgtgcggttttatccctttaccggaaggggctcgcaagaagtcgatccacaagaaggtgaccctcaagtacatggccaatgactccagccggcgcagtaggtttaggaagcgtctcggggggctgatgaagaaggcggcccagctggccaccctgtgcgacgtcaagacctgcgtggtggtgtacggcgagcgcgaggcggagcctaaggtattcccttgccacgccgaggcggtggatatcctcaacgaatttaaaagcatgccacagctagggcattgcaagaagacgatggaccaggaggccttcctcacccagcgcatcgccaagctccgggaccaggtcgacaaggctcgccgcgagtgccaagacagcgagattaggtacctgctttacaacatcatgcacggtaaccaccc

SEQ ID NO: 2262 - DNA, 69 bp, Triticum aestivum
  Clone ID: uC-tsfl9316088g02b2
acaaatgtaatctgctgctggccgcctgtgaatatgtgcacatccggctaatgctagagggaagaaagt

SEQ ID NO: 2263 - DNA, 358 bp, Triticum aestivum
  Clone ID: uC-tsfl9316088h09b2
tggtatggccgatccagcggagcaccgcgaggaggaggagtaggccacggccgccggtgaggaagaggacaccggcgcccaaatcgctcccatcgtgaagctcgaggaggtggccatcaccaccggcgaagaggacgaggacgtcctcctcgacatgaaagcgaagctgcatcgatttgacaaggacgggggccagtggaaggagaggggcacgggtgccgccaagctgctcaaacacaatgagactgccaaggtccgcctcgtcatgcgacaggccaagaccctcaagatctgcgccaatcacctcgacgtggccacgacgaagatgcaggagcacgctgggagcgacaagtcgtgc

SEQ ID NO: 2264 - DNA, 341 bp, Triticum aestivum
  Clone ID: uC-tsfl9316090b10b2
ttttcaatgttgccagcagttgccgcaaatcccccagcaatcccgctatgaggcaatccgtgctatcatctactccatcatcctgcaagaacaacaacaggttcagggttccatccaaactcctcagcagcaaccccaacagttgggccaatgtgtttcccaaccccaacagcagtcacaacaacaactcgggcaacaacctcaacaacaacaattggcacaaggtacctttttgcagccacaccagatagctcagcttgaggtgatgacttccattgcgctccgtaccctgcaccgatgtgccgtgtcaatgtgccgttgtatagaaccaccactagtgt

SEQ ID NO: 2265 - DNA, 381 bp, Triticum aestivum
  Clone ID: uC-tsfl9316090c07b2
ctcatacattccacaacttgggggtgagaatttcgagtttggagaatgcacatttgctccagttccatccccagcttctgctaggccattcattggtaacaagatgggagaagaatcattagtaaattacgctatgaaccagagcctgtaccctctggtattgggctcgacatggaagaatctcgaaatggctcaaaagtgccagaaagtgttgttgggattgctccgctacctgagctgaataaatccaaaaggggatcccaaacagaaagatatagtaaaccatcaaaaccagcaggtttacttgaacgaatgctcatgttctccagtggggttggcattggtattttatcttcctctctatcaagcaaaaaagatctt

SEQ ID NO: 2266 - DNA, 351 bp, Triticum aestivum
  Clone ID: uC-tsfl9316090c11b2
ttttgagccaaccaccaccgccgcgcgactaggagccacgagcgagctcggccgattccgattccgtctgcgctattaaggtttgtttggaggaaggggaggaggttcggaggtggagctgagagagagaccggagatggcggcttccgcgaggcagggggagagggcgaccagcttcgccatggcctgcagcctgctcagccgctacgtccgccagaacggcgccgacgaggccgagctcggcctcggaatcaacaagggtgaggccgaggctcacaggacggcggacaccaagagccctttgcctgcggcggagggcgaggaggccggcaggaagaaggagaccatgga

SEQ ID NO: 2267 - DNA, 445 bp, Triticum aestivum
  Clone ID: uC-tsfl9316090e01b2
ttgtcttcgaccagcaccaccgccgcaacgccagggcaactgtgcgtcccgttggtgatcatcaggcgccaccggtcgccggcagtgctgcccgagacgacgatcatcgtcgtcgggcgaacgccacaacaatcacaaagcccaattctaccaccacaagtcatcttcccagcacgcgtcggcatgaagaaaagggagcgaaggaggatgcggagttccgggggctggcggcggcggtggcacgcgcggcaacggacgaccggacggtgatcatcacgtgcgtgaaccaggcttgggcggcaccaggctccttactggacctgttcctggagagcttccgcatcggcgacggcacggcgcggctcctcctacacgtgctggtcgtggccatggatcccggcgcccatgcacggtgcctcgccgtgcaccagcactgctaccacta

SEQ ID NO: 2268 - DNA, 216 bp, Triticum aestivum
  Clone ID: uC-tsfl9316090e05b2
aggggaagatgcctgcggggcacgggctgcggtcgcggacgcccgacctgttcgcgcggtccttccgtaagaaggggtacatcccgctcaccacctacctgcgcacctacaaggtcggggagcacgtcgacgtcaaggtgaacggcgccgtccacaagggcatgccgaacaagttctaccacggccgcaccggccgagtctggaacgtcaccaagc

SEQ ID NO: 2269 - DNA, 462 bp, Triticum aestivum
  Clone ID: uC-tsfl9316090f08b2
tttaccggctgggactggcgctccatcccgcaggggctctcctccgcctgcatcttcatctgctccggaggctgttttggatgctgtgagaaggccgcaaaacatgtaggcgatctttccaagagcttaatagcccatgcccagaatcctacggtggcagaggaattttggagtacgaccaccatcgaggttgatccggcagacctacgagcaccatacaacacatcctcttgggaccttgatctgcatggagtcggaagcagtcataacctgggcgaatctgctaatcatggtttttctctttggcaacaaactagggatgagtggactgagaatacaaggttaaggcaagaaccggtggtgaagcagatccaggaaccagtgttgagttggaatgcagcgtatgaaagtttgcttggatcaaataaaccattccctcagcccatccctctacatgagatg

SEQ ID NO: 2270 - DNA, 379 bp, Triticum aestivum
  Clone ID: uC-tsfl9316090f12b2
gcatcttgccgggcggtagtgttgctgggttccagattgactgactgcgccaacttcttcagccatgtccggggatggccagagcggcttcgcaagggtgcactccgtgctggtcccgatgatggcgcagggtcacataatccccatgaccgacatggcgagcctgctggccgagcacggcgcgcaggtcaccttcatcaccacgccagtgaacgcgtccaggttggcgagctttgccgtccacgtggaggagacaggcttggcggaccgactcgtggagctccatttcccggcagccaagtttggcctaccggacgggtgcgagaccgtcgacatgatccaatcgcaggatctgctgtcgaacttcttggaggcatgc

SEQ ID NO: 2271 - DNA, 318 bp, Triticum aestivum
  Clone ID: uC-tsfl9316092b06b1
cttatgatcggggcgtttgcagctccagacaggatccactgggcgccggggctccccaagacccgcagcggcaagatcatgcgcaggatcctgcgcaaaattgccgcgaagcagctggacgagctcggcgacataagcactctcgctgaccccggcgtcgtcgaccagctgatcgcgctcaaagattgctaggatgtaaagcagttatgcgactgttttttcccctatgcggttatgtggttggtagaaggttgattttagtgctcgctagtccttttaatcagtgcgattttctcctgaggctagtgagctgcagcg

SEQ ID NO: 2272 - DNA, 393 bp, Triticum aestivum
  Clone ID: uC-tsfl9316092b08b1
attcaatcgcaggtggaatctgaagctagaagagctcttcaagcagacttggatgaggccactgtttcactaaatgaggtgaatgagagtacattatttctgtctaataagcttgatagcactgtttccaggatttctgctattaaagaagagaaagaggttctttcagcggctcttttggagcaaaagaaaagtacagccgaagctcagaaaaatatggtggatgctcagcatcttattaaaaggcttgggatggagagagagaatagtgaaatcaggagtacaaagcttgaagaggagttggccacagcaaaaggtgagatgttatatctgaggaggcagattactgcaagtgggtcacagaatacagatgttttggaagcaagcccaaca

SEQ ID NO: 2273 - DNA, 380 bp, Triticum aestivum
  Clone ID: uC-tsfl9316092b10b1
tcggtcccctcgcgcgttccgcctcccagttgcggctccggtcgttcccctcctcctcggttgctgagatggccggtcgtgggaaggcaatcggcgccggcgcggccaagaaggcgacgtcaaggagctccaaggctgggctgcagttccccgtgggaaggatcgccaggttcctcaaggccggcaagtacgccgagcgcgtcggagccggcgcccccgtctacctcgccgccgtccttgagtacctcgccgctgaggtcctggagctggccggaaacgccgccagggacaacaagaagacacgtatcgtgccccgccacatccagctcgccgtgcgcaatgacgaggagctgaccaagttgctcggcggcgccaccatc

SEQ ID NO: 2274 - DNA, 399 bp, Triticum aestivum
  Clone ID: uC-tsfl9316092c01b1
gttctttggtttcaaattttcctggcgaggacccaaaaatgctctccaattttaaagaccttcttgaaaaaatatttgtcttagatccagataagaggataaccgtatcacaggcacttagccatccatttatcactggcaagtgaaaataagatgttgattcctcttgacattgtaaactacaatttgggttcctcttgtctaatcatcggcatttctatcttgtgtctgggagctatgagatctgagtgcgtgcccaaatggacgaagcatggggttgctgaagagatgctgtcttacggaccttgctgcatgcacttaccatttggatagttctgctgcttggattctgccagggcctctgctgcatgcacttatatttcctaaaggaccaacaaa

SEQ ID NO: 2275 - DNA, 241 bp, Triticum aestivum
  Clone ID: uC-tsfl9316092d04b1
ttggtttggagggaaattggggcacgtacgttataccgccgatgcgtctgaaggtttgagaagatggacctgactgtctatcagtttggaattactgtccgatggtctaacaaaaaagtggttatgggacagttaaagttttattttgcatgtctttgaatcacgtagctggatcatcgttttctagcatgtgtggtacatccaaatatgcaagtaagacgaattgcaagttttattttgc

SEQ ID NO: 2276 - DNA, 431 bp, Triticum aestivum
  Clone ID: uC-tsfl9316092d07b1
tcgatttaggtttcagttcactttccctgaacccgattatggggagtacggctctgatttcggtgaggaagaggagtgtttaccgaggcagaggaaacctcccgaagtaaggaatgcactccgtgagaagagagtcgcgtttaggcaaaagactgggcggcaccatgcaaaggtagccctgcgtaagtacaacagagcaaacaacaccaagtttgagctggtggaggtgccagtgatccgtgagttttgggagtttggagggggctgcatccattacaacttcacggctaagcaagcagaggatcatcgtcattctgctgatgcagacaacaccaagctcttcttctctgaggtcaactctgctttccatggcgacaaggatgtggtcctgtgctgtatcgttggagaacatgacaatgggcattgctatg

SEQ ID NO: 2277 - DNA, 421 bp, Triticum aestivum
  Clone ID: uC-tsfl9316092e12b1
agctgattttcttcggcggcatcgcgaacacgttcatgctcgcggccggcctgtcgatcggcaagtcgctcgcggaagccgatctcgtcaacgaggcaaaggcgatcatcgacgaagcgcgcgagcgcggcgcgtcggtgccgatcccgaccgacgtcgtgacggccaaggaattctcgccgacggccgcggccacggtgaagcaggtcgccgacatcgaagcggacgacatgatcctcgacatcggccccgatacggccaaggcgctcgcgagccagctcgagaaggccggcacgatcgtgtggaacggcccggtcggcgtgttcgagttcgaccagttcggcaacggcaccaagacgctcgctgaagcaatcgccaaatcgtccgcgttctcgatcgcgggcggcggcgacacgctcgc

SEQ ID NO: 2278 - DNA, 437 bp, Triticum aestivum
  Clone ID: uC-tsfl9316092g02b1
gctagttatcgcctccccacctagcaatttacgtactccgccatggccccagccgtgatggcttcttccgccaccaccgtcgcgcccttccaggggctcaagtcgaccgccggcctccccgtcagctgccgctccggcagcaccggcctcagcagcgtcagcaatggcggaaggatcagatgcatgcaggtgtggccaattgagggcatcaagaagttcgagaccctgtcttacttgccacccctctccacggaggccctcttgaagcaggtcgactacttgatccgctccaagtgggtgccctgcctcgagttcagcaaggttggcttcgtcttccgtgagcacaacagctcccccgggtactacgacggtcgatactggacaatgtggaagctgcctatgttcgggtgcaccgacgccacacaggtgctcaacga

SEQ ID NO: 2279 - DNA, 255 bp, Triticum aestivum
  Clone ID: uC-tsfl9316093a05b1
cccagatccatcctctcctttcctgcaaccgccgccgccgatctccactcccccaaaccgccccgccccgccggcgacctccgccttcctctcccctagccacctcgcctaccctcgccgcctcgccacccctctccgcgctggcgccctcctggagcacggaggtggtgctggcctcctacctccgtcccgaccgacgctcacgtccctggcgcacaccctgcgcctcgaagacgccccgctgcgctggatcgt

SEQ ID NO: 2280 - DNA, 393 bp, Triticum aestivum
  Clone ID: uC-tsfl9316093c05b1
gtccacctggccaccatccccatcaccggcaccggcatcaacccggcccggagcctgggggccgccgtcatctacaacaaggacaaggcctgggatgatcagtggatcttctgggtcggccccatgatcggcgcggcgatcgcggccttctaccaccagtacatcctcagggccggcgccatcaaggccctcggctccttcaggagcaacgcgtaacaagttatcatccatgtcatctgtatgcaagactgaagcaatggcgacccgtgttgtgtccatccatccagagagaaatgcgcttttgcaacttctcgacagttcagttcggccgccgcaatggtcgtgttattatgtgtcggcagctgcatatgcgtagtacgtggtccggtcatg

SEQ ID NO: 2281 - DNA, 304 bp, Triticum aestivum
  Clone ID: uC-tsfl9316093c10b1
gtcccctgcaggcccagcaccgccaactgctccgccaccgccaagaacgtctgcccgccctacctcgttgtctacggctccggatccaccgcggggctcctcgtctccgacacgctgcgcatgtcgccacggggcgccgccagccgcaacttcgccgtgggctgcagcctcgcgtccgtgcaccagccgccgtcggggctcgcggggttcggccgcggcgcgccgtccgtgccggcgcagctcggggtcaccaagttctcctactgcctcctctcccgccacttcgacgacgacgccaccgtca

SEQ ID NO: 2282 - DNA, 119 bp, Triticum aestivum
  Clone ID: uC-tsfl9316093d09b1
gggcaaagaatcactctggtgacccagagattgatgaagctttaaagaagggagaagatgctggccttgccttggtgaagaaagcgtatgtgtacattcacaagaatgggtacaagaca

SEQ ID NO: 2283 - DNA, 351 bp, Triticum aestivum
  Clone ID: uC-tsfl9316093e10b1
ttttcgttgggctcccacgttcagggggaggatcaagtccccgtctatgaatcgggtgcagatgccctgcagaagctgcaggagaaatggaagtccacggcggcgccgtacccggccatgtactcgagcttcttgggcggcatcgtcctggacccggccatgatggccctccccatcgacgaccacatggtccaccgcggccacggcgtcttcgacacggccatgctcctagacggccacctctacgagctcgacacgcacctagatcgtttcctgcgctccgcggcgcaggccaaggtgggcaccccgttcccgcgcgacacgctgcgcagaatcctcgtgcagatgacg

SEQ ID NO: 2284 - DNA, 402 bp, Triticum aestivum
  Clone ID: uC-tsfl9316093e11b1
ttaaatactcctcctccacctagggttttgctgcctccctcccccaccgccgccgtcgccgcccgcgtccaccatggcgctgccgaaccagaacaccgtcgattaccccagcttcaagctcgtcatcgtcggcgatggcgggactggcaaaaccacatttgtgaagaggcatctcactggagagtttgagaagaaatacgaacccaccattggtgttgaagttcacccgttggatttcaccactaactgtggaaagatccgtttctactgctgggacactgctgggcaagagaagtttggtggccttagggatggatactatatccatggtcagtgtgcgattatcatgtttgatgtcacttcaaggctgacctacaagaatgttcctacgtggcacaggga

SEQ ID NO: 2285 - DNA, 238 bp, Triticum aestivum
  Clone ID: uC-tsfl9316093f01b1
ttttcgttgagaagaaaaaggaaaaaaaaaaaaaaaggcgaggcgaaccgcgcgcgctcacgggatccgcggcagccagcaccgtcgcctcttcccgccgatccgccccgtcccgcccgatcggcatggcggacggggactcggcggcggcctacgcgccgccgcggtcgccgctcccgcccgagacgccgtccacgcagaagcggaggcagcgcggcctcgtctcgcgggtctggaa

SEQ ID NO: 2286 - DNA, 351 bp, Triticum aestivum
  Clone ID: uC-tsfl9316093f06b1
cttagtttctgagatcaccaccactctgtacagaagatgacccagatagtgcttggtatgtaaatatttcgatgtgtagaactcgtcttccaagagttgaacttgttggtgatattgctggtggcccagtggagaaatggcctcaaagacttgctgcagtgccaccaagaatagccaatagggaaatcaaggggatgtccatccaggcatacaaacatgacttttcaatttggaagagaagagttgaactctatggaacatatttgaaagatttatctcacaggagttacagaaatgtcatggatatgaatgctggttttggtagctttgctgcagccatgttgaaatacc

SEQ ID NO: 2287 - DNA, 355 bp, Triticum aestivum
  Clone ID: uC-tsfl9316094a09b1
ctgggtattcaacaatggaatcatccacaatgatgaaggtagttccgctgccattgccccttttgtaaaggatgtattggacagcctagaattcgcaagggggagtgcaaactcaacatggggctctgttagagctgcaatggggcatcctgaaccgttcccagtcaaatatgttgcgattggaaatgaagattgcgggaaaaaatactacctcggtaattacctcaagttctacaatgctataagagaatcctatccagacattcagatgatttcaaactgtgatggttcatctaaaccacttgaccatcctgctgaactgtatgacttccatgtctacaccgattctaagact

SEQ ID NO: 2288 - DNA, 372 bp, Triticum aestivum
  Clone ID: uC-tsfl9316094d06b1
acaagaccgtccgaacctgagatttatgggcataagagatctgaaagagacgcatgtggtcccgtcctggatctcattgtttgctgaatttttgtggacggaagaattttacggtgctttgtggatgttccttatggatgggggctgggagtctcacgtggaagaattgattcatatggcttctggcggtcaatgccgtagtgtcgcattatcgatcccagctagccgtaaacagattgacatatatcttgaattattttgttagtggacgtatgatcaaatggattcagagatactctttctgttccaaaaggagggagtagtgattcccgctgctatttcatctttgggtaagtagtataccccgcaaaa

SEQ ID NO: 2289 - DNA, 402 bp, Triticum aestivum
  unsure (1)..(402): unsure at all n locations
  Clone ID: uC-tsfl9316094d07b1
tantaacaagatatgaagaattaacctgttaatttctttgcaaaggaattggccagttagtattttactaaataactatggactagctactatttttacaatgggttacttattagactagggacgtgtgatatctttctcccgttgcaaagctaaaccacgtcgtgtcatctttgtagtttacatattttttagatgtgttggcacacattttgaggcatcattttctttcaagtcgttcatcatcattggtcccattctgcacaagactatcgatgataccactctgcattggacctacacaatcatcaattttaccaatgtcacaaatggtctgtcttgtaatgtgacattatggctaactgtttggtttaaattatggctggtagatgtccttggatg

SEQ ID NO: 2290 - DNA, 371 bp, Triticum aestivum
  Clone ID: uC-tsfl9316094e04b1
gtggtggtgctggcggcgtaccgggcggtgttgcgggcggcgcggcggacgttctcaggcgaccagctgatgctgacggagtcggccgtggagatccgacgccgctttgaggatcaccgcggcctcgccccgggatcggaggacgccgtccgcgccctctccgaggcccgcgaggccgcggacttcatcgccaacatgatcgtccaggctaagcgctcaccctccggatccttcgttgtgaagcctgagaaggcacatgccggagctacgcttgagattccttccgaggagatcctgtctacgttgaaataggggaggtttgcattatccactgtgcaagcgtcactgataggctagttataataagacca

SEQ ID NO: 2291 - DNA, 326 bp, Triticum aestivum
  Clone ID: uC-tsfl9316094e06b1
attattctttgcctcctctcctctccctttcctcttccccttcttctcctcgacacgaaagcaagcttggcgattgggattcaagcgccagcgctccaaatccggcggaggggtggcgcgcgccggcggcggcgatttcgatttgtggtagtcctcaccgctggaggcggctgcccgatccagccacctgagaacaaactcccgaccatccctccttgcccgcgtatataggccgtactcgttttcgccaccatcctcgacgcgtctggcgtaagaggctgggggtggtcttggtggcggcacacatcccaggaaggagcgagtgg

SEQ ID NO: 2292 - DNA, 351 bp, Triticum aestivum
  Clone ID: uC-tsfl9316094f03b1
gatatgggctggcggcgtaccgggcggtgttgcgggcggcgcggcggacgttctcaggcgaccagctgatgctgacggagtcggccgtggagatccgacgccgctttgaggatcaccgcggcctcgccccgggatcggaggacgccgtccgcgccctctccgaggcccgcgaggccgcggacttcatcgccaacatgatcgtccaggctaagcgctcaccctccggatccttcgttgtgaagcctgagaaggcacatgccggagctacgcttgagattccttccgaggagatcctgtctacgttgaaataggggagggttgcattatccactgtgcaagcgtcactgatag

SEQ ID NO: 2293 - DNA, 331 bp, Triticum aestivum
  Clone ID: uC-tsfl9316094f08b1
cgctcgggggtggcgctggcgcccagatccacctcgtccttctcaggtgcgtcgggggctggcctgctcctgtccttcagcgctggctcgatccggcctgcctgtgtgcgccgctgcatcttgcggcggccctcggcttctccggcgagtgactgttccagctcggggaggcgcgaccctggctgatcctgtgctcgatggggcagactaatctctgcccagatccggtgcgcgccgatgtggtctcgcaagatccgggcagcacacgccctgaagatgccgtcatggtttgctggttgctcacgctccggatgcaaaattctgggtcgac

SEQ ID NO: 2294 - DNA, 238 bp, Triticum aestivum
  Clone ID: uC-tsfl9316094f11b1
gttgcgccggcgtggtgaaggggttccagcagggcctgtacatgggcaacggcggcggcgccaacgtggtggcgcccggctacaccaagggctccggcctcggcgccgagatcatcggcaccttcgtcctcgtctacaccgtcttctccgccaccgacgccaagaggaacgccagggactcccacgttcccatcctcgccccgctgcccatcgggttcgccgtgttcctggtgcacct

SEQ ID NO: 2295 - DNA, 86 bp, Triticum aestivum
  Clone ID: uC-tsfl9316094h02b1
aaatataaaaaaaaaaaaaaaaaaagagaaaaaaaagaaaaaaaaaaaaaaaaaaaagcaaaaaaatggggcggccgatctagagg

SEQ ID NO: 2296 - DNA, 384 bp, Triticum aestivum
  Clone ID: uC-tsfl9316095b06b1
gttcatcttccgtgagcacaacgcatctcctgggtactacgatggccggtattggacaatgtggaagctgcctatgttcgggtgcactgacgccacacaggtgatcaacgaggtggaggaggtcaagaaggagtaccctgacgcgtatgtccgcatcatcggattcgacaacatgcgtcaggtgcagtgcgtcagcttcatcgccttcaagccaccgggctgcgaggagtccggcaaggcctaaacagctcactcacgacaggccatatataaagtgccattgcagttttgtcaactctgacattgctttgggttttccttctccatttatctttcttatttgttcctaagaatatgtgtatgtccatgttcatgtaccaacat

SEQ ID NO: 2297 - DNA, 273 bp, Triticum aestivum
  Clone ID: uC-tsfl9316095d06b1
aggatgggcttaatgttccatctagagagcaggcagctgtggttgcccctgtgttgtcagaagacggaagtaatgctgcccctgttcactccagttagaactactagttaccgtttctggtggcgcaacgccttcagtgccttatattcaattggcatgtagcatagtattctttcttggagctgcaccctcgcaattcttaggctcgtctcgtatagtagaaaataatagctctacccttcaataagcctataagcagcgcaactgcagatg

SEQ ID NO: 2298 - DNA, 123 bp, Triticum aestivum
  Clone ID: uC-tsfl9316095e10b1
ttcgatcatgccgtgtctgttgtaatgctgtggaagaagttaagcaaactgtcttgtgtaccaacgtttgttattcgtgtaggttgagtgtaacgagtgtaataaggacacagagctctagtt

SEQ ID NO: 2299 - DNA, 407 bp, Triticum aestivum
  Clone ID: uC-tsfl9316095g06b1
gctaagtccatggagcagggcgccgtcgacgcggtgaccaaatggcaaacgctcgcaccggtgctccccgacgacctcagcgtacgtgtcgtcatccagaagagccaggccaacttccagtccctgtacctcggcaactgcagcacggcggtggcgacgatgcgcagccggctcccggagctcggggtgacgagcgccgactgcaaggagatgagctggctgcagtacacggtgtacatatacttgggcgacgccatcaacagcaagccgctggaggcgctcctcctcaaccggtccacgaccctgggccccttcgtcaagaacaagtcggactacgtcaagaaagccctcaccaaggagacctggaagaagatcttcctctggcccaacggcggcgggtcggggca

SEQ ID NO: 2300 - DNA, 258 bp, Triticum aestivum
  Clone ID: uC-tsfl9316095h07b1
cgcccacgcgtccgtccgagacgacgattccttccaaaagtaagcaacgccttcgacccctcgaggggtgaaacaaggcaaagggagagtaatgtggcgtcgctgcatttgttgtcaagccgctgagtttgatgagaatgaaaatgggcgtgccaaggccaaggccccaacaaataacgtagatggaatgaaaaagggtttgaaagattctgctactgtgaaagccgagccacaagattcagctccctgtatcaatat

SEQ ID NO: 2301 - DNA, 316 bp, Triticum aestivum
  Clone ID: uC-tsfl9316096b01b1
ttcttttcccctcgccgccgccgccactccgccgctgccgccgccgagatgggtcgcgtgatccgcgctcagcgtaagggtgcgggctccgtcttcaagtcccacacccaccaccgcaagggccccgcccgcttcaggtcgctcgacttcggcgagcgcaacgggtacctcaagggcgtcgtcaccgatgtcatccacgacccggggcgtggtgcgccgctggccaaggtgaccttccgccacccgttcaggtacaagcaccagaaggagctcttcgtcgccgccgagggtatgtacaccggccagttcgtctact

SEQ ID NO: 2302 - DNA, 397 bp, Triticum aestivum
  Clone ID: uC-tsfl9316096c04b1
tctcttcgcgttcgcgccgtgttcgccgtgctcgcggcactggctgtggcggagatggcgtccggggcggtgacctgcggcgacgtgacgtccgccatcgcgccgtgcatgtcatacgcgacggggaaggcctcggcgccgtccgcggggtgctgcagcggcgtgaggaccctgaacggcaaggcgtccacctcggccgaccggcaggcggcgtgccgctgcctcaagaacctggcggggtcgttcaagggcatcagcatgggcaacgccgtcaccatccccggcaagtgcggggtctccgtctttttcccaatcaacaccaacgttaacttgaacaacattcactaagttatctgtcagcatcatcacaccaggctctatatggatagctagccga

SEQ ID NO: 2303 - DNA, 305 bp, Triticum aestivum
  Clone ID: uC-tsfl9316096c09b1
tcttcatactcagattaccatgcttttggtatatctctactgtttgtgctctatactaagctccttagtactgaaagaatgctgtgatttttcttgaatgtacaagatctgtacacgctgggtcacggtgctcaggcgggcaacgcgtgccaaggcgcgcttccgatctagtataggtggttgaaggcgcgatcgaggaaggcctggctcggtctcgggcggccatccgccgggcgactcgcgcgcccagggacgagagcgtccgccggatacggagcttcagggacgtcggcgacgcttttgcg

SEQ ID NO: 2304 - DNA, 280 bp, Triticum aestivum
  Clone ID: uC-tsfl9316096d03b1
ggagcaatagaagtattatttaggttcagccaccatacatgccacaggagactactcctacattctatcatacacagcatagcagcagttttctgcgaatttttatgtccacagtggtttctcttcttcgagtattacaattaaaccggtactacttggatagctaatctattctataatccagctagagagacagacagctcttggattcaccactcactgaccaagaccttgtcttcttgatcaagtgaaccctccgtgctttcgcgatattccagat

SEQ ID NO: 2305 - DNA, 379 bp, Triticum aestivum
  Clone ID: uC-tsfl9316096d11b1
tcttccacgcgtccggcgctgtttctcttgtgccagggtatctaacgaagttctataataaactgctgatctgctttaaggagtttgataatgaattgagagtcaatagaagatattcaattgatcacatcaagaagaagttccaactgctatctagttgtcaactccaagaggctgaatggttgcacaaaaatcacaagcccaggtttgaagataaattgcatttgggtgccatgtccgtaggcgcggtagggctatgcgtgtatatgatggcttgcatgggtgataaaatgcccaagggagcactggagtgggcacttgcataccccgatgtcatcatggcatgtgccaagattgggcgcctaatgaatgaccttgc

SEQ ID NO: 2306 - DNA, 389 bp, Triticum aestivum
  Clone ID: uC-tsfl9316096e05b1
tttttccgcgctcccaaaccctagctcccaccgcagcggtcaccgcctctcgacccccgcccctctcccggtgcgcgcctgttgctgcagacgagaagcggctgaggcgaagaggaatcgaccatggcgacccgtatccagtttgagaacaactgtgaagttggtgttttctccaagctcacaaatgcctactgtctggttgcaattggaggatcagagaatttctacagtacatttgagtctgagcttgcagatgtcattcctgtggtcaagacctctatcggtggcactagaataattggtcgcctctgcgttggaaacaagaatggacttctcttgccacacacaaccactgatcaagagcttcagcatctgaggaactgcatacc

SEQ ID NO: 2307 - DNA, 375 bp, Triticum aestivum
  Clone ID: uC-tsfl9316096e12b1
aatccactccaatccaatccccacagaaatccccatctcaaaaccctagcccgtccgatcccggcgagatggccaacccgagggtgttcttcgacatgaccgtcggcggcgcgccggccgggcgcatcgtgatggagctgtacaaggacgcggtgccgcggacggtggagaacttccgcgcgctctgcaccggcgagaagggcgtcggcaagagcggcaagccactgcactacaagggcagctcgttccaccgcgtgatccccgacttcatgtgccagggcggcgacttcaccaagggcaacggcaccggcggcgagtccatctacggcgagaagttcgccgacgagaagttcgtccacaagcacaccaagcccg

SEQ ID NO: 2308 - DNA, 310 bp, Triticum aestivum
  Clone ID: uC-tsfl9316096f05b1
ttttattttggatgtttatcaacaataaaatatgggttagggcagaacagtaccaaactcgaaaaatgcatatgaggattttccggaattgttgcttgtttttttcggtctaaattaaacttgcctaaacaggtagtttactcatgcttcacctcttgccatgttaaccaacatttaatattgatgagtagctaaacgagaatgaactaaataattgttgtgcatattgagctgcacttaatctgttttattgtttgttgcaccttgccatgccatgaatcattaaaccggacattgcatcacactcgat

SEQ ID NO: 2309 - DNA, 348 bp, Triticum aestivum
  Clone ID: uC-tsfl9316096f12b1
tctttgacttccagagttccggactgatgcatatggtagccaccgaccagagcaagacggcgaccaagaggttcggatggctgtacgtggcgcggtgggcggcggcgtccgtggtgacagtgctggccgtggcagtgatcattcgggccgcggtgctgatgctccgcccccagaagctccagttcaggctctccgggggccatgtggcagtcgactcgatcccgtcgatgccgccgcctgacaacgtcgtgacgctcaccttcgccttcgtggcctacaaccccagcgggcgcgcctccggcgagtacaacaacgtcaccgtccggctcacggacatcacgagcgcgt

SEQ ID NO: 2310 - DNA, 373 bp, Triticum aestivum
  Clone ID: uC-tsfl9316097b05b1
cctcaccttcctccccccgccaccacccaccaaggaaaggaggatgtcttgctgcggcggcaactgcggatgcggcgccggctgcaagtgcggcaacggcttctgcgggtgcaagatgttccccgacgttgaggccaccgccggcgccgccgccatggtcatgcccaccgcctcccacaaggggagctccggcgggttcgagactgccggcggggagaccggcggctgcgactgcaccacctgcaagtgcggcacggcctgcggctgctcctgctgcagctgcaactgagccggcgcccaggaggccggccggcgaggcgagcacgaggatgaggaggacaactggacaagcaaccaccaccaccaccaccac

SEQ ID NO: 2311 - DNA, 368 bp, Triticum aestivum
  Clone ID: uC-tsfl9316097b06b1
tccctaatgaagggttcgaccggcaagtcgccggcggcggcgccgcccgccttccggaacaggtactggatcctccgccacggccgcagcgtccccaactagcgcggcctcatcgtctcctccctggagaacggcacgaaaccggagttcgggctggccccgcagggcgtcgagcaggcgcgctccgccggcgagtcgctctggaaggagcttgaggagatgggtgtgccggtggactctgtcaagatccggtactcaccgttctcgcggacgacggagacggccagggtggtcgccggcgtgctgggcgtcccatttgagggtcctagctgtaaggttaccgtggaacttcgtgaacgttattttgg

SEQ ID NO: 2312 - DNA, 364 bp, Triticum aestivum
  Clone ID: uC-tsfl9316097b10b1
ttcttgtgggaccactacctcgatcttctccaggccgactacactgagggggatgctctggatgccttgggcttggttcgctactgctgccgccgtatgctcatgacccatgttgacctcattgagaagttgctcaactacaacaccctggagaagacggagacaagttgaagttaattgaacccattctgcctcgaaacctttgttcctttgtactttccaagatgctgtttcttgcgtcagtgcttaggaggtgcaaagtgaggcactgaaatgaagttggtttgttcatgaatctccaaggactgttagtgtgaccatgcgtttctactatgtgatcttcaaggctatattaaccaacaag

SEQ ID NO: 2313 - DNA, 355 bp, Triticum aestivum
  unsure (1)..(355): unsure at all n locations
  Clone ID: uC-tsfl9316097d09b1
ttcttgaaccatttaagatagtactaaatcagagacagaaagtctgttcgcagaggaacaaagtcgatgaagatcgtgttctcggtgctcctgctatgtatgctcgtggcnacacccatggggtccgagtacggcgcatggagctataacagtggtccctggatgtgctatccttttcaggccttccaggtgcccgcgctccctggctgtcgtccattgctgaagctccagtgcaatggcagccaggtgcccgaggccgtcctaagggactgctgccagcagctcgccgatatcagtgagtggtgcaggtgcggtgccctctacagcatgttggatagcatgtataaggagcatg

SEQ ID NO: 2314 - DNA, 440 bp, Triticum aestivum
  Clone ID: uC-tsfl9316097e04b1
ttctttcgcgtgggttcgaaatccttgaaggagaaacaccgtgcagagctagttgagcagaagaaggaggagctgtacgaactcctcgccaatgcccactccaattcctcggcctcctcgctggacaagaatctgatcaaggatctctctacacaaatcaagcctagactagaggacccccaatggtgcaagataactaggaacaagaaggcgactgatttggctgcgtcggtggttattcttgctacttctgctctcacttactgcgtcttgacagctggtcctgaaatagtaaagtatgatggacatcttgttactgttgagagtctgcccattctacaaggacatgagcctgctgctactgctaagggagttcacaagcaagatgtgcagaagtgaaggggttgaagaagagatgcatcttgtttgactatcagttc

SEQ ID NO: 2315 - DNA, 372 bp, Triticum aestivum
  Clone ID: uC-tsfl9316097e08b1
tatcgaagcaagcttgtagccaaccaccatgaagaccatgttgatcctcgctctcattgccctcgcggcgactagcgtcgttgcgcagctggacactacatgcatccagggctatgggcaatgccaacagcagccacaacaacaggtgaacacatgcgctgctctcctgcatcagtgtagcccgacaccatatgtccagtcacaaatgtggcaggcaagcggttgccagttgatgcggcaacagtgctgccaaccgctggcccagatctcggagcaggctcggtgccatgccgtctgcggtgtggcccaggtcatcatgcggcagcagcaagggcaaagtttcggtcagcctcagcagcagcaagggcaaag

SEQ ID NO: 2316 - DNA, 385 bp, Triticum aestivum
  Clone ID: uC-tsfl9316097e10b1
tctgaaagcaagcggcattcaaggagatccagggaaaagagacatcacaaaatgcaagattttcccgtgagcaataggtctgcacggaaatcggatgagaagtggcactatactgattcaagcgcacgtgaaagcgatagacattcaaggaaaccaagagaaaaatcacgctactctgatccaagtgcttctgagtattccgattccgatcggccttcacggagatcgaatgagaagcgacactatactgacttgagtacacgtgaaagtgatagacattcaaggaaaccgaagggaaaatcgcgctgctctgatcaaagtgcttctgagtattcagattctgattggcgtaatagtcatcgccgtcgtcgaagaaagtgagtag

SEQ ID NO: 2317 - DNA, 445 bp, Triticum aestivum
  Clone ID: uC-tsfl9316097e11b1
ttctttagatcatcaatcatgttcaatcccttcaaagacaagtcgagtacctgtcaatgagactcgcagcagtaaacccaagggttgactttggtgggctagacaaccttttgactacagagtgtggaaggataacaggtttaaactgcaagagtggaatggacttggagcaagtcagctggcctgacatgggcgttcacggagcaagaaatctcgcgcagctacaacagcagttctggcatggtgatttggcacatccacatcagccagcttcacagtgggaaaaacggggggatgtacaaccccctggctttagcaacaccagttcttctctcttcggctacgatctcgcaagctctggaccgcagcaaccgccaacaagcaagctaaaagcagagctgtgagctacatcagtatattgcaggccaggagagcgagctacaca

SEQ ID NO: 2318 - DNA, 314 bp, Triticum aestivum
  unsure (1)..(314): unsure at all n locations
  Clone ID: uC-tsfl9316097f03b1
tttcttcccggcgtacgtgccggggcggcggcccgaggcgccgcccaacggctacgcgggggtggacggcatggtgagcgtcatcgcgcacgagctatcgtatatntcntccaacccnttggccaacgcgtggtacgccggcggggacccctccttccccaccgagatcgccgacctctgcgagggcatctacggcaccggcggcggcggcgcgtacaccggccagctgctcacctacgggcggtccggcgcgtcgtacaacctgaacggtgtcggcgggcgcaggttcctggtgcagtgggtgtgggacccct

SEQ ID NO: 2319 - DNA, 412 bp, Triticum aestivum
  Clone ID: uC-tsfl9316097f08b1
tttcggcaagctctacgagttctgcagcggccagagcatgcccaaaacacttgagagataccagaaatgcagttatggtgggccagatacagcaatacaaaataaggagaatgagttagtgcagagcagtcgaaacgagtacctcaaactgaaagcacgagtggagaatttgcatagaacccaacgaaatttgcttggtgaagatctcgggtcactcggcatcaaagatctggagcagctcgaaaagcaacttgattcatccttaaggcacataagatccacaaggacacagcatatgcttgaccagctcactgatctccaaaggaaggaacaaatgctgtgtgaagcgaataagtgccttcgaagaaaactggaggagagcagccagcagatgcagggccaaatgtgggag

SEQ ID NO: 2320 - DNA, 417 bp, Triticum aestivum
  unsure (1)..(417): unsure at all n locations
  Clone ID: uC-tsfl9316097f11b1
tgtgtgccagagtgctagacgagagagagagagagaccgagagacatcggccgtgaaggttccggaaggatgcctcgcgcggggttgtcggcggtttcgagcaaggtggacgtggccatcgacctcgggaacccgctcctcaaccgcaccgtcgacntcttcctcaagatcggcgccgtcggcgcctgcagggtggccgccgaggacgccttcgactgcctccaaagtgggagtgtctcgaagcgcaagcttgagaagacactggaaaaaatgtgcaaggagggcgcatattggggtgctgttgctggagtgtatgtaggcatggagtatggagtggaaagggtccccggagagtatgactggaaaaatgcattgattggaggcatcgcaagcggcaccctgatctctgctgctagc

SEQ ID NO: 2321 - DNA, 405 bp, Triticum aestivum
  Clone ID: uC-tsfl9316097f12b1
ttataggaggacctgatggacgagctcatgaggatacacgaggaaggtgacctcgaggtgcctctcaccattggcaacatcaaggctgtcacgatagatctctttggcgccgggaccgagacgtcagcagatgcactccagtgggcgatgtcagagcttatgaggaacccgagagtgatgcataaagcacaggccgagctgcgcgacaaactcggcgggaagcctaccgtgaccgaggccggcctggccgacatgacctacctgaagctcgtcgtcaaggagaccctgaggctgcacccggcgctgccattgctcgttccaagggagtgcaacgagacgtgcaagatcatggggtacgacgtgcccaaaggcttcgtcgtgttcgtgaatgcatgggcgatcggc

SEQ ID NO: 2322 - DNA, 462 bp, Triticum aestivum
  Clone ID: uC-tsfl9316097g06b1
tttctcgcgtccggaatcagaaggagacaagaacgaggttaatgagagtgaggatctgaaggagattgttcttgatgatctagagcccaaggttttcaaggcaatgcttcatttcatctacagagataccctcgttgatgattatgagttggatgcatcaggctccatgggctctatttttgatactttggcggcaaagttgttggccgcagcagacaagtatgacttaggaaggttaagattgctatgtgaatcttacttgtgcaaaggcatttctgtggcctcggttgcaagtactcttgcattggctgatagtcaccatgccatggagcttaaagccgtttgcctaaaatttgctgcagaaaatctttcagctgtgatccggactgacgggttcgattgcctcaaggataattgcccatcacttcagtcggagatactgagaactgttgctgggtgtga

SEQ ID NO: 2323 - DNA, 353 bp, Triticum aestivum
  unsure (1)..(353): unsure at all n locations
  Clone ID: uC-tsfl9316097g09b1
ttttagagagccacccagccatgagatggtatgcatcggtaggctgagggcgctggtgcttcgtgcggcggcgggcgcgggcgcgggcaggcgccggtggtccaaggtcctatncagtcgggcggttgatgtgggcgggagaccccgtccgcgcggacaccattggcataaattcctggcggtggctggcgccaggacaaatatgatgctcgattcatccgactctgactccggcgctcctgctgggcagctgcagctgcagcgccgcgcggttgctgctgggacccatccgcaggatggagggtacgccagtgcggggtggcagagggaagatggtaaactgaaatgtgggt

SEQ ID NO: 2324 - DNA, 437 bp, Triticum aestivum
  Clone ID: uC-tsfl9316097g12b1
tttctttgacgcgtgggccttcctgttgaccatgtcctgggccagcgcctccatcacatactggatggtcaagttccggccaggattcagctacttcgccttcttcgccctcaacctctatggtggcgtctccgtcatcgagagcctcatgatgatcatctcctcccttgtgcccaacttcctcatggggctcatccttggcgccggcgtcattgggatcatgatgctgacgtctggattcttccggctccttccggaacttcccaagattttctggaaatacccagtgtcctacattgtctacggctcttggggtttgaagggtgcatacaagaacgacctgctcgggctggagttcgagccgatgacgccgggaggcgagaagctgaccggcgagttcatcatcaccaacatgatggggctgagcgtcagctact

SEQ ID NO: 2325 - DNA, 374 bp, Triticum aestivum
  Clone ID: uC-tsfl9316097h05b1
tttttgcctcgtcgcggaacagtgctgccaccgccggcgccatgagtaagttgcagagcgacgccctgagggaggcaatcacaaacattatcaatgactgccgtgagaagaaccgcaagttcgttgaaaccattgagctgcagattggtctgaagaactattacccgcaaaaggacaagcgtttcagtggttctgtcaagcttcctcacatccctcgcccaaagatgagggtttgcatgcttggtgatgcccagcacgttgaagaggcagggaaaatgggcctagactgcatggatgtggaatcccttaagaagatgaacaaaaacaagaagctggtcaagaagcttgcaaagaagtatcatgctttccttgca

SEQ ID NO: 2326 - DNA, 304 bp, Triticum aestivum
  unsure (1)..(304): unsure at all n locations
  Clone ID: uC-tsfl9316097h08b1
taagcacaaggagcacctcggcgagatgggcgccgccgccgccggagccttcgccctctacgagaagcacgaggcgaagaaggacccggagcacgcgcacaatcacaagatcgaggaggaggtggccgccgctgcagccgtcggcgccggcggcttcntcttccactagcaccactagaagaagcaggaccacaaggaggccaaggaggccagcggcgagaagaagcaccaccacttcggctagatcaccgttgacgtgcggtggccggcctcgccgccggccgtgcgtgtgcttacgttacgt

SEQ ID NO: 2327 - DNA, 374 bp, Triticum aestivum
  Clone ID: uC-tsfl9316098a05b1
cttactcgtccggaaaataatgcagagaaggctacggcggcagatggtcaagctaaaaagccagaagatccttatgcagagaaggctagggcgatagaggttatgtttccttcaacagagaaggttgggaagattggagatgtaaatcctgttaaagattttgaagccatgctggcagagagatctagctcaatatgggttcagaaggcaattgaagagatgaagaagtacacgaccaatttggtagagaattctcttcaaggagattattacgaaaaggcactcaagtgttttgttgctctgcggaaggcctgtataatcgaacaggagccggaggaatataaccaatttgtgacgaagctttatgagagact

SEQ ID NO: 2328 - DNA, 371 bp, Triticum aestivum
  Clone ID: uC-tsfl9316098a11b1
tgttcattgaaccactgaagctcctatttaaggatgaggttcggaagctgggaagtatcctaaatgtcccagagtcattcttaaagcgacacccatttcctgggcctggtcttgctgtacgtgtcataggtgatgttacagcaggcaatgctctggaggttcttcgtcaggtggatgagatatttattcaagccattaaagatgcaggcctctatgatgaaatttggcaagcttttgctgtgtttttgcctgtccagacagttggggtccagggtgaccagagaactcactcccatgtggttgctctaagggcaattactagtgaggatggcatgactgcaaattggtatgattttgagcgcccgttcctg

SEQ ID NO: 2329 - DNA, 399 bp, Triticum aestivum
  Clone ID: uC-tsfl9316098b08b1
gcttctccgccatgaagttgaacatcgcgaaccccaccacggggtgccagaagaaggtcgagatcgatgacgaccagaagctgcggaacctttatgacaagagaatctcccaggaggtagttggtgatcttctgggtgaggaattcaagggttatatcttcaagatcatgggtggctgcgataagcagggcttccccatgaagcaaggggtgctaacttctgggcgtgtccgccttctgcttcacaggggcacaccttgcttccgtgggtttggcaggcgtaatggtgagcgcaggcgaaagtccgtccgtggttgcattgtcagccaagacctgtctgttatcaacttggtgattgtcaagaagggtgagaatgatctgccaggccttactgacactg

SEQ ID NO: 2330 - DNA, 339 bp, Triticum aestivum
  Clone ID: uC-tsfl9316098b10b1
gtttcggcaagaagaaggccccgccgaagaaggccaaggcgcccccgaccaccgaccggccgctgtggttccccggcgcgcaggcgcccgagtacctcgacgggacgctcgtcggcgactacggcttcgaccccttcggccttgggaagcccgcggagtacctgcagtacgacgtggactccctggaccagaacctggcccagaacctggcgggcgagatcatcggcacccggttcgaggacgccgacgtcaagtccaccccgttccagccctacgccgaggtgttcggcctccagaggttccgcgagtgcgagctcatccacggtcgctgggccatgc

SEQ ID NO: 2331 - DNA, 312 bp, Triticum aestivum
  Clone ID: uC-tsfl9316098c07b1
tgggtgagcgcgcaatcacccaatgtttcctacatcccttctggcaacaacggccagatgctgcttgggctcagcactgcccggtgaatgaattgccacttatcttccagttggtcacagtactttcgtcacttcagatgcccaattatccttcacttgattacaatacttgaataacttcagatgcttcgacatagtagttatgattttatcgtagaatggagacttctattatggaggagtcattgaacaaatgttgtattttggttgccaacctatgctatatttgtgcttatgatgcgttcttgaatt

SEQ ID NO: 2332 - DNA, 466 bp, Triticum aestivum
  Clone ID: uC-tsfl9316098e01b1
gttcttacataaaggttatgttggaaaaggagctgccaacatgttctgcgtttgaaagcctcacaactcttgagattggcgaatggtttttaactgaggacttgtacgttgtgcttcgcttcctccagctttcaccgaggctagaagaactcactttgatgcataggccgcttgatgaaggagcggaaatagattgcatgccaattgacgggatgaccttccggtgtccactccttgaaagtgttgtcatacaatgttcagagggtgatggaggaatcgataagctgctaagtgttctggtagtcaatgggattagtctagacaatataaatattgccttctatgatgaaattgaaaagcgggaccgtgcggagaggatacgtgccgacgaggaacggtcgaaggagctgcgcatcttcgagaagagggtgaagagaaatccagaatggagagagtatgatcctta

SEQ ID NO: 2333 - DNA, 407 bp, Triticum aestivum
  Clone ID: uC-tsfl9316098g04b1
cctccaccatgctcctgcttgtcgactgcatcgccacacgaagttcacaggccatagctacggacggacgaaattccaactgtactgcaacccctcaggatccacagtggccaaagatggcgatccacagttgttcggtgtaatgcctaaggagaaaacaatgtctctctcacttttgtttttcgaaagacctacctatcatcttgccgctgctgcgttagagtggctccatctgcagatgggggaggtctcgaccagcagctgggagaagtctcgacctgcacctggtcacgcgtgccactgccacttaggtccaccacctacagctggcgccgcagtgcctcaaccattcaactatgccacctcagcagttcaatatatattggagaagaagaaaaaacaacagt

SEQ ID NO: 2334 - DNA, 414 bp, Triticum aestivum
  Clone ID: uC-tsfl9316098g07b1
tttagagccgcgacgtgggcaagggcttccgctgcgtacgcatggtgaacaacatctacctcaacttcgacgccttccacggcgacaaggcccacggcggcgtccacgacggcaccgaggtcgtgctctggaagtggtgcgagggcgacaaccagcgctggaagatcctcccctggtagatgagatgccaggagagctttcgcattgccatcgacacatcgccatggattagtccggggacaagcccccccgccccgagtcgtcgtccgtccgtccatcgtcgtcgtagtagtcctctgccgctggtagcgaataatgttgctgtgtccaaataaaaccgtgtgcgatgtgtggcaatggtgtctgtgtgcgtccgtcgtgtgtcgccttgtgattgaatgattgagccggcgt

SEQ ID NO: 2335 - DNA, 416 bp, Triticum aestivum
  Clone ID: uC-tsfl9316098g12b1
gttaaagattacgcacccgaattgctctgggaaaggctaaaagaatggatgtcgtcgcaggagaaacagctggtgtggaagggcagctattgctactatatcctgttctttttgtattacaggggtttgaagcatatgtcggagtgttgcttcttcagaccgcgtggcacgggctcacctctgaatggcaggtcatagtgtgcgggatcttgctggtggtgatggcggttggcaacttcgtcaacacggtggagactctggccctgaagctgaggttcaaagcaaagatgaagaggacgaggcccaggcaggagcctggccagagccgtgcgaatcgcctgcatcaaaattgacaatccagtctggtgtcacccctccatgcctggaatggagacatcaacactgacaaaaccatc

SEQ ID NO: 2336 - DNA, 179 bp, Triticum aestivum
  Clone ID: uC-tsfl9316098h07b1
tcggtcgaattcacccgtctgcaccgctcagtcccccggaccggaccgccggacctgttcttgccttgccatggcagcagcagcactgagggcgcacctgaacgatcatatcgccagcatgtacaccgatggtgtgggcgacgaggacacgttcgaggagctgcgggacgagggcaccg

SEQ ID NO: 2337 - DNA, 312 bp, Triticum aestivum
  Clone ID: uC-tsfl9316099c05b1
ttgaataggaatagaggtcgtgattggtgtaacgggctacaacgaagacctgagacctgagaagaagtttgcaaagaaggcaaggagcgcaggacctgagacctgagaagtttgcaaagaaggcaaggagcgcaggaggctagatatctgtggagctgaatgttggaacaacgaagtaaccaacgagtggcttcataactcatttcaattgcagtatgcgtgcttctcttccatcatcttttaagcatggactaaccgtggtttgtagcacattgagtttttgcaacaccgatagacatgaaccactccctc

SEQ ID NO: 2338 - DNA, 210 bp, Triticum aestivum
  Clone ID: uC-tsfl9316099c12a1
gttggggggggcaaagatgtttctcattaattacccaaatacataggcgacagattggacttataatattatgtgcatgggcatatacatagccatgggtaggatttacatacgagcatgctttctagagttatgttgggaacatggacatacacatattcttattttaggaacaaacaagaaagattaatggaaaaggaaaacccaaag

SEQ ID NO: 2339 - DNA, 370 bp, Triticum aestivum
  Clone ID: uC-tsfl9316099c12b1
tcttccacgcgtccggcaagctatatacctacatagtacagccatggcccccaccgtgatggcctcgtcggccacctccgtcgctcctttccaggggctcaagtccaccgccggcctccccgtcagccgccgctccaacggcgctagcctcggcagcgtcagcaacggtggaaggatcaggtgcatgcaggtgtggcccatcgagggcattaagaagttcgagaccctgtcctacctgccaccgctcagcacggaggccctcctcaagcaggtcgactacctgatccgctccaagtgggtgccttgcctcgagttcagcaaggttgggtttatcttccgcgagcacaacgcatcccctgggtactacgat

SEQ ID NO: 2340 - DNA, 169 bp, Triticum aestivum
  Clone ID: uC-tsfl9316099e10a1
ttaccggaatccgtttgttattgcggtatagtgagcgacagtgcgcctgagggcagatcttcccttgtttgtacattcatttacactctacaacaggatgtcccaaagaataatggtatctacacctagcaaaccagataacgttattgatgcggtgattctatagctc

SEQ ID NO: 2341 - DNA, 341 bp, Triticum aestivum
  Clone ID: uC-tsfl9316099f03b1
ttcatcacgtactcgcatccatcacactagcttgcttagcatcgccacctgctcttagaatggcgggctactacaacggcggcggcaggaccatgtcctactccaacaacgatgagtgcttcgatggcggcaggacgatgtactccaacaccaccgacgactgctacgacgccggcaagcacgggcacgggcacgggcatggccatggccatggcggggcaaacatgtacgctaacaccactgacgtggagtgcttcgaggactccggcaggcacggctacggtcggtggtggcaggaccatgtactccaacaccgtcgacgaggagtgcttcgactccgg

SEQ ID NO: 2342 - DNA, 102 bp, Triticum aestivum
  Clone ID: uC-tsfl9316099g04b1
tattttaaaaaaaaaaaaaaaaaaaaaaaaaaaataaaaaaataaaaaaaaaaacacaaaaaaacaaaaaaaaaaaaaagggggggccgtcctagaggatcc

SEQ ID NO: 2343 - DNA, 421 bp, Triticum aestivum
  Clone ID: uC-tsfl9316100b08b1
cacttaggcacagccgccgccgccgcggctcccaggacagcagccaaggaagaggaagccaagcctccgccatgccgaaatccaagcgcaatcgctcagtcaccttgtccaagaccaagaagaagcctggtctagagcgtaagggcaaggtggtcacggagatcaaagacgcgattgagcgccacagcagcgcctatgtcttcaccttcaacaatatgaggaatcagaagctcaaggacctcagggaccaacttaaatcctctagccggatattccttgctggaaagaaggtcatgcagatagcattggggcggtcacctgctgatgaagctaagacaggcctgcataaactctccaagttccttcaaggtgcttctggattgttatttacaaatctcccagggatgatgttgagagatta

SEQ ID NO: 2344 - DNA, 469 bp, Triticum aestivum
  Clone ID: uC-tsfl9316100c10b1
ggaattcatacatcgactgaagcagcatttgttcctaaagttattgacttggcagccagagaactcacttcccttgctactcctggtcaagttgaccaaacccaactggaacgtgctaaagcatttgcaaaatcagctatcttgaagaacctggaatcaaaggcatcaacaactgaagacatggggcgccaagcattggcatttggtgaaaggaaacctgtggagcagcttcttaaggctgttgatgctataactctggcagatgtatcaactgttgctgagaagatcatctcgtcaccattgacaatggcatctcatggaaatgttctcaatgtaccagcctacgagacagtgcgtggcaagttcagctcgaaatgaggaggcttctgaacaagttaactgttcatatttaattttctccaagacctggtcacatttttcacaagaaaaataagatgcatacaatttt

SEQ ID NO: 2345 - DNA, 325 bp, Triticum aestivum
  Clone ID: uC-tsfl9316100d02b1
aatttcactgcatgggttggtctccgctggattgtgaccaactctttgtgtgtggcctgtcccggttctttgtggttctttgcgcctgctcggtcctcccaagacatcagataaattcttgtgaatctgatcagcatcatcttatcgctgatgtagcatctgtagtctagatatttgaaagagtatgtgatcgaaggcattacctcatcaccccatagcccctctgtatagtgtcttgttagaggaatatgtggaatcgtgttcgttggttgatcaagcacagctgcaggtcaaataaatcttaagctgccaattcttattttcc

SEQ ID NO: 2346 - DNA, 375 bp, Triticum aestivum
  unsure (1)..(375): unsure at all n locations
  Clone ID: uC-tsfl9316100d05b1
gcgttatcaaccacttcaactaccaaggctgccgcgggtacgtgtcggacgcgaggggcgcccggtgcccgtcctgcgggaacgagatggcgaccgagacccagtacgtgccgccgccggcgccggccctgccggagcagagcgccgccacggcgaagacggggtacgtgcagggctccgtgacgtacacggtgacggacgacctggccgtgacgcccatgtcggcatctcagcatcncgcggctcggcgccctcgccgccgtcgggggcctcgccgcgctccaggagaagaccgtggagctcgggtacagggagggcctggagatcctcaaggcctcgctgcggtccaagactgtcctcacggacgtcttcctc

SEQ ID NO: 2347 - DNA, 343 bp, Triticum aestivum
  Clone ID: uC-tsfl9316100d10b1
cccacgcgtccgcccacgcgtccggggagatgcccagccagcaaaggtgagcgtgaggatcccttcatggacatccacagctgacgcaatggcaactctgaatggcaaaaaactcaacctgacatctgcaggtgatttcctcacgttgacaaaactctggggcgatgataccttagtgctccaatttcccattaacttgagaaccgaggcaatcaaagatgaccggccggagtatgcgtccatccaggcggtgctgatcgggccgcacctcctcgccggcctgacacacggcaacaagggccattaacgcgaccgagcactccaacgacggcctgaccccggg

SEQ ID NO: 2348 - DNA, 102 bp, Triticum aestivum
  Clone ID: uC-tsfl9316100e07b1
aaaaaaaaaaaaaaaaaaaaaaaaaagaaaaaaaaataaaaaaaaaataataaaaaaaaaaaaaaaaaaaaaaaaaaaaaaaaaacaaaaaaaaaaaatagg

SEQ ID NO: 2349 - DNA, 429 bp, Triticum aestivum
  Clone ID: uC-tsfl9316100e10b1
gttatcagcctcctcctcttccctcgccgcccgccgcccgccgaggttggtcgccggacgccatggcccccaccaagaagtcgaagaagagcacggagaacatcaacaacaagctgcagctggtgatgaagagcggcaagtacacgctcggctacaagaccgtcctcaagacgctccggagctccaaggggaagttgattatcctcgcaaacaactgccctccgctcaggaagtctgagatcgagtactatgctatgctgtccaagatcagcgttcatcatttccatggaaacaatgtggatcttggaactgcgtgtggcaagtactaccgggtgtgctgtttgagcatacttgaccctggtgactcggacatcatcaccaccgttcctcagtgaagacaagcttacctatcctagcctaagatgatgt

SEQ ID NO: 2350 - DNA, 394 bp, Triticum aestivum
  Clone ID: uC-tsfl9316100g05b1
cgccgtgccacttccagtgcctgcgtgtgcggatcgctgctctcgtcgccggcgttgtggacctcgctgtcaccgccagcatcatgccgcgtcccgtggaaggttagctgcatgcatgcggcgcgggtgcatgtgccagaggaagatggatctggagagtcacgaattggattaaaactggcatgccttatagtatataccctaaataacaagggcatgcgttgtgtcgagtgttatattgtgtctttgtgttgatcatggatttccccggttatgtgaacatgttttactttactcagtatagaagcatttgagggttggagctgttatgtgagactctatttcgtgagcaacttctcgaagggtttatctatgcatgaccttatcttggttt

SEQ ID NO: 2351 - DNA, 326 bp, Triticum aestivum
  Clone ID: uC-tsfl9316100h03b1
gagaatagaaaatacacaaaagatagaccacgattgccggcatcgagcccgacgaggcgtcggaggtgcgacaaagatgaggaagaagctgggcacccggttccccgcggcacggatcaaaaagataatgcaagcagatgaggatgttggcaaaattgcactggctgtgcctgttttagtttcgagagccattgaattgtttctgcaagatttgatcgaccactcatacaaaattactcttcaaagtggtgcaaagacactgaattccttccacctaaagcaatgtgtgaagaggtacagctcttttgacttcctaactgagattg

SEQ ID NO: 2352 - DNA, 462 bp, Triticum aestivum
  Clone ID: uC-tsfl9316100h10b1
gtgttccatgatggcacaaagatggcatgctgggctctaccagagctttcaactttccaagataaattagggagagaggcttatgataaggtagatgtcataggtatcgatgaagcccagttcttcgatgatcttcatgatttttgcagcaaagctgctgatcatgatggaaaaatcattgtggttgcagggctagatggtgattacaaaaggaacaagtttggctcagttctggacatcattcccctggccaactcggtcaccaagctgacagcacggtgtgagttgtgcgatcgccgggcgtccttcacattgaggaagacacaggaaaccaggactgaactcattggtggagccgatgtgtatatgcctgtgtgcaggcagcactacctggacgggcagattgtcatcgaggccacacggattgtcatggatattgaaagatccacggaagtagctcgc

SEQ ID NO: 2353 - DNA, 322 bp, Triticum aestivum
  Clone ID: uC-tsfl9316102b07b2
tctccatatccacaaccgcaaccacagtatccgcaaccatattaaccaatttcgcagcatcaagcacaacaacaacaacaacaacaacaaatccttcaacaaattctgcaacaacaactgattccatgcagggatgttgtcttgcaacaacacaacataacgcatgcaagctcacaagtattgcaacaaagtagttaccaacagttgcaacaattatgttgtcagcaactgtttcagatccccgagcagtcgcggtgccaagccatccacaatgtcgatcatgctattattctgcatcatcattaacaacaacaacaacaac

SEQ ID NO: 2354 - DNA, 322 bp, Triticum aestivum
  unsure (1)..(322): unsure at all n locations
  Clone ID: uC-tsfl9316102c11b2
tgnatacgcacagctcgaccgcaatggcgtcgctcgtcgccgtccagccggtcgccgtgaggggcctggccggcagctccatctccggccgcaagctcgccgtccggcccgcctccgccgccgtctcccgctccacgcgcagggctcgcggggcggcggtggtggccaagtacggggagaagagcgtctacttcgacctggacgacatcgccaacacgacggggcagtgggacctgtacggcagcgacgcggcgtcgccctacaacggcctgcagagcaagttcttcaacaccttcgccgtgcccttcaccaagcgggggct

SEQ ID NO: 2355 - DNA, 375 bp, Triticum aestivum
  unsure (1)..(375): unsure at all n locations
  Clone ID: uC-tsfl9316102e02b2
tgctgnnagtgcagcagaccagttctacacttccaacgcacgcaagaaaatcctccaggttcatctacagcataggaagcggggagatggaagggagcagcagccggacgccagagataaccatcgtcccggcgcctaggccggcggcgggcggtggcggtggcggtggcgccgtggacgcggtgaaggcggcgagcaaggagcccatcagcccgggctcgccttccccggccagcaaggtgcgccccggcgccgtctccctgcccgggtggaagctcgactccctctgcaaggagtccagctcgccgccggccatgatggcgcgcttcccctatttctgaagccacgcgggcatccttgtcatcctttgctagt

SEQ ID NO: 2356 - DNA, 356 bp, Triticum aestivum
  unsure (1)..(356): unsure at all n locations
  Clone ID: uC-tsfl9316102f03b2
cgtannctcatccaggaagagtgcattagcttgtgtggaaggaataaacagtgccaattttggtggtgaagttaagctggctgcaagtcttgctcgaccacgtcgggaaatacaactggacaagaagagtgctaaaggtggggtcaaggtcaatagtgacgcaacttctaaagacaccaacaattctattaagaaaaagaaccagaatagggaggtcgaagtgaagaaggattcaccacataaattgcgaaaaggtgatgtgagcaagctgacctcacatgttgatgcgaaagtaccacaatcatccaacccatcgaaaggcaaacggaaagctggaaagactgaaaataccgctg

SEQ ID NO: 2357 - DNA, 193 bp, Triticum aestivum
  Clone ID: uC-tsfl9316102g07b2
tcacccagcgccagttttgtgaagctgtcggacatgggctccgaggagtggaatgcgttcctcgacaagttccaggagctcctcccgagcgccttcgaagcacggaagcacgctgctggcgccggcccgcgcccgctgcagaggctgggaacttcttgccagttttgaaggtagcagtacgtacccaaaggta

SEQ ID NO: 2358 - DNA, 236 bp, Triticum aestivum
  Clone ID: uC-tsfl9316102h07b2
tcggtggagaagctgataacatcaaagatgatacttgctgggtcgaaccggagacttcattccgtgcaccgaaactctggcttggctgtggctgggttagcagcagacggtaggcagatagtctcaagagcaaagtcagaagcagccaattatgaaaaggtatacggagaacccatgcctgtaaaggaattagctgatcgtgttgctagctatgttcatctgtgtacactctactg

SEQ ID NO: 2359 - DNA, 272 bp, Triticum aestivum
  Clone ID: uC-tsfl9316102h11b2
tggtgctggagaacggcgtgctctgggaagtcgacggtcattgggtcgttcaaggagcagttgatgtggacattggagccaatccctctgctgagggtggtggtgatgatgagggtgtcgatgaccaggccgtgaaggaggttgacattgttgacaccttccgtcttcaggagcaacctgcttttgacaagaagcagcttatctctcacatgaagcgctacatcaagaacctctctgccaagcttgaaggggatgacctagatgttttcaag

SEQ ID NO: 2360 - DNA, 281 bp, Triticum aestivum
  Clone ID: uC-tsfl9316105a10b1
gtttgtttcacattgtgtggtttcctatatgatgatgcgattggttgattgattctgcctgggttggttggttggctggtgttgtatactgtcctctggttatacaggtctgctcaaagtgtagcgtgactgagtcgagcggtaagaattgaattgcgatgggaggaactctgtttttgtcgagtcggagaaggcggtgcgggtgcgcgccttgtaggttataggaagttgaggtcggtcggtcgagtcaaaatttgtattggctggttgcagtggggtct

SEQ ID NO: 2361 - DNA, 330 bp, Triticum aestivum
  Clone ID: uC-tsfl9316105c09b1
gttatttcttcgctgaacagtgctttgatctgctggaaaaatgctcccaacctaccagcaaagaactttcatgcattgacaaggttggatgaaaatagagccaagtgtcagctagcgttaaaagctggtgtgttttatgacaaaatatcaaatatgactatttggggaaaccattcaacaactcaggttcctgatttcttgaatgccaaaattaatgggaggccagtaaaagaagtcatcaaagatacaaagtggctagaagaggatttcactataactgttcaaaagcgtggaggtgtgctcatccaaaagtggggctgatcttcagct

SEQ ID NO: 2362 - DNA, 284 bp, Triticum aestivum
  Clone ID: uC-tsfl9316105d06b1
gatatgttgaacttcttgaggaatgcaacataaatatcccttcatggttttccttcaactcaaaagatggagttaatgttgtgagtggagactcattaatcgaatgtgctaaaattgctaatgaatgtgcaaaggttggtgcagttggcataaactgcacacctccaagatttattcatagcttgatactctccattcggaaggtcacagacaagccaattctgatataccccaacagtggagaaagatacgatgctgagaaaaaggagtgggtggaatccact

SEQ ID NO: 2363 - DNA, 313 bp, Triticum aestivum
  Clone ID: uC-tsfl9316105e04b1
cgttttgtttgggagattcctgatgtgcagcctggatgcatcattcagatgagattgcaagttcctgagaacaaacggcgagagtctacattgaaagggattgtgatagcaaggcgcaatgctgggataaatacaaccttcagattgcgtagattagtagctggtgtgggagtcgagtccgtctttccactttactcaccaaacatcaaagaaatgaagatcttggacaggaagaaagtcaggagagctaagctgtattacctgagagacaggatgaatgcacttaaaaaatgaggctttcggctaggatttt

SEQ ID NO: 2364 - DNA, 300 bp, Triticum aestivum
  Clone ID: uC-tsfl9316105e07b1
ctccaactcgcaccccgctgggggcctccacctccgcctccgcctgcgctgctgctgctccgccagcgatccggcgccgatggtgaaggccatcagggtccacgagctcggcggccccgaggcgctgcggtgggaggatgtggaggtgggcgagcccggggacggcgagatccggatccggaacaccgccatcggcgtcaacttcatcgacgtctacttccgcaagggcgtctaccccgctccccttcccttcacccccggcatggaagctgttggcgtggtgactgccgtggggcccgg

SEQ ID NO: 2365 - DNA, 356 bp, Triticum aestivum
  Clone ID: uC-tsfl9316105e10b1
ggaaagaggaggtgggcaacgtgccgacgcggcggatcgggtccgcggcgggcgccatagccagcacggccacgttcccgctggaggtggcgcggaagcagatgcaggtgggcgccgtgggcgggaggcaggtgtacaagaacgtgctgcacgccatgtactgcatcctcgagaaggagggcaccgccgggctctaccgcgggctcggccccagctgcatcaagctcatgcccgccgccggcatctcctacatgtgctacgaggcctgcaagaagatacttgtcgacgagaaagaagacggcggcgccgtcgagccccaggaggagacggagaccggacaggcaggaggacaggcg

SEQ ID NO: 2366 - DNA, 243 bp, Triticum aestivum
  Clone ID: uC-tsfl9316105f06b1
ccatgctgctgctcaggaggcgtacgacgaggacgacgagatgcctggaggcggtgcccaaagagtgcagtgcgcacaacagtaagctagggttgggcaagctttttggggacccaagatcaagatgcctgcctgctctctggggttttggtggtgttatcgatgaagctgatttttgcccgtttggcgccggggctgtatccatccatgtcttttgaaaaatgctacgtggctactcttaat

SEQ ID NO: 2367 - DNA, 318 bp, Triticum aestivum
  Clone ID: uC-tsfl9316105f10b1
tccgcgatatcacaaaatatcacatccttccacatgagttgctcttcggaatgatagctatatgcttcatttggtccttccaagcaaagttgatccactggtcaatcttatgaaagttgataaggtcccagattctacatatgatatgattggaggtcttgatcagcaaatcaaggagatcaaagaggtcatcgagcttcctatcaaacatcctgagttatttgagagccttggaattgcccagccaaagggtgttctcctttatggaccaccagggacaggcaaaacattactggcacgtgcagttgctcatcacac

SEQ ID NO: 2368 - DNA, 393 bp, Triticum aestivum
  Clone ID: uC-tsfl9316109d03b1
gaaggggttgccggatcttggcctggagctgtgggattatctgatcgggaaaggatgtgtacctcataggcatgcattggatgttctggttaccggtttatgctgcagagatgtggttggtgaagcatataggtgcttccgggagctggttgagatgggaatggcacctacagagcgtgcattcagggttttggaagggttcttgaagaagaagcgggagtttgggaagattgacgagattaggcaaatgatgaaggctatccaattggaggagcatcaagctgaagaagaagctgcgtgaagctatcaaccctcctgtgggcccttttgaaaagaaacatatttatttcttggaccatgtaaaatttccaagcctgcgtggtttaagcaaag

SEQ ID NO: 2369 - DNA, 281 bp, Triticum aestivum
  Clone ID: uC-tsfl9316109g11b1
tggtaatctctgggatctctttgttccaagcaggggaactattcaggactagcttggtatgtcgccggccaaatcgaccgcacactgagctggaaggtaaaccaagaagaagaaaaatgtcttacttgaacttgacaactaactccattcgtgtatgaaatttgttctagttgccgtggctctgaactgaagatgtagccttgtggtgcaggatgtgaagtggctgcagtccattaccacgatgccgatcctggtgaaaggagtgatcaccgcagaggaca

SEQ ID NO: 2370 - DNA, 290 bp, Triticum aestivum
  Clone ID: uC-tsfl9316109h02b1
attaacaagtctgccccaaggatgcccgatgtgatcattcctgaggatctggttgacaacattgcgctatctacacgtcatgagatcaacagagcctttgcaaaccgtcattcagattgctcttggccgtgacataaagaaggtccttatggtgattgctggtctatggctgctttccattctcggcagttgctgcaacttcttgacgctgatctacattgtttttgtggttctgcacacagttccagtaatctacgagaagtctgaagatcagattgatacctatggtg

SEQ ID NO: 2371 - DNA, 450 bp, Triticum aestivum
  Clone ID: uC-tsfl9316109h04b1
ctctttcttgcggcactcacactacactcatccacgcacaagctaatctagcggcgtggctcacttcagtccagtcggcatggcggctcccaggggcgcggcactggtgctggcgatggtgctcgcggcgatgctggtggcgccgccggcgacggtgcacgccatatcctgctccacggtgtacagcacgctgatgccgtgcctgcagtacgtgcagcagggcgggtcgccggcccggggctgctgcaccggcatccagaacctgctggccgaggccaacaacagccccgaccgccgcaccatctgcggctgcctgaagaacgtcgccaacggcgcctccggcgggccctacatcacccgcgccgccgcgctcccctgcaagtgcaacgtcgccctcccctacaagatcagccccagcgacgactgcaactcgatccactgaacgaactg

SEQ ID NO: 2372 - DNA, 290 bp, Triticum aestivum
  Clone ID: uC-tsfl9316110a01b1
gctccgatcaagatcggcatcaatggtttcggccggatcggcaggcttgtggccagggttgcgctccagagccccgatgtcgagctcgtcgccgttaacgaccccttcatcaccaccgactacatgacctacatgttcaagtatgacactgtccacggtcagtggaagcaccatgaagttaaggtgaaggactccaagacccttctctttggtgagaaggaggttgcggtgtttggctgcaggaacccataggagatcccatgggctgctgctggtgctgagtacgttgt

SEQ ID NO: 2373 - DNA, 372 bp, Triticum aestivum
  Clone ID: uC-tsfl9316110b02b1
gtctttttttgcaatggtgacatccctggcctcgccacccataccggcgccgactcatgggtcgctaccaacatcgcgccatactacccctcgacagatatatctctcatcgccgtgggcaacgagatcatggacacgaccgacaagaatctcatcggcaagctcgtccccgccatgcagatgctcaaggatgcgctcgtcacggctggctacaacgaaattcgtgtttccacgccaagctcactcagcatcctggtagactcccagctgccgtccgcggctcggtttcgcgacgtctgggatgacgccatcttcacgccgatgctccaatttctccggcagaccaagtcgccactcatcgtgaacatgtac

SEQ ID NO: 2374 - DNA, 429 bp, Triticum aestivum
  Clone ID: uC-tsfl9316110b04b1
ggctttgttaaccaaggcgcctcccaagactcacaagaggtacaaccccaagaagctgacctatgagcagaggaaggccagcctcgtcgaaaggctcaacgccctcaacaactctgccggtgccgccgatgatgacgaggaggacgacgagtgaagagcgttcttgtccaccccagtgtagtattgcaacgtgcgtttttgttgaagtctggcaccctgcccaacgggcctgttcctttgagttttggttatgtcgcttgagttatagattgtgttatctggattatgtgccgtgctggcatttggatcttaatcttaatcctttagtctggcaccctttctttattttttgtggctgttccatgctggttggccttaggttgacatgaccttcgttgaggtcttttcagcttattactaaccatacta

SEQ ID NO: 2375 - DNA, 365 bp, Triticum aestivum
  Clone ID: uC-tsfl9316110c08b1
gtagtccatgactcttctgcgcaccgcgggcgcgaggccgccgcgggccggtggcgcggccttgcgcgccacgccctgcagcagcaggtgatgcagcaccgtctcggccgcgctgctggcggccaggcggtcggcgggcgcattccagtcggtgtcgagcagggcccggcagacgtcggtcagcgagtcgtcgtggatgtaggtgcggtcgcgcagttcgagcgagcgcggttcgcagtcgagccgcatcacggcctcgcgcgccagccgctccggcgcgatgtagagatgcaggaagtgcaccgtgtcgttcatgcaccagcgcgaatagtgctcggccggcagcacgcagaatttgccggcgc

SEQ ID NO: 2376 - DNA, 415 bp, Triticum aestivum
  Clone ID: uC-tsfl9316110f07b1
gtcttaggtgtacccgctgttcgcggcgacgggcgtggccatcggcatctgcgccttcagcctcctccgcaacatcaccggcaacccagaagtcagggtcaacaagatggggagggcagcaggagtgcttgagaaccatgaggagggcaggcgctacgccgagcacggtctcagagcctatgtgcaggacaagacccccgagatcatgccaggaatcaacaagttcttcaccagcccgaaatgaagcactttagtctctctgtgactcgctattagcaactgttgtggtcaagtgcaaacctatttcaagcattcagtaatgttgtcgcgtccataattcagaggatatcataaagtacctcttattgaaagaaccatgtgatgtttgatggcttgctatatatgtgatggttga

SEQ ID NO: 2377 - DNA, 418 bp, Triticum aestivum
  Clone ID: uC-tsfl9316110g02b1
gaacttacttcatcctaaatcttccccaaccccaatccaggcgacatggatctcgccatggcgccgccgcccaccgccgtcgcggccgtccgttgccacccgcacatcctccgcaggggcctcctgcccgcttcgtcgccgctgctccccttcgcctcccggctggcctcctccacgccgctgcgcgcccagccgctgcgcttctcgctctcccccgtccccaagagcatctcctcctcctcgacctcccacatccccgtgcgctccctcttcaccgggatcgtcgaggaggtcggccgcgtgcgccgcatcggcccgccgcccacgccttctgggggcgggggagacgcggctcccggtgtcgacctcgaggtcgagaccaagaacctcctcgccgggacgcagctgggcgacagca

SEQ ID NO: 2378 - DNA, 415 bp, Triticum aestivum
  Clone ID: uC-tsfl9316110g06b1
ccactgttttgtgaccgtgagctctcagaggactggctggtctatttcatcggacagggaaaaagaatgttttgcttcttgcctcttcatttgctacgacttgattcgtgcggatgttgctcttgagcttgcatggacgaataacatgctggattttgcgttcccctatctattacagttcatccgtgagtacacaagcaaggtggatgatttggtgaaggacagaatagaatcgcagaaggaagaaaaagctaaagagaacgaagagaaggaactagttgcgcagcagaacatgtacgctcaattgcttcctctggccttgcctgctccgcccggcatgatgggcggtccacctccgatgggtggaatgggcatgccgccgatgggcgggatgggtttgcctccgatgggtcct

SEQ ID NO: 2379 - DNA, 455 bp, Triticum aestivum
  Clone ID: uC-tsfl9316110g09b1
tttttatcaagcagatccctcgtctccttggccctggtcttaacaaggcaggcaagtttcccactctggttagtcaccaggaatctcttgaagccaaggtcaacgagacaaaagctacagtcaagttccagctaaagaaggttctttgcatgggtgttgctgtgggcaacttgtcgatggacgagaagcagatccaacaaaacatccaaatgagtgtcaacttccttgtgtccctcctgaagaagaattggcagaatgtgaggtgcctgtacgtgaagagcaccatggggaagcgtgtacgggtgttctaagtgtgtgcgctccagtgaagttgataagataccgggctttcctgccgacccctgcttgtctttggattagatctgtttcactgataccaattttgtgtttgcctaagcgaatatcaacaagtatttaatcgtactagtcttatc

SEQ ID NO: 2380 - DNA, 408 bp, Triticum aestivum
  Clone ID: uC-tsfl9316110g12b1
ttttgtcccatccctacacgtcatggattcctatggctgtatatatttgcctacgcggttgcacccagcagttgaggggcgcttctttggctctcttcgcttggcttggcaaggtcacactggagacttatatttcccagatccacatttggctcaggtctagtgtaccaaatgggcagcccaaatggcttctgtctttcataccgggctacccgatgcttaacttcatgctaacgacatcaatctatcttttgctatcataccgggtatttgagatcacaaacgtgctgagggcagccttcattcccagcagagacaacaaccgcctgtaccagaatttcgttgcgggggttgccatctccgtatgtctgtattgctgctcgctcgttcttctaaaaattccggctg

SEQ ID NO: 2381 - DNA, 174 bp, Triticum aestivum
  Clone ID: uC-tsfl9316111c08b1
caacaacaacagggacagagtatcatccaacatcagcaacaacaaccccaacagttgggccaatgtgtctcccaaccccaacagcagttgcagcagcaactcgggcaacaacctcaacaacaacaaatggcacatggtacctttttgcagccacaccagatagctcagcttgag

SEQ ID NO: 2382 - DNA, 320 bp, Triticum aestivum
  Clone ID: uC-tsfl9316111e10b1
aaggacacaaagggggaggctgcagagggagggggggatgaaaaacatgcaacctcaccaactcacagacaaggagccgaccaagcagcagctgcagatgatgatgacgatgacgatgtggagtggcagactgacacgtcagcggaagccgcgagaaaacgcatggaggagcagctgagcgcagcaactgctgaaaaggcaatgcttgccaccgaggagacggagaagaagaagaaacaggccctgcacaaagagggcagccccaaagggacaccaaaggctgaagataatcccaatggcaaccagactgggcccaagac

SEQ ID NO: 2383 - DNA, 241 bp, Triticum aestivum
  Clone ID: uC-tsfl9316111g02b1
ctctttctctcttcctctctgtggcggcgggtcggggctcctaccaagcagcagtggacaccggcggtttgcgcggcgcggcggcggggagcggcggcagaccggccgtgcggcggcaggccatcgggctccgtcaaggttgctaaaatggataagctcaagggctctgcgcgtcttatgattgtttcagatctcgatcacacaatggttgatcatcatgacgaagagaacttgtctttgc

SEQ ID NO: 2384 - DNA, 263 bp, Triticum aestivum
  Clone ID: uC-tsfl9316111h02b1
gtcgctcaacatcctcatcaaggggggggtcgttgagtccctggggggggcgcccttcttcgccacgtacggaggtgtgctgttcaagtacatctagaagactcgtcgagcggacttagaatctacggacaccatcacgaataactctgccccgcccgcccgccgttcgtatgttgtgcgctgctgttatttttggttcttgtgtcattattccaggattgccgcagtttacccccactttccctttggccttttgggtgtgt

SEQ ID NO: 2385 - DNA, 269 bp, Triticum aestivum
  Clone ID: uC-tsfl9316114a01b1
tttttctgctagggttttggtccttcggtttcggcggctcaagatgggggagagggtcaagggaaccgtgaagtggttcaacgtcaccaaggggttcggcttcatctccccggaggacggcagcgaggacctcttcgtccaccagtccgccatcaagtccgacggctaccgcagcctcaacgagaacgacaccgtcgagttcgaggtcatcaccggcgacgacggtcgcaccaaggcctccgacgtcaccgcaccaggaggaggagcgc

SEQ ID NO: 2386 - DNA, 375 bp, Triticum aestivum
  Clone ID: uC-tsfl9316114b12b1
tctcttcaccggagtcgccgccgccatggccgccggggtgccggagctgcagggcgcggctatgccgatggcgacgctggccggggttgccctcgcgcaggcgctggcggcgggggtgctggtgacggcggggttccatgtgtcgggcgggcacctcaacccggcggtgacggtggcgctgctggcgcgcgggcacatcacggcgttcagggcggtgctgtacgtggcggcccagctgctggcctgctccctcgcctgcatactcctccgctacctctccggcggccaggccactccggttccggtgcacaccctgggcacaggcataggccccatgcaagggctggtcatggagatcatcctcaccttctccct

SEQ ID NO: 2387 - DNA, 427 bp, Triticum aestivum
  unsure (1)..(427): unsure at all n locations
  Clone ID: uC-tsfl9316114c03b1
tggatgcttcaatatgatggtgagttgaagcttccaagcaagtaccttgtttccccacctttgattgagaggacatctggtgaatacttggtgaagaatggtgtccgcaccttcgcttgcagtgaaacagttaagtttggccatgtcacatttttctggaatggaaaccgttcgggatactttgacgagaccagggaagagtatgtagaaattcccagtgacagtggtatcacattcaatgagcagcccaaaatgaaggcacttgaaattgctgagagaactcgggatgctatcctcagtgggaagtttgaccaggtgcgtattaacctgccaaacggtgacatgngttggtcacactggtgatattgaagccacagttgttgcttgcaaggctgctgatgaagctgtcaagatggtcttggatgct

SEQ ID NO: 2388 - DNA, 308 bp, Triticum aestivum
  Clone ID: uC-tsfl9316114c05b1
tacgataattcctcaaagaagatatccatggaccaccgatggaggttgcagttgccgaattaccagtgctgccacaagatgtcctgatgtctatatttgcacacctggagatccctgacctgatgcgtgccagcttcgtctgctcctcgtggcgctccgcgtattccagcctgcgcaaccttgagcagtaccagcaacgccagacgccgtgcctcttatacacatctgaatctgctggtgaaagcgttgcgtgcctctacagcctcttggagaagagggtcatacaagttgactctcccggagccacc

SEQ ID NO: 2389 - DNA, 433 bp, Triticum aestivum
  Clone ID: uC-tsfl9316114c12b1
ccacgcgtccggaccgtagcttgcgtatggccaaccttgtcaatttctccctcgactccaagcgtgagaatagagaaatggtttcaagagcaactcttctatctgagttggctgcgaaaggtgtgatttcatgtgcttcccaagaagtaaaagatctatacaaccttatggagcatgagttccttcctctggatctagcatcaaaagtgcagcctctgctatccaagatttctacgattggaggaaagctttccgctgcatcgtcagttccggaaattcgtttatcacagtaccaaactgcattggagaagcttactgcactgagggtgctgcagcaggcatctcatattttccagtccatgaaaattgatatgctatctagaatgatcccattctttgagttcattgtcgtcgagaagatcgctgttgatgc

SEQ ID NO: 2390 - DNA, 337 bp, Triticum aestivum
  unsure (1)..(337): unsure at all n locations
  Clone ID: uC-tsfl9316114d01b1
tcctgcgcgcagctggagtcactgaacatctccgccgggagcgtatcacagacagtcgacttgcagacactttacagcatagaaggctgggatgcatatgccctggctttccaagcagtggatgagcaggcgagcattgagtttaggaaccctggcatggaggacgacccgacctgcgggcctatccttgacaacgtggccatcaagaagctcttctcccccgacaaagcaaaggagaacatgngtgatcaatggagactttgaggaggggccaatggatgtttccaaacacaagctttncgtgtcctgctcccgacgaaccttgacgagcagacat

SEQ ID NO: 2391 - DNA, 244 bp, Triticum aestivum
  unsure (1)..(244): unsure at all n locations
  Clone ID: uC-tsfl9316114e01b1
taacacagagcaagaagagaagagagaagcaaagcttgagatggcgcaaaccatggcgtccatgaccggcctgtcgcagggcgtgcgtctcccaggcccggccggcaggcgcgccagcaggttcatcgtgagggcgtcgtcggcggaggcggaggccgccggccgccgcgcggtccttggcctcatggcccagcggagtcgtcggagncgcgttcgctcaggtggtgcacgccggcaccgtcgc

SEQ ID NO: 2392 - DNA, 308 bp, Triticum aestivum
  Clone ID: uC-tsfl9316114g03b1
tcattcccagatcccccaagagctccctctcccccacccacgaagcgcctcccatcccgatggcccgcacgaagcagacggcgaggaagtccaccggcggcaaggcgccgcggaagcagctggcgaccaaggcggcgcgcaagtccgccccggccaccggcggcgtgaagaagccccaccgcttccgccccggcaccgtcgcgctccgcgagatccgcaagtaccagaagagcaccgagctgctcatccgcaagctgcccttccagcgcctggtgcggggagatcgcgcaggacttcaagaccgacct

SEQ ID NO: 2393 - DNA, 279 bp, Triticum aestivum
  Clone ID: uC-tsfl9316114g08b1
tgccaccatgagcggagtgacctgttgcctgaggttccccggccagctgaactccgacctccggaagctggcggtgaacctgatccccttcccgcgtctccacttcttcatggtcgggttcgcgccgctgacctcacgcggctcccagatgtaccgctccctcacggtcccggagctgacccagcagatgtgggactccaagaacatgatgtgcgccgccgacccccggcacggccggtacctgacggcctcggccatgttccgcggcaagatgagcac

SEQ ID NO: 2394 - DNA, 60 bp, Triticum aestivum
  Clone ID: uC-tsfl9316114h10b1
ttaaaaaaaaaaaaaaaaaaaaaaaaaaaaggaaaaaaaaaaaaaaaaaaaaaagagggc

SEQ ID NO: 2395 - DNA, 302 bp, Triticum aestivum
  Clone ID: uC-tsfl9316116b02b1
ctggctagtttcgggtgcgcggcccagcagacctccgggcagtgcggggcgtgcgcggacggctgtggcttcttcgacccctgcccggcgctggacgccgacgtatgctccaccagggtccagtgccccaacgccggctgccacaggtacgtgacctaccaccaggccgaggagcaccggagcgcctgcgcgcacgcgccctgccgctgcacggagcacggatgcggctaactcggcgcggcttcggacctcgccgaccacctcagcgccgaccactgcgtgccggtgcgccccatccacta

SEQ ID NO: 2396 - DNA, 345 bp, Triticum aestivum
  Clone ID: uC-tsfl9316116b07b1
ttcattgtacggcacaaccaagcccgtcatacaggcctacaagcccgcacactacctctggaggacctagcccagattacagcccgacatctccaaactacagccccagcgcaagctactccccgactgcaccgggctactccccgtcctacaccggcccgaagacaactgacaaggacgatgagactgttgactagaaaatggctgctgttggttggcttgatgcagaacgatgccccacgaccaactcttgtttcctcgagtgtccggaacaggcgtgttgatgtaagctgtgatgctaatagcagcactagaatctgcggccgtagctgggctgatatttaa

SEQ ID NO: 2397 - DNA, 452 bp, Triticum aestivum
  Clone ID: uC-tsfl9316116b11b1
gtttcttggctgacacctccaagaagggcgagggcaggctcaaggccgccggcggcgccagcaagaggaagaaggacgccgctgccgctggcaagcccaagcgcccgccctccgcctttttcgtcttcatgtctgagttcaggcagcagtacaacgcggagaaccccaacaacaagagtgtcgccaacgtgagcaaggcggcgggtgagaagtggagagctatgtctgatgaggagaaagcaccttatgtggaaaaggctgaacagaagaagaaggattatgagaagaccaaagccacctttgataacaaggagagtgcgagctccaagaaggccaagactcagaacgatgaggaggtcaaatctgaggtcgaagatgagggtagcgatgaggaaaatgaggacgatgacgagtaaatagtgtatcagatcatgaggtagcaaattgggtgt

SEQ ID NO: 2398 - DNA, 89 bp, Triticum aestivum
  Clone ID: uC-tsfl9316116e10b1
ttaatataaaaaaaaaaaaaaaaaaaaaaaaaaaaaaataaaaaaaaaaaaaaaaaaaaaaaaaaaagggcggacgttttgggggggcc

SEQ ID NO: 2399 - DNA, 368 bp, Triticum aestivum
  Clone ID: uC-tsfl9316116f03b1
gtcatttttttacttctgcaagagggaagggtccggttcgggttcgtcgtcggacgaagtcgactgctactcgtacgaccatcctttccaccaggagctgtacaactatgtgaagcagcaagctctgaggaaccaggacagcgtcggccccgcgaagcaagggtcgatgcatgtgagggtgccgacgccggacctggaggaggccaagatcatggagacgatccagtcggagctccacagcctcaaggcaggcgacggcatttcccgctccttcagcaggatcacgatcgaaggtccatgatgaccttgtttcctgctcatatcgaagatcgtcatggatatgatccatgatgatcggagtggctcga

SEQ ID NO: 2400 - DNA, 467 bp, Triticum aestivum
  Clone ID: uC-tsfl9316116f04b1
agatcttgttaggctggtccctgttctggatgcaatcaccaaaatccccgagatggaagggaagctgatctcagtagacacattctacggacaagtcgctgctgaagctgtgaaaagaggagccaccatgattaatgatgtgtctggcggacagcttgacccaagtattcttgaagttgtagctgaacttggagttccatatgttaccatgcacatgagaggtgatccatcaactatgcagagtgaacagaatttacagtatgatgatgtctgcaaagaagttgcttctgaattatatgcacggttaagagaagctgagttgtctggaattcctttgtggaggatagttcttgatcccggcattgggttttcgaagaaatccaaacataatcttgaaataatcaacggcttgggatccattagaaaagagatgggtaaagtgagtttaggtgctttacatgtgccaa

SEQ ID NO: 2401 - DNA, 141 bp, Triticum aestivum
  Clone ID: uC-tsfl9316116g03b1
ggttggctaggcagcgcctgtgctaccgaagggtttggagtgggctgggtttgtgatgaactcgagaatgctgtggaaggaggcagagggcaagcctgattgggtgaaggatcttgatgctgtgggggagaatggggagga

SEQ ID NO: 2402 - DNA, 362 bp, Triticum aestivum
  Clone ID: uC-tsfl9316116g05b1
ccgtctcctttctcctttccccaacccaaaccaggagcgccctccctcccccagccgcccgccccctccccacccaggaaaccagccatgaagggggccaaatccaagggcgccgtcaaggccgacaccaagttggcggtgaagagcaagggggcggagaagccggccgtcaaggggaagaagggcaaggccggcaaggaccccaacaagcccaagagggcgccctccgccttcttcgtcttcatgggcgagttccgcgaggagttcaagcagaagaaccccaagaacaagtccgtcgccgccgtcggcaaagcggccggtgagaggtggaagagcttgagcgaatcggagaaggcccccta

SEQ ID NO: 2403 - DNA, 373 bp, Triticum aestivum
  Clone ID: uC-tsfl9316116h08b1
ggtgggttgcctcgactacctcggcaaccccagcctggttcatgcgcagagcatcctcgccatctgggcctgccaggtcgcgctcatgggcgccgtcgagggctaccgcgtcgccggcgggccgctcggcgagatccgcgacccgctctaccccggcggcagcttcgaccccctgggcctcgctgacgaccccgaggcgttcgcggagctcaaggtgaaggagatcaagaacggccgcctcgccatgttctccatgttcggcttcttcgtgcaggccatcgtcaccggcaagggccctctcgagaacctcgccgaccaccttgccgaccccgtcaacaacaacgcctgggcctttgccaccaacttcgtgccc

SEQ ID NO: 2404 - DNA, 289 bp, Triticum aestivum
  Clone ID: uC-tsfl9316116h11b1
ttaggtatgaggaagaagagggttttgctacgtggcatggaattcatggcatagttggttctttcttcttcctcttcctacctctgcctcttgctcttccttcttcgcaagcagcagcctcttcgccctcgcagccagccgctgtcgataggggggaggtcgtcaccgccggctgctctctgccacgccgcttcgaccagagacaggtgagatggaaggtttcgagttcttccagatcgtacttgacaactcctcgagcaggctgaggctgcctgacaagtttaccatg

SEQ ID NO: 2405 - DNA, 211 bp, Triticum aestivum
  Clone ID: uC-tsfl9316117a01b1
gttttattttctcgtaccgctgcatcctttaccaataaggaggcaagcacttcagtctggttgatgtattctgacctctgggccagagcgtgattaacggccaggatttctctgatggggcaatctaacggctgtagaggatcgttcctgcctggctctcatgcctgacagggtggcccagaggttgtctgacagactacaaaacttttta

SEQ ID NO: 2406 - DNA, 388 bp, Triticum aestivum
  Clone ID: uC-tsfl9316117b12b1
cacgacgaagaaccaagaaacggccgccggcgacaagcccgcgccgccggtgctgccgtggtcggtgaggctccagctgttcgcgctcgtcaccgccaacgacatcgcgcagcgccgcgacgggaccgtcaaccgcttcctcttctccttcggcgaccggcagtcgcccgcgaggccgcgcccggacgcgcacggcgttcgctccgccgacgtcaccgtcgacgcctcccggaacctctgggcgcgcgtctactcccccgcagcggaggcgaccccactccccgtcctcgtctacttccacggcggcggcttcacgctgctctccgcggcctccacgcccatcgacggcatgtgccgccgcttctgccgcgagctgggcgccgtggtc

SEQ ID NO: 2407 - DNA, 359 bp, Triticum aestivum
  Clone ID: uC-tsfl9316117e07b1
ctctaactggcctacctttccgcaaatatttatcaacggggagttcgttgggggctctgacatcatattaagcatgcaccagaaaggggaacttaaggatttacttggtgattccgcacaaaagggcgagcaagacagtgcccagtgaaacaagctacagttgttagcatttgcatggagatggatgcttcctctctgagtactcttttactcgacgctcttcctgcggtgttctgttgttttgacgcaggattttcatcgtcgtgttgccagccatgatggaaatctctcggttccaagagcatccaagttttcgcttcatgacaaataaatgccactttttcaatactctgtttttt

SEQ ID NO: 2408 - DNA, 445 bp, Triticum aestivum
  Clone ID: uC-tsfl9316117f11b1
ttgattttgttgaacgagaggacgagttcgacataaatgcatatgcagaaagggttgaagaactgatgatagatcaggatgcagagattgatgttgaaacatgtgagaagaactcatcattcagtgattttgaggactcagcagatgagatcatctacttgcctgctattccttccccggatgctcctgatgagcagccagacaagtgcctagtaagctcatcaaaattggaggatagcaatcattctggttcgcccccatcctcaatggatgctgtgcagaatggtctagccattcctcccgcatctagtccattggaagttgttgacaattccatggccgaagagccatcagcggaagcggcaaacgcaaagcggaagaggaggctatcagccaaggggctggagatgcagcaggctgaaaaagtgaagaaaccacccataaa

SEQ ID NO: 2409 - DNA, 426 bp, Triticum aestivum
  Clone ID: uC-tsfl9316117g05b1
aagaggctggtagacgccggtgtggatggcgtcatggtagacgtctggtggggcttggtggaggccaagggccctagggtctacgactggtccgcctacaagcagttgttcaagctggtgcatgaggctggactgaagctacaggccatcatgtcactccaccagtgcggtggcaacgtcggcgacgtcgtcaacatcccgatcccgcagtgggtgcgggacgtcggtgcgagtgatccggacattttctacaccgaccagcacgggactaggaacattgagtacctcacccttggagttgatgaccagcctctcttccatggaagatccgccgtgcagatgtatgccgattacatggcaagcttcagggacaacatgaaagagttcttggatgccggtgttattgtagacattgaagtcggactt

SEQ ID NO: 2410 - DNA, 283 bp, Triticum aestivum
  Clone ID: uC-tsfl9316117g08b1
ttcttttctttgcttccgcctccacagcccccactttccaacttagggttctagggtttctccagcagcgccggcgcctccacccgcccacccaaccaccatgacggccgagaccgcgacgcaggcggagctgctccgcgccgttctggaagagcagaagctcgctgcgcagggagacgagcccgtagttgaggatgatgatgatgaggaagatgaggatgatgatgacgaggatgacaaagatgatgatgttgagggagttgatgcaagtggaagatctaag

SEQ ID NO: 2411 - DNA, 329 bp, Triticum aestivum
  Clone ID: uC-tsfl9316117h01b1
gcctttaatttcctggactttgcagctaccctctacatcatccatttgttcatttgcattatttatggtggatggccagcttcaggtacatggtgggtggttaatattgctggtttggcaatcatgtccctcctcggtgaatacctatgcatcaggcgagagctaaaagatattccagtaaggcttcgtgcaagtgtttaatctcagaggctaaaggagtctaggtggtttccaactgttgttaccccccaggagatgcttgttaatatctgtccttaggaatacaagagacctgcgatgcatgctatcttctgtgattacaaccaata

SEQ ID NO: 2412 - DNA, 304 bp, Triticum aestivum
  Clone ID: uC-tsfl9316119b05b1
ttcttctatcctgttcgacggctggcgcacgtccgggtggacgggctacctcctctgcctcctggcgctcttgctcggcgccggcttgtaccagtacctggaggccttccggatccgggtcaagctcctcgccggcgccaaggcgtaccccctgcccccggccggcggctcctacgcgcgggccccgatgatcgcgccgggctccgccgccttcttgggcgggcgctggccggcgcgggtggccacggcggcgctcttcagggtcaacgcgggcatagggctcctcctgatgctcgccgtcatg

SEQ ID NO: 2413 - DNA, 362 bp, Triticum aestivum
  Clone ID: uC-tsfl9316119c09b1
tcgttctgagctacgactacctccccgaggaccgctggtcctcgagcgacctcctcatcgcgtccaaccccgtgtacaagaaggtgcccgtcctcattcacaacggcaggcccgtctgcgagtcgctgctcatcctggagtacctcgacgacgccgtcggccttgccggcaacggcaagcccatcctccccgcagacccctacagccgcgccgtcgctcgcttctgggccgcctatgtgaacgacaagctgttcccttcgtgcaccgggatcctcaagactacgaagcatgaggagagagccggtaagatggaggagaccctgtccgggctcagacacttagaagctgtcatggcggagtgc

SEQ ID NO: 2414 - DNA, 287 bp, Triticum aestivum
  Clone ID: uC-tsfl9316119d06b1
ttcacgcgcaatcgttcgccggacttcggcgcgctcgacccgaacttcttcttcgtccagggcttcagcgggctcggcgtcgcgctcaccggcatcgccggacgcgcgattgccggcgcgatcgcgggcgatacgcgcgcgttcgacctgttcgcgcgcctgcgtcaccggcgcttccccggcggcgacgcatggcggcaacccgcgctcgaactcgggatgctgtaccaccgtgtacgcgagctgttctgagccccctctctccgttctccagaccatgcagacat

SEQ ID NO: 2415 - DNA, 288 bp, Triticum aestivum
  Clone ID: uC-tsfl9316119e03b1
ggcagcctgcctgtgcctcttcctgcttgccgccgcgccgaccctcgctctcgcccgcgcggcgcccgccgccgactcgatacacaagttactgcggtcgcacggcctccccggcgggctgctcccgcgcagcgtcgagtcgtacaccctggacgaggggaacggcctgctcgaggcgcggctgtcggcgccgtgctacgcgacgtacgacaacggcgacctggctttcttcgacaccgtggtgcgagggaatctcagcttcggcgcgctccgcggctgtgaggggct

SEQ ID NO: 2416 - DNA, 218 bp, Triticum aestivum
  Clone ID: uC-tsfl9316119e06b1
ttgttctgccatttccgcaagcacgggcgcaacgtcctggtggcctgcaaggcctacctggacggggcgcaggtcgggtgcctcgccgggaacggggtgcaggacgtggacgagggtgacaagagctgctcgctcaagttcaagacctcgctcaagaggctgttcgaggagctgctgatggagttcacggtgaagggagcggactgcagcaagttcct

SEQ ID NO: 2417 - DNA, 264 bp, Triticum aestivum
  Clone ID: uC-tsfl9316119g10b1
gcacaaaaaaattggggccttggatggctacacactgtatggagctggtggcagctgataatgactatgcagatattatgttgcatgaagaacgacctaactttggtggcataagcatagaagaactgcaccggctagtctatgctcaagttttgtgttctcattctttaacttggcatattgcaccgacttatctgtgctggtgtctgaaccaaggcctatggctgctggagattctacttctcaagcaacccatacaagata

SEQ ID NO: 2418 - DNA, 301 bp, Triticum aestivum
  Clone ID: uC-tsfl9316120a11b1
cggtcgcgtggggcttgcgcgcctcgtgtgatacagatcaaggatctgaagggaaagctgggggacgaggaggccgcggccagcttcacgtcggtgaaggaggagccggcggcgtccgacggcccggccgcccgcgggcatggggtcatccgacagcgactcgagcggggtgctgaacgacacggacgcgaccggcgccacgccaacagaggaggcgccggctccggagatggggacgctgctcggcgggcccggggcggccggcgcggcggcggcggggcacgggcaggtgttcctgcac

SEQ ID NO: 2419 - DNA, 230 bp, Triticum aestivum
  Clone ID: uC-tsfl9316120c04b1
cttacagcaacaaaccgatgaggccaaacatcggtaaacaaaactggagaagaaattgaaacaaaggggcttacttaacaaggagtcagaggaatctaatgaagaagagagctattttttctgttgagctgacaccaagcttgtttacatctactgctgataatgcataccaatcaatacatgagttctcaaagcccttgatcaacatgatgaaagctgcaggttgggat

SEQ ID NO: 2420 - DNA, 374 bp, Triticum aestivum
  unsure (1)..(374): unsure at all n locations
  Clone ID: uC-tsfl9316120f04b1
cgcggccatggcgctcgccnacttcccacccgcgcccgcaggccaccatacgccgggccccttctatcccccgccgctcgcgtgcgccaccaacaccggcttctctttccttttcccaccgtcctcccgctggccctccctgcagagggccagctccgcggcagccggagatggcgccggctcgtcagaagcgccgggcgacagctcgctcgacgcagacctcctcaggagggtctccggggtagaggacgcggaccgagcgttggacattatcgcggagtcgctgggaggcggggctggctccggctcgaaagcgttcctcgacgcgttcgactgcaatgcgatattagcggcggcgcttgaccggggcaacg

SEQ ID NO: 2421 - DNA, 98 bp, Triticum aestivum
  Clone ID: uC-tsfl9316120f05b1
ggccatggcgatgagggagagccggaggaccagggaggacaggcagacccccatggctaccaggaggacaccttctcggatcgtgaggattgggacag

SEQ ID NO: 2422 - DNA, 392 bp, Triticum aestivum
  Clone ID: uC-tsfl9316001a07b1
taacactttgttacatctagcggatttggatttctttaacaactaaggttcctgtttttaacattttaaagtcaagggcttttgcccatctccaatagctaacaagaactctttcttttctttacaaatcccaaaacctttactagactttttctgcttctttagcttacttcacctagagtcttctaccttttcttatcattgaatcaacccctttttttttttcttttaaacacatcccaacccaaagtataagcgcccacctagtcctatctagtccgaaaaatgcgaactagaactacatgagacactatctctgtcgttacgaacctaacactttctaccaagcttaatcggaataagacctcacaaacactcacaagttatatagg

SEQ ID NO: 2423 - DNA, 536 bp, Triticum aestivum
  Clone ID: uC-tsfl9316001a09b1
cactttgttacatctagcggatttggatttctttacaactaaggttcctgtttttaacattttaaagccaagggcttttgcccatctccaatagctaacaagaactctttcttttctttacaaatcccaaaacctttactagactttttctgcttctttagcttacttcacctagagtcttctaccttttcttatcattgaatcaacccctttttttttttcttttaaacacatcccaacccaaagtataagcgcccacctagtcctatctagtccgaaaaatgcgaactagaactacatgagacactatctctgtcgttacgaacctaacactttctaccaagcttaatcggaataagacctcacaaacactcacaagttatatagggcttgaaagaaagctaggtttgggtttgggttaactgctctaataggagagtcagctacttggataaaaagagtgatccaaatgaataagaaaatccaagtattttacggtattcatgaggtcaaatttgatgcagacatgataatta

SEQ ID NO: 2424 - DNA, 554 bp, Triticum aestivum
  unsure (1)..(554): unsure at all n locations
  Clone ID: uC-tsfl9316001a12b1
acactctgttacatctagcggatttggatttctttaacaactaaggttcctgtttttaacattttaaatccaagggcttttgcccatctccaatagctaacaagaactctttcttttctttacaaatcccaaaacctttactagactttttctgcttctttagcttacttcacctagagtcttctaccttttcttatcattgaatcaacccctttttttttttcttttaaacacatcccaacccaaagtataagcgcccacctagtcctatctagtccgaaaaatgcgaactagaactacatgagacactatctctgtcgttacgaacctaacactttctaccaagcttaatcggaataagacctcacaaacactcacaagttatatagggcttgaaagaaagtctaggtttgggtttgggttaactgctctataaggagagtcagctacttggataaaaagagtgatcaaaatgaataagaaaatccangtattttacggtatccatgagttcaaattgatgcagacatgataataaaagatagatcagggtc

SEQ ID NO: 2425 - DNA, 539 bp, Triticum aestivum
  Clone ID: uC-tsfl9316001b07b1
acactctgttacatctagcggatttggatttctttaacaactaaggttcctgtttttaacattttaaagccaagggcttttgcccatctccaatagctaacaagaactctttcttttctttacaaatcccaaaacctttactagactttttctgcttctttagcttacttcacctagagtcttctaccttttcttatcattgaatcaacccctttttttttttcttttaaacacatcccaacccaaagtataagcgcccacctagtcctatctagtccgaaaaatgcgaactagaactacatgagacactatctctgtcgttacgaacctaacactttctaccaagcttaatcggaataagacctcacaaacactcacaagttatatagggcttgaaagaaagtctagggttggggtttgggttaactgctctaataaggagagtcagctacttggattaaaaagagtgatcaaaatgaataagaaaatccacgtattttacggtatccatgagttcaaatttgatgcagacatgataa

SEQ ID NO: 2426 - DNA, 515 bp, Triticum aestivum
  Clone ID: uC-tsfl9316001b09b1
ctcttcccgcacctagcaaatggtaagccaagaaagccaactgacggcattgcacatgagctgacaaagtaatgctgctgctgctattcaacgagatcgattctaacctcaaagcgcccagatcccaatgacgagctcgtcgacgatgtccaccacgttgcagtcgcgccatgggccccgaatgcgaaccccgtcgacatggcctggtccgttgtgccggtactgcgatccggcgacttgtcccattcgaccatccagttctcgccctcctcgtcggcgcttcagagcttcgccgtgaccctgcaacaggtggccccttcgaagctgtccagccacagccgcagcggcattgagatcctcgtcctcgacgttgctccccttccgctagacacggtgttcgtcaacctggagagcgaattgacaaaacggctggagagcggcgagggcaccttttacaaggaccatccgacaagccccaatgccaaggacgttgccaacatgacgcccgaggagcg

SEQ ID NO: 2427 - DNA, 543 bp, Triticum aestivum
  Clone ID: uC-tsfl9316001b12b1
acactctgttacatctagcggatttggatttctttaacaactaaggttcctgtttttaacattttaaagccaagggcttttgcccatctccaatagctaacaagaactctttcttttctttacaaatcccaaaacctttactagactttttctgcttctttagcttacttcacctagagtcttctaccttttcttatcattgaatcaacccctttttttttttcttttaaacacatcccaacccaaagtataagcgcccacctagtcctatctagtccgaaaaatgcgaactagaactacatgagacactatctctgtcgttacgaacctaacactttctaccaagcttaatcggaataagacctcacaaacactcacaagttatatagggcttgaaagaaagtctaggtttgggtttgggttaactgctctaataaggagagtcagctacttggattaaaagagtgatcaaaatgaataagaaaatccaagtattttacggtatccatgagttcaaatttgatgcagacatgataattaaag

SEQ ID NO: 2428 - DNA, 538 bp, Triticum aestivum
  Clone ID: uC-tsfl9316001c08b1
cactctgttacatctagcggatttggatttctttaacaactaaggttcctgtttttaacattttaaagccaagggcttttgcccatctccaatagctaacaagaactctttcttttctttacaaatcccaaaacctttactagactttttctgcttctttagcttacttcacctagagtcttctaccttttcttatcattgaatcaacccctttttttttttcttttaaacacatcccaacccaaagtataagcgcccacctagtcctatctagtccgaaaaatgcgaactagaactacatgagacactatctctgtcgttacgaacctaacactttctaccaagcttaatcggaataagacctcacaaacactcacaagttatatagggcttgaaagaaagtctaggtttgggtttgggttaactgctctaataaggagagtcagctacttggattaaaaagagtgatcaaaatgaataagaaaatccacgtattttacggtatccatgagttcaaatttgatgcagacatgataat

SEQ ID NO: 2429 - DNA, 591 bp, Triticum aestivum
  Clone ID: uC-tsfl9316001c10b1
acactttgttacatctagcggatttggatttctttaacaactaaggttcctgtttttaacattttaaatccaagggcttttgcccatctccaatagctaacaagaactctttcttttctttacaaatcccaaaacctttactagactttttctgcttctttagcttacttcacctagagtcttctaccttttcttatcattgaatcaacccctttttttttttcttttaaacacatcccaacccaaagtataagcgcccacctagtcctatctagtccgaaaaatgcgaactagaactacatgagacactatctctgtcgttacgaacctaacactttctaccaagcttaatcggaataagacctcacaaacactcacaagttatatagggcttgaaagaaagtctaggtttgggtttgggttaactgctctaataaggagagtcagctacttggattaaaaagagtgatcaaaatgaataagaaaatccaagtattttacggtatccatgagttcaaaattgatgcagacatgataattaaagattagattcaggttcaaatggatagggaatggtatcagatcatgaca

SEQ ID NO: 2430 - DNA, 612 bp, Triticum aestivum
  unsure (1)..(612): unsure at all n locations
  Clone ID: uC-tsfl9316001c11b1
acactttgttacatctagcggatttggatttctttaacaactaaggttcctgtttttaacattttaaagccaagggcttttgcccatctccaatagctaacaagaactctttcttttctttacaaatcccaaaacctttactagactttttctgcttctttagcttacttcacctagagtcttctaccttttcttatcattgaatcaacccctttttttttttcttttaaacacatcccaacccaaagtataagcgcccacctagtcctatctagtccgaaaaatgcgaactagaactacatgagacactatctctgtcgttacgaacctaacactttctaccaagcttaatcggaataagacctcacaaacactcacaagttatatagggcttgaaagaaagtctaggtttgggtttgggttaactgctctaataaggagagtcagctacttggattaaaaagagtgatcaaaatgaataagaaaatccaagtattttacggtatccatgagttcaaattngatgcagacatgataattaaagattagattcaggttcanaatgatagggaatggtatcagatcatgacagtgtggcgagtagagcaatct

SEQ ID NO: 2431 - DNA, 634 bp, Triticum aestivum
  unsure (1)..(634): unsure at all n locations
  Clone ID: uC-tsfl9316001c12b1
acactttgttacatctagcggatttggatttctttacaactaaggttcctgtttttaacattttaaagccaagggcttttgcccatctccaatagctaacaagaactctttcttttctttacaaatcccaaaacctttactagactttttctgcttctttagcttacttcacctagagtcttctaccttttcttatcattgaatcaacccctttttttttttcttttaaacacatcccaacccaaagtataagcgcccacctagtcctatctagtccgaaaaatgcgaactagaactacatgagacactatctctgtcgttacgaacctaacactttctaccaagcttaatcggaataagacctcacaaacactcacaagttatatagggcttgaaagaaagtctaggtttgggtttgggctaactgctctaataaggagagtcagctacttggattaaaaagagtgatcaaaatgaataagaaaatccaagtattttacggtatccatgagttcaaattngatgcagacatgataattaaagattagattcaggttcaaattgatagggaatggtatcagatcatgacagtggggcgagtagagcaatctaagcttggtcacgtttttttttt

SEQ ID NO: 2432 - DNA, 525 bp, Triticum aestivum
  Clone ID: uC-tsfl9316001d08b1
gttctccgacctcttcccgcacctagcaaatggtaagccaagaaagccaactgacggcattgcacatgagttgacaaagaaatgctgctgctgctattcaacgagatcgattctaacctcaaagcgcccagatcccaatgacgagctcgtcgacgatgtccaccacgttgcagtcgcgccatgggccccgaatgcgaaccccgtcgacatggcctggtccgttgtgccggtactgcgatccggcgacttgtcccattcgaccatccagttctcgccctcctcgtcggcgcttcagagcttcgccgtgaccctgcaacaggtggccccttcgaagctgtccagccacagccgcagcggcattgagatcctcgtcctcgacgttgctccccttccgctagacacggtgttcgtcaacctggagagcgaattgacaaaacggctggagagcggcgagggcaccttttacaaggaccatccgacaagccccaatgccaaggacgttgccaacatgacgcccgaggagcg

SEQ ID NO: 2433 - DNA, 513 bp, Triticum aestivum
  Clone ID: uC-tsfl9316001d09b1
tctcttcccgcacctagcaaatggtaagccaagaaagccaactgacggcattgcacatgagttgacaaagaaatgctgctgctgctattcaacgagatcgattctaacctcaaagcgcccagatcccaatgacgagctcgtcgacgatgtccaccacgttgcagtcgcgccatgggccccgaatgcgaaccccgtcgacatggcctggtccgttgtgccggtactgcgatccggcgacttgtcccattcgaccatccagttctcgccctcctcgtcggcgcttcagagcttcgccgtgaccctgcaacaggtggccccttcgaagctgtccagccacagccgcagcggcattgagatcctcgtgctcgacgttgctccccttccgctagacacggtgttcgtcaacctggagagcgaattgacaaaacggctggagagcggcgagggcaccttttacaaggaccatccgacaagccccaatgccaaggacgttgccaacatgacgcccgagga

SEQ ID NO: 2434 - DNA, 533 bp, Triticum aestivum
  Clone ID: uC-tsfl9316001d11b1
tctccgccctcttcccgcacctagcaaatggtaagccaagaaagccaactgacggcattgcacatgagtagacaaagaaatgctgctgctgctattcaacgagatcgattctaacctcaaagcgcccagatcccaatgacgagctcgtcgacgatgtccaccacgttgcagtcgcgccatgggccccgaatgcgaaccccgtcgacatggcctggtccgttgtgccggtactgcgatccggcgacttgtcccattcgaccatccagttctcgccctcctcgtcggcgcttcagagcttcgccgtgaccctgcaacaggtggccccttcgaagctgtccagccacagccgcagcggcattgagatcctcgtactcgacgttgctccccttccgctagacacggtggtcgtcaacctggagagcgaattgacaaaacggctggagagcggcgagggcaccttttacaaggaccatccgacaagccccaatgccaaggacgttgccaacatgacgcccgaggagcgtctagccacg

SEQ ID NO: 2435 - DNA, 513 bp, Triticum aestivum
  Clone ID: uC-tsfl9316001e07b1
gttctccgactctcttcccgcacctagcaaatggtaagccaagaaagccaactgacggcattgtacatgagttgacaaagaaatgctgctgctgctattcaacgagatcgattctaacctcaaagcgcccagatcccaatgacgagctcgtcgacgatgtccaccacgttgcagtcgcgccatgggccccgaatgcgaaccccgtcgacatggcctggtccgttgtgccggtactgcgatccggcgacttgtcccattcgaccatccagttctcgccctcctcgtcggcgcttcagagcttcgccgtgaccctgcaacaggtggccccttcgaagctgtccagccacagccgcagcggcattgagatcctcgtcctcgacgttgctccccttccgctagacacggtgttcgtcaacctggagagcgaattgacaaaacggctggagagcggcgagggcaccttttacaaggaccatccgacaagccccaatgccaaggacgttgccaacatga

SEQ ID NO: 2436 - DNA, 416 bp, Triticum aestivum
  Clone ID: uC-tsfl9316001e08b1
tcaacactttgttacatctagcggatttggatttctttaacaactaaggttcctgtttttaacattttaaatccaagggcttttgcccatctccaatagctaacaagaactctttcttttctttacaaatcccaaaacctttactagactttttctgcttctttagcttacttcacctagagtcttctaccttttcttatcattgaatcaacccctttttttttttcttttaaacacatcccaacccaaagtataagcgcccacctagtcctatctagtccgaaaaatgcgaactagaactacatgagacactatctctgtcgttacgaacctaacactttctaccaagcttaatcggaataagacctcacaaacactcacaagttatatagggcttgaaagaaagtctaggtttg

SEQ ID NO: 2437 - DNA, 343 bp, Triticum aestivum
  unsure (1)..(343): unsure at all n locations
  Clone ID: uC-tsfl9316001e09b1
caacaacaacaactagttctaccgcaacaacaaataccatttgttcatccatctatcttgcagcagctaaacccatgcaaggtattcctccagcagcaatgcagccctgtggcaatgccacaaagtcttgctaggtcgcaaatgttgcagcagagcagttgccatgtgatgcaacaacaatgttgccagcagttgccgcanatcccccagcaatcccgctatgaggcaatccgtgctatcatctactccatcatcctgcaagaacaacaacaggttcagggttccatccaaactcctcagcagcaaccccaacagttgggccaatgtgtttcccacccccaac

SEQ ID NO: 2438 - DNA, 298 bp, Triticum aestivum
  Clone ID: uC-tsfl9316001e11b1
gttctccgacctcttcccgcacctagcaaatggtaagccaagaaagccaactgacggcattgcacatgagtagacaaagaaatgctgctgctggtattcaacgagatcgattctaacctcaaagcgcccagatcccaatgacgagctcgtcgacgatgtccaccacgttgcagtcgcgccatgggccccgaatgcgaaccccgtcgacatggcctggtccgttgtgccggtactgcgatccggcgacttgtcccattcgaccatccagttctcgccctcctcgtcggcgcttcagagc

SEQ ID NO: 2439 - DNA, 369 bp, Triticum aestivum
  Clone ID: uC-tsfl9316001f08b1
gctctaacgctcaacactttgttacatctagcggatttggatttctttaacaactaaggttcctgtttttaacattttaaagccaagggcttttgcccatctccaatagctaacaagaactctttcttttctttacaaatcccaaaacctttactagactttttctgcttctttagcttacttcacctagagtcttctaccttttcttatcattgaatcaacccctttttttttttcttttaaacacatcccaacccaaagtataagcgcccacctagtcctatctagtccgaaaaatgcgaactagaactacatgagacactatttctgtcgttacgaacctaacactttctaccaagcttaatcgga

SEQ ID NO: 2440 - DNA, 505 bp, Triticum aestivum
  Clone ID: uC-tsfl9316001f09b1
tcaacactttgttacatctagcggatttggatttctttaacaactaaggttcctgtttttaacattttaaagccaagggcttttgcccatctccaatagctaacaagaactctttcttttctttacaaatcccaaaacctttactagactttttctgcttctttagcttacttcacctagagtcttctaccttttcttatcattgaatcaacccctttttttttttcttttaaacacatcccaacccaaagtataagcgcccacctagtcctatctagtccgaaaaatgcgaactagaactacatgagacactatctctgtcgttacgaacctaacactttctaccaagcttaatcggaataagacctcacaaacactcacaagttatatagggcttgaaagaaagtctaggttttgggtttgggttaaactgctctaataaggagagtcagctactttgattaaaaagagtgatccaaaatgaataagaaaatccaagttttta

SEQ ID NO: 2441 - DNA, 514 bp, Triticum aestivum
  Clone ID: uC-tsfl9316001f10b1
gttctccgacctcttcccgcacctagcaaatggtaagccaagaaagccaactgacggcattgttacatgagtagacaaagaaatgctgctgctggtattcaacgagatcgattctaacctcaaagcgcccagatcccaatgacgagctcgtcgacgatgtccaccacgttgcagtcgcgccatgggccccgaatgcgaaccccgtcgacatggcctggtccgttgtgccggtactgcgatccggcgacttgtcccattcgaccatccagttctcgccctcctcgtcggcgcttcagagcttcgccgtgaccctgcaacaggtggcccctttgaagctgtccagccacagccgcagcggcattgagatcctcgtcctcgacgttgcttaccctccgctagacacggtgttcgtcaacctggagagcgaattgacaaaacggctggagagcggtgagggcccttttacaaggaccattcgacaagccccaatgccaaggacgttgccaacatgacg

SEQ ID NO: 2442 - DNA, 526 bp, Triticum aestivum
  Clone ID: uC-tsfl9316001f11b1
gttctccgatctcttcccgcacctagcaaatggtaagccaagaaagccaactgacggcatttttacatgagttgacaaagaaatgctgctgctggtattcaacgagatcgattctaacctcaaagcgcccagatcccaatgacgagctcgtcgacgatgtccaccacgttgcagtcgcgccatgggccccgaatgcgaaccccgccgacatggcctggtccgttgtgccggtactgcgatccggcgacttgtcccattcgaccatccagttctcgccctcctcgtcggcgctttagagcttcgccgtgaccctgcaacaggtggccccttcgaagctgtccagccacagccgcagcggcattgagatcctcgtcctcgacgttgctccccttccgctagacacggtgttcgtcaacctggagagcgaattgacaaaacggctggagagcggcgagggcaccttttacaaggaccatccgacaagccccaatgccaaggacgttgccaacatgacgcccgaggagcg

SEQ ID NO: 2443 - DNA, 522 bp, Triticum aestivum
  Clone ID: uC-tsfl9316001g08b1
gttctccgacctcttcccgcacctagcaaatggtaagccaagaaagccaactgacggcattgcacatgagttgacaaagaaatgctgctgctgctattcaacgagatcgattctaacctcaaagcgcccagatcccaatgacgagctcgtcgacgatgtccaccacgttgcagtcgcgccatgggccccgaatgcgaaccccgtcgacatggcctggtccgttgtgccggtactgcgatccggcgacttgtcccattcgaccatccagttctcgccctcctcgtcggcgcttcagagcttcgccgtgaccctgcaacaggtggccccttcgaagctgtccagccacagccgcagcggcattgagatcctcgtcctcgacgttgctccccttccgctagacacggtgttcgtcaacctggagagcgaattgacaaaacggctggagagcggcgagggcaccttttacaaggaccatccgacaagccccaatgccaaggacgttgccaacatgacgcccgagga

SEQ ID NO: 2444 - DNA, 520 bp, Triticum aestivum
  Clone ID: uC-tsfl9316001g09b1
gttctccgacctcttcccgcacctagcaaatggtaagccaagaaagccaactgacggcattgcacatgagtagacaaagaaatgctgctgctgctattcaacgagatcgattctaacctcaaagcgcccagatcccaatgacgagctcgtcgacgatgtccaccacgttgcagtcgcgccatgggccccgaatgcgaaccccgtcgacatggcctggtccgttgtgccggtactgcgatccggcgacttgtcccattcgaccatccagttctcgccctcctcgtcggcgcttcagagcttcgccgtgaccctgcaacaggtggccccttcgaagctgtccagccacagccgcagcggcattgagatcctcgtcctcgacgttgctccccttccgctagacacggtgttcgtcaacctggagagcgaattgacaaaacggctggagagcggcgagggcaccttttacaaggaccatccgacaagccccaatgccaggacgttgccacatgacgcccgagga

SEQ ID NO: 2445 - DNA, 513 bp, Triticum aestivum
  Clone ID: uC-tsfl9316001g10b1
tgttcttcgacctcttcccgcacctagcagagtggtgaagccaagaaagccaactgacggcattgtacatgagtagacaaagaaatgctgctggtgctattcaacgagatcgattctaacctcaaagcgcccatatcccaatgacgagctcgtcgacgatgtccaccacgttgcagtcgcgccatgggccccgaatgcgaaccccgtgacatggactggtccgatgagccggtactgcgatccggcgacttgtgccattcaaccatacagttatggccctcctcgtgggagcttcaaagatttggcgcgaccctgcaacaggtggccccttggaagctgtgcagccacagccgcagctggattgagatcctcgttctcgacgttgctacccttacgctagacacggtgttcgtcaacctggagagcgaattgacaaaacgtgtggagagcggcgagggcaccttttacaaggaccatgcgacaagtcccaatggcaaggacgttggcaacatg

SEQ ID NO: 2446 - DNA, 523 bp, Triticum aestivum
  Clone ID: uC-tsfl9316001g11b1
gttctccgactctcttcccgcacctagcaaatggtaagccaagaaagccaactgacggcattgcacatgattagacaaagaaatgctgctgctgctattcaacgagatcgattctaacctcaaagcgcccagatcccaatgacgagctcgtcgacgatgtccaccacgttgcagtcgcgccatgggccccgaatgcgaaccccgtcgacatggcctggtccgttgtgccggtactgcgatccggcgacttgtcccattcgaccatccagttctcgccctcctcgtcggcgcttcagagcttcgccgtgaccctgcaacaggtggccccttcgaagctgtccagccacagccgcagcggcattgagatcctcgtcctcgacgttgctccccttccgctagacacggtgttcgtcaacctggagagcgaattgacaaaacggctggagagcggcgagggcaccttttacaaggaccatccgacaagccccaatgccaaggacgttgccaacatgacgcccgagga

SEQ ID NO: 2447 - DNA, 525 bp, Triticum aestivum
  Clone ID: uC-tsfl9316001g12b1
gttctccgacctcttcccgcacctagcaaatggtaagccaagaaagccaactgacggcattgtacatgagcagacaaagaaatgctgctgctgctattcaacgagatcgattctaacctcaaagcgcccagatcccaatgacgagctcgtcgacgatgtccaccacgttgcagtcgcgccatgggccccgaatgcgaaccccgtcgacatggcctggtccgttgtgccggtactgcgatccggcgacttgtcccattcgaccatccagttctcgccctcctcgtcggcgcttcagagcttcgccgtgaccctgcaacaggtggccccttcgaagctgtccagccacagccgcagcggcattgagatcctcgtcctcgacgttgctccccttccgctagacacggtgttcgtcaacctggagagcgaattgacaaaacggctggagagcggcgagggcaccttttacaaggaccatccgacaagccccaatgccaaggacgttgccaacatgacgcccgaggagcg

SEQ ID NO: 2448 - DNA, 552 bp, Triticum aestivum
  Clone ID: uC-tsfl9316001h07b1
cactttgttacatctagcggatttggatttctttaacaactaaggttcctgtttttaacattttaatgccaagggcttttgcccatctccaatagctaacaagaactctttcttttctttacaaatcccaaaacctttactagactttttctgcttctttagcttacttcacctagagtcttctaccttttcttatcattgaatcaacccctttttttttttcttttaaacacatcccaacccaaagtataagcgcccacctagtcctatctagtccgaaaaatgcgaactagaactacatgagacactatctctgtcgttacgaacctaacactttctaccaagcttaatcggaataagacctcacaaacactcacaagttatatagggcttgaaagaaagtctaggtttgggtttgggttaactgctctaataaggagagtcagctacttggattaaaaagagtgatcaaaatgaataagaaaattcacgttttttacggtatccatgagttaaaatctgtgcagacatgataattaaagattagattca

SEQ ID NO: 2449 - DNA, 591 bp, Triticum aestivum
  Clone ID: uC-tsfl9316001h08b1
tcaacactttgttacatctagcggatttggatttctttaacaactaaggttcctgtttttaacattttaaagccaagggcttttgcccatctccaatagctaacaagaactctttcttttctttacaaatcccaaaacctttactagactttttctgcttctttagcttacttcacctagagtcttctaccttttcttatcattgaatcaacccctttttttttttcttttaaacacatcccaacccaaagtataagcgcccacctagtcctatctagtccgaaaaatgcgaactagaactacatgagacactatctctgtcgttacgaacctaacactttctaccaagcttaatcggaataagacctcacaaacactcacaagttatatagggcttgaaagaaagtctaggtttgggtttgggttaactgctctaataaggagagtcagctacttggattaaaaagagtgatcaaaatgaataagaaaatccaagtattttacggtatccatgagttcaaatttgatgcagacatgataataaagattagattcacgttcaaattgataggggatggtatcagatcatga

SEQ ID NO: 2450 - DNA, 593 bp, Triticum aestivum
  Clone ID: uC-tsfl9316001h09b1
ctcaacactttgttacatgtagcggatgtggattcctttaacaactaagggtcctgtttctaatcattcaatgtcaagggcttttgcccatctgcaatagctaacaagaactgtttgttttctttacaaaccccaaaacctttactagactttgtctgcttctttagcttacttcacctagagccttctaccttttcttatcatggaatcaacccctttttttttttgttttaaacacatcccaacccaaagtataagcgcccacctagtcctatctagtccgaaaaatgcgaactagaactacatgagacactctctgtgtcggtacgaacctaacactttctaccaagcttaatcggtataagacctcacaaacactcacaagttatatagggcttgaaagaaagtctaggtttgggtttgggttaactgctctaataaggagagtcagctacttggattaaaaagagtgatcaaaatgaataagaaaatcccagtattttacggtattcatgagttcaaatttgatgcagacatgataattaaagattagattcagggtcaaaatgatagggaatggtatcagatcatga

SEQ ID NO: 2451 - DNA, 522 bp, Triticum aestivum
  Clone ID: uC-tsfl9316001h10b1
gttctccgatctcttcccgcacctagcaaatggtaagccaagaaagccaactgacggcattgtacatgagtctgacaaagaaatgctgctgctgctattcaacgagatcgattctaacctcaaagcgcccagatcccaatgacgagctcgtcgacgatgtccaccacgttgcagtcgcgccatgggccccgaatgcgaaccccgtcgacatggcctggtccgttgtgccggtactgcgatccggcgacttgtcccattcgaccatccagttctcgccctcctcgtcggcgcttcagagcttcgccgtgaccctgcaacaggtggccccttcgaagctgtccagccacagccgcagcggcattgagatcctcgtcctcgacgttgctccccttccgctagacacggtgttcgtcaacctggagagcgaattgacaaaacggctggagagcggcgagggcaccttttacaggaccattcgacatgccccaatgccaaggacgttgccaacatgacgcccgagga

SEQ ID NO: 2452 - DNA, 645 bp, Triticum aestivum
  Clone ID: uC-tsfl9316001h11b1
tcaacactttgttacatctagcggatttggatttctttaacaactaaggttcctgtttttaacattttaaagccaagggcttttgcccatctccaatagctgacaagaactctttcttttctttacaaatcccaaaacctttactagactttttctgcttctttagcttacttcacctagagtcttctaccttttcttatcattgaatcaacccctttttttttttcttttaaacacatcccaacccaaagtataagcgcccacctagtcctatctagtccgaaaaatgcgaactagaactacatgagacactatctctgtcgttacgaacctaacactttctaccaagcttaatcggaataagacctcacaaacactcacaagttatatagggcttgaaagaaagtctaggtttgggtttgggttaactgctctaataaggagagtcagctacttggattaaaaagagtgatcaaaatgaataagaaaatccaagtattttacggtatccatgagttcaaatttgatgcagacatgataattaaagattagattcaggttcacattgatagggaatggtattagatcatgacagtgtggtcgagtagagcaatctaagcatcgttcaggtttttttttttttaa

SEQ ID NO: 2453 - DNA, 535 bp, Triticum aestivum
  Clone ID: uC-tsfl9316001h12b1
gttctccgatctcttcccgcacctagcaaatggtaagccaagaaagccaactgacggcattttacatgattagacaaagaaatgctgctgctgctattcaacgagatcgattctaacctcaaagcgcccagatcccaatgacgagctcgtcgacgatgtccaccacgttgcagtcgcgccatgggccccgaatgcgaaccccgtcgacatggcctggtccgttgtgccggtactgcgatccggcgacttgtcccattcgaccatccagttctcgccctcctcgtcggcgcttcagagcttcgccgtgaccctgcaacaggtggccccttcgaagctgtccagccacagccgcagcggcattgagatcctcgtcctcgacgttgctccccttccgctagacacggtgttcgtcaacctggagagcgaattgacaaaacggctggagagcggcgagggcaccttttacaaggaccatccgacaggccccaatgccaaggacgttgccaacatgacgcccgaggagcgtctagccacg

SEQ ID NO: 2454 - DNA, 524 bp, Triticum aestivum
  Clone ID: uC-tsfl9316008a02b1
tgttctccgacctcttcccgcacctagcaaatggtaagccaagaaagccaactgacggccttgcacatgagcagacaaagaaatgctgctgctgctattcaacgagatcgattctaacctcaaagcgcccagatcccaatgacgagctcgtggacgatgtccaccacgttgcagtcgcgccatgggccccgaatgcgaaccccgtcgacatggcctggtccgttgtgccggtactgcgatccggcgacttgtcccattcgaccatccagttctcgccctcctcgtcggcgcttcagagcttcgccgcgaccctgcaacaggtggccccttcgaagctgtccagccacagccgcagcggcattgagatcctcgtcctcgacgttgctccccttccgctagacacggtgttcgtcaacctggagagcgaattgacaaaacggctggagagcggcgagggcaccttttacaaggaccatccgacaagccccaatgccaggacgttgccaacatgacgcccgaggagc

SEQ ID NO: 2455 - DNA, 589 bp, Triticum aestivum
  Clone ID: uC-tsfl9316008a03b1
tgtgctctcaagctcaacactttgttacatctagcggatttggatttctttaacaactaaggttcctgtttttaacattttaaagccaagggcttttgcccatctccaatagctaacaagaactctttcttttctttacaaatcccaaaacctttactagactttttctgcttctttagcttacttcacctagagtcttctaccttttcttatcattgaatcaacccctttttttttttcttttaaacacatcccaacccaaagtataagcgcccacctagtcctatctagtccgaaaaatgcgaactagaactacatgagacactatctctgtcgttacgaacctaacactttctaccaagcttaatcggaataagacctcacaaacactcacaagttatatagggcttgaaagaaagtctaggtttgggtttgggttaactgctctaataaggagagtcagctacttggattaaaaagagtgatcaaaatgaataagaaaatccaagtattttacggtatccatgagttcaaatttgatgcagacatgataattaaagattagattcaggttcacattgatagggaa

SEQ ID NO: 2456 - DNA, 526 bp, Triticum aestivum
  Clone ID: uC-tsfl9316008a07b1
cctcttcccgcacctagcaaatggtaagccaagaaagccaactgacggcattgcacttgagcatacaaagaaatgctgctgctgctattcaacgagatcgattctaacctcaaagcgcccagatcccaatgacgagctcgtcgacgatgtccaccacgttgcagtcgcgccatgggccccgaatgcgaaccccgtcgacatggcctggtccgatgtgccggtactgcgatccggcgacttgtcccattcgaccatccagttctcgccctcctcgtcggcgcttcagagctttgccgtgaccctgcaacaggtggccccttcgaagctgtccagccacagccgcagcggcattgagatcctcgtcctcgacgttgctcccctttcgctagacacggtgttcgtcaacctggagagcgaattgacaaaacggctggagagcggcgagggcaccttttacaaggaccattcgacaagccccaatgccaaggacgttgccaacatgacgcccgaggagcgtctagccacg

SEQ ID NO: 2457 - DNA, 532 bp, Triticum aestivum
  Clone ID: uC-tsfl9316008a09b1
gtgtcttttacctcttaccgcacctagcaaatggtaagcctagaaagccaactgacggttttgcacttgagcagacaaagaaatgctgctgctgctattcaacgagatcgattctaacctcaaagcgcccagatcccaatgacgagctcgtcgacgatgtccaccacgttgcagtcgcgccatgggccccgaatgcgaaccccgtcgacatggcctggtccgttgtgccggtactgcgatccggcgacttgtcccattcgaccatccagttctcgccctcctcgtcggcgcttcagagcttcgccgtgaccctgcaacaggtggccccttcgaagctgtccagccacagccgcagcggcattgagatcctcgtcctcgacgttgctccccttccgctagacacggtgttcgtcaacctggagagcgaattgacaaaacggttggagagcggcgagggcaccttttacaaggaccattcgacaagccccaatgccaaggacgttgccaacatgacgcccgaggagcgtctagc

SEQ ID NO: 2458 - DNA, 537 bp, Triticum aestivum
  Clone ID: uC-tsfl9316008a11b1
cctctgaccgcacctagcaaatggtaagccaagaaagccaactgacggttttgcatttgagccgacaaggaaatgctgctgctgctattcaacgagatcgattttaacctcaaagcgcccagatccaaaagacgagctcggcgacgatgtccaccacgttgcagacgcgccatgggtctcgaatgcgaaccccagcgacatggcctggttcgttgtgccggtactgcgatccggcgacttgtcccattcgaccattcagttctcgccctcctcgtaggtgctatcagagctttaccgtgaccctgcaacaggtggcctcttcgatgctgcccagtcacagccgtagcggcattgagatccttgacctcgacgttggtcctcttccgatagacacggtgtttgttaacctggagagcgaaatgacaaaacggctggagagcggttagggcaccttttacaaggaccatacgacaagccccaatgccaaggacgttgccaacatgacgtccgaggaagcgttagccacggggcttaggg

SEQ ID NO: 2459 - DNA, 604 bp, Triticum aestivum
  Clone ID: uC-tsfl9316008a12b1
tgctctcaagctaacactttgttacatctagcggatttggatttctttaacaactaaggttcctgtttttaacattttaaagccaagggcttttgcccatctccaatagctaacaagaactctttcttttctttacaaatcccaaaacctttactagactttttctgcttctttagcttacttcacctagagtcttctaccttttcttatcattgaatcaacccctttttttttttcttttaaacacatcccaacccaaagtataagcgcccacctagtcctatctagtccgaaaaatgcgaactagaactacatgagacactatctctgtcgttacgaacctaacactttctaccaagcttaatcggaataagacctcacaaacactcacaagttatatagggcttgaaagaaagtctaggtttgggtttgggttaactgctctaataaggagagtcagctacttggattaaaaagagtgatcaaaatgaataagaaaatccaagtattttacggtatccatgagttcaaatttgatgcagacatgataattaaagattagattcaggttcaaattgatagggaatggtatcagatcatgaca

SEQ ID NO: 2460 - DNA, 513 bp, Triticum aestivum
  Clone ID: uC-tsfl9316008b01b1
gtgttctcttacctcttcccgcacctagcaaatggtaagccaagaaagccaactgacggctttgcacttgagcagacaaagaaatgctgctgctgctattcaacgagatcgattctaacctcaaagcgcccagatcccaatgacgagctcgtcgacgatgtccaccacgttgcagtcgcgccatgggccccgaatgcgaaccccgtcgacatggcctggtccgttgtgccggtactgcgatccggcgacttgtcccattcgaccatccagttctcgccctcctcgtcggcgcttcagagcttcgccgtgaccctgcaacaggtggccccttcgaagctgtccagccacagccgcagcggcattgagatcctcgtcctcgacgttgctccccttccgctagacacggtgttcgtcaacctggagagcgaattgacaaaacggctggagagcggcgagggcaccttttacaaggaccatccgacatgccccaatgccaggacgttgccacatgac

SEQ ID NO: 2461 - DNA, 529 bp, Triticum aestivum
  Clone ID: uC-tsfl9316008b03b1
gtgttctccgacctcttcccgcacctagcaaatggtaagccaagaaagccaactgacggctttgcacttgagcagacaaagaaatgctgctgctgctattcaacgagatcgattctaacctcaaagcgcccagatcccaatgacgagctcgtcgacgatgtccaccacgttgcagtcgcgccatgggccccgaatgcgaaccccgtcgacatggcctggtccgttgtgccggtactgcgatccggcgacttgtcccattcgaccatccagttctcgccctcctcgtcggcgcttcagagcttcgccgtgaccctgcaacaggtggccccttcgaagctgtccagccacagccgcagcggcattgagatcctcgtcctcgacgttgctccccttccgctagacacggtgttcgtcaacctggagagcgaattgacaaaacggctggagagcggcgagggcacctcttacaaggaccatccgacaagccccaatgccaaggacgttgccaacatgacgcccgaggagcgtc

SEQ ID NO: 2462 - DNA, 350 bp, Triticum aestivum
  Clone ID: uC-tsfl9316008b05b1
tcaattataacctcatggtcgctccagatctgcaacgtcaagcgtggggacctgcacacagcgtgataatggcgccatgggccccaaaggcgaaccccgaggaatgcatctggaacgatgaaccgaactgccatctccggtacttgggcgatcaaccatacagtgatggccctcttacggggacctaaaaagatttggcgctaccctggaacaagtggacagttgaaagttgtgcaaccacagtctaagctgggaattagatcctcgttctcaacgttggtactgttacaaagacacggtgttccacaaactggagagtgaattgactaaacttttggaagtggcgaggt

SEQ ID NO: 2463 - DNA, 517 bp, Triticum aestivum
  Clone ID: uC-tsfl9316008b06b1
cgacctctttccgcacctagcacatggtaagccaagaaagccaactgacggcattgcacttgagcattcaaagaaatgctgctgctgctattcaacgagatcgattctaacctcaaagcgcccagatcccaatgacgagctcgtcgacgatgtccaccacgttgcagtcgcgccatgggccccgaatgcgaaccccgtcgacatggcctggtccgttgtgccggtactgcgatccggcgacttgtcccattcgaccatccagttctcgccctcctcgtcggcgcttcagagcttcgacgtgaccctgcaacaggtggcccctttgaagctgtccagccacagccgcagcggcattgagatcctcgtcctcgaccgttgcttccccttccgttagacacggtgttcgtcaacctggagagcgaattgacaaaacggttggagagcggtgagggcactttttacaaggaccatccgacaagccccaatgccaaggacgttgccacatgacgcccgagga

SEQ ID NO: 2464 - DNA, 561 bp, Triticum aestivum
  Clone ID: uC-tsfl9316008b08b1
cgcacctagcagatggtaagccacgaaagccgactgacggcattgcacatgagcagacaaagaaatgctgctgctgctattcaacgagatcgattttaaccttaaagcgcccagatcccaatgacgagctagtcgacgatgtccaccacgttgcagtcgcgccatgggccccgaatgcgaaccccgtcgacatggcctggtccgttgtgccggtactgcgatccggcgacttgtcccattcgaccatccagttctagccctcctcgacggcgcttcagagctttgccgggaccctgcaacaggtggccccttagaagctgttcagtcacagccgtagtgggattgagatcctcgacctcgacgctgctcctcttgcgctagacacagtgttcgtgaacctggagagcgaatcgacaaaacggctggagagcggctagggcaccttttacaagggccatccgacaagccccaatgccaaggacgttgccaacatgacgcccgaggagcggctagccacggcgctcatggcagttctcagcaccctcaagattgtccattccg

SEQ ID NO: 2465 - DNA, 537 bp, Triticum aestivum
  Clone ID: uC-tsfl9316008b09b1
gtgttctcttgcctcttcccgcacctagcaaatggtaagccatgaaagccaactgacggtattgcatttgagcagacaaagaaatgctgctgctgctattcaacgagatcgattctaacctcaaagcgcccagatcccaatgacgagctcgtcgacgatgtccaccacgttgcagtcgcgccatgggccccgaatgcgaaccccgtcgacatggcctggtccgttgtgccggtactgcgatccggcgacttgtcccattcgaccatccagttctcgccctcctcgtcggcgcttcagagcttcgccgtgaccctgcaacaggtggccccttcgaagctgtccagccacagccgcagcggcattgagatcctcgtcctcgacgttgctccccttccgctagacacggtgttcgtcaacctggagagcgaattgacaaaacggctggagagcggcgagggcaccttttacaaggaccatccgacaagccccaatgccaaggacgttgccaacatgacgcccgaggagcgtctagccacg

SEQ ID NO: 2466 - DNA, 537 bp, Triticum aestivum
  Clone ID: uC-tsfl9316008b10b1
gtgttctccgacctcttcccgcacctagcaaatggtaagccaagaaagccaactgacggtattgcacttgagcagacaaagaaatgctgctgctgctattcaacgagatcgattctaacctcaaagcgcccagatcccaatgacgagctcgtcgacgatgtccaccacgttgcagtcgcgccatgggccccgaatgcgaaccccgtcgacatggcctggtccgttgtgccggtactgcgatccggcgacttgtcccattcgaccatccagttctcgccctcctcgtcggcgcttcagagcttcgccgtgaccctgcaacaggtggccccttcgaagctgtccagccacagccgcagcggcattgagatcctcgtcctcgacgttgctccccttccgctagacacggtgttcgtcaacctggagagcgaattgacaaaacggctggagagcggcgagggcaccttttacaaggaccattcgacaagccccaatgccaaggacgttgccaacatgacgcccgaggagcggttagccacg

SEQ ID NO: 2467 - DNA, 567 bp, Triticum aestivum
  Clone ID: uC-tsfl9316008b12b1
gtgttctccgacctcttcccgcacctagcaaatggtaagccaagaaagccaactgacggtattgcacatgagcagacaaagaaatgctgctgctgctattcaacgagatcgattctaacctcaaagcgcccagatcccaatgacgagctcgtcgacgatgtccaccacgttgcagtcgcgccatgggccccgaatgcgaaccccgtcgacatggcctggtccgttgtgccggtactgcgatccggcgacttgtcccattcgaccatccagttctcgccctcctcgtcggcgcttcagagcttcgccgtgaccctgcaacaggtggccccttcgaagctgtccagccacagccgcagcggcattgagatcctcgtcctcgacgttgctccccttccgctagacacggtgttcgtcaacctggagagcgaattgacaaaacggctggagagcggcgagggcaccttttacaaggaccatccgacaagccccaatgccaaggacgttgccaacatgacgcccgaggagcgtctagccacggcgctcagggcagctctcagcaccctcaag

SEQ ID NO: 2468 - DNA, 578 bp, Triticum aestivum
  Clone ID: uC-tsfl9316008c02b1
gctaacactttgttcatctagcggatttggatttctttaacaactaaggttcctgtttttaacattttaaagccaagggcttttgcccatctccaatagctaacaagaactctttcttttctttacaaatcccaaaacctttactagactttttctgcttctttagcttacttcacctagagtcttctaccttttcttatcattgaatcaacccctttttttttttcttttaaacacatcccaacccaaagtataagcgcccacctagtcctatctagtccgaaaaatgcgaactagaactacatgagacactatctctgtcgttacgaacctaacactttctaccaagcttaatcggaataagacctcacaaacactcacaagttatatagggcttgaaagaaagtctaggcttgggttcgggttaactgctctaataaggagagtcagctacttggattaaaaagagtgatcaaaatgaataagaaaatccaagtattctacggtatccatgagttcaaatttgatgcagacattgataaataaagattagattcaggctcaaactgatagggaat

SEQ ID NO: 2469 - DNA, 575 bp, Triticum aestivum
  Clone ID: uC-tsfl9316008c03b1
gctcaacactttgttacatctagcggatttggatttctttaacaactaaggttcctgtttttaacattttaaagccaagggcttttgcccatctccaatagctaacaagaactctttcttttctttacaaatcccaaaacctttactagactttttctgcttctttagcttacttcacctagagtcttctaccttttcttatcattgaatcaacccctttttttttttcttttaaacacatcccaacccaaagtataagcgcccacctagtcctatctagtccgaaaaatgcgaactagaactacatgagacactatctctgtcgttacgaacctaacactttctaccaagcttaatcggaataagacctcacaaacactcacaagttatatagggcttgaaagaaagtctaggttcgggcttgggttaactgctctaataaggagagtcagctacttggattaaaaagagtgatcaaaatgaataagaaaatccaagtattttacggtatccatgagttcaaatttgatgcagacatgataattaaagattagattcaggctcaaattgatagg

SEQ ID NO: 2470 - DNA, 595 bp, Triticum aestivum
  Clone ID: uC-tsfl9316008c04b1
gctaacactttgtacatctacgcggatttggatttctttaacaactaaggttcctgtttttaacattttaaagccaagggcttttgcccatctccaatagctaacaagaactctttcttttctttacaaatcccaaaacctttactagactttttctgcttctttagcttacttcacctagagtcttctaccttttcttatcattgaatcaacccctttttttttttcttttaaacacatcccaacccaaagtataagcgcccacctagtcctatctagtccgaaaaatgcgaactagaactacatgagacactatctctgtcgttacgaacctaacactttctaccaagcttaatcggaataagacctcacaaacactcacaagttatatagggcttgaaagaaagtctaggtttgggtttgggttaactgctctaataaggagagtcagctacttggattaaaaagagtgatcaaaatgaataagaaaatccaagtattttacggtatccatgagttcaaatttgatgcagacatgataattaacgattagattcaggttcaaattgatagggaatggtatcagatcatgaca

SEQ ID NO: 2471 - DNA, 561 bp, Triticum aestivum
  Clone ID: uC-tsfl9316008c05b1
ttcagctaacactttgttacatctagcggatttggatttctttaacaactaaggttcctgtttttaacattttaaagccaagggcttttgcccatctccaatagctaacaagaactctttcttttctttacaaatcccaaaacctttactagactttttctgcttctttagcttacttcacctagagtcttctaccttttcttatcattgaatcaacccctttttttttttcttttaaacacatcccaacccaaagtataagcgcccacctagtcctatctagtccgaaaaatgcgaactagaactacatgagacactatctctgtcgttacgaacctaacactttctaccaagcttaatcggaataagacctcacaaacactcacaagttatatagggcttgaaagaaagtctaggtttgggtttgggttaactgctctaaaaggagagtcagctacttggattaaaaagagtgatcaaaatgaataagaaaatccacgtattttacggtatccatgagttcaaatttgatgcagacatgataattaaagattagattca

SEQ ID NO: 2472 - DNA, 612 bp, Triticum aestivum
  unsure (1)..(612): unsure at all n locations
  Clone ID: uC-tsfl9316008c07b1
acactttgttacatctcgcggatttggatttctttaacaactaaggttcctgtttttaacattttaaagttcaagggcttttgcccatctccaatagctaacaagaactctttcttttctttacaaatcccaaaacctttactagactttttctgcttctttagcttacttcacctagagtcttctaccttttcttatcattgaatcaacccctttttttttttcttttaaacacatcccaacccaaagtataagcgcccacctagtcctatctagtccgaaaaatgcgaactagaactacatgagacactatctctgtcgttacgaacctaacactttctaccaagcttaatcggaataagacctcacaaacactcacaagttatatagggcttgaaagaaagtctaggtttgggtttgggttaactgctctaataaggagagtcagctacttggattaaaaagagtgatcaaaatgaataagaaaatccaagtantttacggtatccatgagttcaaatttgatgcagacatgataattaaagattagattcaggttcaaattgatagggaatggtatcagatcatgacagtgtggtcgagtagagcaat

SEQ ID NO: 2473 - DNA, 529 bp, Triticum aestivum
  unsure (1)..(529): unsure at all n locations
  Clone ID: uC-tsfl9316008c08b1
cgacctcttcccgcacctagcaaatggtaagccaagaaagccaactgacggcattgcacatgagcagacaaagaaatgctgctgctgctattcaacgagatcgattctaacctcaaagcgcccagatcccaatgacgagctcgtcgacgatgtccaccacgttgcagtcgcgccatgggccccgaatgcgaaccccgtcgacatggcctggtccgttgtgccggtactgcgatccggcgacttgtcccattcgaccatccagttctcgccctcctcgtcggcgcttcagagcttcgccgtgaccctgcaacaggtggccccttcgaagctgtccagccacagccgcagcggcattgagatcctcgtcctcgacgttgctccccttccgctagacacggtgttcgtcaacctggagagcgaattgacaaaacggctggagagcggcgagggcaccttttacaaggaccatccgacangccccaatgccaaggacgttgccaacatgacgcccgaggagcgtctagccacg

SEQ ID NO: 2474 - DNA, 596 bp, Triticum aestivum
  Clone ID: uC-tsfl9316008c09b1
gctaacactttgttacatctacgcggatttggatttctttaacaactaaggttcctgtttttaacattttaaagccaagggcttttgcccatctccaatagctaacaagaactctttcttttctttacaaatcccaaaacctttactagactttttctgcttctttagcttacttcacctagagtcttctaccttttcttatcattgaatcaacccctttttttttttcttttaaacacatcccaacccaaagtataagcgcccacctagtcctatctagtccgaaaaatgcgaactagaactacatgagacactatctctgtcgttacgaacctaacactttctaccaagcttaatcggaataagacctcacaaacactcacaagttatatagggcttgaaagaaagtctaggtttgggtttgggttaactgctctaataaggagagtcagctacttggattaaaaagagtgatcaaaatgaataagaaaatccaagtattttacggtatccatgagttcacatttgatgcagacatgataattaaagattagattcacgttcaaattgatagggaatggtatcagaacatgaca

SEQ ID NO: 2475 - DNA, 516 bp, Triticum aestivum
  Clone ID: uC-tsfl9316008c10b1
gtgttctctgacctcttcccgcacctagcaaatggtaagccaagaaagccaactgacggtattgcacttgagcagacaaagaaatgctgctgctgctattcaacgagatcgattctaacctcaaagcgcccagatcccaatgacgagctcgtcgacgatgtccaccacgttgcagtcgcgccatgggccccgaatgcgaaccccgtcgacatggcctggtccgttgtgccggtactgcgatccggcgacttgtcccattcgaccatccagttctcgccctcctcgtcggcgcttcagagcttcgccgtgaccctgcaacaggtggccccttcgaagctgtccagccacagccgcagcggcattgagatcctcgtcctcgacgttgctccccttccgctagacacggtgttcgtcaacctggagagcgaattgacaaaacggctggagagcggcgagggcaccttttacaaggaccattcgacaagccccaatgccaaggacgttgccaacatgacg

SEQ ID NO: 2476 - DNA, 460 bp, Triticum aestivum
  Clone ID: uC-tsfl9316008c11b1
tgtaatccgacgcactatagggcatgctggtacgtctgaaagggccggtccgaatgcccggtgagagtcacgcgtatcaacaaggagaacagtggagaggtatgatggtagatacaaccatacttgccctatgacgatgcaagggcaaaggaaaagccttatattgatagcaagggtatttatgttattagaagacatgtgaaggttaaccttgtccgcaagcactgttctggagctaatgacttgggaagcgaggatatgcctggtgcaactagccatggtatgagggttcaagcatacctataagatggttactgacaagatatcgggacaaccgaggcaatctataaagcaacagtgggaattaccaaaaaaccaatacctgataccaggttctatgaccgctctgctccgatttacacacaatctagagacttgcctccttaaaggttatagatgc

SEQ ID NO: 2477 - DNA, 596 bp, Triticum aestivum
  Clone ID: uC-tsfl9316008c12b1
gctaacactttgttacatctacgcggatttggatttctttaacaactaaggttcctgtttttaacattttaaagccaagggcttttgcccatctccaatagctaacaagaactctttcttttctttacaaatcccaaaacctttactagactttttctgcttctttagcttacttcacctagagtcttctaccttttcttatcattgaatcaacccctttttttttttcttttaaacacatcccaacccaaagtataagcgcccacctagtcctatctagtccgaaaaatgcgaactagaactacatgagacactatctctgtcgttacgaacctaacactttctaccaagcttaatcggaataagacctcacaaacactcacaagttatatagggcttgaaagaaagtctaggtttgggtttgggttaactgctctaataaggagagtcagctacttggattaaaaagagtgatcaaaatgaataagaaaatccaagtattttacggtatccatgagttcaaatttgatgcagacatgataattaaagattagattcaggttcaaattgatagggaatggtatcagatcatgaca

SEQ ID NO: 2478 - DNA, 485 bp, Triticum aestivum
  Clone ID: uC-tsfl9316008d01b1
tcggccgccgcttcctcctctcgctccacgtcgcgctgctgctgctagtcccctgcacctgccaggtcggggattcgtgctcggcggcccgcgactgcggggtgggcctctactgcggcgattgcgccgccgccggccggacgcggccgtcctgcatcagggacctggccatccagcccacctccatcgtgaaggggctgccatttaacaggtactcatggctggtgacccataattcattctccatcgtcggcgagccgtcacgcaccggggttgagagggtcacattctacaaccaggaagacactgtcaccaaccaactcaggaatggagtgaggggattgatgctggatatgtatgacttcggcggggatgcctggctctgccactccttgcaagggcaatgctacaacttcactgctttcgaaccagcaattgacacgttgaaagaggtggaagcatttctatcccagaatcccacggag

SEQ ID NO: 2479 - DNA, 602 bp, Triticum aestivum
  Clone ID: uC-tsfl9316008d03b1
gctctcaagctcaacactttgttacatctagcggatttggatttctttaacaactaaggttcctgtttttaacattttaaagccaagggcttttgcccatctccaatagctaacaagaactctttcttttctttacaaatcccaaaacctttactagactttttctgcttctttagcttacttcacctagagtcttctaccttttcttatcattgaatcaacccctttttttttttcttttaaacacatcccaacccaaagtataagcgcccacctagtcctatctagtccgaaaaatgcgaactagaactacatgagacactatctctgtcgttacgaacctaacactttctaccaagcttaatcggaataagacctcacaaacactcacaagttatatagggcttgaaagaaagtctaggtttgggtttgggttaactgctctaataaggagagtcagctacttggattaaaaagagtgatcaaaatgaataagaaaatccaagtattttacggtatccatgagttcaaatttgatgcagacatgataattaaagattagattcaggctcaaaatgatagggaatggtatcagatcatga

SEQ ID NO: 2480 - DNA, 564 bp, Triticum aestivum
  Clone ID: uC-tsfl9316008d04b1
gtgtacccctacctctttccgcacctagcaaatggtaagccaagaaagccaactgacggcattgcacttgagcagtcaaagaaatgctgctgctgctattcaacgagatcgattctaacctcaaagcgcccagatcccaatgacgagctcgttgacgatgtccaccacgttgcagtcgcgccatgggccccgaatgcgaaccccgtcgacatggcctggtccgttgtgccggtactgcgatccggcgacttgtcccattcgaccatccagttctcgccctcctcgtcggcgcttcatagctttgccgtgaccctgcaacaggtggccccttcgaagctgttcagccacagccgcagcggtattgagatcctcgtactcgacgttgctccccttccgctagacacggtgttcgtcaacctggagagcgaattgacaaaacggatggagagcggcgagggcaccttttacaaggaccatccgacaagccccaatgccaaggacgttgccaacatgacgcccgaggagcgtctagccacggcgctcatggcagctctcagcaccctc

SEQ ID NO: 2481 - DNA, 581 bp, Triticum aestivum
  Clone ID: uC-tsfl9316008d05b1
gctaacactttgttacatctagcggatttggatttctttaacaactaaggttcctgtttttaacattttaaagccaagggcttttgcccatctccaatagctaacaagaactctttcttttctttacaaatcccaaaacctttactagactttttctgcttctttagcttacttcacctagagtcttctaccttttcttatcattgaatcaacccctttttttttttcttttaaacacatcccaacccaaagtataagcgcccacctagtcctatctagtccgaaaaatgcgaactagaactacatgagacactatctctgtcgttacgaacctaacactttctaccaagcttaatcggaataagacctcacaaacactcacaagttatatagggcttgaaagaaagtctaggtttgggtttgggttaactgctctaataaggagagtcagctacttggattaaaaagagtgatcaaaatgaataagaaaatccaagtattttacggtatccatgagttcaaatttgatgcagacatgataattaaggattagattcaggttcaaattgatagggaatggt

SEQ ID NO: 2482 - DNA, 591 bp, Triticum aestivum
  Clone ID: uC-tsfl9316008d08b1
tttggtacatgtaccggatttggatttctttaacaactaaggctgctgcttttaacattttaaagtcaagggcttttgcccatctccaatagctaacaagaactctttcttttctttacaaattccaaaacctttactagactttttctgcttctttagcttacttcacctagagtcttctaccttttcttatcattgaatcaacccctttttttatttattttaaacacatcccaacccaaagtataagcgcccacctagtgctatctagtccgaaaaatgcgaactagaactacatgagacactatctctgtcgttacgaacctaacactttctaccaagcttaattggaataagacctcacaaacactcacaagttatatagggcttgaaagaaagtctaggtttgggtttgggttaactgctctaataaggagagtcagctacttggattaaaaagagcgatcaaaatgaataagaaaatccaagtattttacggtatgcatgagttcaaagttgatgcagacatgattattaacgattagattcaggttcaaattgatagggaatggtatcagatcatgacagtgt

SEQ ID NO: 2483 - DNA, 567 bp, Triticum aestivum
  unsure (1)..(567): unsure at all n locations
  Clone ID: uC-tsfl9316008d09b1
gctaacactttgttacatgtagcggatttggatttctttaacaactaagggtcctgtttttaacattttaaagccaagggcttttgcccatctccaatagctaacaagaactctttcttttctttacaaattccaaaacctttactagactttttctggttctttagcttacttcacctagagtgttctaccttttcttatcattgaatcaaccccttttttttttacttttaaacacatcccaacccaaagtataagcgcccacctagtgctatctagtccgaaaaatgcgaactagaactacatgagacactatctctgtggttacgaacctaacactttctaccaagncttaattggaataagacctcacaaacactcacaagttatatagggcttgaaagaaagtctaggtttgggtttgggttaactgctctaataaggagagtcagctacttggattaaaaagagtgatcataatgaataagaaaatccaagtattttacggtatgcatgagttcaacattgatgcagacatgataattaaagattagattcaggttcaaa

SEQ ID NO: 2484 - DNA, 477 bp, Triticum aestivum
  Clone ID: uC-tsfl9316008d10b1
gtgttctattacctcttcccgcacctagcaaatggtaagccaagaaagccaactgacggtattgcatttgagcagacaaagaaatgctgctgctgttattcaacgagatcgattttaacctcaaagcgcccagatcccaatgacgagctcgtcgacgatgtccaccacgttgcagtcgcgccatgggccccgaatgcgaaccccgtcgacatggcctggtccgttgtgccggtactgcgatccggcgacttgtcccattcgaccattcagttctcgccctcctcgtaggtgcttcagagctttgccgtgaccctgcaacaggtggccccttcgaagctgcccagtcacagccgcagcggattgagatcctcgtcctcgacgttgcttccctgtcgctagacacggtgttcgttaacctggagagcgaattgacaaaaccgctggagagtcgctagggcaccttttacaaggaccatt

SEQ ID NO: 2485 - DNA, 514 bp, Triticum aestivum
  unsure (1)..(514): unsure at all n locations
  Clone ID: uC-tsfl9316008d12b1
tgttctccgacctcttcccgcacctagcaaatggtaagccaagaaagccaactgacggtattgcatatgagcagacaaagaaatgctgctgctgctattcaacgagatcgattctaacctcaaagcgcccagatcccaatgacgagctcgtcgacgatgtccaccacgttgcagtcgcgccatgggccccgaatgcgaaccccgtcgacatggcctggtccgttgtgccggtactgcgatccggcgacttgtcccattcgaccatccagttctcgccctcctcgtcggcgcttcagagcttcgccgtgaccctgcaacaggtggccccttcgaagctgtccagccacagccgcagtggcattgagatcctcgtcctcgacgttgctccccttccgctagacacggtgttcgtcaacctggagagcgaattgacaaaacggctggagagcggtgagggcaccttttacaaggaccatccgacangccccaatgccaaggacgttgtcaacatgac

SEQ ID NO: 2486 - DNA, 602 bp, Triticum aestivum
  Clone ID: uC-tsfl9316008e02b1
gctctcaagctcaacactttgttacatctagcggatttggatttctttaacaactaaggttcctgtttttaacattttaaagccaagggcttttgcccatctccaatagctaacaagaactctttcttttctttacaaatcccaaaacctttactagactttttctgcttctttagcttacttcacctagagtcttctaccttttcttatcattgaatcaacccctttttttttttcttttaaacacatcccaacccaaagtataagcgcccacctagtcctatctagtccgaaaaatgcgaactagaactacatgagacactatctctgtcgttacgaacctaacactttctaccaagcttaatcggaataagacctcacaaacactcacaagttatatagggcttgaaagaaagtctaggtttgggtttgggttaactgctctaataaggagagtcagctacttggattaaaaagagtgatcaaaatgaataagaaaatccaagtattttacggtatccatgagttcaaatttgatgcagacatgataattaaagattagattcaggttcaaattgatagggaatggtatcagatcatga

SEQ ID NO: 2487 - DNA, 457 bp, Triticum aestivum
  Clone ID: uC-tsfl9316008e03b1
cttcccgcacctagcaaatggtcagccacgaatgccgactgacggctttgcacttgagcagacaaagatatgctgctgctgctattcatcgagatcgattcttacctcatagcgcccagaccccaacgacgagctcgtcgacgaggtccaccacgttgcagttgcgccatgggccccgcttgcgaaccccgtcgacatggcctggtccgttgtgccggtactgcgatccggcgacttgtcccattcgaccatccagttctcgccctcctagtaggagcttaatagctctgccgggaccctgcaacaggtggccccttggaagctgttcagccacaggctgagcgggattgagatcctcgtcctcgacgttgctacccttccgctagacacagagttcgtcaacctggagagcgaatcgacaaaaccgctggagagcggcgagggcaccttttacaag

SEQ ID NO: 2488 - DNA, 325 bp, Triticum aestivum
  Clone ID: uC-tsfl9316008e04b1
ggaaatttggcacgactgccggtaccggcaacggaattcccgtttcggcccttgcgtttgaatttttcatgcacacctgcaaaggagctcatgagtaaaaaatgcttatataggagctatattcgctgcaagttgaacggagtgagtttgagaaccacatgggaaggacacatggatcctcacgtttattgccggtgagccgaggagtccatgaccaggggtgaatttgttggccgctgtgatttctttgagcgaacaactgaagcgagctactgaactaactgggaccatatgagcaccctggttgcttttagccaggttgatg

SEQ ID NO: 2489 - DNA, 610 bp, Triticum aestivum
  Clone ID: uC-tsfl9316008e05b1
gctaacactttgtacatctagcggatttggatttctttaacaactaaggttcctgtttttaacattttaaagccaagggcttttgcccatctccaatagctaacaagaactctttcttttctttacaaatcccaaaacctttactagactttttctgcttctttagcttacttcacctagagtcttctaccttttcttatcattgaatcaacccctttttttttttcttttaaacacatcccaacccaaagtataagcgcccacctagtcctatctagtccgaaaaatgcgaactagaactacatgagacactatctctgtcgttacgaacctaacactttctaccaagcttaatcggaataagacctcacaaacactcacaagttatatagggcttgaaagaaagtctaggtttgggtttgggttaactgctctaataaggagagtcagctacttggattaaaaagagtgatcaaaatgaataagaaaatccaagtattttacggtatccatgagttcaaatttgatgcagacatgataattaaagattagattcaggttcaaattgatagggaatggtatcagatcatgacagtgtggtcgagtagag

SEQ ID NO: 2490 - DNA, 592 bp, Triticum aestivum
  Clone ID: uC-tsfl9316008e06b1
ctttgttcatctagcggatttggatttctttaacaactaaggttcctgtttttaacattttaaagctcaagggcttttgcccatctccaatagctaacaagaactctttcttttctttacaaatcccaaaacctttactagactttttctgcttctttagcttacttcacctagagtcttctaccttttcttatcattgaatcaacccctttttttttttcttttaaacacatcccaacccaaagtataagcgcccacctagtcctatctagtccgaaaaatgcgaactagaactacatgagacactatctctgtcgttacgaacctaacactttctaccaagcttaatcggaataagacctcacaaacactcacaagttatatagggcttgaaagaaagtctagggttgggtttgggttaactgctctaataaggagagtcagctacttggattaaaaagagtgatcaaaatgaataagagaatccaagtattctacggtattcatgagttcaaatttgatgcagacatgataattaaagattagattcaggttcacattgatagggaatggtatcagatcatgacagtgt

SEQ ID NO: 2491 - DNA, 458 bp, Triticum aestivum
  Clone ID: uC-tsfl9316008e07b1
gctaacactttgtacatctacgcggatttggatttctttaacaactaaggtttctgtgtttaacattttaaagttaagggcttttgcccatctccaatagctagcaagaactctttcttttctttacaaatcccaaaacctttactagactttagctgcttctttagcttacttcacctagaggcttctaccttttcttatcattgaatcaaccccttttctttttttttttaaacacataccaccccacagtataagcgcccacctagtcctatctagtccgaaaaatgcgaactagaactacatgagacactatctctggtgttacgagcctaacactttttaccaagcttaatgggaataaggccttagaaacactcacaagttatatagggcttgaaagaaagtctagggtcgggattgggttaactgctataatatcgagagttagctagttg

SEQ ID NO: 2492 - DNA, 466 bp, Triticum aestivum
  Clone ID: uC-tsfl9316008f01b1
gctaacactttgtttcatgtagcggatttggatttctttaacaactaaggctgctgcctttaacattttaaagccaagggcttttgcccatctccaataactaacaagaactctttcttttctttacatattccataacctttactagactttgtccgctcaatttagcttacttaacctagagtcttgtaccttttcttatgattgaatcaacccctttttttttttattttaaacacatcccaacccaatgtataagcgcccacctagtcctatctagtccgaaaaatgcgaactagaactacatgagacactatctctgtcgttacgaacctaacactttctaccaggcttaattggaatatgacctcacaaacactcacaagttatatagggctcgaaagaaagtccaagcttgggcttgggctaaccgctctaataaggagagtcagctacttggattaaa

SEQ ID NO: 2493 - DNA, 559 bp, Triticum aestivum
  Clone ID: uC-tsfl9316008f03b1
gctctcaagctcaacactttgttacatctcgcggatttggatttctttaacaactaaggttcctgtttttaacattttaaagccaagggcttttgcccatctgcaatagctaacaagaactctttcttttctttacaaatcccaaaacctttactagactttttctggttctctagcttacttcacctagaggcttctaccttttcttatcattgaatcaacccctttttttttttcttttaaacacatcccaacccaaagtataagcgcccacctagtcctatctagtccgaaaaatgcgaactagaactacatgagacactatctctgtggttacgaacctaacactttctaccaagcttaatcggaataagacctcacaaacactcacaagttatatagggcttgacagaaagtctaggctcgggtttgggttaactgctctacaaaggagaggcagctacttggattaaaacgagtgatcaacatgaatgagaaaatccaaggattttacggtatccatgagctcaaatttgatgcacacatgacaattaaagat

SEQ ID NO: 2494 - DNA, 91 bp, Triticum aestivum
  Clone ID: uC-tsfl9316008f04b1
ttggcacgtatgcaggggccggtcacgaatgccggctgtcggctttgcatttgagctttaaggcaatgctgcagctgcgattcaacggctg

SEQ ID NO: 2495 - DNA, 596 bp, Triticum aestivum
  Clone ID: uC-tsfl9316008f06b1
gctaacactttgttacatctcgcggatttggatttctttaacaactaagggtcctgtttttaacattttaaagctcaagggcttttgcccatctccaatagctaacaagaactctttcttttctttacaaatcccaaaacctttactagactttttctgcttctttagcttacttcacctagaggcttctaccttttcttatcattgaatcaacccctttttttttttcttttaaacacatcccaacccaaagtataagcgcccacctagtcctatctagtccgaaaaatgcgaactagaactacatgagacactatctctgtcgttacgaacctaacactttctaccaagcttaatcggaataagacctcacaaacactcacaagttatatagggcttgaaagaaagtctaggtttgggtttgggttaactgctctaataaggagagtcagctacttggattaaaaagagtgatcaaaatgaatacgaaaatccaagtattttacggcatccatgagttcacatttgatgcggacatgataattaaagattaggatcaggttcaaattgatagggaatgggtttagatcatgaca

SEQ ID NO: 2496 - DNA, 603 bp, Triticum aestivum
  Clone ID: uC-tsfl9316008f07b1
tcagctaacactttgttacatctacgcggatttggatttctttaacaactaaggttcctgtttttaacattttaaagccaagggcttttgcccatctccaatagctaacaagaactctttcttttctttacaaatcccaaaacctttactagactttttctgcttctttagcttacttcacctagagtcttctaccttttcttatcattgaatcaacccctttttttttttcttttaaacacatcccaacccaaagtataagcgcccacctagtcctatctagtccgaaaaatgcgaactagaactacatgagacactatctctgtcgttacgaacctaacactttctaccaagcttaatcggaataagacctcacaaacactcacaagttatatagggcttgaaagaaagtctaggtttgggtttgggttaactgctctaataaggagagtcagctacttggattaaaaagagtgatcaaaatgaataagacaatccaagtattttacggtatccatgagttcaaatttgatgcagacatgataattaaagattagattcaggttcaaattgatagggaatggtatcagatcatgacagtgt

SEQ ID NO: 2497 - DNA, 264 bp, Triticum aestivum
  Clone ID: uC-tsfl9316008f09b1
gatacccggctcggtgcgtgttgagctgacctctgatgacgtcggtgggtcggacaaggtggctggagtacggccctggggggtcattgttgctatggggaggagaccatgacgatagaaggagtgtacggacgtctgagctggttgggggaacgactgaacggagatgtaagcctggctgagcagaatgacgaacataggatgttcgtgtagcttggagtggaggaggacttatgatgacgtcgaagcctagagattggcact

SEQ ID NO: 2498 - DNA, 187 bp, Triticum aestivum
  Clone ID: uC-tsfl9316008f10b1
atcaatcataacctgatggtggtgcatagctgaccgtcaagagtttgtgtccgacacactagcgtgtaatgggccttgggcccattggcatctgggaggaatgcacgggaacgatgagctgaacggccatctccctacttgggtgatcaaccatacagtgatggccctctgacggggacctacgaag

SEQ ID NO: 2499 - DNA, 431 bp, Triticum aestivum
  Clone ID: uC-tsfl9316008f12b1
gggattgctttaacgactatgctgctgcctttaacattggaggccacggctatcgccctgtgagtcactaacgagaactctttattttttttcatgttggcatgaccttgactagactgtgtccgctcactttggcttacttaaggtcctgcggtgtccctgtttttatgagggggagaacctgtctaatgatgaattgaaagcacatcctacctcgatgggtagagcaaccacctcgtgctatctagttcgcagagtgcaaacaagaactgcatgatacacgttctctgttgatagaggccttcgctgaatacacggctaaattggaaattgacctcacatacactcacaagtgattgggggatcgatggagagtctaggtttgggttcgtggtaactgatctaataatgagaggtggcttcttggatta

SEQ ID NO: 2500 - DNA, 583 bp, Triticum aestivum
  Clone ID: uC-tsfl9316008g02b1
gctctcaagctcaacactttgttacatctagcggatttggatttctttaacaactaaggttcctgtttttaacattttaaagccaagggcttttgcccatctccaatagctaacaagaactctttcttttctttacaaatcccaaaacctttactagactttttctgcttctttagcttacttcacctagagtcttctaccttttcttatcattgaatcaacccctttttttttttcttttaaacacatcccaacccaaagtataagcgcccacctagtcctatctagtccgaaaaatgcgaactagaactacatgagacactatctctgtcgttacgaacctaacactttctaccaagcttaatcggaataagacctcacaaacactcacaagttatatagggcttgaaagaaagtctaggtttgggtttgggctaactgctctaataaggagagtcagctacttggataaaaagagtgatcaaaatgaataagaaaatccaagtattttacggtatccatgagttcaaatttgatgcagacatgataattaaagattagaatcaggttcaaattgataggg

SEQ ID NO: 2501 - DNA, 557 bp, Triticum aestivum
  Clone ID: uC-tsfl9316008g04b1
cgacctcttcccgcacctagcacatggtaagccaagaaagccaactgacggcattgcacttgagcatgtcaaagaaatgctgctgctgctattcaacgagatcgattctaacctcaaagcgcccagatcccaatgacgagctcgtcgacgatgtccaccacgttgcagtcgcgccatgggccccgaatgcgaaccccgtcgacatggcctggtccgttgtgccggtactgcgatccggcgacttgtcccattcgaccatccagttctcgccctcctcgtcggcgcttcagagcttcgccgtgaccctgcaacaggtggccccttcgaagctgttcagtcacaggcgcagtggcattgagatcctcgacctcgacgttgctccccttccgctagacacggtgttcgtcaacctggagagcgaattgacaaaacggctggagagcggcgagggcaccttttacaaggaccatacgacaagccccaatgccaaggacgttgccaacatgacgcccgaggagcgtctagccacggcgctcacggcagttttcagcaccctc

SEQ ID NO: 2502 - DNA, 538 bp, Triticum aestivum
  Clone ID: uC-tsfl9316008g05b1
gctaacactttgtacatctacgcggatttggatttctttaacaactaaggttcctgtttttaacattttaaagccaagggcttttgcccatctccaatagctaacaagaactctttcttttctttacaaatcccaaaacctttactagactttttctgcttctttagcttacttcacctagagtcttctaccttttcttatcattgaatcaacccctttttttttttcttttaaacacatcccaacccaaagtataagcgcccacctagtcctatctagtccgaaaaatgcgaactagaactacatgagacactatctctgtcgttacgaacctaacactttctaccaagcttaatcggaataagacctcacaaacactcacaagttatatagggcttgaaagaaagtctaggtttgggtttgggttaactgctctaataaggagagtcagctacttggattaaaagagtgatcaaaatgaataagaaatccaagattttacggtatccatgagttcaatttgatgcagacatgataa

SEQ ID NO: 2503 - DNA, 386 bp, Triticum aestivum
  Clone ID: uC-tsfl9316008g06b1
ggcatgaaagcccactgacggttttggattttagctttttaagaaatgcgtgctgttgctctttaacgagagcgatactaactttattgcgcctagacaccaacgacgagcttgactagaatgttcacgacgttgcagcttactcatgcggcccggattgccaactcccttatacttggactgacccgttgtgccggtactgtgaaccggagactagtcccatgtgtccatgcacatctagtcctatgtggtggcgataaagagatctagaacgacatgagacaggtggtctgctcgtacgtgcctaacactatgcgccaaggtgatgagaaattagacctccacgctgctcccatgttgtttgacagctgggatcaaagtcccgg

SEQ ID NO: 2504 - DNA, 584 bp, Triticum aestivum
  Clone ID: uC-tsfl9316008g07b1
ctttgttacatctcgcggatttggatttctttaacaactaaggttcctgtgtttaacattttaaagttcaagggcttttgcccatctccaatagctaacaagaactctttcttttctttacaaatcccaaaacctttactagacttttgctgcttctttagcttacttcacctagagtcttctaccttttcttatcattgaatcaacccctttttttttttcttttaaacacatcccaccccaaagtataagcgcccacctagtcctatctagtccgaaaaatgcgaactagaactacatgagacactatctctgtcgttacgaacctaacactttctaccaagcttaatcggaataagacctcacaaacactcacaagttatatagggcttgaaagaaagtctaggtttgggtttgggttaactgctctaataaggagagtcagctacttggattaaaaagagtgatcgaaatgaataagagaatccaagtattttacggtatccatgagttcaaatttgatgcagacatgataattaaagattagattcaggttcaaattgatagggaatggtatcagatca

SEQ ID NO: 2505 - DNA, 513 bp, Triticum aestivum
  Clone ID: uC-tsfl9316008g08b1
gtgttctccgacctcttcccgcacctagcaaatggtaagccaagaaagccaactgacggtattgcacttgagcagacaaagaaatgctgctgctgctattcaacgagatcgattctaacctcaaagcgcccagatcccaatgacgagctcgtcgacgatgtccaccacgttgcagtcgcgccatgggccccgaatgcgaaccccgtcgacatggcctggtccgttgtgccggtactgcgatccggcgacttgtcccattcgaccatccagttctcgccctcctcgtcggcgcttcagagcttcgccgtgaccctgcaacaggtggccccttcgaagctgtccagccacagccgcagcggcattgagatcctcgtcctcgacgttgctccccttccgctagacacggtgttcgtcaacctggagagcgaattgacaaaacggttggagagcggcgagggcaccttttacaaggaccatccgacaagcccaatgccaggacgttgccacatgacg

SEQ ID NO: 2506 - DNA, 527 bp, Triticum aestivum
  unsure (1)..(527): unsure at all n locations
  Clone ID: uC-tsfl9316008g09b1
gtgttctccgacctcttcccgcacctagcaaatggtaagccaagaaagccaactgacggtattgcatatgagcagacaaagaaatgctgctgctgctattcaacgagatcgattctaacctcaaagcgcccagatcccaatgacgagctcgtcgacgatgtccaccacgttgcagtcgcgccatgggccccgaatgcgaaccccgtcgacatggcctggtccgttgtgccggtactgcgatccggcgacttgtcccattcgaccatccagttctcgccctcctcgtcggcgcttcagagcttcgccgtgaccctgcaacaggtggccccttcgaagctgtccagccacagccgcagcggcattgagatcctcgtcctcgacgttgctccccttccgatagacacggtgttcgtcaacctggagagcgaattgacaaaacggctggagagcggcgagggcaccttttacaaggaccatncgacaggccccaatgccaaggacgttgtcaacatgacgcccgaggagcg

SEQ ID NO: 2507 - DNA, 516 bp, Triticum aestivum
  Clone ID: uC-tsfl9316008g12b1
gtgttcttcgacctcttcccgcacctagcaaatggtaagccaagaaagccaactgacggttttgcacttgagcagacaaagaaatgctgctgctgctattcaacgagatcgattctaacctcaaagcgcccagatcccaatgacgagctcgtcgacgatgtccaccacgttgcagtcgcgccatgggccccgaatgcgaaccccgtcgacatggcctggtccgttgtgccggtactgcgatccggcgacttgtcccattcgaccatccagttctcgccctcctcgtcggcgcttcagagctttgccgggaccctgcaacaggtggccccttcgaagctgttcagccacaggcgtagcggcattgagatcctcgtactcgacgttgctccccttccgctagacacggtgttcgtcaacctggagagcgaattgacaaaacggctggagagcggcgagggcaccttttacaaggaccatacgacaagccccaatgccaaggacgttgccaacatgacg

SEQ ID NO: 2508 - DNA, 470 bp, Triticum aestivum
  Clone ID: uC-tsfl9316008h02b1
gctcaacactttgatacatctagcggatttggatttctttaacaactaaggctcctgcctttaacattttaaagccaagggcttttgcccatctccaatagctaacaagaactctttcttttctttacaaatcccaaaacctttactagactttttctgcttatttagcttacttcacctagagtcttctaccttttcttatcattgaatcaaccccttttttttttttttttaaacacatcccaacccaaagtataagcgcccacctagtcctatctagcccgaaaaatgcgaactagaactacatgagacactatctctgtcgttacgaacctaacactttctaccaagctcaatcggaataagacctcacaaacactcacaagttatatagggcttgaaagaaagcctaggcttgggtttcgggtaactgctccaaaaaggagagtcagctccctggattaaaaaga

SEQ ID NO: 2509 - DNA, 604 bp, Triticum aestivum
  Clone ID: uC-tsfl9316008h03b1
cttgtgctctcaagctaacactttgttcatctagcggatttggatttctttaacaactaaggttcctgtttttaacattttaaagccaagggcttttgcccatctccaatagctaacaagaactctttcttttctttacaaatcccaaaacctttactagactttttctgcttctttagcttacttcacctagagtcttctaccttttcttatcattgaatcaacccctttttttttttcttttaaacacatcccaacccaaagtataagcgcccacctagtcctatctagtccgaaaaatgcgaactagaactacatgagacactatctctgtcgttacgaacctaacactttctaccaagcttaatcggaataagacctcacaaacactcacaagttatatagggcttgaaagaaagtctaggcttgggtttgggttaactgctctaaaaggagagtcagctacttggattaaaaagagtgatcaaaatgaataagaaaatccaagtattttacggtatccatgagttcacatttgatgcagacatgataattaaagattagattcaggttcaaactgatagggaatggtatcagatcatga

SEQ ID NO: 2510 - DNA, 600 bp, Triticum aestivum
  Clone ID: uC-tsfl9316008h04b1
ttcagctaacactttgttacatctagcggatttggatttctttaacaactaaggttcctgtttttaacattttaaagccaagggcttttgcccatctccaatagctaacaagaactctttcttttctttacaaatcccaaaacctttactagactttttctgcttctttagcttacttcacctagagtcttctaccttttcttatcattgaatcaacccctttttttttttcttttaaacacatcccaacccaaagtataagcgcccacctagtcctatctagtccgaaaaatgcgaactagaactacatgagacactatctctgtcgttacgaacctaacactttctaccaagcttaatcggaataagacctcacaaacactcacaagttatatagggcttgaaagaaagtctaggtttgggtttgggttaactgctctaataaggagagtcagctacttggattaaaaagagtgatcaaaatgaataagaaaatccaagtattttacggtatccatgagttcaaatttgatgcagacatgataattaaagattagattcaggttcaaattgatagggaatggtatagatcatgacagt

SEQ ID NO: 2511 - DNA, 495 bp, Triticum aestivum
  unsure (1)..(495): unsure at all n locations
  Clone ID: uC-tsfl9316008h05b1
gctcaacactttgttacatctacgcggatttggatttctttaacaactaaggttcctgtttttaacattttaaagccaagggcttttgcccatctccaatagctaacaagaactctttcttttctttacaaatcccaaaacctttactagactttttctgcttctttagcttacttcacctagagtcttctaccttttcttatcattgaatcaacccctttttttttttcttttaaacacatcccaacccaaagtataagcgcccacctagtcctatctagtccgaaaaatgcgaactagaactacatgagacactatctctgtcgttacgaacctaacactttctaccaagcttaatcggaataagacctcacanacactcacaagttatatagggcttgaaagaagtctagggttggggttgggttaactgctctaataaggagagtcagctactgggattaaaaagagtgatcaaaatgaataagaaaatcc

SEQ ID NO: 2512 - DNA, 595 bp, Triticum aestivum
  Clone ID: uC-tsfl9316008h06b1
gctaacactttgttacatctacgcggatttggatttctttaacaactaaggttcctgtttttaacattttaaagccaagggcttttgcccatctccaatagctaacaagaactctttcttttctttacaaatcccaaaacctttactagactttttctgcttctttagcttacttcacctagagtcttctaccttttcttatcattgaatcaacccctttttttttttcttttaaacacatcccaacccaaagtataagcgcccacctagtcctatctagtccgaaaaatgcgaactagaactacatgagacactatctctgtcgttacgaacctaacactttctaccaagcttaatcggaataagacctcacaaacactcacaagttatatagggcttgaaagaaagtctaggtttgggtttgggttaactgctctaataaggagagtcagctacttggattaaaaagagtgatcaaaatgaataagaaaatccaagtattttacggtatccatgagttcaaatttgatgcagacatgataattaaagattagattcaggttcaaattgatagggaatggtatcagatcatgac

SEQ ID NO: 2513 - DNA, 595 bp, Triticum aestivum
  unsure (1)..(595): unsure at all n locations
  Clone ID: uC-tsfl9316008h08b1
gctaacactttgttacatctagcggatttggatttctttaacaactaaggttcctgtttttaacattttaaagccaagggcttttgcccatctccaatagctaacaagaactctttcttttctttacaaatcccaaaacctttactagactttttctgcttctttagcttacttcacctagagtcttctaccttttcttatcattgaatcaacccctttttttttttcttttaaacacatcccaacccaaagtataagcgcccacctagtcctatctagtccgaaaaatgcgaactagaactacatgagacactatctctgtcgttacgaacctaacactttctaccaagcttaatcggaataagacctcacaaacactcacaagttatatagggcttgaaagaaagtctaggtttgggtttgggttaactgctctaataaggagagtcagctacttggattaaaaagagtgatcaaaatgaataagacaatccaagtattttacggtatccatgagttcaaatttgatgcagacatgataattaacgattagattcagggtcaaatngataggggatggtatcagatcatgaca

SEQ ID NO: 2514 - DNA, 458 bp, Triticum aestivum
  Clone ID: uC-tsfl9316008h12b1
atctggatctaccttaacaactatcgattctgattttaacattttaaagccaagggctattgcccatctccaatagctaacaagaactctttctcttctttacaaaccccaaaacacgatactagacgtttcctgcttcaatagcttacataacctacagcctcctaccttgtcttatcatcgactcaacccctttttttttattgcttgaaccacatcccagcctaaagtatcagcccccccttagtcctatgctagtccgcaaaatgctaactagaactacatgagacactctctatgtggttacgaacctaacactatctaccaagcttaatgggaataagacctctcaaacactcacatgttatttagggcttgacagaaagtccttgattgtgatcggcctaactgctctaataggagagtcgctacttggactaaaaagagcgacctaaatg

SEQ ID NO: 2515 - DNA, 487 bp, Triticum aestivum
  Clone ID: uC-tsfl9316009a08b1
tcagctaccactttgttacatctagcggatttggatttctttaacaactaaggttcctgcctttaacattttaaagccaagggcttctgcccatctccaatagctgacaagaactctttcttttctttacaaatcccaaaacctttactagactttgtctgcttctttagcttacttcacctagagtcttctaccttttcttatcattgaatcaacccctttttttttttcttttaaacacatcccaacccaatgtataatgcgcccacctagtcctatctagtccgaaaaatgcgaactagaactacatgagacactatctctgtcgttacgaacctaacactttctaccaagcttaatcggaataagacctcacaaacactcacaagttatatagggcttgaaagaaagtctaggttcgggtttgggttaactgctctaataaggagagtcagctacttggattaaaaagagtgatcaaaatgaa

SEQ ID NO: 2516 - DNA, 516 bp, Triticum aestivum
  Clone ID: uC-tsfl9316009b07b1
gtcagagttctccgacctcttcccgcacctagcaaatggtaagccaagaaagccaactgacggcattgcacttgagctgacaaagaaatgctgctgctgctattcaacgagatcgattctaacctcaaagcgcccagatcccaatgacgagctcgtcgacgatgtccaccacgttgcagtcgcgccatgggccccgaatgcgaaccccgtcgacatggcctggtccgttgtgccggtactgcgatccggcgacttgtcccattcgaccatccagttctcgccctcctcgtcggcgcttcagagcttcgccgtgaccctgcaacaggtggccccttcgaagctgtccagccacagccgcagcggcattgagatcctcgtcctcgacgttgctccccttccgctagacacggtgtttcgtcaacctggagagcgaattgacaaaacggctggagagcggcgagggcaccttttacaaggaccatccgacatgcccaatgccaggacgttgccacatga

SEQ ID NO: 2517 - DNA, 423 bp, Triticum aestivum
  Clone ID: uC-tsfl9316009b08b1
tcctacctcttcccgcacctagcaaatggtaagccaagaaagccaactgacggcattgcacttgagcttacaaagaaatgctgctgctgctattcaacgagatcgattctaacctcaaagcgcccagatcccaatgacgagctcgtcgacgatgtccaccacgttgcagtcgcgccatgggccccgaatgcgaaccccgtcgacatggcctggtccgttgtgccggtactgcgatccggcgacttgtcccattcgaccatccagttctcgccctcctcgtcggcgcttcagagctttgccgtgaccctgcaacaggtggccccttcgaagctgtccagccacagccgcagcggcatttggatcctcgttctcgacgttgcttccccttccgcttgacacggttgttcgtcaacctggagagcg

SEQ ID NO: 2518 - DNA, 543 bp, Triticum aestivum
  unsure (1)..(543): unsure at all n locations
  Clone ID: uC-tsfl9316009b10b1
ttggcgacagtgctttcgcatgagattgggcacgctatcgcgaggcacttgccagagatgatcaccaagggcatgtggtttactatcctgcagcttatcgtcctacagtttatttacatgccagacttaattaatgcaatgtcgacattactcctcagactgcccttctcacgaaggatggaggtagaggcagatcacatcgggctcatgcttcaagcatctgctggttttgacccacgcaccgctcccaaggtctacgagaagctaggacaaatcgcgggcaatcaatcagtactgaaaagctacctctctactcatccttcgagtaagaagcgatcggagctcttgtctcgagccaaggtaatggaggaggcgatgcagctatacagggaagcttgcgccggccacgggaccgaaggtttcctctaaggttgcagtttcgaactctcctgcgtgcggcgtaagtcgtttggtggcggagggtgcctggcgccgaaacatgcccctttgtgnctgcacagtgacggccaataagaagagtgt

SEQ ID NO: 2519 - DNA, 493 bp, Triticum aestivum
  Clone ID: uC-tsfl9316009b11b1
tcagtgttctcctgcctcttcccgcaccttgcaaatggtaagccaagaaagccaactgacggcattgcacttgagctgacaaagaaatgctgctgctgctattcaacgagatcgattctaacctcaaagcgcccagatcccaatgacgagctcgtcgacgatgtccaccacgttgcagtcgcgccatgggccccgaatgcgaaccccgtcgacatggcctggtccgttgtgccggtactgcgatccggcgacttgtcccattcgaccatccagttctcgccctcctcgtcggcgcttcagagcttcgccgcgaccctgcaacaggtggccccttcgaagctgtccagccacagccgcagcggcattgagatcctcgtcctcgacgttgctccccttccgctagacacggtgttcgtcaacctggagagcgaattgacaaaacggctggagagcggcgagggcaccttttacaaggaccatccgacaagcccca

SEQ ID NO: 2520 - DNA, 605 bp, Triticum aestivum
  Clone ID: uC-tsfl9316009b12b1
tgctctcaagctcaacactttgttacatctagcggatttggatttctttaacaactaaggttcctgtttttaacattttaaagccaagggcttttgcccatctccaatagctaacaagaactctttcttttctttacaaatcccaaaacctttactagactttttctgcttctttagcttacttcacctagagtcttctaccttttcttatcattgaatcaacccctttttttttttcttttaaacacatcccaacccaaagtataagcgcccacctagtcctatctagtccgaaaaatgcgaactagaactacatgagacactatctctgtcgttacgaacctaacactttctaccaagcttaatcggaataagacctcacaaacactcacaagttatatagggcttgaaagaaagtctaggtttgggtttgggttaactgctctaataaggagagtcagctacttggattaaaaagagtgatcaaaatgaataagaaaatccaagtattttacggtatccatgagttcaaatttgatgcagacatgataattaaagattagattcaggttcaaattgatagggaatggtatcagatcatgaca

SEQ ID NO: 2521 - DNA, 502 bp, Triticum aestivum
  Clone ID: uC-tsfl9316009c09b1
cctcttcccgcacctagcaaatggtaagccatgaatgccaactgacggtattgcactcgagctttcaaagaaatgctgctgctgctattcaaggagatcgattttaacctcaaagcgcccagaccccaacgacgagcttgtctacgatgtccaccacgttgctgtagctccatgggccccgaatgcgaacccctgttacatggcctggcccgttgtgccggtactgcgatccggcgacttgccccattcgaccatccagttctcgccctcctagtcggtgcttaagagatctgccgcgaccctgcaacatgtggccccttcgaagatgctcagccacagccgcagggggattgagatcctggtcctcgacacatgttccctttcgctagacacggagttcgtcaacctggttagcgaattgacaaaacggctggagagcggcgagggcaccttttacaaggaccatccgtcaagccccaatgccaatgacgttggcaacatg

SEQ ID NO: 2522 - DNA, 528 bp, Triticum aestivum
  Clone ID: uC-tsfl9316009c10b1
ttcagagtcctccgacctcttcccgcacctagcaaatggtaagccaagaaagccaactgacggcattgcacttgagctgacaaagaaatgctgttgctgctattcaacgagatcgattctaacctcaaagcgcccagatcccaatgacgagctcgtcgacgatgtccaccacgttgcagtcgcgccatgggccccgaatgcgaaccccgtcgacatggcctggtccgttgtgccggtactgcgatccggcgacttgtcccattcgaccatccagttctcgccctcctcgtcggcgcttcagagcttcgccgtgaccctgcaacaggtggccccttcgaagatgttcagccacagccgcagcggcattgagatcctcgtcctcgacgttgctccccttccgctagacacggtgttcgtcaacctggagagcgaattgacaaaacggctggagagcggcgagggcaccttttacaaggaccatccgacaagccccaatgccaaggacgtttgccacatgacgcccgagga

SEQ ID NO: 2523 - DNA, 561 bp, Triticum aestivum
  Clone ID: uC-tsfl9316009d11b1
tccgacctcttcccgcacctagcaaatggtaagccaagaaagccaactgacggcattgcacatgagctgacaaagaaatgctgctgctgctattcaacgagatcgattctaacctcaaagcgcccagatcccaatgacgagctcgtcgacgatgtccaccacgttgcagtcgcgccatgggccccgaatgcgaaccccgtcgacatggcctggcccgttgtgccggtactgcgatccggcgacttgtcccattcgaccatccagttctcgccctcctcgtcggcgcttcagagcttcgccgtgaccctgcaacaggtggccccttcgaagctgtccagccacagccgcagcggcattgagatcctcgtcctcgacgttgctccccttccgctagacacggtgttcgtcaacctggagagcgaattgacaaaacggctggagagcggcgagggcaccttttacaaggaccatccgacaagccccaatgccaaggacgttgccaacatgacgcccgaggagcgtctagccacggcgctcatggcagctctcagcaccctcaag

SEQ ID NO: 2524 - DNA, 525 bp, Triticum aestivum
  Clone ID: uC-tsfl9316009d12b1
gtgttctccgacctcttcccgcacctagcaaatggtaagccaagaaagccaactgacggctttgcacttgagcagacaaagaaatgctgctgctgctattcaacgagatcgattctaacctcaaagcgcccagatcccaatgacgagctcgtcgacgatgtccaccacgttgcagtcgcgccatgggccccgaatgcgaaccccgtcgacatggcctggtccgttgtgccggtactgcgatccggcgacttgtcccattcgaccatccagttctcgccctcctcgtcggcgcttcagagcttcgccgtgaccctgcaacaggtggccccttcgaagctgtccagccacagccgcagcggcattgagatcctcgtcctcgacgttgctccccttccgctagacacggtgttcgtcaacctggagagcgaattgacaaaacggctggagagcggcgagggcaccttttacatggaccatccgacaagccccaatgccaaggacgttgccaacatgacgcccgaggag

SEQ ID NO: 2525 - DNA, 462 bp, Triticum aestivum
  Clone ID: uC-tsfl9316009e09b1
ctttggttcatgtagcggatttggattgctttaacaactaatgctgctgcctttaacattgtaaagccaagggcttttgcccatgtgcagtaactaacaagaactctttcttttctttacaaattccataaccttgactagactttgtctgctcatttagcttacttaagctagagtcttgtaccttttcttatgattgaatcaacccctctttttttttattttaaacacatcccaacccaatgtataagcgcccacctagtgctatctagtccgaaaaatgcgaactagaactacatgagacactatctctgtctgtacgaacctaacactttctaccaggcttaattggaatatgacctcacatacactcacaagttatttagggctcgcaagaaagaccaagcttgggcttgggctaaccgctctaataatgagagtcagctgcttggattaaaaaga

SEQ ID NO: 2526 - DNA, 536 bp, Triticum aestivum
  Clone ID: uC-tsfl9316009e10b1
gttcagtgttctcctgcctcttcccgcacctagcaaatggtaagccaagaaagccaactgacggcattgcacttgagcagacaaagaaatgctgctgctgctattcaacgagatcgattctaacctcaaagcgcccagatcccaatgacgagctcgtcgacgatgtccaccacgttgcagtcgcgccatgggccccgaatgcgaaccccgtcgacatggcctggtccgttgtgccggtactgcgatccggcgacttgtcccattcgaccatccagttctcgccctcctcgtcggcgcttcagagcttcgccgtgaccctgcaacaggtggccccttcgaagctgtccagccacagccgcagcggcattgagatcctcgtcctcgacgttgctccccttccgctagacacggtgttcgtcaacctggagagcgaattgacaaaacggctggagagcggcgagggcaccttttacaaggaccatccgacaagccccaatgccaaggacgttgccaacatgacgcccgaggagcgtcta

SEQ ID NO: 2527 - DNA, 494 bp, Triticum aestivum
  Clone ID: uC-tsfl9316009f08b1
ttcagctcaccactttgttcatctagcggatttggatttctttaacaactaaggttcctgtttttaacattttaaagccaagggcttttgcccatctccaatagctaacaagaactctttcttttctttacaaatcccaaaacctttactagactttttctgcttctttagcttacttcacctagagtcttctaccttttcttatcattgaatcaacccctttttttttttcttttaaacacatcccaacccaaagtataagcgcccacctagtcctatctagtccgaaaaatgcgaactagaactacatgagacactatctctgtcgttacgaacctaacactttctaccaagcttaatcggaataagacctcacaaacactcacaagttatatagggcttgaaagaaagtctagggtcgggtttgggctaactgctctaataaggagagtcagctacttggattaaaaagagtgatcaaaatgaataagaaa

SEQ ID NO: 2528 - DNA, 540 bp, Triticum aestivum
  Clone ID: uC-tsfl9316009f11b1
gctaacactttgttacatctagcggatttggatttctttaacaactaaggttcctgtttttaacattttaaagccaagggcttttgcccatctccaatagctaacaagaactctttcttttctttacaaatcccaaaacctttactagactttttctgcttctttagcttacttcacctagagtcttctaccttttcttatcattgaatcaacccctttttttttttcttttaaacacatcccaacccaaagtataagcgcccacctagtcctatctagtccgaaaaatgcgaactagaactacatgagacactatctctgtcgttacgaacctaacactttctaccaagcttaatcggaataagacctcacaaacactcacaagttatatagggcttgaaagaaagtctaggtttgggttcgggttaactgctctaactaggagagtcagctacttggattaaaaagagtgatcaaaatgaataagataatccaagtattttacggtatccatgagttcaaatttgatgcagacatgat

SEQ ID NO: 2529 - DNA, 378 bp, Triticum aestivum
  Clone ID: uC-tsfl9316009f12b1
ttgtacgtatgccggcagcatagcagagagaggcgtccacgaactgtaactgaccgccttgaacttgaggacacccagaaatgctgctggtgatgttcaacgagatcaattataacctatggggctctagcccaccgtcaagagttgggcgatgaccaccacggtgaaatggcccttgggccccataaggctaactcggaggacatgcactggaacgatgagctgatctgccatctccggtacttggccatacaaccatacagtgatggccctcctactgggaccttcaaagatctggcgctaccctggaacaagctgaccgttgagagttgtgcaaccacagcctaagcttggaactggatcctcgttcacaacgtt

SEQ ID NO: 2530 - DNA, 526 bp, Triticum aestivum
  Clone ID: uC-tsfl9316009g07b1
gttcagtgttctccgacctcttcccgcacctagcaaatggtaagccaagaaagccaactgacggcattgcacttgagcagacaaagaaatgctgctgctgctattcaacgagatcgattctaacctcaaagcgcccagatcccaatgacgagctcgtcgacgatgtccaccacgttgcagtcgcgccatgggccccgaatgcgaaccccgtcgacatggcctggtccgttgtgccggtactgcgatccggcgacttgtcccattcgaccatccagttctcgccctcctcgtcggcgcttcagagcttagccgtgaccctgcaacaggtggccccttcgaagctgtccagccacagccgcagcggcattgagatcctcgtcctcgacgttgctcccctttcgctagacacggcgttcgtcaacctggagagcgaactgacaaaacggctggagagctgcgagggcaccttttacaaggaccatccgacaagccccaatgccaaggacgttgccaacatgacgcccga

SEQ ID NO: 2531 - DNA, 203 bp, Triticum aestivum
  Clone ID: uC-tsfl9316009g09b1
tcggtgttgcaaaaaagcagctgtagatcatagcccttagatcacacagaccctttattatccctacaaacaacaacacgtgtactagcttgtctctgctcttttagattacttcacctagacgtcttctacctttccttatgacttgaatcacccccgttttttcttttcttgtaaacacatatccaacccatatttaataa

SEQ ID NO: 2532 - DNA, 606 bp, Triticum aestivum
  Clone ID: uC-tsfl9316009g12b1
gtgctctcaagctcaacactttgttacatctagcggatttggatttctttaacaactaaggttcctgtttttaacattttaaagccaagggcttttgcccatctccaatagctaacaagaactctttcttttctttacaaatcccaaaacctttactagactttttctgcttctttagcttacttcacctagagtcttctaccttttcttatcattgaatcaacccctttttttttttcttttaaacacatcccaacccaaagtataagcgcccacctagtcctatctagtccgaaaaatgcgaactagaactacatgagacactatctctgtcgttacgaacctaacactttctaccaagcttaatcggaataagacctcacaaacactcacaagttatatagggcttgaaagaaagtctaggtttgggtttgggttaactgctctaataaggagagtcagctacttggattaaaaagagtgatcaaaatgaataagaaaatccaagtattttacggtatccatgagttcaaatttgatgcagacatgataattaaagattagattcaggttcaaattgatagggaatggcatcagatcatgaca

SEQ ID NO: 2533 - DNA, 541 bp, Triticum aestivum
  Clone ID: uC-tsfl9316009h07b1
ttcagtgttctcctacctcttcccgcacctagcaaatggtgagccaagaaagccaactgacggcattgcacttgagcagacaaagaaatgctgctgctgctattcaacgagatcgattctaacctcaaagcgcccagatcccaatgacgagctcgtcgacgatgtccaccacgttgcagtcgcgccatgggccccgaatgcgaaccccgtcgacatggcctggtccgttgtgccggtactgcgatccggcgacttgtcccattcgaccatccagttctcgccctcctcgtgggcgcttcagagcttcgccgtgaccctgcaacaggtggccccttcgaagctgtccagccacagccgcagcggcattgagatcctcgtcctcgacgttgctccccttacgctagacacggtgttcgtcaacctggagagcgaattgacaaaacggctggagagcggcgagggcaccttttacaaggaccattcgacaagccccaatgccaaggacgttgccaacatgacgcccgaggagcgtctagccacg

SEQ ID NO: 2534 - DNA, 596 bp, Triticum aestivum
  Clone ID: uC-tsfl9316009h08b1
tcagctcaacactttgttcatctagcggatttggatttctttaacaactaaggttcctgtttttaacattttaaagccaagggcttttgcccatctccaatagctaacaagaactctttcttttctttacaaatcccaaaacctttactagactttttctgcttctttagcttacttcacctagagtcttctaccttttcttatcattgaatcaacccctttttttttttcttttaaacacatcccaacccaaagtataagcgcccacctagtcctatctagtccgaaaaatgcgaactagaactacatgagacactatctctgtcgttacgaacctaacactttctaccaagcttaatcggaataagacctcacaaacactcacaagttatatagggcttgaaagaaagtctaggttcgggtttgggttaactgctctaataaggagagtcagctacttggattaaaaagagtgatcaaaatgaataagaaaatccaagtattttacggtatccatgagttcaaatttgatgcagacatgataattaaagattagattcaggttcacactgatagggaatggtatcagatcatga

SEQ ID NO: 2535 - DNA, 466 bp, Triticum aestivum
  unsure (1)..(466): unsure at all n locations
  Clone ID: uC-tsfl9316009h09b1
ttggggtggacgagagcgagcacagctactacgcgctgcagtggacgctcctccacttcttctccccgggccagcagcagcagtaccgcctcgtcgtcgtcacggccaagcccaccgccgcgtccgccgtcggcctcgccggaccaggtgccgcggacgtgctgccgttcgttgaggcggacctgaagcgaagctcgctgcgcgtcatcgacaaggccaaggagctctgcgcgcaggtgagtgatgctgtctttgaagtggcggagggnggatgccaggaacgtcctctgcgaggcgggagaaaggcatcacgcacagatgttggttgtgggcaaccatggctatggagcaatcaaaagggctgttcttggaagtgtgagcgattactgcacccaccacgcgcactgcaccgtgatggttgtgaagaaaccaaagcacaagcactgagcaatgcccagccttgact

SEQ ID NO: 2536 - DNA, 529 bp, Triticum aestivum
  Clone ID: uC-tsfl9316009h10b1
gttcagtgttctcctacctcttcccgcacctagcaaatggtaagccaagaaagccaactgacggcattgcacttgagctgacaaagaaatgctgctgctgctattcaacgagatcgattctaacctcaaagcgcccagatcccaatgacgagctcgtcgacgatgtccaccacgttgcagtcgcgccatgggccccgaatgcgaaccccgtcgacatggcctggtccgttgtgccggtactgcgatccggcgacttgtcccattcgaccatccagttctcgccctcctcgtcggcgcttcagagcttcgccgcgaccctgcaacaggtggccccttcgaagctgtccagccacagccgcagcggcattgagatcctcgtcctcgacgttgctccccttccgctagacacggtgttcgtcaacctggagagcgaattgacaaaacggctggagagcggcgagggcaccttttacaaggaccatccgacaagccccaatgccaaggacgttgccaacatgacgcccgagga

SEQ ID NO: 2537 - DNA, 519 bp, Triticum aestivum
  Clone ID: uC-tsfl9316009h11b1
tcgcagcaatggaagctctcgcctcgtcgccgcgggctctcttcgcccgcaccgccagtccgaccacggcgctggccacgccagcaagatggacgccgtcatcgaccaggcgtgtcaaggccgccgccgccgccgagccggccggcgaggccaagccggctgcggcagccgcgtcgccggcgcccaagaagatcctcaagaagaagcccgtctactccatgaagaaaggacagatcgtgcgagtcgagaaagagaagtacctgaacagcatcaattacctgtcagtggggcacccacccttctacaaggggctagactacatatacgaagaccgtggcgaggttttggacatcagaatcttcgaagaaaccggagagtatgctctgatcgcgtgggtagggattccaacaccaccagcatggcttccaacttatatgctcatcaagtcagacaaactcgactatgagaggatatgatcgccggatgagagactgcgagggagaacaatgtttgtgcata

SEQ ID NO: 2538 - DNA, 603 bp, Triticum aestivum
  Clone ID: uC-tsfl9316009h12b1
tgctctcaagctcaacactttgttacatctagcggatttggatttctttaacaactaaggttcctgtttttaacattttaaagccaagggcttttgcccatctccaatagctaacaagaactctttcttttctttacaaatcccaaaacctttactagactttttctgcttctttagcttacttcacctagagtcttctaccttttcttatcattgaatcaacccctttttttttttcttttaaacacatcccaacccaaagtataagcgcccacctagtcctatctagtccgaaaaatgcgaactagaactacatgagacactatctctgtcgttacgaacctaacactttctaccaagcttaatcggaataagacctcacaaacactcacaagttatatagggcttgaaagaaagtctaggttcgggtttgggctaactgctctaataaggagagtcagctacttggattaaaaagagtgatcaaaatgaataagaaaatccaagtattttacggtatccatgagttcaaatttgatgcagacatgataattaaagattagattcaggctcaaattgacagggaatggtatcagatcatga

SEQ ID NO: 2539 - DNA, 573 bp, Triticum aestivum
  Clone ID: uC-tsfl9316011a03b1
ctccgacctcttcccgcacctagcaaatggtaagccaagaaagccaactgacggcattgcacatgagcagacaaagaaatgctgctgctgctattcaacgagatcgattctaacctcaaagcgcccagatcccaatgacgagctcgtcgacgatgtccaccacgttgcagtcgcgccatgggccccgaatgcgaaccccgtcgacatggcctggtccgttgtgccggtactgcgatccggcgacttgtcccattcgaccatccagttctcgccctcctcgtcggcgcttcagagcttcgccgtgaccctgcaacaggtggccccttcgaagctgtccagccacagccgcagcggcattgagatcctcgtcctcgacgttgctccccttccgctagacacggtgttcgtcaacctggagagcgaattgacaaaacggctggagagcggcgagggcaccttttacaaggaccatccgacaagccccaatgccaaggacgttgccaacatgacgcccgaggagcgtctagccacggcgctcagggcagctctcagcaccctcaagattgtccattc

SEQ ID NO: 2540 - DNA, 606 bp, Triticum aestivum
  Clone ID: uC-tsfl9316011a04b1
cactttgttacatctagcggatttggatttctttaacaactaaggttcctgtttttaacattttaaagccaagggcttttgcccatctccaatagctaacaagaactctttcttttctttacaaatcccaaaacctttactagactttttctgcttctttagcttacttcacctagagtctgctaccttgtcttatcattgaatcaacccctgtttttttttcttttaaacacatgccagcccaaagtataagcgcccacctagtcctatctagtccgaaaaatgcgaactagaactacatgagacactatctctgtcgttacgaacctaacactttctaccaagctcaatcggaataagacctcacatacactcacaagttatatagggctagaaagaaagtctaggtttgggtttgggttaactgctctaataaggagagtcagctactcggattaaaaagagtgatcaaagtgaataagaaaatccaagtactttacggtatccatgagttcagatttgatgcacacatgacaattaaagattcgatcacgttcaaattgatagggaatggtatcagatcatgccagtgtggcgagtagagca

SEQ ID NO: 2541 - DNA, 666 bp, Triticum aestivum
  Clone ID: uC-tsfl9316011a06b1
cactttgctacatctagcggatttggatttctttaacaactaaggttcctgtttttaacattttaaagccaagggcttttgcccatctccaatagctaacaagaactctttcttttctttacaaatcccaaaacctttactagactttttctgcttctttagcttacttcacctagagtcttctaccttttcttatcattgaatcaacccctttttttttttcttttaaacacatcccaacccaaagtataagcgcccacctagtcctatctagtccgaaaaatgcgaactagaactacatgagacactatctctgtcgttacgaacctaacactttctaccaagcttaatcggaataagacctcacaaacactcacaagttatatagggcttgaaagaaagtctaggtttgggtttgggttaactgctctaataaggagagtcagctacttggattaaaaagagtgatcaaaatgaataagaaaatccaagtattttacggtatccatgagttcaaatttgatgcagacatgataattaaagattagatcaggttcaaattgatagggaatggtatcagatcatgacaagtgtggcgagtagagcaatctaagcttggtcagtttttttttttttaaattcattgctatgcacagacactagcac

SEQ ID NO: 2542 - DNA, 381 bp, Triticum aestivum
  Clone ID: uC-tsfl9316011a07b1
acatctagcggatttggatctctctaacaactaaggttcctgtttttaacattttaaagccaagggctttttcccatctgcaatagctaacaagaactctttgttttctttacaaatgccaaaacctttactagactctttctgcttctttagcttactttacctagagtctggtaccttttcttatcattgaatcaacccctttttttttgtcttatagacacatcccaacccaaagtataagcgcccacctagccctatctagtccgaaaaatgcgaactagaactacatgagacactgtgtctgtggtacgaacctaacactttgtaccaaagctaatcggaattagacctgacaaacactcacaagttatatagggc

SEQ ID NO: 2543 - DNA, 537 bp, Triticum aestivum
  Clone ID: uC-tsfl9316011a10b1
cactttgttacatctagcggatttggatttctttaacaactaaggttcctgtttttaacattttaaagccaagggcttttgcccatctccaatagctaacaagaactctttcttttctttacaaatcccaaaacctttactagactttttctgcttctttagcttacttcacctagagtcttctaccttttcttatcattgaatcaacccctttttttttttcttttaaacacatcccaacccaaagtataagcgcccacctagtcctatctagtccgaaaaatgcgaactagaactacatgagacactatctctgtcgttacgaacctaacactttctaccaagcttaatcggaataagacctcacaaacactcacaagttatatagggcttgaaagaaagtctaggtttgggtttgggttaactgctctaataaggagagtcagctacttggattaaaaagagtgatcaaaatgaataagaaaatccaagtattttacggtatccatgagttcaaatttgatgcagacatgataa

SEQ ID NO: 2544 - DNA, 516 bp, Triticum aestivum
  Clone ID: uC-tsfl9316011a12b1
cactttgttacatctagcggatttggatttctttaacaactaaggttcctgtttttaacattttaaagccaagggcttttgcccatctccaatagctaacaagaactctttcttttctttacaaatcccaaaacctttactagactttttctgcttctttagcttacttcacctagagtcttctaccttttcttatcattgaatcaacccctttttttttttcttttaaacacatcccaacccaaagtataagcgcccacctagtcctatctagtccgaaaaatgcgaactagaactacatgagacactatctctgtcgttacgaacctaacactttctaccaagcttaatcggaataagacctcacaaacactcacaagttatatagggcttgaaagaaagtctaggtttgggtttgggttaactgctctaataaggagagtcagctacttggattaaaaagagtgatccaaatgaataagagaatcccagtcttttacggcatccatgaggtca

SEQ ID NO: 2545 - DNA, 560 bp, Triticum aestivum
  Clone ID: uC-tsfl9316011b01b1
cgacctcttcccgcacctagcaaatggtaagccaagaaagccaactgacggcattgcacatgagcattcaaagaaatgctgctgctgctattcaacgagatcgattctaacctcaaagcgcccagatcccaatgacgagctcgtcgacgatgtccaccacgttgcagtcgcgccatgggccccgaatgcgaaccccgtcgacatggcctggtccgttgtgccggtactgcgatccggcgacttgtcccattcgaccatccagttctcgccctcctcgtcggcgcttcagagcttcgccgtgaccctgcaacaggtggccccttcgaagctgtccagccacagccgcagcggcattgagatcctcgtcctcgacgttgctccccttccgctagacacggtgttcgtcaacctggagagcgaattgacaaaacggctggagagcggcgagggcaccttttacaaggaccatccgacaagccccaatgccaaggacgttgccaacatgacgcccgaggagcgtctagccacggcgctcagggcagctctcagcaccctcaaga

SEQ ID NO: 2546 - DNA, 564 bp, Triticum aestivum
  Clone ID: uC-tsfl9316011b03b1
ctccgacctcttcccgcacctagcaaatggtaagccaagaaagccaactgacggcattgcacatgagcagacaaagaaatgctgctgctgctattcaacgagatcgattctaacctcaaagcgcccagatcccaatgacgagctcgtcgacgatgtccaccacgttgcagtcgcgccatgggccccgaatgcgaaccccgtcgacatggcctggtccgttgtgccggtactgcgatccggcgacttgtcccattcgaccatccagttctcgccctcctcgtcggcgcttcagagcttcgccgtgaccctgcaacaggtggccccttcgaagctgtccagccacagccgcagcggcattgagatcctcgtcctcgacgttgctccccttccgctagacacggtgttcgtcaacctggagagcgaattgacaaaacggctggagagcggcgagggcaccttttacaaggaccatccgacaagccccaatgccaatgacgttgccaacatgacgcccgaggagcgtctagccacggcgctcagggcagctctcagcaccctcaagat

SEQ ID NO: 2547 - DNA, 638 bp, Triticum aestivum
  Clone ID: uC-tsfl9316011b04b1
cgtaacactttgctacatctagcggatttggatttctttaacaactaaggttcctgtttttaacattttaaagccaagggcttttgcccatctccaatagctaacaagaactctttcttttctttacaaatcccaaaacctttactagactttttctgcttctttagcttacttcacctagagtcttctaccttttcttatcattgaatcaacccctttttttttttcttttaaacacatcccaacccaaagtataagcgcccacctagtcctatctagtccgaaaaatgcgaactagaactacatgagacactatctctgtcgttacgaacctaacactttctaccaagcttaatcggaataagacctcacaaacactcacaagttatatagggcttgaaagaaagtctaggtttgggtttgggttaactgctctaataaggagagtcagctacttggattaaaaagagtgatcaaaatgaataagaaaatccaagtattttacggtatccatgagttcaaatttgatgcagacatgataattaaagattagattcaggttcaaattgataggggatggtatcagatcatgacagtgtggcgagtagagcaatctaagcatgggtccagtttttttt

SEQ ID NO: 2548 - DNA, 647 bp, Triticum aestivum
  unsure (1)..(647): unsure at all n locations
  Clone ID: uC-tsfl9316011b06b1
atcatgcggctggatttcatcattaaaacctcactgcttgtttgctgaaaccacaggtgttgaacagatggggatactatccactcattctaataggatcatgggcattcggcactattaaccgtatccatgatttcatcgagccagggcataagatcttctggctctcagttcttgacgttgggacagctgcactaatggtagcaaacctatcaaataaataagttataaaattcgccatagatcatctttgctcttcccgagtcgatgttctgaatgttgtattttcagggcttgttcaattcaatagcctatggtttcaacagctcagagcgtcgagcaatccatgagagactggagctgtaagtcaccaccgatctctttgggttgctatattattcccaataatcaatgaagcttgatttttatgaaacccttggtctgctagattcttgccagaacggctatatcgatggcttccaagcaatttcagaccacaaaaccatctgattctacatcagcagcaacaacagcgaagcgaaatggtatcactcaagaccgaggaccagcaatgacactaactttcaactaatacattggaccgataacangaaggcggcgatgataatcagcgttggatggagaga

SEQ ID NO: 2549 - DNA, 583 bp, Triticum aestivum
  Clone ID: uC-tsfl9316011b07b1
tacatctagcggatttggatttctttaacaactaaggttcctgtttttaacattttaaagccaagggctttttcccatctccaatagctaacaagaactctttgttttctttacaaatcccaaaacctttactagactttttctgcttctttagcttacttcacctagagtcttgtaccttttcttatcattgaatcaacccctttttttttttcttttaaacacatcccaacccaaagtataagcgcccacctagtcctatctagtccgaaaaatgcgaactagaactacatgagacactatctctgtcgttacgaacctaacactttctaccaagcttaatcggaataagacctgacaaacactcacaagttatatagggcttgaaagaaagtctaggtttgggttcgggttaactgctctaataaggagagtcagctacttggattaaaaagagtgatcaaaatgaataagaaaatccaagtattttacggtatccatgagttcaaatttgatgcagacatgatcattaaagattagatcaggttcaaattgatagggaacggcatcagatcatgacagt

SEQ ID NO: 2550 - DNA, 301 bp, Triticum aestivum
  Clone ID: uC-tsfl9316011b09b1
gccactccccagcactttccacaaccttgaagatggcagctgtggcgacatcggattgctggcttgtgcgaatcacccaaaggagttatgggttgctgacactgcccagccttgatatttacctactttacgtcattgccctgagtgtaacgttctgagacgtgtcccagtttgtgcttccggattctgttagggttggcgttggccaaggagtctcggtgagtggtgtgtataaagtaagaatgccattaggaccgtgtatgccggtcccaactgttaacttgaaagataccaagcagac

SEQ ID NO: 2551 - DNA, 387 bp, Triticum aestivum
  Clone ID: uC-tsfl9316011b11b1
accactagcttcgttggagatccatcaaaggaactaacgaggctagaggttggttcttctagcaaacttaggggccgcaagtgtctggccatttcctggccttgcaccatatttccagccgctttccagcatttagtactttggctgatgggctcgcctgcagcagcagcagcagcagctgagttcactcgggaaactgttcgccggccgcttatatggatatttgaatgctaattgtcgggcgctaaccccaagggcaacccaccaaggcccacccctggggcaaacgcatattgcgacgatggggcggggaagtgcatatcgaagcttatctttatttcgtacccaggcactcctgatgccctattcacgccgtgccccccgaag

SEQ ID NO: 2552 - DNA, 593 bp, Triticum aestivum
  Clone ID: uC-tsfl9316011b12b1
tcaacactttgttacatctagcggatttggatttctttaacaactaaggttcctgtttttaacattttaaagccaagggcttttgcccatctccaatagctaacaagaactctttcttttctttacaaatcccaaaacctttactagactttttctgcttctttagcttacttcacctagagtcttctaccttttcttatcattgaatcaacccctttttttttttcttttaaacacatcccaacccaaagtataagcgcccacctagtcctatctagtccgaaaaatgcgaactagaactacatgagacactatctctgtcgttacgaacctaacactttctaccaagcttaatcggaataagacctcacaaacactcacaagttatatagggcttgaaagaaagtctaggtttgggtttgggttaactgctctaataaggagagtcagctacttggattaaaaagagtgatcaaaatgaataagaaaatccaagtattttacggtatccatgagttcaaatttgatgcagacatgataattaaagattagattcaggttcaaattgatagggaatggtatcagatcatgac

SEQ ID NO: 2553 - DNA, 536 bp, Triticum aestivum
  Clone ID: uC-tsfl9316011c01b1
tccgacctcttcccgcacctagcaaatggtcagccaagaaagccatctgacggcattgcacatgagctttcaaagaaatgctgctggtgctattcaacgtgatcgattctaacctcaaagcgcccagatcccaatgacgagctcgccgacgatgtccaccacgttgcagttagcgccatgggccccgaatgcgaaccccgtcgacatggtctggtccgctgtgccggtactgcgatccggagacttgtcccattcgaccatacagttctcgccctcctcgtcggagcttcagagcttcgccgtgaccctgcatcaggtggtcccttcgaagctgtccagccacagccgtagtggcattgagatcctagtactagacgttgctccccttccgctagacacggtgttcgtcaacctggagagcgaattgacaaaacggctggagagcagcgagggcaccttttacatggaccatacgacaagctccaatgccaaggacgttgtccacatgacgcccgaggagcgtttagccacagtgc

SEQ ID NO: 2554 - DNA, 394 bp, Triticum aestivum
  Clone ID: uC-tsfl9316011c02b1
tccggttgttacagttacagtttgggctcatgtccatatactatcccttacatgaactctgatgatggtcttcaaagactattaaccgtactcgactttttatggtgccttggcatactatcacctagagtctcagtacctagtcgttatggatcagaatgcaactccctggttgtatttcctttcaaacacatccgatctcaaagtatacacgcacaattagtgctatttcggacgaaatgtgctaactgtagctccatgagacactgtctatgtcattacgctcctgtcacttcataccaaggtttatcgcaatacgatctaaactgactctctaggtatccacggctcgcaagagagtgctagattgggtccgggttaactggtctcatga

SEQ ID NO: 2555 - DNA, 489 bp, Triticum aestivum
  Clone ID: uC-tsfl9316011c03b1
ttctccgacctcttcccgcacctagcaaatggtaagccaagaaagccaactgacggcattgcacatgagcagacaaagaaatgctgctgctgctattcaacgagatcgattctaacctcaaagcgcccagatcccaatgacgagctcgtcgacgatgtccaccacgttgcagtcgcgccatgggccccgaatgcgaaccccgtcgacatggcctggtccgttgtgccggtactgcgatccggcgacttgtgccattcgaccattcagttctcgcccttctcgtcggcgcttcagagcttcgccgtgaccctgcaacaggtggccccttcgaagctgtccagccacagccgcagcggcattgagatcctcgttctcgacgttgctccccttccgatagacacggtgttcgtcaacctggagagcgaatcgacaaaacggctggagagcgtgaagggcaccttttacatggaccatacgacaaggcccaat

SEQ ID NO: 2556 - DNA, 525 bp, Triticum aestivum
  Clone ID: uC-tsfl9316011c04b1
ctccgacctcttcccgcacctagcaaatggtaagccaagaaagccaactgacggcattgcacatgagcatacaaagaaacgctgctgctgctattcaacgagatcgattctaacctcaaagcgcccagatcccaatgacgagctcgtggacaatgtccaccacgttgcaatcgcgccatgggccccgaatgcgaaccccgtcgacatggcctggtccgttgtgccggtactgcgatccggcgacttgtcccattcgaccatccagttctcgccctcctcgtgggcgcttcagagcttcgccgtgaccctgcaacaggtggtcccttcgaagctgttcagccacagccgcagcggcattgagatcctcgtgctagacgttgctccccttccgctagacacggtgttcgtcaacctggagagcgaactgacaaaacggctggagagcggcgagggcaccttttacaaggaccattcgacaagccccaatgccaaggacgttgcccacatgacgcccgaagagcgtct

SEQ ID NO: 2557 - DNA, 558 bp, Triticum aestivum
  Clone ID: uC-tsfl9316011c05b1
ctccgacctcttcccgcacctagcaaatggtaagccaagaaagccaactgacggcattgcacatgagcagacaaagaaatgctgctgctgctattcaacgagatcgattctaacctcaaagcgcccagatcccaatgacgagctcgtcgacgatgtccaccacgttgcagtcgcgccatgggccccgaatgcgaaccccgtcgacatggcctggtccgttgtgccggtactgcgatccggcgacttgtcccattcgaccatccagttctcgccctcctcgtcggcgcttcagagcttcgccgtgaccctgcaacaggtggccccttcgaagctgtccagccacagccgcagcggcattgagatcctcgtcctcgacgttgctccccttccgctagacacggtgttcgtcaacctggagagcgaattgacaaaacggctggagagcggcgagggcaccttttacaaggaccatccgacaagccccaatgccaaggacgttgccaacatgacgcccgaggagcgtctagccacggcgctcagggcagctctcagcaccct

SEQ ID NO: 2558 - DNA, 364 bp, Triticum aestivum
  Clone ID: uC-tsfl9316011c07b1
acccagtctttttaaattcccacactcggtgcgttacgagtgctaaccgactgtattacagatgatcctcttccaccccgaccgttgttgcactcgcaacaaagaggtgattccacaggcttatagcgcccagtatctactatcaagaggttatcaatatccaccacgacagagttgtccatggaccccctaggggctccccggcggcatagactggaccaaaatgcccaatctgccaggacaggacttgagcccttgaagcacacattcatctccatctttacaaaccttaaacagattctaggcgctcctatgtcaagcgtgccgttcctaacttgtcataaccatgcgcagcgtggttata

SEQ ID NO: 2559 - DNA, 517 bp, Triticum aestivum
  Clone ID: uC-tsfl9316011c08b1
ttaccgcacctagcaaatggtcagccaagaaagccaactgacggcattgcacatgagctgacaaagaaatgctgctgctgctattcaacgtgatcgattctaacctcaaagcgcccagatcccaatgacgagctcgtcgacgatgtccaccacgttgcagtcgcgccatgggccccgaatgcgaaccccgtcgacatggcctggtccgctgcgccggtactgcgatccggcgacttgccccattcgagcatccagttctcgccctgctcttcggcgcttcagagctgcgccgtgaccctgcatcaggcggtccctttgaagctgcccagccacagccgcagcggcattgagatcctagtctgaacgttgctccccttccgatagacacggtgttcgtcaacctggagagcgaattgacaaagcggctggagagcggtgagggcaccttttacaaggaccatccgacaagccccaatgccaaggacgttgcccacatgacgcccgaggagcgtctagc

SEQ ID NO: 2560 - DNA, 458 bp, Triticum aestivum
  Clone ID: uC-tsfl9316011c09b1
cgcacctagcagatggcgacgccaagaaaggcatctgacggtattgcacatgagcagacaaagaaatgctgctggtgctattcaacgagagcgattctaacctcaaagcgcccagatcccaatgacgagctcgcctactatgttcaccaccttgcactcgcgccatgagcgcccaatgcgaaccccgtctacatggcctggtacgctgtgccagtactgagatccggggacttgtcccattcgaccatccaaatatcgccctcctcggtggcgcttcagagcttcaacgagaccctgccacaggtggccccttcagaagctgtgcagacacagacgacacgaggtcgagatcctggtcctggacgttgctccccttccgctagacacggagttcgctaacctggagagcgaattgacaaatcggctggagagcggctagggcaccttgtacaatgacc

SEQ ID NO: 2561 - DNA, 460 bp, Triticum aestivum
  Clone ID: uC-tsfl9316011c10b1
tccaccttttcccgacctagcaaatggtaagccaagaaagccaactgacggcattgcacatgagctgacaacgaattgctgctgctgctattcaacgagatcgattgtaacctcaaagcgcccagatcccaatgacgagctcgtcgacgatgtccaccacgttgcaggcgcgccatgggccccgaatgcgaaccccgtcgacatggcctgggccgttgtgccggtactgcgatccggcgacttgtcccattcgaccatgcaagatctcgccctcctcgccggcgctttagagcttcggcgcgaccctgcaacaggtggccccttcgaagctgttcagccacagcccgagcggtattgagatcctggtcctcgacgttggtccccttccgctagacacggtgttggtcaacctggagagcgaattgacaaaactgctggagagcggcgagggcacctttta

SEQ ID NO: 2562 - DNA, 390 bp, Triticum aestivum
  Clone ID: uC-tsfl9316011c11b1
gcacttcgttcatctagcggatgcggattcctttaacaactgatgtacctgttttgaacattctaaagccaagggcttttgcccatctacaatagctaacaggaactcgtgattatctttacaaatcccagcacctttactagactttatatgattctttcggtcacttgacctagagactgctaccttttcttatcattgaatcaaccccgagttctttttcttttaaacacatgccaacccaaagtataagcgcccacctagtcctatctagtcctaaaaatgcgaactagagctacatgagactctatctctgtcgttacgagcctaacactgtctaccaagcttaatcggactaagaccgcacaagcactcacaagttatataggg

SEQ ID NO: 2563 - DNA, 100 bp, Triticum aestivum
  Clone ID: uC-tsfl9316011d01b1
ctctaaacctcaacactctgttacatgtagcggccatggatgcctttaacagcgcatggcagatgagctgacatggaaaagctgggggtgctatcccatg

SEQ ID NO: 2564 - DNA, 269 bp, Triticum aestivum
  Clone ID: uC-tsfl9316011d02b1
ctgacccttttccgcggagacgcctggggcgaaaaccactgcttagttataggcctgtgatgcagtggtattaccctggctagtatacggccgttcaaggagctgcaggagctggccgatggaacgctgagtggtatgtgtggatttcatggcgagagattaccggcaggcccaactgctgttgctgtgcgttcagcggttccgatctaccagactgtccgtaaccaatatacaagcttgtgtacgtgttggtcaaccttgtgctgggc

SEQ ID NO: 2565 - DNA, 603 bp, Triticum aestivum
  Clone ID: uC-tsfl9316011d03b1
acaaatttacacgctccctgcatttcgtgttctccccaaatatattactgcatctccttttccacccccaccatattatcaccgcaaaaatggtggaccacggtatatcctcacagctactcctatcacacaggttatcatagagccattcaaacagagatttcgaaaagaacccctgctgcctccttcgcggcacaaatctgacccaaatccccaattgagctggacagtctctaagcacgtgaagcacagattcaactccacctttacaaacctgagacacattcgaggcgctaagatgtcttcgatgccgttcctcatctgtcataactatgtccagtttggttatatatattttctgactatacttatatttatatatatttttcctaaatataactattactttggattatttgttaaacatgtgcatggatttaactcaatctcaataaatgcttcttagtcttgtgactctttatcataatttggtggtgaataaatgttttatttaccattgtaaaaaaaaaaactgaaaatttgcgtaaatcattgagctcttcttttttttattttgactgttggcaacgtttctaatcatat

SEQ ID NO: 2566 - DNA, 554 bp, Triticum aestivum
  Clone ID: uC-tsfl9316011d05b1
cactttgccacatctagcggattaggatttctttacaactaaggttcctgcttttaacattttaaagccaagggcttttgcccatctccaatagctaacaagaactctttgttttctttacaaatcccaaaacctttactagactttttctgcttctttagcttacttcacctagagtcttctaccttttcttatcattgaatcaacccctttttttttttcttttaaacacatcccaacccaaagtataagcgcccacctagtcctatctagtccgaaaaatgcgaactagaactacatgagacactatctgtgtcgttacgaacctaacactttctaccaagcttaatcggaataagacctcacaaacactcacaagttatatagggcttgaaagaaagtctaggtttgggtttgggttaactgctctaataaggagagtccgctacttggattaaaaagagtgatctaaatgaagaagaaaatccaagtcttatacggtatgcatgagttcaaatttgatgcagacatgataattaaagattagattcagg

SEQ ID NO: 2567 - DNA, 632 bp, Triticum aestivum
  unsure (1)..(632): unsure at all n locations
  Clone ID: uC-tsfl9316011d06b1
cactttgttacatctagcggatttggatttctttaacaactaaggttcctgtttttaacattttaaagccaagggcttttgcccatctccaatagctaacaagaactctttcttttctttacaaatcccaaaacctttactagactttttctgcttctttagcttacttcacctagagtcttctaccttttcttatcattgaatcaacccctttttttttttcttttaaacacatcccaacccaaagtataagcgcccacctagtcctatctagtccgaaaaatgcgaactagaactacatgagacactatctctgtcgttacgaacctaacactttctaccaagcttaatcggaataagacctcacaaacactcacaagttatatagggcttgaaagaaagtctaggtttgggtttgggttaactgctctaataaggagagtcagctacttggattaaaaagagtgatcaaaatgaataagaaaatccaagtgttttacggtatccatgagttcaaatttgatgcagacatgataattaaagattagattcaggttcanattgatagggaatggtatcagatcatgacagtgtggtcgagtagagcaatctaagcaaggtcaatttttttt

SEQ ID NO: 2568 - DNA, 474 bp, Triticum aestivum
  Clone ID: uC-tsfl9316011d08b1
ttggttcatgtagcgcatttggatttctttaacaactaatgaccctgcttctaatcattgaaagctcaagggcttttgcccatctcgagtacctcacgagaactctttcttttctttacctattccaaaacccttactagactttgtccgctcctctagcttacttcacctagagtcttctacctgttcttatcattgagtaaacccctctttttatttattttaaacacatcccaccccagctgtatgagcgcccacctactcctatctattccgaagaaagcgaactaagactacatgcgacactatctctgtctgtacgaacctaacactttctaccagagcttaatctgaataagaccgtccatacactcacaagttatatagggcttgaaagaaagtctaagcttgggtgtgggttaaccgctctcatatgagagtcagctacttggattaaaaagagtgatcaaaatg

SEQ ID NO: 2569 - DNA, 497 bp, Triticum aestivum
  Clone ID: uC-tsfl9316011d09b1
ctttgccacactcagcggatttggatttctttacaactaaggttcctgtttttaacattttaaagcccagggcttttgcccatcttcaatagctaacaagaactctttcttttctttacaaatcccaaaacctttactagaccttttctgcttctttagcttacttcacctagagtcttctacctttttttatcattgaatcaacccctttttttttttcttttaaacacattccaacccaaagtataagcgcccacctagtcctatctagtccgaaaaatgcgaactagaactacatgagacactatctctgtcgttactaacctaacactttctaccaagcttaatcggaataagacctcacaaacactcacaagttatatagggcttgaaagaaagtctaggtttgggtttgggttaactgctctaataaggagagtcagctacttggattaaaaagagtgatcaaaatgaataagaaaatccaagtattttac

SEQ ID NO: 2570 - DNA, 285 bp, Triticum aestivum
  Clone ID: uC-tsfl9316011d10b1
ttcgttcgaatttcaagggcttttgcccatctccataactgggaagaactctttcttttgtttggaaattccaaaacctttactcgacttttcctgctgatgcagcttacttcacctagagtcgggtaccttaacttatcattgagggaaccccttttttatttttctttgaagcacatcccaacccaaagcctgagcgaccacctaggcctatctagtccgtaaaatgcgaactagaactacatgagacactatctctgacggtactaacctaacactctctac

SEQ ID NO: 2571 - DNA, 485 bp, Triticum aestivum
  Clone ID: uC-tsfl9316011d11b1
ggacttatccctgcacgtaggcaaaggcacaccaagaaagccaactgacgtgtttgcacatgagcagacatggaattgctgctgctgctcttcaacgggatcgatagtaaccacaaagcgcccatattgcaatgacgagatcctgaacaatgtgcaccacgacagctgggctcaaagtgcccctaatgcgaacccggttgtcttgggctgagcccatgagccaagactgacagactgcgactcttcccattctagcataacaatttaaccctgatggtaggctcttcagagcttaaagaatgacctgtgcctacgtgtgcccttcctagctgaggagcttcatgacccgaggcattgagatgctactggtcgacgttgctccacttccgctagacacagagctcttcaacctgcagagtgaattgactaaacggatagagagctttgagggcaccttttacaaggaccatacgacaagccccaat

SEQ ID NO: 2572 - DNA, 212 bp, Triticum aestivum
  Clone ID: uC-tsfl9316011d12b1
cgacctattcccgacctatcagatggcacagccagaaagcctactgactgtgttgcacatgagcatacaaagaagtgctgctgctgctatgcacctggatcgatagtaacctctaagcgcccatattgcatggacgtgatcgtggacaatgtgcatcacgtcacatggcgggcctatagggcccctaatgcgaacctgtgtcgtcttgggct

SEQ ID NO: 2573 - DNA, 494 bp, Triticum aestivum
  Clone ID: uC-tsfl9316011e01b1
ctagcaaatggtctgccacgacagccgactgacggcatttcacatgagcttgtcaaggatatgctgctgctgctattcatcgagagcgattcttacctcatagcgcccagatcccaatgacgagctcgtcgacgatgtccaccacgttgctagtccgccatgggcctcgaatgcgaaccccgttgacatggcctggtccgtcttgcctgtactgcgatccggcgactagtcctattcgaccatccagttctagccctcctaataggcgcttcagagctctgccgggaccctgctacatgtggccccttagaagctgttcagtcacaggcgcaatggcattgagatcctcgtccctcacgctgcttccattgggctagacacagtgttcgagaacctggagagcgaatcggctaaacggctggagagcggctagggggccttttacaagggccctacgtcaaggcccaatgccaaggacgttgccaacatgacgc

SEQ ID NO: 2574 - DNA, 538 bp, Triticum aestivum
  Clone ID: uC-tsfl9316011e02b1
ctctaaacgctaacactttgttacatctagcggatttggatttctttaacaactaaggttcctgtttttatcattttaaagccaagggcttttgcccatctgcaatagctaacaagaactctttcttttctttacaaatcccaaaacctttactagactttttctgcttctttagcttacttcacctagagtcttctaccttttcttatcattgaatcaacccctttttttttttcttttaaacacatcccaacccaaagtataagcgcccacctagtcctatctagtccgaaaaatgcgaactagaactacatgagacactatctctgtcgttacgaacctaacactttctaccaagcttaatcggaataagacctcacaaacactcacaagttatatagggcttgaaagaaagtctaggtttgggcttggggtaactgctctaataaggagagtcagctacttggattaaaaagagtgatcaaaatgaataagaaaatgcaagtgttttacggtatccatgagttcaaatttgatg

SEQ ID NO: 2575 - DNA, 526 bp, Triticum aestivum
  Clone ID: uC-tsfl9316011e04b1
actagcctcacactttgttcatgtagcggatttggacttctgtaacaactaaggacactgtaaataacattggaaagccacgggcttctgcccatctccaataccttacatgaactctaccttttctatacaaattccaaaacctttactagactttttatgctatctttagctaacttcacctagagtcttttaccattgattataaccgaatcaacccctcttttaaacacatttcaaacacataccatcccaacgtatatgcgcccacctagtcctatctatgccgaaaaatgctacactaaaactccatgagacactatctatgctgacactaacctaacactttataccagagcttaatctgactaagacctaccagacacttacaggttgtatgagggtcgaaggaaaggctagggttgggtgctgtgataactgctgtcatctggcgagacagctacgagggttcaaaagggtgaacaaaatgcatgtgtaaaaccgaatccttgacgggatccatgag

SEQ ID NO: 2576 - DNA, 494 bp, Triticum aestivum
  Clone ID: uC-tsfl9316011e06b1
gctcaaacctaacactttgttacatctagcggatttggatttctttaacaactaagggtcctgtttttaacattgtaaagccaagggcttttgcccatctccaatagcttacaagaactctttcttttctttacaaatcccaaaacctttactagactttttctgcttctttagcttacttcacctagagtcttctacctttgcttatcattgaatcaacccctttttttttttcttttaaacacatccctacccaatgtataagcgcccacctagtcctatctagtccgaaaaatgcgaactagaactacatgagacactatctctgtcgatacgaacctaacactttctaccaagcttaatcggaataagacctcacaaacactcacaagttatatagggcttgaaagaaagtctaggtttgggtttgggttaactgctctaattaggagagtcagctacttggattaaaaagagtgatcaaaatgaataag

SEQ ID NO: 2577 - DNA, 240 bp, Triticum aestivum
  Clone ID: uC-tsfl9316011e08b1
cctgagcatgccacacacaatgcgaacgcaataacgcctgtgtccactaccctaacaactgggcgactcaccggcgatccagcgcgtgagctgaccatgatgtaaccatgaccgatgatgctgctgtcatacccttatcagaccgtgatcatacaactggcgtacatcatggcctttcatggccattgggcgcctgtgtatgatctcatgagaaatgatgaactgagttgacctgttcgc

SEQ ID NO: 2578 - DNA, 577 bp, Triticum aestivum
  Clone ID: uC-tsfl9316011e09b1
ttctccgacctcttcccgcacctagcaaatggtaagccaagaaagccaactgacggcattgcacatgagctttcaaagaaatgctgctgctgctattcaacgagatcgattctaacctcaaagcgcccagatcccaatgacgagctcgtcgacgatgtccaccacgttgcagtcgcgccatgggccccgaatgcgaaccccgtcgacatggcctggtccgttgtgccggtactgcgatccggcgacttgtcccattcgaccatccagttctcgccctcctcgtcggcgcttcagagcttcgccgtgaccctgcaacaggtggccccttcgaagctgtccagccacagccgcagcggcattgagatcctcgtcctcgacgttgctccccttccgctagacacggtgttcgtcaacctggagagcgaattgacaaaacggctggagagcggcgagggcaccttttacaaggaccatccgacaagccccaatgccaaggacgttgccaacatgacgcccgaggagcgtctagccacggcgctcatggcagctctcagcaccctcaagattgtccattccg

SEQ ID NO: 2579 - DNA, 413 bp, Triticum aestivum
  Clone ID: uC-tsfl9316011f01b1
ctctaacctaacagtatgttcatgtagcggatttggatttctttcacaactgagggtcctgtgtttatcattgtaaagcctggggctgttgcccatctggaatagctaacaagaactctttctgttatttacaaatcccaaaacctttactagactcttgctgcttatttagctcacttgacctcgagggttataccttgtcttatcattgagatcaagcgcttctgttttgtcttttaaacacattgcaacccaaagtatacgcgcccacctagccctatctagcccagaaaaatgcgaactagaactacatgagacactatctctgtagttacgaacctaacactttctaccaagcttaatcggaataagacctgtcaatcactcacaagttatatagggctcgaaagaaa

SEQ ID NO: 2580 - DNA, 468 bp, Triticum aestivum
  Clone ID: uC-tsfl9316011f03b1
aggcctgatccctgaccgggtgcgggcgccagcgcgaagccttctggcgtctgtgcgcatgaccagacactgaatgtgcgctgctgctctgcacgggagcgaccatgacctaatagggaccagtgacgatggtcgatgtccttgacgaggtccagtacgttccactggcgccatgatggccctttgcgaaccccgtcgatatgggctggtgcgcatggccaatgatgaaatgcgtgcacttgtccgattggtgcatgcacatctggcccttcttgtcagcgctacagagactaaccaagaccctgcagctggtggtcccttagctgatagacgagctcaatcacacgaggactgagatcgtcactggccgcggtgctacaattgcgctagacacgagagccctgaacctgcccagcgtaatggccttgcagctgatgagcctttagggcgcttgttacatagaccata

SEQ ID NO: 2581 - DNA, 399 bp, Triticum aestivum
  Clone ID: uC-tsfl9316011f04b1
ctctaaactgcacttcgagcttttgcggtacctatcacatggtaggccacgagagccaactgtcggcattgcacagtgatcttgcccagatacgctgctgctgctgttctacgagatcgattttcacctccaagcgccctgactcgactgacgagcgttgttttcgatgtccaccaccttgagagttgctccatggtgccacgaatgcaatccccgccgacatggctctgtttcagagagccggtaccgcaatgcgtagactcgcaccatgcgaccattcagtcgtagcactcctactaggagctcatgagacactacgtgtgcctgtaccaagcggacactttgtagctgtcctaacacagacaggaccgcactgagactctcagtgctatatcgggc

SEQ ID NO: 2582 - DNA, 586 bp, Triticum aestivum
  unsure (1)..(586): unsure at all n locations
  Clone ID: uC-tsfl9316011f05b1
gctctaaacctaacactttgttcatctagcggatttggatttctttaacaactaaggttcctgtttttaacattttaaagccaagggcttttgcccatctgcaatagctaacaagaactctttcttttctttacaaatcccaaaacctttactagactttttctgcttctttagcttacttcacctagagtcttctaccttttcttatcattgaatcaacccctttttttttttcttttaaacacattccaacccaaagtataagcgcccacctagtcctatctagtccgaaaaatgcgaactagaactacatgagacactatctctgtcgttacgaacctaacactttctaccaagcttaatcggaataagacctcacaaacactcacaagttatatagggcttgaaagaaagtctaggtttgggtttgggttaactgctctaataaggagagtcagctacttggattaaaaagagtgatcaaaatgaataagaaaatccaagtattttacggtatgcatgagttcaaatttgatgcagacatgataagtaaagactagattcaggttcaaatngatagggaatg

SEQ ID NO: 2583 - DNA, 417 bp, Triticum aestivum
  Clone ID: uC-tsfl9316011f07b1
ctctaaccctaacactttgttacatctagcggatttggatttctttaacaactaaggttcctgtttttaacattttaaagctctagggcttttgcccatctgcaatagctaacaagaactctttcttttctttacaaatgccaaaacctttactagactttttctgcttctatagcttacttcacctagagtcttctaccttttgttatcattgaatcaacccctctttttttttgttttaaacacatgccaacccaaagtataagcgcccacctagtgctatctagtacgaaaaatgcgaacttgaactacatgagacactatgtgtgtcgtgacgaacctaacactttctaccaagcttaatcggaataagacctcacaaacactcacaagttatatagggcctgaaagaaagtc

SEQ ID NO: 2584 - DNA, 549 bp, Triticum aestivum
  Clone ID: uC-tsfl9316011f08b1
ctctaaacgctaacactttgttacatctagcggatttggatttctttaacaactaaggttcctgtttttaacattttaaagccaagggcttttgcccatctgcaatagctaacaagaactctttcttttctttacaaatcccaaaacctttactagactttttctgcttctttagcttacttcacctagagtcttctaccttttgttatcattgaatcaacccctttttttttttcttttaaacacatcccaacccaaagtataagcgcccacctagtcctatctagtccgaaaaatgcgaactagaactacatgagacactatctctgtcgttacgaacctaacactttctaccaagcttaatcggaataagacctcacaaacactcacaagttatatagggcttgaaagaaagtctaggtttgggtttgggttaactgctctaataaggagagtcagctacttggatctaaaagagtgatcaacatgaataagatcatccaagttttttacggcatccatgagttcaaatttgatgcagacatgata

SEQ ID NO: 2585 - DNA, 555 bp, Triticum aestivum
  Clone ID: uC-tsfl9316011f10b1
gctctaaacgctttagatcatgtggctggatttcatcattaaaacctcactgcttgtttcctgaaaccacaggtgttgaacatatggggatactatccactcattctaataggatcatgggcattcggcactattaaccgtatccatgatttcatcgagccagggcataagatcttctggctctcagttcttgacgttgggacagctgcactaatggtagcaaacctatcaaataaataagttataaaattcgccatagatcatctttgctcttcccgagtcgatgttctgaatgttgtattttcagggcttgttcaattcaatagcctatggtttcaacagctcagtgcgtcgagcaatccatgagagactggagctgtaagtcaccaccgatctctttggtttgctatattattcccaataatcaatgaagcttgatttttatgaaacccttggtctgctagattcttgccagaacggctatatcgatggcttccaagcaatttcagaccaaaaaaccatttgattctacatcagcaacaacaacagcgaagc

SEQ ID NO: 2586 - DNA, 379 bp, Triticum aestivum
  Clone ID: uC-tsfl9316011f12b1
cactttggtacatgtagcggatttggatttctttaacaactaaggttcctgtttttaacatttgaaagtcgagggcttttgcccatctgcaatagctaacaagaactctttcttttttttacaaatcccaaaacccttactagactttttctgcttacttagcttacttcacctagagtcttctaccttttgttatcaatgaatcaacccctttttttttttcttttaaacacatcccaacccaaagtataagcgcccacctaagtctatctagtgcgaaaaatgcgaactagaactacttgagacactatttctgtcgttacgaacctaacactttttaccaagctttaaacggaataaggacctcacaaacactcac

SEQ ID NO: 2587 - DNA, 551 bp, Triticum aestivum
  Clone ID: uC-tsfl9316011g01b1
ctaacactttgttacatctagcggatttggatttctttaacaactaaggttcctgtttttaacattttaaagccaagggcttttgcccatctccaatagctaacaagaactctttcttttctttacaaatcccaaaacctttactagactttttctgcttctttagcttacttcacctagagtcttctaccttttcttatcattgaatcaacccctttttttttttcttttaaacacatcccaacccaaagtataagcgcccacctagtcctatctagtccgaaaaatgcgaactagaactacatgagacactatctctgtcgttacgaacctaacactttctaccaagcttaatcggaataagacctcacaaacactcacaagttatatagggcttgaaagaaagtctaggtttgggtttgggttaactgctctaataaggagagtcagctacttggataaaaagagtgatcaaaatgaataagaaaatccagtattttacggtatccatgagttcatatttgatgcagacatgataattaaagaataga

SEQ ID NO: 2588 - DNA, 338 bp, Triticum aestivum
  Clone ID: uC-tsfl9316011g02b1
tccgacctcttcccgcacctagcaaatggtaagccaagaaagccaactgacggcatttcacatgagcagacaaagaaatgctgctgctgctattcaacgagatcgattctaacctcaaagcgcccagatcccaatgacgagctcgtcgacgatgtccaccacgttgcagtcgcgccatgggccccgaatgcgaaccccgtcgacatggcctggtccgttgtgccggtactgcgatccggcgacttgtcccattcgaccatccagttctcgccctcctcgaaggcgcttcagagctttgccgtgaccctgcaacaggtggccccttcgaagctgttcag

SEQ ID NO: 2589 - DNA, 503 bp, Triticum aestivum
  Clone ID: uC-tsfl9316011g03b1
taacactttgttacatctagcggatttggatttctttaacaactaagggtcctgtttttttcattttaaagccaagggcttttgcccatctccgatagctcacaagaactctttcttttctttacaaatcccaaaacctttactagactctttctgcttctttagcttacttgacctagagtgttctaccttttgttatcattgaatcaacccctttttttttttcttttaaacacatgcccacccaaagtataagcgcccacctagtcctatctagtccgaaaaatgcgaactagaactacatgagacactatctctgtcgttacgaacctaacactttataccaagcttaatcggaataagacctcacaaacactcacaagttatatagggcttgaaagaaagactagggttgggtttgggccaactgctctcataaggagagccagctacttgggctaaatagagtggtcaaaatgaataagaaaatgccagtgttttac

SEQ ID NO: 2590 - DNA, 458 bp, Triticum aestivum
  Clone ID: uC-tsfl9316011g05b1
agcggatatggatttctgtaacaactaaggaccctgtatttatcatggtaaagccaagggcttctgcccatctccaatagcttacaagaactctttcttttctttacaaatcccaaaacctttactagactttttctgcttctttagcttacttcacctagagtcttctaccttttcttatcattgaatcaacccctttttttttttcttttaaacacatgccaacccaaagtattagcgcccacctagtcctatctagtccgaaaaatgcgaactagaacttcatgagacactatctatgttgttactaacctaacactttctaccaagcttaatctgaataagacctcacaaacactcacaagttatatagggcttgaaagaaagtctaggtttggggttgggttaacggctctcatatggagagtcagctacttggattaaaaagagtgatcaaa

SEQ ID NO: 2591 - DNA, 329 bp, Triticum aestivum
  Clone ID: uC-tsfl9316011g06b1
gctcatttggatcgctttacacatcttatggccgctgttgctaacagtcggaagttcacggctcttgcccagatacgctggcgctgatgtactacgagatcgattttcacctccaagcgccctgattcgactgacgaggtcgtcgtcgatgaccaccacgttgtggtcgcgccatgggccctgaatgcgatccccgtctacatggtctggttcgatgagccggtactgcgatgcgtagacttgtaccattcgaccattcagttgtagacctcctagtaggagctcctgagattctacgtgaccctgcaacaggtggacccttcgtagct

SEQ ID NO: 2592 - DNA, 588 bp, Triticum aestivum
  Clone ID: uC-tsfl9316011g08b1
tcaacactttgttacatctagcggatttggatttctttaacaactaaggttcctgtttttaacattttaaagccaagggcttttgcccatctccaatagctaacaagaactctttcttttctttacaaatcccaaaacctttactagactttttctgcttctttagcttacttcacctagagtcttctaccttttcttatcattgaatcaacccctttttttttttcttttaaacacatcccaacccaaagtataagcgcccacctagtcctatctagtccgaaaaatgcgaactagaactacatgagacactatctctgtcgttacgaacctaacactttctaccaagcttaatcggaataagacctcacaaacactcacaagttatatagggcttgaaagaaagtctaggtttgggtttgggttaactgctctaataaggagagtcagctacttggattaaaaagagtgatcaaaatgaataagaaaatccaagtattttacggtatccatgagttcaaatttgatgcagacatgataattaaagattagatcaggttcaattgatagggatggttcagatcatga

SEQ ID NO: 2593 - DNA, 531 bp, Triticum aestivum
  Clone ID: uC-tsfl9316011g09b1
gctctaacctaacactttgttacatctagcggatttggatttctttaacaactaaggttcctgtttttaacattttaaagccaagggcttttgcccatctccaatagctaacaagaactctttcttttctttacaaatcccaaaacctttactagactttttctgcttctttagcttacttcacctagagtcttctaccttttcttatcattgaatcaacccctttttttttttcttttaaacacatcccaacccaaagtataagcgcccacctagtcctatctagtccgaaaaatgcgaactagaactacatgagacactatctctgtcgttacgaacctaacactttctaccaagcttaatcggaataagacctcacaaacactcacaagttatatagggcttgaaagaaagtctaggtttgggtttgggttaactgctctaataaggagagtcagctacttggattaaaaagagtgatcaaaatgaataagaaaatccaagtattttacggtatccatgagttcaaat

SEQ ID NO: 2594 - DNA, 76 bp, Triticum aestivum
  Clone ID: uC-tsfl9316011g10b1
aattaaaaaaaaaaaaaaaaaaaaaaaaaaaaaaagaaaaaaaaaaaaaaaaaggggggccgttttaaaaggatcc

SEQ ID NO: 2595 - DNA, 601 bp, Triticum aestivum
  Clone ID: uC-tsfl9316011h01b1
ctttagatcatgtggctggatttcatcattaaaacctcactgcttgtttcctgaaaccacaggtgttgaacagatggggatactatccactcattctaataggatcatgggcattcggcactattaaccgtatccatgatttcatcgagccagggcataagatcttctggctctcagttcttgacgttgggacagctgcactaatggtagcaaacctatcaaataaataagttataaaattcgccatagatcatctttgctcttcccgagtcgatgttctgaatgttgtattttcagggcttgttcaattcaatagcctatggtttcaacagctcagtgcgtcgagcaatccatgagagactggagctgtaagtcaccaccgatctctttggtttgctatattattcccaataatcaatgaagcttgatttttatgaaacccttggtctgctagattcttgccagaacggctatatcgatggcttccaagcaatttcagaccaaaaaaccatctgattctacatcagcaacaacaacagcgaagcgaaatggtatcactcaagaccgaggaccagcaatgacactaactttcaactaatac

SEQ ID NO: 2596 - DNA, 434 bp, Triticum aestivum
  Clone ID: uC-tsfl9316011h02b1
cggacgcgtggggcaaaatttcctgcttagttatagttctgtgattcattgctaataatcgtgcttctatacggcccttgaaggatttccaggtgctgttcgatggaatgctcagtgggatgtgtgaattttatggtcagattttcctgccaggttgaatagctgatgcagtgcattgagtgttttccatctaccagatttttcctaatcgttatgcaggcttgtggatgttttggtcgagcttgtgcttggattataaatgtgacgtttttagctctgtgaaagtaaagatgcctcgatataatttgtgcccataatacatgtttttttaatgataagatgtatcacatatgctgcaggttttgtatgaatttccattccgacctttcttgatctcaactgctcttaatttgttttattgttccaccaatttt

SEQ ID NO: 2597 - DNA, 461 bp, Triticum aestivum
  Clone ID: uC-tsfl9316011h03b1
gttctccgacctcttcccgcacctagcaaatggtaagccaagaaagccaactgacggcattttacatgagcagacaaagaaatgctgctgctgctgttcaacgagatcgattctaacctcaaagcgcccagatcccaatgacgagctcgtcgacgatgtccaccacgttgcagtcgcgccatgggccccgtatgcgaaccccgtcgacatggcctggtccgttgtgccggtactgctatccggcgacttgtcccattcgaccatccagttttcgccctcctcgtaggtgcttcagagcttcaccgtgaccctgcaacaggtggtcccttctaagctggccaagcacagccgcagcggcattgagatcctcgtactcgacgatgctccccttccgatagacacggtgtccgtcgacctggagagcgacatgaccaaacggctggtgagcggcgagggcacct

SEQ ID NO: 2598 - DNA, 564 bp, Triticum aestivum
  Clone ID: uC-tsfl9316011h05b1
ttctccgacctcttcccgcacctagcaaatggtaagccaagaaagccaactgacggcattgcacatgagcagacaaagaaatgctgctgctgctattcaacgagatcgattctaacctcaaagcgcccagatcccaatgacgagctcgtcgacgatgtccaccacgttgcagtcgcgccatgggccccgaatgcgaaccccgtcgacatggcctggtccgatgtgccggtactgcgatccggcgacttgtgccattcgaccatccagttctcgccctcctcgtaggcgcttcagagcttcgccgtgaccctgcaacaggtggccccttcgtagctgtccagccacagccgcagcgggattgagatcctcgtcctcgacgttgctgcccttacgctagacacggtgttcgtcaacctggagagcgaattgacaaaacggctggagagcggcgagggcaccttttacaaggaccatccgacaagtcccaatgccaaggacagtgccaacatgacgcccgaggagcgtctagccacggcgctcacggcaggtctcagcaccctcaag

SEQ ID NO: 2599 - DNA, 295 bp, Triticum aestivum
  Clone ID: uC-tsfl9316011h06b1
actcgatagttagtcaaccgcaacaaagaggcgagaccaaaggtatatagcgcaccagatacctactaacacagatggtatacatatagccaccacaaacagagattctccatggaccccgtaggtgacccttggcggcacagactggacccaaatgcccaatctagcaggacagtatttaagcaagtgaagcatagattcatctccatcttcacaaacctgagacacattcgaggcgatcatatgtcatgtaggccgttcctaatttgtcataactatgcgcagcggggttata

SEQ ID NO: 2600 - DNA, 565 bp, Triticum aestivum
  unsure (1)..(565): unsure at all n locations
  Clone ID: uC-tsfl9316011h07b1
cccgcgactctgttaccggacctagcaaatggttagccaagaaagccaactgacggcattgcacatgagcagacaaagaaatgctgctgctgctattcaacgagatcgattctaacctcaaagcgcccagatcccaatgacgagctcgtcgacgatgtccaccacgttgcagtcgcgccatgggccccgaatgcgaaccccgtcgacatggcctggtccgttgtgccggtactgcgatccggcgacttgtcccattcgaccatccagttctcgccctcctcgtcggcgcttcagagcttcgccgtgaccctgcaacaggtggccccttcgaagctgtccagccacagccgcagcggcattgagatcctcgtcctcgacgttgctccccttccgctagacacggtgttcgtcaacctggagagcgaattgacaaaacggctggagagcggcgagggcaccttttacaaggaccatccgacaagccccaatgccaaggacgttgccaacatgacgcccgaggagcgtctagccacggcgctcanggcagctctcagcaccctcaaga

SEQ ID NO: 2601 - DNA, 520 bp, Triticum aestivum
  Clone ID: uC-tsfl9316011h10b1
gctctaacgctaacactttgttacatctagcggatttggatttctttaacaactaaggttcctgtttttaacattttaaagccaagggcttttgcccatctccaatagctaacaagaactctttcttttctttacaaatcccaaaacctttactagactttttctgcttctttagcttacttcacctagagtcttctaccttttcttatcattgaatcaacccctttttttttttcttttaaacacatcccaacccaaagtataagcgcccacctagtcctatctagtccgaaaaatgcgaactagaactacatgagacactatctctgtcgttacgaacctaacactttctaccaagcttaatcggaataagacctcacaaacactcacaagttatatagggcttgaaagaaagtctaggtttgggtttgggttaactgctctaataaggaggagtcagctacttggattaaaaaagagtgatcaaaaatgaaataagaaaaatcccaagtatttttac

SEQ ID NO: 2602 - DNA, 498 bp, Triticum aestivum
  Clone ID: uC-tsfl9316011h11b1
cactttgttacatctagcggatttggatttctttaacaactaaggttcctgtttttaacattttaaagtcaagggcttttgcccatctccaatagctaacaagaactctttcttttctttacaaatcccaaaacctttactagactttttctgcttctttagcttacttcacctagagtcttctaccttttcttatcattgaatcaacccctttttttttttcttttaaacacatcccaacccaaagtataagcgcccacctagtcctatctagtccgaaaaatgcgaactagaactacatgagacactatctctgtcgttacgaacctaacactttctaccaagcttaatcggaataagacctcacaaacactcacaagttatatagggcttgaaagaaagtctaggtttgggtttgggttaactgctctaataaggagagtcagctactttgattaaaaagagtgatcaaaatgaataagaaaatccaagtttttt

SEQ ID NO: 2603 - DNA, 382 bp, Triticum aestivum
  Clone ID: uC-tsfl9316011h12b1
gctataacgtgttctccgacctcttcccgcacctagcaaagaggtgagccacgaaagccgactgacggcattgcacatgagcagacaaagaaatgctgctgctgctattcaacgagatcgattctaacctcaaagcgcccagatcccaacgacgagctcgtcgacgaggtccaccacgttgcagtcgcgccatgggccccgaatgcgaaccccgtcgacatggcctggtccgatgtgcctgtactgccatccggcgacttgtgccattcgaccatccagttctggccctcctagtgggagctaaagagatctgccgggaccctgcaacaggtggccccttggaagctgttcagccacagcctgagctggattgagatcctcg

SEQ ID NO: 2604 - DNA, 539 bp, Triticum aestivum
  Clone ID: uC-tsfl9316012a01b1
gttctccgacctcttcccgcacctagcaaatggtaagccaagaaagccaactgacggcattgcacatgagctgacaaagaaatgctgctgctgctattcaacgagatcgattctaacctcaaagcgcccagatcccaatgacgagctcgtcgacgatgtccaccacgttgcagtcgcgccatgggccccgaatgcgaaccccgtcgacatggcctggtccgttgtgccggtactgcgatccggcgacttgtcccattcgaccatccagttctcgccctcctcgtcggcgcttcagagcttcgccgtgaccctgcaacaggtggccccttcgaagctgtccagccacagccgcagcggcattgagatcctcgtcctcgacgttgctccccttccgctagacacggtgttcgtcaacctggagagcgaattgacaaaacggctggagagcggcgagggcaccttttacaaggaccatccgacaagccccaatgccaaggacgttgccaacatgacgcccgaggagcgtctagccacggcgc

SEQ ID NO: 2605 - DNA, 429 bp, Triticum aestivum
  Clone ID: uC-tsfl9316012a04b1
gccggtcgctcagctgcggcgaccgcatctcgcttcgcccgtttagctgaacgagcggccctctccacgaaggcggcggcggccgaatgtcacgctcccaccttgggttcccaccgtgcagactgcgtagatctgcgtctgcaccgtactcccgtcggcgctcctccccccgccatgaccgcacctgcctgccagacgctcagctacttaaaagaacaaacgccggaaggtaaggtgaaatttgcggcacaggagaaagaccttgagtcagatgaaaccctttgggccttgtacgagcgctggtgcgaggctttcaaccaaaagcgtgaccatgatgagaaggctcgccggttcaacacattcaagaagaccgttctgcacattcacaacaagcccaatgtgggctaccgaaggggaataacccaattc

SEQ ID NO: 2606 - DNA, 448 bp, Triticum aestivum
  Clone ID: uC-tsfl9316012a05b1
tctccgactctcttcccgacctatgcaaatggtaagccaagaaagccaactgacggcattgcacatgagctgacaaagaaatgctgctgctgctattcaacgagatcgattctaacctcaaagcgcccagatcccaatgacgagctcgtcgacgatgtccaccacgttgcagtcgcgccatgggccccgaatgcgaaccccgtcgacatggcctggtccgttgtgccaggactgcgatccggcgacttgtcccattctgagcatacagttctcgccctcctcgtcggcgcttcagagcttagccgtgaccctgcaacaggtggccccttcgaagctgtccagccacagccgcagcggcattgagatgctcgtgctcgacgttgctccccttccgctagacacggagttcgtcaacctggagagcgaattgacaaaacggctatagagc

SEQ ID NO: 2607 - DNA, 433 bp, Triticum aestivum
  Clone ID: uC-tsfl9316012a06b1
aacactacgctacatctagcggatttggattgctttaacaactaaggcccctgtttgtaacattgtaaagccaagggctttcgcccatctccaatagctaacaagaactctatcttttctttacaaatcccagcaaccttcactagactttctctgcttctttagcttacttaacctacagcaccctaacttttcttatcattgaaacaaccccatcaaccctttcttttaaacacatcccaccccaaagtataagcacccacctcgtcctatttagtccaaaaaatgcgaactagaactacttgagacactatctatgctgttacgaacctaacactccctaccatgcttaaccggcataagacctcacaaacactcacaagctatatcgggcttgaaagagcgtctaagatagggtttgggttgactggtc

SEQ ID NO: 2608 - DNA, 362 bp, Triticum aestivum
  Clone ID: uC-tsfl9316012a07b1
tttagatcatgtggctggatttcatcattaaaacctcactgcttgtttcctgaaaccacaggtgttgaacagatggggatgctatccactcattctaataggatcatgggcattcggccttaacgatcagatcatggccggatagacttggttagtcttgcgtggacgcgctaggtgcaccttaaaaatagataatcgcataacatttgtttccagcgagttgatgtgattcaggctgcataaagctatgtaacctagggcacatcagaacggctgagacccacttggtgtttatccaatagagtgatataacttgtgtatttgcacgtttgtgtcacattaacaaacttgttctagacaca

SEQ ID NO: 2609 - DNA, 321 bp, Triticum aestivum
  Clone ID: uC-tsfl9316012a09b1
ctaacactttgttacatctagcggatttggatttctttaacaactaaggttcctgtttttaacattttaaagccaagtgcttttgcccatctccaatagctaacaagaactcttttttttttacaaatccaaccttactgacttttgttttactacttacctaagctttacctttttatatgatacccttttttttttttaaccatcaaccaagataagcccactatctattagtcaaaagcactaactactaaccttttgcgtcgacctacatttccactaacgatagactacacctccagattggctgaaaagctagtg

SEQ ID NO: 2610 - DNA, 380 bp, Triticum aestivum
  Clone ID: uC-tsfl9316012a10b1
ctttaagctaacactttgttacatctagcggatttggatttctttaacaactaaggttcctgtttttaacattttaaagccagtggcttttgcccatctccaatagctaacaagaactctttttttttacaaatcaaactactgacttttgttttactacttacaagctttcctttctatattgataccctttttttttttaacacatcaccaagttagcccactagcctattgccaaaatgcacaactcagaacacttttgtgtcaactacactttaccactaatgaataaacccaacctacagtattaggctgaaaagctagtgggtgggaacgttaaaggagcactctgataaaaggacaagatagaatcagattac

SEQ ID NO: 2611 - DNA, 171 bp, Triticum aestivum
  Clone ID: uC-tsfl9316012a11b1
gttctccgacctcttcccgcacctagcaaatggtaagccaagaaagccaactgacggcattgcacatgagcagactaagaaatgctgctgctgctattcaacgagatcgattaactaagcgccaatcatgcagctctcacatgtcacagtgatccccatgcccaatgcacc

SEQ ID NO: 2612 - DNA, 426 bp, Triticum aestivum
  Clone ID: uC-tsfl9316012a12b1
cgacctcttcccgcacctagcaaatggtaagccaagaaagccaactgacggcattgcacatgagctgacgtttgaaatgctgctgctgctattcaacgagatcgattaacctaaagcgccaatcatgcagctgcacatgtcacactgctcgccatggcccaatgcaaccgcactggctgtccgtggcgactgaccgcactgtcatcaccatcagtctgcctctgcggctcaagttgcgacctgacagggccttaagtgtccccagccagggatagactgctcacgtgtccttcgtagaacggtcgcacctgaagcaatgcaacggtgaagcggagcccttacagcctcacagccatgaggcttcccagacccagaggtagccgcctaggacttacacctaatgtcatcgcatgttcgtgcttgcgc

SEQ ID NO: 2613 - DNA, 569 bp, Triticum aestivum
  Clone ID: uC-tsfl9316012b01b1
cactttgttacatctagcggatttggatttctttaacaactaaggttcctgtttttaacattttaaagccaagggcttttgcccatctccaatagctaacaagaactctttcttttctttacaaatcccaaaacctttactagactttttctgcttctttagcttacttcacctagagtcttctaccttttcttatcattgaatcaacccctttttttttttcttttaaacacatcccaacccaaagtataagcgcccacctagtcctatctagtccgaaaaatgcgaactagaactacatgagacactatctctgtcgttacgaacctaacactttctaccaagcttaatcggaataagacctcacaaacactcacaagttatatagggcttgaaagaaagtctaggtttgggtttgggttaactgctctaataaggagagtcagctacttggattaaaaagagtgatcaaaatgaataagaaaatccaagtattttacggtatccatgagttcaaatttgatgcagacatgataattaaagattagattcaggttcaaattgatagg

SEQ ID NO: 2614 - DNA, 292 bp, Triticum aestivum
  Clone ID: uC-tsfl9316012b02b1
acactttgttacatctagcggatttggatttctttaacaactaaggttcctgtttttaacattttaaagccaagggcttttgcccatctccaatagctaacaagaactctttcttttctttacaaatcccaaaacctttactagactttttctgcttctttagcttactttacctagaggcttctaccctttcttatcattgaatcaaccccttttttttttttttttaaacacatcccaacccaaagtataagcgcccacctagtcctatctagtcccgaaaatgccaact

SEQ ID NO: 2615 - DNA, 551 bp, Triticum aestivum
  Clone ID: uC-tsfl9316012b03b1
acacttcgttacatctagcggatttggatttctttaacaactaaggttcctgtttttaacattttaaagccaagggcttttgcccatctccaatagctaacaagaactctttcttttctttacaaatcccaaaacctttactagactttttctgcttctttagcttacttcacctagagtcttctaccttgtcttatcattgaatcaacccctttttttttttcttttaaacacatgccaacccaaagtataagcgcccacctagtcctatctagtccgaaaaatgcgaactagaactacatagagacactatctctgtcgatacagaacctaacactttctaccaagcttaatcggaataagacctcacaaacactcacaagttatatagggctcgaaagaaagtctaggtttgggtttgggttaactgctctaataaggagagtcagctacttggattaaaaagagcgatcaaaatgaataagacaatccaagtcttttacggtgtccatgagttcaaatctgatgcagacatgataattaaagattat

SEQ ID NO: 2616 - DNA, 278 bp, Triticum aestivum
  Clone ID: uC-tsfl9316012b05b1
cgatggcgtgcacaccgccgccggtaatcggcaaggcgggaaacctcactgtcttcatcacgcccccggacacgccgacgccagcggataccccgacctctcgttcggtcgagtagccaggatctgagttttccaccctacaattccactccccgttcggtggcgtctcctgcgaccccgccgacggagcatatagacacatcgacttcgccggacaagatgggatcgacgcctacgacagctacgagggactctctgtctgtggcgacagacaaaat

SEQ ID NO: 2617 - DNA, 220 bp, Triticum aestivum
  Clone ID: uC-tsfl9316012b08b1
gttctagatgtgcgagcgctccgctttaccgttcttgattcagtgatggcacaatcggaggggatgctttgttgcttgtaccgtcttgattaagtaactttctgtgatcctgtgcgcgaggaactggatggatgctggtgtgtcttctatgataccgcttgagatgaataaatgcttgttactcctctgaacttttgtgacaaactcctttccactaacg

SEQ ID NO: 2618 - DNA, 343 bp, Triticum aestivum
  Clone ID: uC-tsfl9316012b09b1
cttaacctgttccccgacctcttcccgcacctagcaaatggtaagccaagaaagccaactgacggcattgcacatgagctgacgtagaaatgctgctgctgctattcaacgagatcgattctactagcgcccaatcaatgacagctgcacatgtcaccacgttgatcccctggccccaatgcaaccccgcacatggctgtcgtggccgctcatccgactgtcatcaccatcagtctgcctctgtcgcttaagttgcgacctgccagggccttaagtgccgccagcgagggttaatctcgccacgtgtccttcgtagacacggtgcaccgaagaatgcaaacgt

SEQ ID NO: 2619 - DNA, 361 bp, Triticum aestivum
  Clone ID: uC-tsfl9316012b10b1
gttctccgacctcttcccgcacctagcaaatggtaagccaagaaagccaactgacggcattgcacatgagcttacgtagaaatgctgctgctgctattcaacgagatcgattctacctaagcgccaatcatgacagctgcacatgtccaccacgtgatcccctggccccaatgcaccccgcacatggctgtcgtggccgctcatccgactgtcatcacctcatttgcctctgtgggctaagttgcgacctgacagggccttaagtgcagccagcgagggttaacctgtccacgtgtccttcgtgaacggtcgaactgaaggatgcaacgtgaagcgaggacttcagactcacagccatgca

SEQ ID NO: 2620 - DNA, 120 bp, Triticum aestivum
  Clone ID: uC-tsfl9316012b11b1
ctctaagtgtactccgacctatccccgcacctagcagatggtaatgccacgacagccgactgacggcattgcacatgagcagactaggaaatgctgctgctgctattcaacgagatcgat

SEQ ID NO: 2621 - DNA, 448 bp, Triticum aestivum
  Clone ID: uC-tsfl9316012c01b1
cacttcgttacatctagcggatttggatttctttaacaactaaggttcctgtgtttaacattttaaagccaagggcttttgcccatcttcaatcgctaacaagaactctttattttctttacaaatcccaaaacctttactagactttttctgcttctttagcttacttcacctagagtctcctaccttttcttatcattgaatcaaccccattttctcctttcttttaaacacatgccaacccaaagtataagcggccacataggcctatctagtcctaaaaatgcgaactagagctacatgagacactatctctgccgttacgagcctaacactttctaccaagcttaatcggactaagacctcacaaacactcacaagttatatagggcttgatagaaagtctaagtatgggtttgggttaactgctctaataaggagagtcagc

SEQ ID NO: 2622 - DNA, 500 bp, Triticum aestivum
  Clone ID: uC-tsfl9316012c02b1
acttcgctacatctagcggatttggatccctttaacaactaaggctcctgttcctaacatgctaaagccaagggcttttgcccatctccaatagctaacaagaactctgtgttttttttacaaatcccaagacctatactagactttatctgcttctttagcttacttcacctacagcctcctaactgttcttatcatggaatcaaccccattaatcctttttttgaaacacatcccaacccaaagtgtgagcgcccacatagtgctatctagtccgaaaaatgcgaactagagctacatagagacactatatatggcgttacgaacctaacactttctaccaagcttaatcggaataagacctcacaagcactcacaagtcatatagggcttgatagaaagtctaagattgggcttgggttcactgctctaataaggagagacagctgcttggattaaaaagagtgatcaaaatgaattataaaatccaagccttttta

SEQ ID NO: 2623 - DNA, 271 bp, Triticum aestivum
  Clone ID: uC-tsfl9316012c03b1
gcgctctactccggccagtctcttcttctgtacaaagctagcgaggcttggaggtgagcgaaaatgccggtcagcacgatcgccgtggggagccaccgtggggtgtacgatgtctgcgccctcaaggcggcgctcgccgtgatcatctccacgctcatcttcgtctttgccggccagggcttccgcatggcacttcatcaagctgacgcctcgaccgtgctgggacccccgacggcctgatctaagtcgtgatagcactctctttgtccct

SEQ ID NO: 2624 - DNA, 325 bp, Triticum aestivum
  Clone ID: uC-tsfl9316012c06b1
tctacgacctcttcccgcacctagcaaatggtgagccaagaaagccaactgacggcattgcacatgagcagacaaagaaatgctggggctggtatccaacgcgatcgattctgacctcaaagcgcccagatcccaatgacgagctcgtcgacgatgtccaccacgttgcagacgcgccatgggccccgaatgcgaaccctgtcgacatggtctggaccgccgtgccggtactgcgatccggcgacttgagccattagaccattcagttctcgcactcctagtcggtgctatagaggtttgccatgaccctgcgacacgttgcccc

SEQ ID NO: 2625 - DNA, 303 bp, Triticum aestivum
  Clone ID: uC-tsfl9316012c08b1
ctctaccctcaacactttgttacatctagcggatttggatttctttaacaactaaggttcctgtttttaacattttaaagccaggggcttttgcccatctccaatagctaacaagaactctttttttttacaaatccaaccttactagacttttgttttactacttacctaagctctcctttttatatgataacccctttttttttttaaacacatcacccaagataagccccactgtctattgccgaaaagcactaaactactgaacactatttgtgtacaacctaacactttacagctaat

SEQ ID NO: 2626 - DNA, 273 bp, Triticum aestivum
  Clone ID: uC-tsfl9316012c09b1
tcaacactttgttacatctagcggatttggatttctttaacaactaaggttcctgtttttaacattttaaagccacgggcttttgcccatctccaatagctaacaagaactctttttttttacaatccaaccttactaacttttgttttactacttacaagctttcctttcttatatgataacccttttttttttaacactcaccaagatacgccactagcctattatcaaaatgcactaactactaacacttttgcgtacaacctcacttta

SEQ ID NO: 2627 - DNA, 127 bp, Triticum aestivum
  Clone ID: uC-tsfl9316012c10b1
gggtgagcagagaacacgatggccacttcatcagtcctcctccctgctctctggggcgcgcggcggggcggacttacggatcaacaggccgacacgggggcgggcggccgcggcgggcggagtggac

SEQ ID NO: 2628 - DNA, 367 bp, Triticum aestivum
  Clone ID: uC-tsfl9316012c11b1
gtttggtttatttgaagagtggaaggacggtgttccacgagcagtacagggcgtggggcttcatacaagatcaaacaattccttgcgctgacttttgcaactgggtagctacgggccagggaaatttttatgacaccctggatgtgatactcgtctggacgtgacatcaattaatcatgtacatgaaaaaaaaaaaggcgcgttaaggatcaagtactaccggctgcagatacttttatggcactaaattattatggcgcgttacacgctgatgaaactgggtacaataatgctgagaatcctttgcgtggtatacaaaggcgaccacgcttcacatgcagctatggatgacccctgacgccatacc

SEQ ID NO: 2629 - DNA, 370 bp, Triticum aestivum
  Clone ID: uC-tsfl9316012c12b1
ttacatcatgtggctggatttcatcattaaaacctcactgcttgtttcctgaaaccacaggtgttgaacattaaacggatactatccactcattctaataggatcatgggcatcgcactataaccgttcatattcatggccgggatagactttggcttagtcttgcgtggacactgactaatggagcaaacctataataatagtataaatcgcataatcatttgctttccgagcatgtctgaagtgttttcaggctgtcaattaataccatggtcaacagtcagggtcacaatcatgaagatggactgaagtacaccatctcttggttgcttatatccaatataatgagctcgttttataaaccctggct

SEQ ID NO: 2630 - DNA, 296 bp, Triticum aestivum
  Clone ID: uC-tsfl9316012d01b1
tattccaatgacaagatcttctatagactttttctggttctttagcttacttgagctagagtgtgcgaacctttgcttatcattgaatcaaccccttttctttttgtttataaacacatccgaacccaaagactaagcgcgcacctagtcctatctagtccgaaaaatgtgaactactacttcgtgagacgctgtctctgtggagacgaacataacactctgtaccaagtttgattggctttagacctcacaaacactctcacgttatatagggcgtgaaagaaagtgtagggttg

SEQ ID NO: 2631 - DNA, 333 bp, Triticum aestivum
  Clone ID: uC-tsfl9316012d04b1
tcccgccgtagctatgggattaggaatgtcacctgacggcttgcacatgagcatcacaaagaaatgctggtgctgctattcaacgagatcgattctaacctcattgtgctcatatcccaatgacgagctcgttgatgaggtccaccaggttgtataggctccttgagccccagaatgcgaacctttgtcgaatggtctggaacgctgtgcctgttctgctatccggcagactttgaccatacaaccataccgttctcgtcgtcctatttggagctaaaaaggtttgccgtgacctctgtgacaagctgtcctttggaagttcgacactcacag

SEQ ID NO: 2632 - DNA, 377 bp, Triticum aestivum
  Clone ID: uC-tsfl9316012d06b1
tacatctagcggatttggattgctttaacaactaatgttcctgttttgaacattttaaagccaagggctttcgcccatctccaatagctaacaagaactctgtcttttctttacaaatcccaaaacctttactagactttgtctgcttctttagcttacttcacctaaagtcttctacctgttcttatcattgaatcaacccctttttttttttcttttaaacacatcccaacccaaagtataagcgcccacctagtcctatctagtccgaaaaatgcgaactagaactacctgagacactatctctgtcgatacgaacctaacactacctaccaagcttaatctgaattagacctcacaacactcacaagttatta

SEQ ID NO: 2633 - DNA, 153 bp, Triticum aestivum
  Clone ID: uC-tsfl9316012e01b1
cctccgaccggtgcccgcacctagcaaagagggcagcgcacgaaatgctcaacctgatcggcatatgttacatggaggttattcacccgaagatgcctgctgcctgctattcaacgtgatcgattctaacctcaaagtcgcccatgatcctca

SEQ ID NO: 2634 - DNA, 297 bp, Triticum aestivum
  Clone ID: uC-tsfl9316012e02b1
tctttcgctctcttcttggagatgatggtttggctcgccagattggcagggatgatttaaggctgaagcttatgaggaaaggcttgacacaaaagagcaactgtgaggcataacagaatggagtggatctccgtgaaaagctttccaggaagtcaaagaaactccagggatacgaggcaagaaggggtgatccagaatcaaggtctaattatgatgagggggaaatcccaaaatcaggatctggatatggtttgagggggagagtcccacaatcaagagcctctactcttgtaagcc

SEQ ID NO: 2635 - DNA, 105 bp, Triticum aestivum
  Clone ID: uC-tsfl9316012e04b1
cctggttgtaacacttgaatgcccagggcttttgcccatctgcagtaccctacaagaactctttgttttctttaccaaatcccaaacccttaatagaccttttcc

SEQ ID NO: 2636 - DNA, 374 bp, Triticum aestivum
  Clone ID: uC-tsfl9316012e05b1
gctctaagctaacactttggtacatctagccgatttgggattttttaacaactaaaggttctgtttttaacattttaaagccaaggggcttttgcccatctgcaatagctaaaaaagaactctttcttttctttacaaataccaaaacctttactagaccctttctgcttctttagcttactttacctagagtcttctaccttttcttatcattgaatcaacccctttttttttttcttttaaacacatcccaacccaaagtataagcgcccacctagtcctatctaatgccaaaaatgccaactagaactacatgagacactatctttgtcgttacgaaccttatcactttttaccaagctttaatcgggaat

SEQ ID NO: 2637 - DNA, 494 bp, Triticum aestivum
  Clone ID: uC-tsfl9316012e06b1
aagctaacactttgttacatctagcggatttggatttctttaacaactaaggttcctgtttttaacattttaaagccaagggcttttgcccatctccaatagctaacaagaactctttcgtttctttacaaatcccgaaacctttactagactttttctgcttctttagcttacttcacctagagtcttctaccttttcttatcattgaatcaacccctttttttttttcttttaaacacatcccaacccaaagtataagcgcccacctagtcctatctagtccgaaaaatgcgaactagaactacatgagacactatctctgtcgttacgaacctaacactttctaccaagcttaatcggaataagacctcacaaacactcacaagttatatagggcttgaaagaaagtctaggtttgggtttgggttaactgctctaataaggagagtcagctacttggattaaaaagagtgatcaaaatgaataagaaaat

SEQ ID NO: 2638 - DNA, 183 bp, Triticum aestivum
  Clone ID: uC-tsfl9316012e07b1
acactttgttacatctagcggatttggatttctttaacaactaaggctcctgtttttaacattttaaagtcaaaggctcttgcccatctccaatagctaacaagaactctttttcttcaatcaaactactgacttttgttttactactcacaagctctccttctatatgatcacccttttttt

SEQ ID NO: 2639 - DNA, 184 bp, Triticum aestivum
  Clone ID: uC-tsfl9316012e09b1
tgtccgacctattgccgacctagcaaatggtcagccaagaaagccaactgacggcattgcacatgagctgacaaagaaatgctgctgctgctattcaacgagatcgtttaacctaagcgccaatcatgcagctgcacatgtcaccgtgagcggcctggcccaagcaacccgcacatggctgtcg

SEQ ID NO: 2640 - DNA, 527 bp, Triticum aestivum
  Clone ID: uC-tsfl9316012f01b1
gttctccgacctcttcccgcacctagcaaatggttagccaagaaagccaactgacggcattgtacatgagcttacaaagaaatgctgctgctgctattcaacgagatcgattctaacctcaaagcgcccagatcccaatgacgagctcgtcgacgatgtccaccacgttgcattcgcgccatgggccccgaatgcgaaccccgtcgacatggcctggtccgttgtgccggtactgcgatccggcgacttgtcccattcgaccatccagttctcgccctcctcgtcggcgcttcagagcttcgccgtgaccctgcaacaggtggccccttcgaagctgtccagccacaggcgcaggggcattgagatcctcgtcctcgacgttgcttcccttgcgctagacacggtgttcgtcaacctggagagcgaattgacaaaaccgctggagagcggtgaaggcaccttttacaaggaccatccgacaagccccaatgccaaggacgttgccaacatgacgcccgaggagcgtc

SEQ ID NO: 2641 - DNA, 252 bp, Triticum aestivum
  Clone ID: uC-tsfl9316012f02b1
aacgctaacactttgttacatctagcggatttggatttctttaacaactaagggtcctgtttttaacattttatagccaagggctttttgcccatcctgcaatagcttaacaggaacctctttcttttctttacaaaatcccaaaaccctttactagaactttttctgcttctttaggcttacttcaaccctaaaggcttctaccctttctttataattgaatcaaccccctttttttttttttttttaaaa

SEQ ID NO: 2642 - DNA, 448 bp, Triticum aestivum
  Clone ID: uC-tsfl9316012f03b1
gctctaacgtgttctccgacctcttcccgcacctagcaaatggtgagccaagaaagccaactgacggcattgcacatgagctgacaaagaaatgctgctgctgctattcaacgagatcgattctaacctcaaagcgcccatatcccaatgacgagctcgtcgacgatgtccaccacgttgcagtcgcgccatgggccccgaatgcgaaccccgtcgacatggcctggtccgatgtgccggtactgcgatccggcgacttgtcccattcgaccatccagttctcgccctcctcgtcggcgcttcagagcttcgccgtgaccctgcaacaggtggtcccttcgaagctgtgcagccacagccgcagaggcattgagatcctcgtactcaacgttgctccccttacgatagacacggtgttcgtcaacctggagagctgattgacaaaacg

SEQ ID NO: 2643 - DNA, 467 bp, Triticum aestivum
  Clone ID: uC-tsfl9316012f05b1
ctaacactttgttacatctagcggatttggatttctttaacaactaaggttcctgtttttaacattttaaagccaagggcttttgcccatctccaatagctaacaagaactctttcttttctgtacaaatcccaaaacctttactagactttttctgcttctttagcttacttcacctagagtcttctaccttttcttatcattgaatcaacccctttttttttttcttttaaacacatcccaacccaaagtataagcgcccacctagtcctatctagtccgaaaaatgcgaactagaactacatgagacactatctctgtcgttacgaacctaacactttctaccaagcttaatcggaataagacctcacaaacactcacaagttatatagggcttgaaagaaagtctaaggttgggtttgggttaactgctctaataaggagagtcagctacttggattaaaaga

SEQ ID NO: 2644 - DNA, 318 bp, Triticum aestivum
  Clone ID: uC-tsfl9316012f06b1
cggatttggatttcttaacaactaaggttcctgtttttaacattttaaagctcaagggcttttgcccatctccaatagctaacaagaactctttcttttctttacaaatcccaaaacctttactagactttttctgcttctttagcttacttcacctagagtcttctaccttttcttatcattgaatcaacccctttttttttttcttttaaacacatcccaacccaaagtataagcgcccacctagtcctatctagtccgaaaaatgcgaactagaactacatgagacactatctctgtcgttacgaacctaacact

SEQ ID NO: 2645 - DNA, 230 bp, Triticum aestivum
  Clone ID: uC-tsfl9316012f08b1
tacatctagcggatttggatttctttaacagctaaggttcctgtctttaacattttaaagtcaagggctcatgcccatctccaatagctaacaagaaccttcttctttcaaatccaaacgactgacttttgtcttactacttactaagctttcctttttatatgacaccctttttttttttaaacacatcaaccaagttacccccacctatccttctagacgaaagcaac

SEQ ID NO: 2646 - DNA, 75 bp, Triticum aestivum
  Clone ID: uC-tsfl9316012f09b1
gacgtcatagctcttgtataggtacctaagaatcactggcgcgttacaacgcggctgaaaacctgcgccccactt

SEQ ID NO: 2647 - DNA, 347 bp, Triticum aestivum
  Clone ID: uC-tsfl9316012f10b1
ggtaacgacagtgacatccctacggagccccttccattatctgtgcgtcgctgtgttcacaaataacccgtgagctacacgcaattggggcgagctaaggaaatccacagctgcacaatcgtgaagagatcaactcattggcccagagtgaaaaaatggtgttcgtcactgattgtcagcactacaaagcgctgggagtacaagagtgcgaagacaaggtttgcatatctgatgggatggattatcacgttcgtggactgctgtgcaacgtgatgcgcaaactttatgtgtgtttaaaaaaaagcgcgttagacagtctcctctgacgtattttggactatatatgc

SEQ ID NO: 2648 - DNA, 228 bp, Triticum aestivum
  Clone ID: uC-tsfl9316012f11b1
gcttaactgttctccgacctcttcccgcacctagcaaatggtaagccaagaaagccaactgacggcattgcacatgagttttacaaagaaatgctgctgctgctattcaacgagatgattacctaagcgccaatcaagcagctgcacatgtccacttgatcccctggcccaagcaaccccactggctgtcgtggcgactgaccgcactgtcatcactcagtctgctct

SEQ ID NO: 2649 - DNA, 555 bp, Triticum aestivum
  Clone ID: uC-tsfl9316012g01b1
gctctaacgctaacactttgttacatctagcggatttggatttctttaacaactaaggttcctgtttttaacattttaaagccaagggcttttgcccatctccaatagctaacaagaactctttcttttctttacaaatcccaaaacctttactagactttttctgcttctttagcttacttcacctagagtcttctaccttttcttatcattgaatcaacccctttttttttttcttttaaacacatcccaacccaaagtataagcgcccacctagtcctatctagtccgaaaaatgcgaactagaactacatgagacactatctctgtcgttacgaacctaacactttctaccaagcttaatcggaataagacctcacaaacactcacaagttatatagggcttgaaagaaagtctaggtttgggtttgggttaactgctctaataaggagagtcagctacttggattaaaaagagtgatcaaaatgaataagaaaatccaagtattttacggtatccatgagttcaaatttgatgcagacatgataattaaa

SEQ ID NO: 2650 - DNA, 533 bp, Triticum aestivum
  Clone ID: uC-tsfl9316012g02b1
gctctaacgtgtactccgacctcttcccgcacctagcaaatggtaagccaagaaagccgactgacggcattgcacatgagcagacaaggaaatgctgctgctgctattcaacgagatcgattctaacctcaaagcgcccagatcccaatgacgagctcgtcgacgatgtccaccacgttgcagtcgcgccatgggccccgaatgcgaaccccgtcgacatggcctggtccgttgtgccggtactgcgatccggcgacttgtcccattcgaccatccagttctagccctcctcgacggcgcttcagagcttcgccgggaccctgcaacaggtggccccttagaagctgttcagtcacaggctgagcggcattgagatcctcgaactcgacgttggtccccttgcgctagacacagtgttcgtgaacctggagagcgaattgacaaaactgctggagagcggctagggcaccttttacaaggaccattcgacaagccccaatgccaaggacgttgccaacatgacgcccgaggag

SEQ ID NO: 2651 - DNA, 401 bp, Triticum aestivum
  Clone ID: uC-tsfl9316012g03b1
gctctaaacgctaacactttgttacatctagcggatttggatttctttaacaactaaggttcctgtttttaacattttaaagccaagggcttttgcccatctccaatagctaacaagaactctttcttttctttacaaatcccaaaacctttactagactttttctgcttctttagcttacttcacctagagtcttctaccttttcttatcattgaatcaacccctttttttttttcttttaaacacatcccaacccaaagtataagcgcccacctagtcctatctagtccgaaaaatgcgaactagaactacatgagacactatctctgtcgttacgaacctaacactttctaccaagcttaatcggaataagacctcacaaacactcacaagttatata

SEQ ID NO: 2652 - DNA, 527 bp, Triticum aestivum
  Clone ID: uC-tsfl9316012g04b1
gctctaacctaacactttgttacatctagcggatttggatttctttaacaactaaggttcctgtttttaacattttaaagccaagggcttttgcccatctgcaatagctaacaagaactctttcttttctttacaaatcccaaaacctttactagactttttctgcttctttagcttacttcacctagagtcttctaccttttcttatcattgaatcaacccctttttttttttcttttaaacacatcccaacccaaagtataagcgcccacctagtcctatctagtccgaaaaatgcgaactagaactacatgagacactatctctgtcgttacgaacctaacactttctaccaagcttaatcggaataagacctcacaaacactcacaagttatatagggcttgaaagaaagtctaggtttgggtttgggttaactgctctaataaggagagtcagctacttggattaaaaagagtgatcaaaatgaataagaaaatccaagtgttttacggtatccatgaggtc

SEQ ID NO: 2653 - DNA, 328 bp, Triticum aestivum
  unsure (1)..(328): unsure at all n locations
  Clone ID: uC-tsfl9316012g06b1
tctacgacctnttcccgcacctagcaaagggtgacgccaagaaagccaactgactgcattgcacatgaacatacaaagaaatgctgctgctgctattcaacgagatcgattctaacctcatagcgcccagatgcaaaagacaagctggtcgactatgtgcaccacgttgcacaagccccatgggctcccaaggcgagcagagcagacatggtcatttccattgggacggaactgagatccggggagtagctccataccaccatccagatatgggcctcctccactgcgcttcagagctttgtcgtgaccctgtgacatgtggcccctt

SEQ ID NO: 2654 - DNA, 215 bp, Triticum aestivum
  Clone ID: uC-tsfl9316012g09b1
gctctaaccctaacactttgttacatctagcggatttggatttctttaacaactaaggttcctgtttttaacattttacagccaagggcttttgcccatctccaatagctaacaagactttttttttacaatccaaactactgatttctgtcttactactcacctaagctctccttttttatattgataaccctttttttttttaacacatcacc

SEQ ID NO: 2655 - DNA, 295 bp, Triticum aestivum
  Clone ID: uC-tsfl9316012g10b1
gctctaaagctcaacactttgttacatctagcggatttggatttctttaacaactaaggttcctgtttttaacattttaaagccaagggcttttgcccatctccaatagctaacaagactttttttttttcaatccaacctttactagacttttgttttactacttacctaagctttcctttttatatgataccctttttttttttttaacacatcaccaagatacgccactagtctattagtcaaaatgcaactaactactagacacttttgtgtacaacctcactttaccagc

SEQ ID NO: 2656 - DNA, 278 bp, Triticum aestivum
  Clone ID: uC-tsfl9316012g11b1
ctctaacgctcaacactttgttacatctagcggatttggatttctttaacaactaaggttcctgtttttaacattttatagccaagggcttttgcccatctccaatagctaacaagactttctttttttacaatcaaacctactgacttttgttttactacttactaagctttcctttttatattgataacccttttttttttttaaacacatccacccaagatagcccacctgcctattatcaaaatgcactaactcatgaacactatttgcgtaca

SEQ ID NO: 2657 - DNA, 489 bp, Triticum aestivum
  Clone ID: uC-tsfl9316012h02b1
gctctaacgctcaacactttgttacatctagcggatttggatttctttaacaactaaggttcctgtttttaacattttaaagccaagggcttttgcccatctccaatagctaacaagaactctttcttttctttacaaatcccaaaacctttactagactttttctgcttctttagcttacttcacctagagtcttctaccttttcttatcattgaatcaacccctttttttttttcttttaaacacatcccaacccaaagtataagcgcccacctagtcctatctagtccgaaaaatgcgaactagaactacatgagacactatctctgtcgttacgaacctaacactttctaccaagcttaatcggaataagacctcacaaacactcacaagttatatagggcttgaaagaaagtctaggtttgggtttgggctaactgctctaataaggagagtcagctacttggattaaaaagagtgatcaaaat

SEQ ID NO: 2658 - DNA, 638 bp, Triticum aestivum
  Clone ID: uC-tsfl9316012h04b1
acactttgttacatctagcggatttggatttctttaacaactaaggttcctgtttttaacattttaaagccaagggcttttgcccatctccaatagctaacaagaactctttcttttctttacaaatcccaaaacctttactagactttttctgcttctttagcttacttcacctagagtcttctaccttttcttatcattgaatcaacccctttttttttttcttttaaacacatcccaacccaaagtataagcgcccacctagtcctatctagtccgaaaaatgcgaactagaactacatgagacactatctctgtcgttacgaacctaacactttctaccaagcttaatcggaataagacctcacaaacactcacaagttatatagggcttgaaagaaagtctaggtttgggtttgggttaactgctctaataaggagagtcagctacttggattaaaaagagtgatcaaaatgaataagaaaatccaagtattttacggtattcatgagttcaaatttgatgcagacatgataattaaaagattagattcaggttcaaattgatagggaatggtttcagatcatgacagtgtggtcgagtagaacaatctaagcatggttcagttttttttttt

SEQ ID NO: 2659 - DNA, 274 bp, Triticum aestivum
  Clone ID: uC-tsfl9316012h05b1
acaactgacgactgtgggcttaacacatgaacgcccagggctatggtgcagctgctatagatcgcgagaactttttatcttattgagcaaagccacaaccgacactcgactttacgtggttcaccagcttacttcacctccagggtcctaccttgcgatctcatgtgaacaagcccttgttcgttgtgcttgtaaccgcatcccagccacatagtactagcgcccatctagttctatctactcctgaaaaatgctaactagatctacctgaaac

SEQ ID NO: 2660 - DNA, 412 bp, Triticum aestivum
  Clone ID: uC-tsfl9316012h06b1
ctcaacactttgttacatctagcggatttggatttctttaacaactaaggttcctgtttttaacattttaaagccaagggcttttgcccatctccaatagctaacaagaactctttcttttctttacaaatcccaaaacctttactagactttttctgcttctttagcttacttcacctagagtcttctaccttttcttatcattgaatcaacccctttttttttttcttttaaacacatcccaacccaaagtataagcgcccacctagtcctatctagtccgaaaaatgcgaactagaactacatgagacactatctctgtcgttacgaacctaacactttctaccaagcttaatcggaataagacctcacaaacactcacaagttatatagggcttgaaagaaaagtcta

SEQ ID NO: 2661 - DNA, 437 bp, Triticum aestivum
  Clone ID: uC-tsfl9316012h07b1
gctctaaagtgttctccgacctcttcccgcacctagcaaatggtaagccaagaaagccaactgacggcattgcacatgagcagacaaagaaatgctgctgctgctattcaacgagatatctacctaaagcgccaatcatgcagctgcacatgtcaccacttgatccccatggcccaatgcaaccgcacatggctgtcgtggccgctgatccgactgtcatcacctcagtctgcctctgcggcttaagttgcgacctgacagggcctcaactgccgccagcgagggatgaatctgtccacgtgtccttcgtgaacggtcgaactgaagaatgacaacgtgaagcgaggcccttacagcatcacagcatgcagactgcactacccagagcgtaccgcctaggagttacactagatgcatcgcatgttcgtgcttggcat

SEQ ID NO: 2662 - DNA, 296 bp, Triticum aestivum
  Clone ID: uC-tsfl9316012h08b1
gttctccgacctcttcccgcacctagcaaatggtaagccaagaaagccaactgacggcattgcacatgagcagacaaagaaatgctgctgctgctattcaacgagatatctacctaaggccaaccaagcagtctcacatgtcacattcagccccatggcccaatgcaacccgcacatggctgtcgtggcgactgcaccgcgactgtcatcaccatcagctgcctctgtggcttaagttgcggactgacggggcctcaagtgcacccagcgagggatgaaccctctcacgtgtcctt

SEQ ID NO: 2663 - DNA, 366 bp, Triticum aestivum
  Clone ID: uC-tsfl9316012h09b1
gctctaaagctcaacactttgttacatctagcggatttggatttctttaacaactaaggttcctgtttttaacattttaaagccaagggcttttgcccatctccaatagctaacaagactcttttttttacaatccaaacttactagacttttgttttagtacttacctaagttttactttttatatgatacccttttttttttttaaccatccaccaagatagcgccactgtctattagccgaaaagcacagactactagaactatttgtgtacaactacactttacagctaatggatagacacaacactacagtattgggtgagaagctggtggttggtactgtctatagaagcagtctgataa

SEQ ID NO: 2664 - DNA, 312 bp, Triticum aestivum
  Clone ID: uC-tsfl9316012h10b1
ctctaacctgttctccgacctcttcccgcacctagcaaatggtaagccaagaaagccaactgacggcattgcacatgaacttacaaagaaatgctgctgctgctattcaacgagagtattacctaaagcgccatccaatgcagctcgcacatgtccaccacgttcagccccatggcccaatgcacccctcacatggctgtcgtggcgactgatccgactgtcatcaccatcgtctgcctctgtcgcttaacttccgacctgccagggccttaagtgcacccagcgagggatgaacctcgccacgtgtccttc

SEQ ID NO: 2665 - DNA, 424 bp, Triticum aestivum
  Clone ID: uC-tsfl9316012h11b1
gttctccgacctcttcccgcacctagcaaatggtaagccaagaaagccaactgacggcattgcacatgagctgacaaagaaatgctgctgctgctattcaacgagatcatctacctaagcgccaatccaagcagctgcacatgtcacccgtgagcgccatgggccaatgcacccgcactggctgtcgtggccgctgaccggactgtcatcaccatcagttgcctctgtgggctaagttgcgacctgacaggggccttaagtgcacccagcgagggatgaatctgtccacgtgtccttcgtgaacgtgcgaactgaaggatgcaaacgtgaagggagggctttcaggcatcacagccatgcagcgtgcactgacccagaggtaccgcctaggagttacacctaatgcatccgatgtcgtgttgcg

SEQ ID NO: 2666 - DNA, 111 bp, Triticum aestivum
  Clone ID: uC-tsfl9316013a01b1
cgacctcttcccgcacctagcaaatgggtaggccagaaaagccacctgacggctttgcccatgacctgcattttaaatgctgctgctgctcttcaacgagaccgatcacct

SEQ ID NO: 2667 - DNA, 368 bp, Triticum aestivum
  Clone ID: uC-tsfl9316013a02b1
cccgacctcttcccgcacctagcaaatggtaagccaagaaagccaactgacggcattgcacatgagcttaatttttaaatgctgctgctgctattcaacgagatcgatttcctaagcgccgaccaagcagctgcacatgccacacttgcatgcctggcccgagcacccgcactggctggccgtggcggtctggatcgcactgtcatcaccatcatctgcctctctcgcttaagtcgcgacctgcacggggccttaattgtctccagccagcgatgaatctatctcactgctccttcctgaccggctgaactgaaggatgcaaacgtgagaggcagggctttacagcatcacagccatgcagcctgcac

SEQ ID NO: 2668 - DNA, 385 bp, Triticum aestivum
  Clone ID: uC-tsfl9316013a05b1
aggacctgtttgtgaacattgctgttgccatcggtgcccaagtccagttccttggtttccttcaagatgtgtcttgtgaaagaaacttgaagcattttgtattggcaattgttggattgtgggctgcttctgtagctgggagctggttcaacttcctgactgtcatttacattgggtttgtctgcgcgcacacgctccctgtgctgtacgagaagtacgaggaccaggtcgacgacttcctctacagcatcctgggcctgctccgagagcagtaccagaaactcgacagcggcgtcctgagcaggataccctccaagaggaacaagaagagcgagtagattgattagatcagatggacactcatgatttatcgagtgaaatccca

SEQ ID NO: 2669 - DNA, 429 bp, Triticum aestivum
  Clone ID: uC-tsfl9316013a06b1
cttggacagcggcagtgccgtcggcgccgccctcacgggcgcgcgcgctggcggccggggccgggctcgtgctcccgcggctcgccatggacccaggcctggtgtacgacgccggcgcgcaggactacgtcgacttcctctgcacactcaactacacggtggagcagatgcggctgttcgtcccggagctgaacaagtgcgacaggacgatccccggcggcgtggccaacctgaaccacccgtcgttcgtggtggtgttcgacggccgcacccgcgtctgcacgctgacgcggacggtgaccttggtgtcggcgcgccccgagagctacaacgtgacggtctccgcgcccgacggtgtgaaggtgaccgtgacgccggcgacgctggagttcagggtggccgaacgagaagaggagctacagcgtgcag

SEQ ID NO: 2670 - DNA, 420 bp, Triticum aestivum
  Clone ID: uC-tsfl9316013a07b1
taacactttgttacatctagcggatttggatttctttaacaactaaggttcctgtttttaacattttaaagccaagggcttttgcccatctccaatagctaacaagaactcttttttctttacaaatcccaaaacctttactagactttttctgcttctttagcttacttcacctagagtcttctaccttttcttatcattgaatcaacccctttttttttttcttttaaacccatcccaccccaaagtttaagcgcccacctagtcctatctagtccgaaaaatgcgaactagaactacatgagacactatctctgtggttacgaacctaacactttctaccaagcttaatcggaataagacctcacaaacactcacaagttatatagggcttgaaagaaagtctaggttggggttggg

SEQ ID NO: 2671 - DNA, 515 bp, Triticum aestivum
  Clone ID: uC-tsfl9316013a08b1
cgtgttctccgacctcttcccgcacctagcaaatggtaagccaagaaagccaactgacggcattgcacatgagctgacatagaaatgctgctgctgctattcaacgagatcgatctacctcaaagcgcccagatcccaatgacgagctcgtcgacgatgtccaccacgttgcagtcgcgccatgggccccgaatgcgaaccccgtcgacatggcctggtccgttgtgccggtactgcgatccggcgacttgtcccattcgaccatccagttctcgccctcctcgtcggcgcttcagagcttcgccgtgaccctgcaacaggtggccccttcgaagctgtccagccacagccgcagcggcattgagatcctcgtcctcgacgttgctccccttccgctagacacggtgttcgtcaacctggagagcgaattgacaaaacggctggagagcggcgagggcaccttttacaaggaccatccgacaagccccaatgccatggacgttgccaacatgacg

SEQ ID NO: 2672 - DNA, 453 bp, Triticum aestivum
  Clone ID: uC-tsfl9316013a09b1
cgctaacactttgttacatctagcggatttggatttctttaacaactaaggttcctgtttttaacattttaaagccaagggcttttgcccatctccaatagctaacaagaactcttttttctttacaaatcccaaaacctttactagactttttctgcttctttagcttacttcacctagagtcttctaccttttcttatcattgaatcaacccctttttttttttcttttaaacacatcccaacccaaagtataagcgcccacctagtcctatctagtccgaaaaatgcgaactagaactacatgagacactatctctgtcgttacgaacctaacactttctaccaagcttaatcggaataagacctcacaaacactcacaagttatatagggcttgaaagaaagtctaagtttgggtttgggttaactgctctaataaggagagtcagcta

SEQ ID NO: 2673 - DNA, 59 bp, Triticum aestivum
  Clone ID: uC-tsfl9316013a11b1
aaaaaaaattaaaaaaaaaaaaaaaaaaaaaaaaaaaaaaaaacaaaaaaaaaaaaaaa

SEQ ID NO: 2674 - DNA, 215 bp, Triticum aestivum
  Clone ID: uC-tsfl9316013a12b1
ctcacgcgtacgcccacgcgtgcggtgtgctccagttccccgtcgcagatcgcccggttcctgaaggccggcaagtacgccgtgtgggtcggcgccggcgcccccgtttacctcgccgacgtgctcgagtatctcgccgccgcggctctggagttgcccaagatcgcggctagggacaacaagatgaccctcatcgtgccgagccacatggagct

SEQ ID NO: 2675 - DNA, 195 bp, Triticum aestivum
  Clone ID: uC-tsfl9316013b03b1
ctctaagtgttctccgacctcttcccgcacctagcaaatggtaagccaagaaagccaactgacggcattgcacatgagcagacaaagaaatgctgctgctgctattcaacgagatcgattaacctaagcgccaatcaagcagtctcacatgtcacacttgatccccatgcccaatgcacccgcacatggctgtcg

SEQ ID NO: 2676 - DNA, 559 bp, Triticum aestivum
  Clone ID: uC-tsfl9316013b09b1
tgttctccgacctcttcccgcacctatgcaattggtaagccaagaaagccaactgacggcattgcacatgagcagacaatgaaatgctgctgctgctattcaacgagatcgatctacctcaaagcgcccagatcccaatgacgagctcgtcgacgatgtccaccacgttgcagtcgcgccatgggccccgaatgcgaaccccgtcgacatggcctggtccgttgtgccggtactgcgatccggcgacttgtcccattcgaccatccagttctcgccctcctcgtcggcgcttcagagcttcgccgtgaccctgcaacaggtggccccttcgaagctgtccagccacagccgcagcggcattgagatcctcgtcctcgacgttgctccccttccgctagacacggtgttcgtcaacctggagagcgaattgacaaaacggctggagagcggcgagggcaccttttacaaggaccatccgacaagccccaatgccaaggacgttgccaacatgacgcccgaagagcgtctagccacggcgctcatggcagctctcagcacc

SEQ ID NO: 2677 - DNA, 443 bp, Triticum aestivum
  Clone ID: uC-tsfl9316013b11b1
gctaacactttgttacatctagcggatttggatttctttaacaactaaggttcctgtttttaacattttaaagccaatgtcttttgcccatctccaatagctaacaagaactctctttctttacaaatcccaaaacctttactagactttttctgcttctttagcttacttcacctagagtcttctaccttttcttatcattgaatcaacccctttttttttttcttttaaacacattccaacccaaagtattagcgcccaccttgtcctatctagtccgaaaaatgcgaactagaactacatgagacactatctctgtcgttacgaaccttacactttctaccaagcttaatcggaattagaccttacaaacactcacaagttatatagggcttgaaagaaagtctaagtttgggtttgggttaactgctctaataaggaga

SEQ ID NO: 2678 - DNA, 450 bp, Triticum aestivum
  Clone ID: uC-tsfl9316013c03b1
gttctccgacctcttcccgcacctagcaaatggtaagccaagaaagccaactgacggcattgcacatgagcttacacggaaatgctgctgctgctattcaacgagatcgattctaactaagcgccaatccatgcagctgcacatgtccaccattgatccccatggccccaatgcacccgcacatggctggccgtggccgctgatccgactgtcatcaccatcagtctgcctctgtcgcttaagttgcggactgacggggccttaagtgccgccagcgagggatgaatctgtccacgtgtccttcgtgacacggtgaaccgaagaatgcaaacgtgaagggaggccctttcaggcatcacagccatgcagcgtgcacatacccgagggtaccacggctagagttagacctaatgcattcggatgtcgtcttgcgcgatcgtctactgcgct

SEQ ID NO: 2679 - DNA, 587 bp, Triticum aestivum
  Clone ID: uC-tsfl9316013c04b1
acactttgttacatctagcggatttggatttctttaacaactaaggttcctgtttttaacattttaaagccaagggcttttgcccatctccaatagctaacaagaactcctctttctttacaaatcccaaaacctttactagactttttctgcttctttagcttacttcacctagagtcttctaccttttcttatcattgaatcaacccctttttttttttcttttaaacacatcccaacccaaagtataagcgcccacctagtcctatctagtccgaaaaatgcgaactagaactacatgagacactatctctgtcgttacgaacctaacactttctaccaagcttaatcggaataagacctcacaaacactcacaagttatatagggcttgaaagaaagtctaggcttgggtttgggctaactgctctaataaggagagtcagctacttggattaaaaagagtgatcaaaatgaataagaaaatccaagtattttacggtatccatgagttcaaatttgatgcagacatgataattaaagattagattcaagctccaattgatagggaatggtatcagatcatga

SEQ ID NO: 2680 - DNA, 487 bp, Triticum aestivum
  Clone ID: uC-tsfl9316013c06b1
gttctccgacctcttcccgcacctagcaaatggtaagccaagaaagccaactgacggcattgcacatgagctgacaaagaaatgctgctgctgctattcaacgagatcgattaactcaaagcgcccagatcccaatgacgagctcgtcgacgatgtccaccacgttgcagtcgcgccatgggccccgaatgcgaaccccgtcgacatggcctggtccgttgtgccggtactgcgatccggcgacttgtcccattcgaccatccagttctcgccctcctcgtcggcgcttcagagcttcgccgtgaccctgcaacaggtggccccttcgaagctgtccagccacagccgcagcggcattgagatcctcgtcctcgacgttgctccccttccgctagacacggtgttcgtcaacctggagagcgaattgacaaaacggctggagagcggcgagggcaccttttacaaggaccatccgacaagccccaat

SEQ ID NO: 2681 - DNA, 563 bp, Triticum aestivum
  Clone ID: uC-tsfl9316013c07b1
gttctccgacctcttcccgcacctagcaaatggtaagccaagaaagccaactgacggcattgcacatgagctgacattgaaatgctgctgctgctattcaacgagatcgatttactcaaagcgcccagatcccaatgacgagctcgtcgacgatgtccaccacgttgcagtcgcgccatgggccccgaatgcgaaccccgtcgacatggcctggtccgttgtgccggtactgcgatccggcgacttgtcccattcgaccatccagttctcgccctcctcgtcggcgcttcagagcttcgccgtgaccctgcaacaggtggccccttcgaagctgtccagccacagccgcagcggcattgagatcctcgtcctcgacgttgctccccttccgctagacacggtgttcgtcaacctggagagcgaattgacaaaacggctggagagcggcgagggcaccttttacaaggaccatccgacaagccccaatgccaaggacgttgccaacatgacgcccgaggagcgtctagccacggcgctcagggcagctctcagcaccctcaaga

SEQ ID NO: 2682 - DNA, 560 bp, Triticum aestivum
  Clone ID: uC-tsfl9316013c08b1
gttctccgacctcttcccgcacctagcaattggtaagccaagaaagccaactgacggcattgcacatgagctgacaaagaaatgctgctgctgctattcaacgagatcgattcactcaaagcgcccagatcccaatgacgagctcgtcgacgatgtccaccacgttgcagtcgcgccatgggccccgaatgcgaaccccgtcgacatggcctggtccgttgtgccggtactgcgatccggcgacttgtcccattcgaccatccagttctcgccctcctcgtcggcgcttcagagcttcgccgtgaccctgcaacaggtggccccttcgaagctgtccagccacagccgcagcggcattgagatcctcgtcctcgacgttgctccccttccgctagacacggtgttcgtcaacctggagagcgaattgacaaaacggctggagagcggcgagggcaccttttacaaggaccatccgacaagccccaatgccaaggacgttgccaacatgacgcccgaggagcgtctagccacggcgctcatggcagctctcaacaccctca

SEQ ID NO: 2683 - DNA, 343 bp, Triticum aestivum
  Clone ID: uC-tsfl9316013c09b1
gtccggtggcggagtcacgagggccgaccgacgcgttcgaacatgaaggggacaagcaaatgctgctgctgctataagcgagacgtctaacctcaaagcgcccagaccccaatgacgagctcgtggaccatgaccaccacgttgcagtcgcgccatgggccccgaatgcaaaccccgtcgacatggcctggtccgttgtgccgagactgcgatccggcgacttgcgccattcgaccatccagttatggccctcctcgtgggcgcttcatagctgagacgcgaccctggaccaggcggccccttcaaagctgaccagccacagccggagggggatcgagatcct

SEQ ID NO: 2684 - DNA, 376 bp, Triticum aestivum
  unsure (1)..(376): unsure at all n locations
  Clone ID: uC-tsfl9316013c10b1
tttgttacatctagcggatttggatttctttaacaactaaggttcctgtttttaacattccatttgtcatttctttcgcccatctccaatagctaacaagaactnttctttctttacaaatcccaaaacctttactagactttttctgcttctttagcttacttcacctagagtcttctaccttttcttattattgaatcaacccctttttttttttcttttaaacacatcccaacccaaagtataagccgcccacctagtcctatctagtccgaaaaatgcgaactaaaactacatgagacactatcttttgtcggttccgaacctaacactttttacccaagcttaattcggaataaagaccctcacaaaacac

SEQ ID NO: 2685 - DNA, 523 bp, Triticum aestivum
  Clone ID: uC-tsfl9316013c11b1
gctcaacactttgttacatctagcggatttggatttcttaacaactaaggttcctgtttttaacattttaaagccaagggcttttgcccatctccaatagctaacaagaactctttcttctttacaaatcccaaaacctttactagactttttctgcttctttagcttacttcacctagagtcttctaccttttcttatcattgaatcaacccctttttttttttcttttaaacacatcccaacccaaagtataagcgcccacctagtcctatctagtccgaaaaatgcgaactagaactacatgagacactatctctgtcgttacgaacctaacactttctaccaagcttaatcggaataagacctcacaaacactcacaagttatatagggcttgaaagaaagtctaggtttgggtttgggttaactgctctaataaggagagtcagctacttggattaaacagagtgatcaaaatgaataagaaaatccaagtattttacgggatccatgagttcaaatt

SEQ ID NO: 2686 - DNA, 519 bp, Triticum aestivum
  Clone ID: uC-tsfl9316013c12b1
aacactttgttacatctagcggatttggatttctttaacaactaaggttcctgtttttaacattttaaagccaagggcttttgcccatctccaatagctaacaagaactctttcttctttacaaatcccaaaacctttactagactttttctgcttctttagcttacttcacctagagtcttctaccttttcttatcattgaatcaacccctttttttttttcttttaaacacatcccaacccaaagtataagcgcccacctagtcctatctagtccgaaaaatgcgaactagacctacatgaaacactatctttgtcgttacgaacctaacactttctaccaagcttaatcggaataagacctcacaaacactcacaagttatatagggcttgaaagaaagtctaggtttgggtttgggttaactgctctaataaggagagtcagctacttggattaaaaagagtgatcaaaatgaataagaaaatccaagtattttacggtatccatgagttcaaat

SEQ ID NO: 2687 - DNA, 333 bp, Triticum aestivum
  Clone ID: uC-tsfl9316013d02b1
gttctccgacctcttcccgcacctagcaaatggtaagccaagaaagccaactgacggcattgcacatgagcttacaaggaaatgctgctgctgctattcaacgagatcgattctacctaagcgccaatcatgcagctgcacatgccaccacgttgagtcccctggccccaatgcacccgcacatggctgtcgtggcgactgatcggactgtcatcaccatcagtctgcctctgcgccttaagcttgcgacctcacagggccttaagtgccgccagcgacggttagacctgctacgtgtccttcgtgacacggcgaaccgaagaatgcaacgtg

SEQ ID NO: 2688 - DNA, 403 bp, Triticum aestivum
  Clone ID: uC-tsfl9316013d03b1
gacctcttcccgaacctagcaaatggtaagccaagaaagccaactgacggcattgcacatgagcttacaatcaaatgctgctgctgctattcaacgagatcgattctaactacagcgcagaccaagcagctgcacatgcacacgtgagccgcaggcccgaagcacccgcacatggctggccgtggcggcgcaccgggatgtcatcgcatcagtctgcctctgtgccttaagtcgcggactgacagggccttaagtgcaccaagcgagggttgaacctgtccacgtgtccttcgtagaacgtgtcgaaccggaaggatgacaacgtgaagggaggacttacatgactcacagccatgcagagtgcaagagcgagggtaccaggcaggagttaacctaatgcatc

SEQ ID NO: 2689 - DNA, 306 bp, Triticum aestivum
  Clone ID: uC-tsfl9316013d04b1
cactttgttacatctagcggatttggatttctttaacaactaaggttcctgtttttaacattttaatctcaagggcttttgcccatctccaatagctaacaagaactcctctttctttacaaatcccaaaacctttactagactttttctgcttctttagcttacttcacctagagtcttctaccttttcttatcattgaatcaacccctttttttttttcttttaaacacatcccatcccaaagtataagcgcccacctagtcctatctagtccgaaaaatgcgaactagaactacatgagacac

SEQ ID NO: 2690 - DNA, 469 bp, Triticum aestivum
  Clone ID: uC-tsfl9316013d06b1
taacactttgttacatctagcggatttggatttcttaacaactaaggttcctgtttttaacattttaatttcagggcttttgcccatctccaatagctaacaagaactccgctttctttacaaatcccaaaacctttactagactttttctgcttctttagcttacttcacctagagtcttctaccttttcttatcattgaatcaacccctttttttttttcttttaaacacatcccaacccaaagtataagcgcccacctagtcctatctagtccgaaaaatgcgaactagaactacatgagacactatctctgtcgttacgaacctaacactttctaccaagcttaatcggaataagacctcacatacactcacaagttatatagggcttgaaagaaagtctaggtttggggttgggggttaactggttctaattaaggaagagtccagcctaccttgggatataaa

SEQ ID NO: 2691 - DNA, 504 bp, Triticum aestivum
  Clone ID: uC-tsfl9316013d07b1
cgctaacactttgttacatctagcggatttggatttcttaacaactaaggttcctgtttttaacattttaaagccaagggcttttgcccatctccaatagctaacaagaactcctctttctttacaaatcccaaaacctttactagactttttctgcttctttagcttacttcacctagagtcttctaccttttcttatcattgaatcaacccctttttttttttcttttaaacacatcccaacccaaagtataagcgcccacctagtcctatctagtccgaaaaatgcgaactagaactacatgagacactatctctgtcgttacgaacctaacactttctaccaagcttaatcggaataagacctcacaaacactcacaagttatatagggcttgaaagaaagtctaggtttgggtttgggttaactgctctaataaggagagtcagctacttggattaaaaagagtgatcaaaatgaataagaaaatccaagtattttacg

SEQ ID NO: 2692 - DNA, 314 bp, Triticum aestivum
  Clone ID: uC-tsfl9316013d08b1
gctaacactttgttacatctagcggatttggatttctttaacaactaaggttcctgttctgaacattttaaagccgagggcttttgcccatctgcaatagctaacaagaactactctttctctacaaagcccaaaacctccactagactgcttctgctcctttagctcacttcagctagagccccatacccccccttagcattgactcaacccctggtctgtttcgttgtagcacacatctccaacccaaagtattagcgcccacctagatctatctagtccgctacatgcgagctctaactacatgagacact

SEQ ID NO: 2693 - DNA, 153 bp, Triticum aestivum
  Clone ID: uC-tsfl9316013d12b1
ggtagccaagaaagccaactgagggcattgcacaagatcttacatttaaatgctgctgctgctattcaacgagatggattatactaaagcgcccagatcccaatgacgagctcgtcgacgatgtccaccacgttgcagtagcgccgtgggccc

SEQ ID NO: 2694 - DNA, 331 bp, Triticum aestivum
  Clone ID: uC-tsfl9316013e02b1
aactgttctccgacctcttcccgcacctagcaaatggtaagccaagaaagccaactgacggcattgcacatgatctgacaaagaaatgctgctgctgctattcaacgagatatctacctaagcgccaatcaagcagctgcacatgccaccacgtgatcccctggcccaatgcaaccctcactggctgtcgtggccgctgatcgggactgtcatcaccatcgttcgctctgtggcttaagttccggactgccagggccttaagctgcgccagcgagggatgaatctcgctacgtgtccttcgtgaacggtcgaactgaagcaatgcaaacgt

SEQ ID NO: 2695 - DNA, 150 bp, Triticum aestivum
  Clone ID: uC-tsfl9316013e03b1
catggcattcggcgctattgaccgtgtccatgatttcatcgagccagggcatacgatcttctggctctcagttcttgacggtgggacagctgctcgtaatggtggccaacctatcagatgaacaagttatacaactcgccatagatcatc

SEQ ID NO: 2696 - DNA, 589 bp, Triticum aestivum
  Clone ID: uC-tsfl9316013e05b1
aacactttgttacatctagcggatttggatttctttaacaactaaggttcctgtttttaacattttaatgttcaagggcttttgcccatctccaatagctaacaaccttttcttttctttacaaatcccaaaacctttactagactttttctgcttctttagcttacttcacctagagtcttctaccttttcttatcattgaatcaacccctttttttttttcttttaaacacatcccaacccaaagtataagcgcccacctagtcctatctagtccgaaaaatgcgaactagaactacatgagacactatctctgtcgttacgaacctaacactttctaccaagcttaatcggaataagacctcacaaacactcacaagttatatagggcttgaaagaaagtctaggtttgggtttgggttaactgctctaataaggagagtcagctacttggattaaaaagagtgatcaaaatgaataagacaatccaagtattttacggtatccatgagttcatatttgatgcagacatgataattaaagattagattcaggttcaaactgatagggaatgtatcagatcatgaca

SEQ ID NO: 2697 - DNA, 187 bp, Triticum aestivum
  Clone ID: uC-tsfl9316013e06b1
acacgatgttacgcctagcggatcaggaggtctgtaacaactgacgacccaggggttagcatttgaatttccagggctgtggggcatctgctatagatcgcaacgacttttgctgttgttgaccaaactcaaaatcgtgaagatagtcttggagcttcaccaggtgactgaagctagagggctcgac

SEQ ID NO: 2698 - DNA, 514 bp, Triticum aestivum
  Clone ID: uC-tsfl9316013e08b1
gttctccgacctcttcccgcacctagcaaatggtaagccaagaaagccaactgacggcattgcacatgagctgacaaagaaatgctgctgctgctattcaacgagccgttctaacctcaaagcgcccagatcccaatgacgagctcgtcgacgatgtccaccacgttgcagtcgcgccatgggccccgaatgcgaaccccgtcgacatggcctggtccgttgtgccggtactgcgatccggcgacttgtcccattcgaccatccagttctcgccctcctcgtcggcgcttcagagcttcgccgtgaccctgcaacaggtggccccttcgaagctgtccagccacagccgcagcggcattgagatcctcgtcctcgacgttgctccccttccgctagacacggtgttcgtcaacctggagagcgaattgacataacggctggagagcggcgatggcaccttgtacatggaccatccgccaagccccaatgccatggacgttgccaacatgacgcc

SEQ ID NO: 2699 - DNA, 537 bp, Triticum aestivum
  Clone ID: uC-tsfl9316013e10b1
gttctccgacctcttcccgcacctagcaaatggtaagccaagaaagccaactgacggcattgctcatgagcttacaaagaaatgctgctgctgctattcaacgagccgttctaacctcaaagcgcccagatcccaatgacgagctcgtcgacgatgtccaccacgttgcagtcgcgccatgggccccgaatgcgaaccccgtcgacatggcctggtccgttgtgccggtactgcgatccggcgacttgtcccattcgaccatccagttctcgccctcctcgtcggcgcttcagagcttcgccgtgaccctgcaacaggtggccccttcgaagctgtccagccacagccgcagcggcattgagatcctcgtcctcgacgttgctccccttccgctagacacggtgttcgtcaacctggagagcgaattgacaaaacggctggagagcggcgagggcaccttttacaaggaccattcgacaagccccaatgccaaggacgttgccaacatgacgcccgaggagcgtctagccacggcgc

SEQ ID NO: 2700 - DNA, 550 bp, Triticum aestivum
  Clone ID: uC-tsfl9316013e11b1
aacgctaacactttgttacatctagcggatttggatttctttaacaactaaggttcctgtctttaacatttaatgtcagggcttgcccattcaatagctacacacctttcttttctttacaaatcccaaaacctttactagactttttctgcttctttagcttacttcacctagagtcttctaccttttcttatcattgaatcaacccctttttttttttcttttaaacacatcccaacccaaagtataagcgcccacctagtcctatctagtccgaaaaatgcgaactagaactacatgagacactatctctgtcgttacgaacctaacactttctaccaagcttaatcggaataagacctcacaaacactcacaagttatatagggcttgaaagaaagtctaggtttgggtttgggttaactgctctaataaggagagtcagctacttggattaaaaagagtgatcaaaatgaataagaaaatccaagtattttacggcatccatgagttcaaatttgatgcagacatgataattaaagattagattc

SEQ ID NO: 2701 - DNA, 552 bp, Triticum aestivum
  Clone ID: uC-tsfl9316013e12b1
gctctaacgctaacactttgttacatctagcggatttggatttctttaacaactaaggttcctgtttttaacattttaaagccaagggcttttgcccatctccaatagctaacacgacctttcttttctttacaaatcccaaaacctttactagactttttctgcttctttagcttacttcacctagagtcttctaccttttcttatcattgaatcaacccctttttttttttcttttaaacacatcccaacccaaagtataagcgcccacctagtcctatctagtccgaaaaatgcgaactagaactacatgagacactatctctgtcgttacgaacctaacactttctaccaagcttaatcggaataagacctcacaaacactcacaagttatatagggcttgaaagaaagtctaggtttgggtttgggttaactgctctaataaggagagtcagctacttggattaaaaagagtgatcaaaatgaataagataatccaagtattttacggtatccatgagttcatatttgatgccagacatgataatta

SEQ ID NO: 2702 - DNA, 338 bp, Triticum aestivum
  Clone ID: uC-tsfl9316013f04b1
gttctccgacctcttcccgcacctatgcaaatggtaagccaagaaagccaactgacggcattgcacatgagcttacaaagaaatgctgctgctgctattcaacgagacgatctaatcctcaaagcgcccagatcccaatgacgagctcgtcgacgatgtccaccacgttgcagtcgcgccatgggcccctaatgcgaaccccgtcgacatggcctggtccgttgtgccggtactgcgatccggcgacttgtcccattcgaccatccagttttggccctcctcgtaggagcttaaaagcttcgccgtgaccttgcaccagggggccccttggaagctgt

SEQ ID NO: 2703 - DNA, 250 bp, Triticum aestivum
  Clone ID: uC-tsfl9316013f06b1
cgtgcatgcaggcggtggcggtcatccaggcaggggctccctagaccccggcaggggaggaggaggccccgccccaccggttcggcgggttgtcaaggaaaagcccgttggtatctttccgcggccggggttgctacatggcgcacgtgatgaaaagcctcctcgcggccgcaggggctcacgccaccctttttaatttgtaggcccccacctaggaccccccgctgtggaaggccgttggcctcccggc

SEQ ID NO: 2704 - DNA, 447 bp, Triticum aestivum
  Clone ID: uC-tsfl9316013f07b1
gctctaacgctcaacactttgttacatctagcggatttggatttctttaacaactaagggtcctgtttttaacattttaattccaagggcttttgcccatctccaatagctaacacaatctttcttttctttacaaatcccaaaacctttactagactttttctgcttctttagcttacttcacctagagtcttctaccttttcttatcattgaatcaacccctttttttttttcttttaaacacatcccaacccaaagtataagcgcccacctagtcctatctagtccgaataatgcgaactagaactacatgagacactatctctgtcgttacgaacctaacactctctaccaagcttaatgggaataagacctcacaaacactcacaagttatatagggcttgaaagaaagtctaggtttgggtttgggctaactgctctaata

SEQ ID NO: 2705 - DNA, 538 bp, Triticum aestivum
  Clone ID: uC-tsfl9316013f08b1
tgctctaacgctcaacactttgttacatctagcggatttggatttctttaacaactaaggttcctgtttttaacattttaatgccaagggcttttgcccatctccaatagctaacacaatctttcttttctttacaaatcccaaaacctttactagactttttctgcttctttagcttacttcacctagagtcttctaccttttcttatcattgaatcaacccctttttttttttcttttaaacacatcccaacccaaagtataagcgcccacctagtcctatctagtccgaaaaatgcgaactagaactacatgagacactatctctgccgatacgaacctaacactctctaccaagcttaatcggaataagacctcacaaacactcacatgttatatagggcttgaaagaaagtctaggtttgggtttgggctaactgctctaataaggagagccagcttcttggattgagaagagtgagcaaaatgaataagaaaatccaagcgttttacgggatccatgagtgcaaatttgatg

SEQ ID NO: 2706 - DNA, 304 bp, Triticum aestivum
  Clone ID: uC-tsfl9316013g01b1
gctctaacgctcaacactttgttacatctagcggatttggatttctttaacaactaaggttcctgtttttaacattttaatgccaagggcttttgcccatctccaatagctaacaagactctttttttttacaaatcaaaacctactaacttttgttttactactcacctaagctttactttttatattgataaccccttttttttttaaacacatccaccaagataagccccacctagtctattagtcaaaatgcactaaactacatagacactatttgcgtacaacctacactttaccaact

SEQ ID NO: 2707 - DNA, 271 bp, Triticum aestivum
  Clone ID: uC-tsfl9316013g03b1
ctctaaagctcaacactttgttacatctagcggatttggatttctttaacaactaaggttcctgtttttaacattttaaaaccaagggcttttgcccatctccaatagctaacaagaaccttctttttttacaaatccaaactactagacttttgttttagtacttacctaagctttacctttttatatgataacccttttttttttaaccatcaccaagatacgccactgcctattgtcgaaagcacaaacactgaaacttttgcgtaca

SEQ ID NO: 2708 - DNA, 543 bp, Triticum aestivum
  Clone ID: uC-tsfl9316013g06b1
gctctaaagtgttctccgacctcttcccgcacctagcaaatggtaagccaagaaagccaactgacggcattgctcatgagcagacaaagaaatgctgctgctgctattcaacgagactatctaacctcaaagcgcccagatcccaatgacgagctcgtcgacgatgtccaccacgttgcagtcgcgccatgggccccgaatgcgaaccccgtcgacatggcctggtccgttgtgccggtactgcgatccggcgacttgtcccattcgaccatccagttctcgccctcctcgtcggcgcttcagagcttcgccgtgaccctgcaacaggtggccccttcgaagctgtccagccacagccgcagcggcattgagatcctcgtcctcgacgttgctccccttccgctagacacggtgttcgtcaacctggagagcgaattgacaaaacggctggagagcggcgagggcaccttttacaaggaccatccgacatgccccaatgccaaggacgttgccaacttgacgcccgaggagcgtctagccacg

SEQ ID NO: 2709 - DNA, 141 bp, Triticum aestivum
  Clone ID: uC-tsfl9316013g10b1
atacgatctcttaccgaacctagcaaaaggtaagccaagaaagccaactgacggcatagcatatgagttgacaaagaaaagccgcagcagcaaaacaacgagagacgccaacgctcaaaagcgcccagatacccaaagacg

SEQ ID NO: 2710 - DNA, 405 bp, Triticum aestivum
  Clone ID: uC-tsfl9316013g12b1
tcgatatacaacaattgaacatagagaccgagaaggcgaaaacacgcgctcgggcccggcccgatcccggatcttcgccgccggcgacgccggttggagaggtgatgggggaggtgcgcggtgctctatagcagctagtaggtgtagttctagtttttccttagaggagtttggcctagtgccggagattggcgtcatgccgatgaggattttgctgccggcgcgcccgagccgcgttcggtggttcctggcgatactcttgttggtggtggcggttggctcgctgctgttggaaggaggtgcgctggaatcctcggaaataagctcgatgtcttccctggtatgcaggaatccccttcgcttgctctcgccgacggcagtcaccatggtggtggtcaagtcgac

SEQ ID NO: 2711 - DNA, 226 bp, Triticum aestivum
  Clone ID: uC-tsfl9316013h01b1
atgcactatacttttataggccctaaatcatactggcgcgttacacgctgactggaaaccctgcgtccaactaatccctgagaatcccttccagcgcgaatagcaaaggcccacgtcgcttcaacagtgcagctgatggaaggaccccctgacggcataacgcgtgggggggtcccagggccgtcactgaggcctaggccgtcttcttttcttctttcccgtcgcg

SEQ ID NO: 2712 - DNA, 320 bp, Triticum aestivum
  Clone ID: uC-tsfl9316013h02b1
ctaaagctcaacactttgttacatctagcggatttggatttctttaacaactaaggttcctgtttttaacattttaaagccaagggcttttgcccatctccaatagctaacaagaacctttttttttacaaatcaaaaccttactaacttttgttttactacttacctaagctttccttttttatattgataaccctttttttttctttaaacacatcacccaagataagccccacctagtctattatcaaaatgcactaactactgaacactatttgtgacaacctacactttaccactaatggatagactcaacctac

SEQ ID NO: 2713 - DNA, 334 bp, Triticum aestivum
  Clone ID: uC-tsfl9316013h03b1
ctctaacctgttctccgacctcttcccgcacctagcaaatggtaagccaagaaagccaactgacggcattgcacatgagcacacaaagaaatgctgctgctgctattcaacgagatcgattacctaagcgccaatcaagcagctcgcacatgtcacacgtgagcccctggcccaatgcacccgcacaggctgtcgtggcgactgaccggactgtcatcaccatcagttgcctctgtggcttaagttgcggactgacggggccttaagtgcacccagcgagtgatgaatctgtctacgtgtccttcgtgacacggcgcactgaaggatgcaacgt

SEQ ID NO: 2714 - DNA, 560 bp, Triticum aestivum
  Clone ID: uC-tsfl9316013h04b1
gctctaaagctcaacactttgttacatctagcggatttggatttctttaacaactaaggttcctgtttttaacattttaaagccaagggcttttgcccatctccaatagctaacacaacctttcttttctttacaaatcccaaaacctttactagactttttctgcttctttagcttacttcacctagagtcttctaccttttcttatcattgaatcaacccctttttttttttcttttaaacacatcccaacccaaagtataagcgcccacctagtcctatctagtccgaaaaatgcgaactagaactacatgagacactatctctgtcgttacgaacctaacactttctaccaagcttaatcggaataagacctcacaaacactcacaagttatatagggcttgaaagaaagtctaggtttgggtttgggttaactgctctaataaggagagtcagctacttggattaaaaagagtgatcaaaatgaataagaaaatccaagtattttacggtatccatgagttcaaatttgatgcagacatgataaattaaaggatt

SEQ ID NO: 2715 - DNA, 646 bp, Triticum aestivum
  Clone ID: uC-tsfl9316013h05b1
taacactttgttacatctagcggatttggatttctttaacaactaaggttcctgtttttaacattttaaatccaagggcttttgcccatctccaatagctaacaaccttttcttttctttacaaatcccaaaacctttactagactttttctgcttctttagcttacttcacctagagtcttctaccttttcttatcattgaatcaacccctttttttttttcttttaaacacatcccaacccaaagtataagcgcccacctagtcctatctagtccgaaaaatgcgaactagaactacatgagacactatctctgtcgttacgaacctaacactttctaccaagcttaatcggaataagacctcacaaacactcacaagttatatagggcttgaaagaaagtctaggtttgggtttgggttaactgctctaataaggagagtcagctacttggattaaaaagagtgatcaaaatgaataagaaaatccaagtattttacggtatccatgagttcaaatttgatgcagacatgataattaaagattagattcaggttcaaattgatagggaatggtatcagatcatgacagtgtggtcgagtagagcaatctaagcattggtcagttttttttttttttcaaattc

SEQ ID NO: 2716 - DNA, 473 bp, Triticum aestivum
  unsure (1)..(473): unsure at all n locations
  Clone ID: uC-tsfl9316013h06b1
gctctacgtgttctccgacctcttcccgcacctagcaaatggtaagccaagaaagccaactgacggcattgcacatgagctgacaaagaaatgctgctgctgctattcaacgagacgatctaacctcaaagcgcccagatcccaatgacgagctcgtcgacgatgtccaccacgttgcagtcgcgccatgggccccgaatgcgaaccccgtcgacatggcctggtccgttgtgccggtactgcgatccggcgacttgtcccattcgaccatccagttctcgccctcctcgtcggcgcttcagagcttcgccgtgaccctgcaacaggtggccccttcgaagctgtccagccacagccgcagcggcattgagatcctcgtcctcgacgttgctccccttccgctagacacggtgttcgtcaacctggagagcgaattgacaaaacngctggagagcggcgatggcaccttttac

SEQ ID NO: 2717 - DNA, 533 bp, Triticum aestivum
  Clone ID: uC-tsfl9316013h08b1
gctctaaagtgttctccgacctcttcccgcacctagcaaatggtaagccaagaaagccaactgacggcattgcacatgagcagacaaagaaatgctgctgctgctattcaacgagacgatctaatcctcaaagcgcccagatcccaatgacgagctcgtcgacgatgtccaccacgttgcagtcgcgccatgggccccgaatgcgaaccccgtcgacatggcctggtccgttgtgccggtactgcgatccggcgacttgtcccattcgaccatccagttctcgccctcctcgtcggcgcttcagagcttcgccgtgaccctgcaacaggtggccccttcgaagctgtccagccacagccgcagcggcattgagatcctcgtcctcgacgttgctccccttccgctagacacggtgttcgtcaacctggagagcgaattgacaaaacggctggagagcggcgagggcaccttttacaaggaccatccgacaagccccaatgccaaggacgttgccaacatgacgcccgatgagc

SEQ ID NO: 2718 - DNA, 598 bp, Triticum aestivum
  Clone ID: uC-tsfl9316013h09b1
ctaacgctaacactttgttacatctagcggatttggatttctttaacaactaaggttcctgtttttaacattttaaagccaagggcttttgcccatctccaatagctaacaagcgtcttcttttctttacaaatcccaaaacctttactagactttttctgcttctttagcttacttcacctagagtcttctaccttttcttatcattgaatcaacccctttttttttttcttttaaacacatcccaacccaaagtataagcgcccacctagtcctatctagtccgaaaaatgcgaactagaactacatgagacactatctctgtcgttacgaacctaacactttctaccaagcttaatcggaataagacctcacaaacactcacaagttatatagggcttgaaagaaagtctaggtttgggtttgggttaactgctctaataaggagagtcagctacttggattaaaaagagtgatcaaaatgaataagataatccaagtattttacggtatccatgagttcaaatttgatgcagacatgataattaaagattagattcaggttcaaattgatagggaatggtatcagatcatgaca

SEQ ID NO: 2719 - DNA, 443 bp, Triticum aestivum
  Clone ID: uC-tsfl9316013h10b1
ctctaaagctaacactttgtacatctagcggatttggatttctttaacaactaaggttcctgtttttaacattttaaagccaagggcttttgcccatctccaatagctaacaagactcttcttttctttacaaatcccaaaacctttactagactttttctgcttctttagcttacttcacctagagtcttctaccttttcttatcattgaatcaacccctttttttttttcttttaaacacatcccaacccaaagtataagcgcccacctagtcctatctagtccgaaaaatgcgaactagaactacatgagacactatctctgtcgttacgaacctaacactttctaccaagcttaatcggaataagacctcacaaacactcacaagttatatagggcttgaaagaaagtctaggtttgggtttgggttaactgctctaat

SEQ ID NO: 2720 - DNA, 377 bp, Triticum aestivum
  Clone ID: uC-tsfl9316014a04b1
gtggctggatttcatcattaaaacctcactgcttgtttcctgaaaccgggtgacgatgggtcttccactcatttataggacatggcattcggcctattaaccgttcatgattcatcgaccgggctagatctttggtctagtcttgcgtggacagtgcctatggagcaactataataatagtttaaattcgcatagatatttgtttccagcgtgttgaagtgatttagggtgtaatcatagctaggttaacgtaggcgcagatcatgagatggctgagtaccaccgctttggtgtttatccatataatgactgattatgaactggctgtaattgcaaacgtttcaggtcaacattaacaaaacttgattctacacaca

SEQ ID NO: 2721 - DNA, 273 bp, Triticum aestivum
  Clone ID: uC-tsfl9316014a07b1
ttgttacatctagcggatttggatttctttaacaactaaggttcctgttactttaagccagctttgcatctcatactacagactctttttttttacagatcaaaacctttactaacttttgttttactactaccaagttttaccttttatattgatacccttttttttttaacacatcaccaagttacgccactagtctatttccgaaaatgcactaactctaacacttttgtgtcaacctcactttaccactaatggtagactacaacctac

SEQ ID NO: 2722 - DNA, 255 bp, Triticum aestivum
  Clone ID: uC-tsfl9316014a08b1
tttgttacatctagcggatttggatttctttaacaactaaggttcctgttacatttaagccaggcttgccattcatagctacaggactttctttttttacgatccaacctttactaacttttgttttactacttacctaagttttaccttttatattgatacccttttttttttttaacacatcaccaagttacgccactagtctattagtcgaaatgcaactaactctaacacttttgcgtcaacctacattta

SEQ ID NO: 2723 - DNA, 582 bp, Triticum aestivum
  Clone ID: uC-tsfl9316014a11b1
ttctccgacctcttcccgcacctagcaaatggtaagccaagaaagccaactgacggcattgcacatgagcagacaaagaaatgctgctgctgctattcaacgagatcgattctaacctcaaagcgcccagatcccaatgacgagctcgtcgacgatgtccaccacgttgcagtcgcgccatgggccccgaatgcgaaccccgtcgacatggcctggtccgttgtgccggtactgcgatccggcgacttgtcccattcgaccatccagttctcgccctcctcgtcggcgcttcagagcttcgccgtgaccctgcaacaggtggccccttcgaagctgtccagccacagccgcagcggcattgagatcctcgtcctcgacgttgctccccttccgctagacacggtgttcgtcaacctggagagcgaattgacaaaacggctggagagcggcgagggcaccttttacaaggaccatccgacaagccccaatgccaaggacgttgccaacatgacgcccgaggagcgtctagccacggcgctcagggcagctctcagcaccctcaagattgtccattccggcgat

SEQ ID NO: 2724 - DNA, 522 bp, Triticum aestivum
  Clone ID: uC-tsfl9316014a12b1
tcgctgaccctcgccgttgccccgctgacctcaaccaggcgccggcgaaatggcccctaagcgaggcgggaaggcgccggtcccggcgaagaacaaaacggagaatgtgaccaacccgctgttcgagaagaggccgaagcaattcggcatcggtggcgcccttccgcccaagaaggaccttcaccgcttcgttaagtggcccaaggttgtgcgcatccagcgccagcgccgcatcctcaagcagcgcctcaaggtgcccccggcactccaccagttcacccgcaccctcgacaagaaccttgcaacaaacttgttcaagatgcttgttaagtaccggcctgaagacaaagttgccaagaaggagaggcttctaaagagggcccatgctgaagctgaaggtaaaactgttgaggccaacaagccaatagttgtgaagtatggccttaaccatgttacctacctaatcgagcagagtatagcccagctggctgtcatagctcatgatgttgatccgattgagct

SEQ ID NO: 2725 - DNA, 473 bp, Triticum aestivum
  unsure (1)..(473): unsure at all n locations
  Clone ID: uC-tsfl9316014b01b1
tgttacatctagcggatttggatttctttaaccaactatagggtgtccttgttcaacattttaaagccaagggcttttgccatctccaatagctaacaagaactctntcttttctttacaaatcccaaaacctttactagactctatctgcttctttagcttacttcacctagagtcttctaccttntcttatcattgaatcaacccctttttttttttcttttatacacatcccaacccacagtataagcgcccacctagtcctatctagtccgaagaatgcgaactagaactacatgagacactatctctgtcgttacgaacctaacactctctaccaagcttaatcggaataagacctcacaaacactcacacgttatatagggctngaaagatagtctaggtgtgggtgtgtgtaactgctctaatagggagagtcagctacttggattaaaagagtgatcaaatgaat

SEQ ID NO: 2726 - DNA, 391 bp, Triticum aestivum
  unsure (1)..(391): unsure at all n locations
  Clone ID: uC-tsfl9316014b02b1
ttgttacatctagcggatttggatttctttaacaactaaggttcctgtttactttaagcaagcttttgccattcatagctacagactttttttttttacgatccaacctttactagacttttgtttttactacttacaagttttactttttatatgataccctttttttttttaacacatcaccaagttacgccactagtctattgtcgaaaagcactaactctgaaactatttgtgtcaactacactttaccactaacgatagactcaacctacagattgggtgaagaagtagttggtgggaactgttaaaagaagagtctggtaaagaggcaaagataanatcaagttacggtctagtaaatgtgaactgtataagataatagtaatgt

SEQ ID NO: 2727 - DNA, 197 bp, Triticum aestivum
  Clone ID: uC-tsfl9316014b05b1
gtggctggatttcatcattaaaacctcactgcttgtttcctgaaacagggtgacaatggtcttcatatctatgacatgcatgggcttaccgatcaggatacaccaggataactttggttcagttgcgtggcagtcctatggagaaccacaaaatagtataatcctaacatttgtttccagcgagctaatgtgattta

SEQ ID NO: 2728 - DNA, 234 bp, Triticum aestivum
  Clone ID: uC-tsfl9316014b06b1
gcacatgagcactcaaggatatggtgctgctgctattcaacaagagcgatcgtgacctcatagcgcggcagaccgaacgacaagctactctacgaggtccaccacgttacagccgcgccatggtgccacaatgccaaccctgtgaacatggcctgtttcgttgtgcttgtactgcgatcccacgactaggccatgcgaccatccagttctatctctcctggagggcgctaaata

SEQ ID NO: 2729 - DNA, 538 bp, Triticum aestivum
  unsure (1)..(538): unsure at all n locations
  Clone ID: uC-tsfl9316014b07b1
gacctcttcccgcacctagcaaagtggtaatgccaagtaaagtctcaactgacgattgcacatgacatacaagattgctgtgtgctattaacgagacattctacctcaagcggcagatcgaatgacagctcgtcacgatgtccaccacgttgcagtcgnccatgggccccgatgcgaaccccgttacatggcctggtccgtggccggtctgcgaccggnacttgtccattcgaccatccagtttcgcctcctcgtcggcgcttcagagcttcgcgtgaccctgaacaggtggcccttcaagctgtcagccacagcgagcggattgagatcctctgctcgacgtgctcccttccgtagaacggtgttcgtcaacctgagagcgaattgcataacggctgggagcgggagggccctttacaaggacattcacagccccatgcaggacgtgcaacatgacccgagaggttagcacgggctaggagtctacacctcagatgtcattcgcattgttcgtgcttgcgcgatcgtctactgcgct

SEQ ID NO: 2730 - DNA, 527 bp, Triticum aestivum
  Clone ID: uC-tsfl9316014b09b1
acctcttcccgcacctagcaaatggggtaagccaagaaagtccaactgacgattgcacatgagcgacaaaaatgctgtgtgtattcaacggatcgattctacctcaagcgccagatcccaatgacagctcgcgacatgccaccacgtgagtcgccatggccccaatgcaaccccgtcgacatggctggtcgtgtgccggtactggatcgggactgtcattcgaccatcagtttcgcctctcgcgggcttagagttcgcgtgaccctgcacaggtggccctttaagctgtcagccacagcgagcggcattgagacctcgtctcacgttgctcccttcgtagacacggtgtcgcaacctgagagcgaatgcaaacggtggaagcgggagggccctttacaggaccatcacagcccaatgcaaggacgtgcacatgacgccgagagcgttagcacgcgctaggcagcttcacaccctaagatgtcattcgcgatttgttcgtgctctgcgcgatccgtactacctgcgct

SEQ ID NO: 2731 - DNA, 676 bp, Triticum aestivum
  Clone ID: uC-tsfl9316014b11b1
gctaacactttgttacatctagcggatttggatttctttaacaactaaggttcctgtttttaacattttaaagccaagggcttttgcccatctccaatagctaacaagaactctttcttttctttacaaatcccaaaacctttactagactttttctgcttctttagcttacttcacctagagtcttctaccttttcttatcattgaatcaacccctttttttttttcttttaaacacatcccaacccaaagtataagcgcccacctagtcctatctagtccgaaaaatgcgaactagaactacatgagacactatctctgtcgttacgaacctaacactttctaccaagcttaatcggaataagacctcacaaacactcacaagttatatagggcttgaaagaaagtctaggtttgggtttgggttaactgctctaataaggagagtcagctacttggattaaaaagagtgatcaaaatgaataagaaaatccaagtattttacggtatccatgagttcaaatttgatgcagacatgataattaaagattagattcaggttcaaattgatagggaatggtatcagatcatgacaagtgtggcgagtagagcaatctaagcattggtcagtttttttttttttcaattcattgctatgcaacagacactagcaacg

SEQ ID NO: 2732 - DNA, 678 bp, Triticum aestivum
  Clone ID: uC-tsfl9316014b12b1
tcaacactttgttacatctagcggatttggatttctttaacaactaaggttcctgtttttaacattttaaagcttagggcttttgcccatctccaatagctaacaagaactctttcttttctttacaaatcccaaaacctttactagactttttctgcttctttagcttacttcacctagagtcttctaccttttcttatcattgaatcaacccctttttttttttcttttaaacacatcccaacccaaagtataagcgcccacctagtcctatctagtccgaaaaatgcgaactagaactacatgagacactatctctgtcgttacgaacctaacactttctaccaagcttaatcggaataagacctcacaaacactcacaagttatatagggcttgaaagaaagtctaggtttgggtttgggttaactgctctaataaggagagtcagctacttggattaaaaagagtgatcaaaatgaataagaaaatccaagtattttacggtatccatgagttcaaatttgatgcagacatgataattaaagattagattcaggttcaaattgatagggaatggtatcagatcatgacagtgtggtcgagtagagcaaatctaagcatggtcacgtttttttttttttcaaatcattgactatgcaacagacaactagcaacg

SEQ ID NO: 2733 - DNA, 527 bp, Triticum aestivum
  unsure (1)..(527): unsure at all n locations
  Clone ID: uC-tsfl9316014c03b1
acctcttcccgcacctacgcaaatgggtaagccaagaaaggtccaactgacgattgcacatggctgtcaagaatgctgtgtgtattcaacggatcgattctacctcaagcgcccagatcccaatgacagctcgtgacatgtcaccacgtgagtcgcccatggccccgaatgcaaccccgtcgaatggctggtcgtgtgccggtactggatccgggattgtccattcaccatcagtctcgcctctcgtgggcttagagcttgcgtaccctgaacggtggcccttcaagctgtcagccacagcgagcggattgagatcctcgtctcgacgtgtccccttcgtagacacggtgtcgtaacctgagagcgattgcaaacggtggaagcgggagggacctttacaagaccatcacagcccaatgcaggacgttgcacatgaccccgngagcgttagcacgggctanggagtctcacaccctaagatgtcattccgcgattgttcgtgctctgcgcgatccgtactactgcgc

SEQ ID NO: 2734 - DNA, 401 bp, Triticum aestivum
  unsure (1)..(401): unsure at all n locations
  Clone ID: uC-tsfl9316014c04b1
acctcttcccgcaccttagcaaatgggtaagccaagaaaagccaactgacgttgactgacgacaagaatgctgtgtgctattaacgagatcgattctaacctcaagcgccagatcaatgcnagctcgtgacgatgtccaccacttgagtcgcccatggccccgatgcgaaccccgtcacatggctggtcgttggccggtactgcgatccggtacttgcccattcgaccatccagtttcgcctctcgtgggcttagagcttgcgtgacctgcacaggtggcccttcaagctgtcagccacagcgagcggattgagatctcgtctcacgttgctcccttcgctaacacgggttcgtcaacctgagagcaattgcaaaacggtggaagcgggagggccctttac

SEQ ID NO: 2735 - DNA, 56 bp, Triticum aestivum
  Clone ID: uC-tsfl9316014c05b1
tgatgctgctgcatatcatcttgatcgtgtacctcaatcaggggctggccgacgac

SEQ ID NO: 2736 - DNA, 251 bp, Triticum aestivum
  Clone ID: uC-tsfl9316014c06b1
ttgttacatctagcggatttggatttctttaacaactaaggttcctgttactttaagcaagcttgccattcatgctacagactttttttttttacaaatccaacctttactagacttttgttttactacttacctaagctttaccttttatattgataccctttttttttttaacacatcaccaagttacgccaccttcctattatcgaaagcactaactctaacacttttgcgtcaacctcactttacca

SEQ ID NO: 2737 - DNA, 529 bp, Triticum aestivum
  unsure (1)..(529): unsure at all n locations
  Clone ID: uC-tsfl9316014c09b1
acctcttcccgcaccttagcaaatgggtaagccaagaaagggccaactgacggttgcacatgagcgacaagaaatgctgtgtgctttaacgagatcgattctacctcaagcgccagatcccatgacagctcgtcgacatgtcaccacgttgagtcgcccatggccccaatgcaaccccgtcacatggctggtcgttggccggtctgcgatcgggacttgcccattcgaccatccattctcgcctcctgtcggncttagagcttcgcgtaccctgcacaggtggcccttcaagctgtcagccacagcgagcggattgaatcctcgtctcgacgtgctcccttccgtagacacgggtcgtaacctgagagcgaatgcaaacggtggaagcgggagggccctttacaggaccatcacagcccaatgcaggacgtgcacatgacccgagagcttagcacgggctanggcagttacacctcagatgtcatccgcgattgttcgtgcttgcgcgatccgtctactgcgctaccgg

SEQ ID NO: 2738 - DNA, 363 bp, Triticum aestivum
  Clone ID: uC-tsfl9316014c12b1
gggcgaggaagcattctgagtcatagcctagtggtggaaaggggttgatgccttcccacccacccaggttcaaggcatagtaattgcaattttggttcgttgcaccaatcatactgtaggggtctcccttatagtctttctgtcaaaaagatggattttgacaccgcgcgcttccgtgaccggttttcttcgcacaccagccgtgcttcgagcagagttctgaatgttgtacattgtagccagcgtatcacatgccaaaacctacttgtttttgcatgaatcttagcgtaaaatcaatgacatatgactttttcttgaaatagatgtgcaatacttagagcacatttagatgtgctttagcaa

SEQ ID NO: 2739 - DNA, 284 bp, Triticum aestivum
  Clone ID: uC-tsfl9316014d05b1
ttgttacatctagcggatttggatttctttaacaactaaggttcctgttacatttaagtcaggcttgccatctcatactacagactctttttttttacaaatccaaactactaacttttgttttactacttacctaagttttactttttatattgataaccctttttttttttaaacacatcaccaagttagcgcccactgtctattgtcgaaatgcactaactactgaacactatttgtgtcaacctacactttaccactaatggatagacctccaacctaca

SEQ ID NO: 2740 - DNA, 273 bp, Triticum aestivum
  Clone ID: uC-tsfl9316014d07b1
gttacatctagcggatttggatttctttaacaactaaggttcctgttaacatttaaagttaggctttgccattcaatactacagactgtttttttttacaaatccagacctttactaactttctgtttttagctacttcacctaagcttctactttcttatatgataacccttttttttttttaaacacatccacccaagataagcgccacctatctattagtcaaaatgcactaaactctgaaccttcttgtgtcaactacactttaccact

SEQ ID NO: 2741 - DNA, 334 bp, Triticum aestivum
  Clone ID: uC-tsfl9316014d10b1
agtagctcgacaccatacatgatgttccaagttcgtctcagcttccaaagcgagaaccttatgttttggtcaacagattcgcagttgagttctcggtagattgtttttgctcatacaagtcgatatgaaatgtttgtacaaaaaccgggtccgcgtgtacagtatgaaatgtcgtttgtgcttcctttgggtatgtcgcggcactagttaagagttgctcggtgcactgcactggttcgtccaaattattactgatgtatagtacctccaaaaaaaaataaccaccacgcttatttggaattagacctcacaaacactcacggggtccgttttc

SEQ ID NO: 2742 - DNA, 312 bp, Triticum aestivum
  unsure (1)..(312): unsure at all n locations
  Clone ID: uC-tsfl9316014e01b1
ctcttgcccatctccaatagctaacaagaactctttcttttgtttacaaatcccaaaacctttactagacttcttctgcttctttagctgacttcacctagagtcttctaccttttgttatcatcgaatcaaccgattattttgtttcttttaaacacatcctaacccaaacgataagcgcccacctagtcctatctagtacgaanaatgcaaactagaactacatgagacactatctctgacgttacgaacctaacactgtctaccaagcttattcggaataagacctcacaaacactcacaagttatata

SEQ ID NO: 2743 - DNA, 419 bp, Triticum aestivum
  Clone ID: uC-tsfl9316014e03b1
gttctccgacctcttcccgcacctagcaaatggtaagccaagaaagtcctgcggcttgcacatgcttcaagaatgtgtgtgtatcacggacgtttacctaagcgccaatccatgacgagctcgcacatgccaccacttgagcgcgcaggcccgaagcaaccgcacatggctgtcgtggccgctgatcgggatgtcattcaccatcagtctgcctctgcgccttaagttgcggactgacagggccttgagtgcagccagcgacggttgaatctgttcacgtgtccttcgtgaacggtctaactgaagcaatgcaaacgtggagcggaggccttcaagcatcacagcatgcagactgcacatacccgagggtagccgcctagagttacacctaatgcatcgattttcgtgcttgcgcgtcg

SEQ ID NO: 2744 - DNA, 319 bp, Triticum aestivum
  Clone ID: uC-tsfl9316014e04b1
accctcaccatattatgaccgtagacatggtggacctacggctatcctcacagctacttctatcacacaggttatcatcgagccattcaaacagatagctcgaaaagaacccctgctgtctgcttcgcagctcacatatgacccagatacccaattgagctggacagtttctaagcacgtgaagcacagattcaactccgcctttacaaaccggatagacattcgaggcgctaagatgtcttacatgccgatcctcatctgccataactatgagcagggaggtgatatataccacctgtctatactgatatgtatatat

SEQ ID NO: 2745 - DNA, 311 bp, Triticum aestivum
  unsure (1)..(311): unsure at all n locations
  Clone ID: uC-tsfl9316014e05b1
gctcttgcccatctncaatagctaacaagaactctttcttttgtttacagatcccaaaacctttactagactttttctgcttctttagctgactctacctagagtcttctaccttttcttatcattgaatcaacccatgtttttttttgttttaaacacatcccaacccaaagtataagcgcccacctagtcctatctagtgcgaaaaatgcgaactacaactacatgagacactatgtatgtcgttactaacctaacactgtctaccaagcttaatcggaataagacctcacaaacactcacaagttata

SEQ ID NO: 2746 - DNA, 330 bp, Triticum aestivum
  unsure (1)..(330): unsure at all n locations
  Clone ID: uC-tsfl9316014e06b1
ttctccgacactcttacccgcagcctagncataatagcgtaacgcctcagagcaaagtcactgacggcgttgcacatgagcatacaagaaatgctgctgctgctattcaacgagatcgattctaacctcgaagcgcgcagatcccaatgacgagctcgtcgacgatgtccaccacgttgcagtcgcgccatgggccccgaatgcgaaccccgtctacatggcctggtccgttgtgccggtactgcgatccggcgacttgtcccattcgaccatccagttctcgccctcctcgtcggcgcttcagagcttcgccgtgaccctgcaacaggt

SEQ ID NO: 2747 - DNA, 189 bp, Triticum aestivum
  Clone ID: uC-tsfl9316014e07b1
ttttaacattatagagttctgggcttctgcccatcttcactagatcacaagaactctttctctgatttacaaatcccaacaccactactagagtttctctggttcactagctcactagacctagagccttctacatcatctgatcatcgcaataacccctttcttttattctcttacacacatcccagc

SEQ ID NO: 2748 - DNA, 495 bp, Triticum aestivum
  unsure (1)..(495): unsure at all n locations
  Clone ID: uC-tsfl9316014e08b1
aacattttaaagccaagggcttttgcccatctccaatagctaacgagaactctatcttttctttacagatcccaaaacctttactagactttgtctgcttctttagcttacttcacctagagtcttctaccttttcttatcattgaatcaacccctttttttttttcttttaaacacatcccaacccaaagtataagcgcccacctagtcctatctagtccgaaaaatgcgaactagaactacatgagacactatctctgtcgttacgaacctaacactntctaccaagcttaatcggaataagacctcacaaacactcacaagttatatagggcttgaaagaaagtctaggtttgggtttgggttaactgctctaataaggagagtcagctacttggattaaaaagagtgatcaaaatgaataagaaaatccaagtattttacgggatccatgagttcanatttgatgcagacatgataattaaagatagattc

SEQ ID NO: 2749 - DNA, 648 bp, Triticum aestivum
  unsure (1)..(648): unsure at all n locations
  Clone ID: uC-tsfl9316014e10b1
gctctaaagctaacactttgttacatctagcggatttggatttctttaacaactaaggttcctgtttttaacattttaaagccaagggcttttgcccatctccaatagctaacaagaactctttcttttctttacaaatcccaaaacctttactagactttttctgcttctttagcttacttcacctagagtcttctaccttttcttatcattgaatcaacccctttttttttttcttttaaacacatcccaacccaaagtataagcgcccacctagtcctatctagtccgaaaaatgcgaactagaactacatgagacactatctctgtcgttacgaacctaacactttctaccaagcttaatcggaataagacctcacaaacactcacaagttatatagggcttgaaagaaagtctaggtttgggtttgggttaactgctctaataaggagagtcagctacttggattaaaaagagtgatcaaaatgaataagaaaatccaagtattttacggtatccatgagttcaaatttgatgcacacatgataattaaagattagattcagggtcaaattgatagggaatggatcagatcatgacagtgtggtcgagtagagcaatctaagcatcggtcagntntttttttt

SEQ ID NO: 2750 - DNA, 560 bp, Triticum aestivum
  Clone ID: uC-tsfl9316014e11b1
ttctccgacctcttcccgcacctagcaaatggtaagccaagaaagccaactgacggcattgcacatgagcattctaaagaaatgctgctgctgctattcaacgagatcgattctaacctcaaagcgcccagatcccaatgacgagctcgtcgacgatgtccaccacgttgcagtcgcgccatgggccccgaatgcgaaccccgtcgacatggcctgggccgttgtgccggtactgcgatccggcgacttgtcccattcgaccatccagttctcgccctcctcgtcggagcttcagagcttcgccgtgaccctgcaacaggtggccccttcgaagctgtccagccacagccgcagcggcattgagatcctcgtcctcgacgttgctccccttccgctagacacggagttcgtcaacctggagagcgaattgacaaaacggctggagagcggctagggcaccttttacaaggaccatccgacaagccccaatgccaaggacgttgccaacatgacgcccgaggagcgtctagccacggcgctcagggcagctttaagcaccc

SEQ ID NO: 2751 - DNA, 471 bp, Triticum aestivum
  unsure (1)..(471): unsure at all n locations
  Clone ID: uC-tsfl9316014f01b1
tcaacacttnntgttacatctgagcagagagtttggnnatttcnntttaacacncggtataggcctgtttttaacattttaaagccaagggcttttgcccatctccaatagctaacaagaactctgtcttttctttacaaatcccaaaacctttactagactttttctgcttctttagcttacttcacctagagtcttctaccttttcttatcattgaatcaacccctttttttttttcttttaaacacatcccaacccaaagtataagcgcccacctagtcctatctagtccgaaaaatgcgaactagaactacatgagacactatctctgtcgttacgaacctaacactttctaccaagcttaatcggaataagacctcacaaacactcacaagttatatagggcttgaaagaaagtctaggtttgggtttgggttaactgctctaataaggagagtcagctacttgga

SEQ ID NO: 2752 - DNA, 529 bp, Triticum aestivum
  unsure (1)..(529): unsure at all n locations
  Clone ID: uC-tsfl9316014f05b1
ctaacactttgtgtacatctgagcaggagtttgggatttnnnctttaaccacacgtaagtcctgtttttaacattttaaagccaagggcttttgcccatctccaatagctaacaagaactctttcttttctttacagatcccaaaacctttactagactttttctgcttctttagcttacttcacctagagtcttctaccttttcttatcattgaatcaacccctttttttttttcttttaaacacatcccaacccaaagtataagcgcccacctagtcctatctagtccgaaaaatgcgaactagaactacatgagacactatctctgtcgttacgaacctaacactttctaccaagcttaatcggaataagacctcacaaacactcacaagttatatagggcttgaaagacagtctaggtttgggtttgggtaactgctctaataggagagtcagctacttggataaaaagagtgatcaaaatgaataagacaatccaagtatgttacggtatccatgagttcaaat

SEQ ID NO: 2753 - DNA, 254 bp, Triticum aestivum
  Clone ID: uC-tsfl9316014f06b1
tcaacactttgttacatctagcggatttggatttctttaacaactaagtctgttaacatttaagtcgggctttgccattcatgctacagactttttttgtttacaaatccaaacctttactgactttttgtttttagctacttacctaagctttccttttatcatgataccctttttttctttacacatcacccaagttagcgcccctatctattgtcgaaaatgcactgactactgaacctatttgtgtacac

SEQ ID NO: 2754 - DNA, 426 bp, Triticum aestivum
  Clone ID: uC-tsfl9316014f09b1
ttctccgacctcttcccgcacctagcaaatggtaagccaagaaagcctgacgctgacatgcatcaagaagctgtgtgtttaacgagacatttacctaaggccaatccaatgcagctgtgcatgccaccacgtgcatgccctggcccaagcaaccccgcactggctgtcgtggcgtctgcaccgactgtcatcaccatcagttgcctctgtgccttaagtcgcgacctgacggggccttaagtgcaccacagcgagggatggactgtccacgtgtctttcgtgaacggtcgaactgaagcgatgcaacggtgaagcggaggacttaaggcctcacagcccaagcggcgtgcaatgacccagaggtagcacgctaggagttcaacctaatgcatcgcatgttcgtgcttgcgcgatcgtctactgcct

SEQ ID NO: 2755 - DNA, 456 bp, Triticum aestivum
  Clone ID: uC-tsfl9316014f10b1
tcgtgtctttccaatacaaaataccggagtacgtccacgtatcccaagactgcaagcaactccttgccagtatttttgtcgcaaaccctgcaaagagaataacaatgagggagatcaggaaccacccctggttcttgaagaacttgccaagagagctcacggaagctgcccaagcaatgtactacaagagagacaacagcgccccgacctactcggtccagtccgtggaggagatcatgaagatcgtggaggaggcgcagaaaccgcctccttccaccactccggtggcgggtttcgggtgggcggaggaggacgagcaggaggatggcaagaagccacaggaggaagcggaggaggaagaccaggaagatgagtatgagaagcacttgaatgaggtccgtgccagcggtgagttccacatcacctagctgatgggggtgcttcactggcgtgaga

SEQ ID NO: 2756 - DNA, 525 bp, Triticum aestivum
  Clone ID: uC-tsfl9316014f12b1
ctgcgacctcttcccgcacctagcatatggtaagccaagaaagccaactgacgggattgcacttgagcagataaagaactggtgctgatgctgttcaacgagatcgattctaacctgaaagcgcccagatcccaatgacgagctcgtcgacgatgtccaccacttggcagtcgcgccatgggccccgaatgcgaaccccgccgacatggcctggtccgttgtgccggtactgcgatcctgcgacttgacccattccaccatccagttctcgccctcctcgacggcgctttagagcttcgccgtgaccctgcaacaggtggccccttcgaagctgtgcagccacaggcgcagcggcattgagatcctcgtcctcgacggtgctccccttgcggtagacacggtgttcgtcaacctggagagcgaattgacaaaacggttggagagcggcgagggcaccttttacaaggaccatccgacaagccccaatgccaaggacgttgccaacatgacgcccgaggagcgttt

SEQ ID NO: 2757 - DNA, 430 bp, Triticum aestivum
  Clone ID: uC-tsfl9316014g01b1
ctaacactttgttacatctagcggatttggatttctttaacaactaagtcctgtttacatttaagccggctttgccattcatagctacagactctttttttttcaatccaacctactaacttttgttttactacttacaagttttacctttttatattgataccctttttttttttacacatcaccaagttacgccactagtctattatcgaaagcaactaactctgaacacttttgtgacaacctcactttaccactatcgatagactacaacctacagattgggtgaagaagtagtggtgggaacgttatagaagagtctgataaaaggcaaagataaaatcagtttacgtctatcaattggcactaatagatatagtaatgtggaggtaaatacgggcagtacacactgtagttttttaatatgttc

SEQ ID NO: 2758 - DNA, 435 bp, Triticum aestivum
  Clone ID: uC-tsfl9316014g03b1
taacactttgttacatctagcggatttggatttctttaacaactaaccctgtttaatttaagtcggctttgccatctcatagtacagactctttttttttcaatcccaaaccttctaacttttgtttttactactacctaagttttccttttttatatgataaccttttttttttaacacatcacccaaagatagccccacctatctattgtcgaaaagcactaactctaacacttttgtgtcaacctaacactttacactaacgatagactcaacctacagattaggtgagaagctagtggttggtactgttaaaggaagactcttgataaaaggacaagaaaaaatcatttacggtctagtaatgtgcactaataaataatagtaatgtggatgataataacggtgcagaacattactgtcatttttttatat

SEQ ID NO: 2759 - DNA, 271 bp, Triticum aestivum
  Clone ID: uC-tsfl9316014g06b1
ctaacactttgttacatctagcggatttggatttctttaacaactaagtctgtttacatttaagccagctttgccatctcatagctacagactcttttttttttcaatccaacctttactgactttttgttttagcttacttacctaagttttaccttttatattgatcacccctttttttttctttaaacacatcacccaagatagcgcccctagtctattagtcgaaatgcaactaactactgaacactatttgtgtcaacctacactt

SEQ ID NO: 2760 - DNA, 262 bp, Triticum aestivum
  Clone ID: uC-tsfl9316014g07b1
ctaacactttgttacatctagcggatttggatttctttaacaactaagtcctgtttacatttaagccagctttgccatctcatactacagactttcttttttacaaatccaacctttactaacttttgttttactacttacctaagttttactttttatatgataccccttttttttttttaaacacatcacccaagataacccccctatctattatcgaaatgcactaactctgaacacttttgtgacaacctaacattta

SEQ ID NO: 2761 - DNA, 650 bp, Triticum aestivum
  Clone ID: uC-tsfl9316014g10b1
gctctaaagctcaacactttgttacatctagcggatttggatttctttaacaactaaggttcctgtttttaacattttaaagccaagggcttttgcccatctccaatagctaacaagaactctttcttttctttacaaatcccaaaacctttactagactttttctgcttctttagcttacttcacctagagtcttctaccttttcttatcattgaatcaacccctttttttttttcttttaaacacatcccaacccaaagtataagcgcccacctagtcctatctagtccgaaaaatgcgaactagaactacatgagacactatctctgtcgttacgaacctaacactttctaccaagcttaatcggaataagacctcacaaacactcacaagttatatagggcttgaaagaaagtctaggtttgggtttgggttaactgctctaataaggagagtcagctacttggattaaaaagagtgatcaaaatgaataagaaaatccaagtattttacggtatccatgagttcaaatttgatgcagacatgataattaaagattagattcaggttcaaattgatagggaatggtatcagatcatgacagtgtggtcgagtagagcaatctaagcaatgttcaggtttttttttt

SEQ ID NO: 2762 - DNA, 538 bp, Triticum aestivum
  Clone ID: uC-tsfl9316014g12b1
ttctccgacctcttcccgcacctagcaaatggtaagccaagaaagccaactgacggcattgcacatgagcagttatagaaatgctgctgctgctattcaacgagatcgattctaacctcgaagcgcccagatcccaatgacgagctcgtcgacgatgtccaccacgttgcagtcgcgccatgggccccgaatgcgaaccccgccgacatggcctggaccggtgtgcccgtactgcgatccggggacttgaaccattccaccatccagttctcgccctcctcgacggcgctttagagcttcgccgtgaccctgtaacaggtggccccttcgaagctgtgcatccacaggcgaatcggcattgagatcctcgtcctcgactgtgctccccttgcgctagacacggtgttcgtcaacctgtagagcgaattgacaaaacggctggagagcggtgagggcaccttttacaaggaccatccgacaagccccaatgccaaagacgttgacaacatgacgcccgaagagcgtttatacacggcgc

SEQ ID NO: 2763 - DNA, 430 bp, Triticum aestivum
  Clone ID: uC-tsfl9316014h02b1
ttctccgacctcttcccgcacctagcaaatggtaagccaagaaagcctgcgcttgattgactcaagaaagctgtgtgttcaacggacatttacctaaagcgccaatccatgcagtctcacatgtcaccactgcatgccaggcccgatgcaccccgcacatggctgtcgtggccgctgatcgcactgtcattcacatcatttgcctctgtgccttaagttgcggacctgcacagggccttaagtgcacccagcgagggatgaacctgtccacgtgtccttcgtgacacggttgaactgagagcatgcaacggtgaagcgggagcctttacaagacatccagccaagcagcttgcacatacccagaggtagacgctaggagttacactcaatgcatcggatgttctgcttcgcgatcgtctactgcgctacg

SEQ ID NO: 2764 - DNA, 246 bp, Triticum aestivum
  Clone ID: uC-tsfl9316014h03b1
taacactttgttacatctagcggatttggatttctttaacaactaactcttttaacattaaagccgggcttgcctctcatagctacagactctttttttttcaatcaaaacctactagactttctgttttactactcactaagtctttacctttctatattgataacccttttttttttttaaacacatcacccaagatagcccacctatctattatcaaaagcaactaaactctgaacctatctt

SEQ ID NO: 2765 - DNA, 427 bp, Triticum aestivum
  Clone ID: uC-tsfl9316014h06b1
gttctccgacctcttcccgcacctagcaaatggtaagccaagaaagcctgcgcttgcttgactcaagaagctgtgtgtttaacggacatttacctaagcgccaatcaatgcagctcgcacatgtcaccactgcatgccctggcccgaatgcaccccgcacatggctgtcgtggccgctgatccgactgtcattcaccatcagtctgcctctgtgccttaacttgcggacctgccagggccttaactgcacccagcgacggttaatctgtccacgtgtccttcgtacacggttgaactgaaggatgcaaacgtgaaggggagcctttcaggccatcacagccatgcagactgcacatacgccagaggtagccgcctaggagttacacctaatgcatcgcgatgtcgtgcttgccatcgtctactgcct

SEQ ID NO: 2766 - DNA, 651 bp, Triticum aestivum
  Clone ID: uC-tsfl9316014h11b1
ctctaaacctcaacactttgttacatctagcggatttggatttctttaacaactaaggttcctgtttttaacattttaaagccaagggcttttgcccatctccaatagctaacaagaactctttcttttctttacaaatcccaaaacctttactagactttttctgcttctttagcttacttcacctagagtcttctaccttttcttatcattgaatcaacccctttttttttttcttttaaacacatcccaacccaaagtataagcgcccacctagtcctatctagtccgaaaaatgcgaactagaactacatgagacactatctctgtcgttacgaacctaacactttctaccaagcttaatcggaataagacctcacaaacactcacaagttatatagggcttgaaagaaagtctaggtttgggtttgggttaactgctctaataaggagagtcagctacttggattaaaaagagtgatcaaaatgaataagaaaatccaagtattttacggtatccatgagttcaaatttgatgcagacatgataattaaagattagattcaggttcacattgatagggaatggtatcagatcatgacagtgtggtcgagtagagcaatctaaggcatggtcagttttttttttttc

SEQ ID NO: 2767 - DNA, 623 bp, Triticum aestivum
  Clone ID: uC-tsfl9316015a05b1
ctcaacactttgttacatctagcggatttggatttctttaacaactaaggttcctgtttttaacattttaaagccaagggcttttgcccatctccaatagctaacaagaactctttcttttctttacaaatcccaaaacctttactagactttttctgcttctttagcttacttcacctagagtcttctaccttttcttatcattgaatcaacccctttttttttttcttttaaacacatcccaacccaaagtataagcgcccacctagtcctatctagtccgaaaaatgcgaactagaactacatgagacactatctctgtcgttacgaacctaacactttctaccaagcttaatcggaataagacctcacaaacactcacaagttatatagggcttgaaagaaagtctaggtttgggtttgggttaactgctctaataaggagagtcagctacttggattaaaaagagtgatcaaaatgaataagaaaatccaagtattttacggtatccatgagttcaaatttgatgcagacatgataattaaagattagattcaggctcaaattgatagggaatggtatcagatcatgacagtgtggtcgagtagaagcatctaagcat

SEQ ID NO: 2768 - DNA, 358 bp, Triticum aestivum
  Clone ID: uC-tsfl9316015a07b1
cggacgcgtgggccgccgcgagatcggccctccggcgggcgcccctcgccgcctcctcgtcctcttccgccgccgggatcctccgcaggtcggcggcggcgggcctggggacgcggatgcccctccacagcgcggcgtcggcggcgcgcctgggatcctgcatcacccaagatggcaacaatgctttctcatggaactccaggcgcatgttcagttcaaatgagaaacatctgcctgcaatatctgacccgaaaattgagactgcatttaaggatttgatggctgctagctggaacgagcttccaggttctcttgtggaggaggcaaagaaagcagtatctatggctactgatgataa

SEQ ID NO: 2769 - DNA, 521 bp, Triticum aestivum
  Clone ID: uC-tsfl9316015a08b1
tatccgacctcttcccgcacctagcaaatggtaagccaagaaagccaactgacggcattgcacatgagcagacaaagttatgctgctgctgctattcaacgagatcgattctaacctcaaagcgcccagatcccaatgacgagctcgtcgacgatgtccaccacgttgcagtcgcgccatgggccccgaatgcgaaccccgtcgacatggcctggtccgttgtgccggtactgcgatccggcgacttgtcccattcgaccatccagttctcgccctcctcgtcggcgcttcagagcttcgccgtgaccctgcaacaggtggccccttcgaagctgtccagccacagccgcagcggcattgagatcctcgtcctcgacgttgctccccttccgctagacacggtgttcgtcaacctggagagcgaattgacaaaacggctggagagcggcgagggcaccttttacaaggaccatccgacaagccccaatgccaaggacgttgccacatgacgcccgaggagc

SEQ ID NO: 2770 - DNA, 423 bp, Triticum aestivum
  Clone ID: uC-tsfl9316015a09b1
tcaacactttgttacatctagcggatttggatttctttaacaactaaggttcctgtttttaacattttaaagccaagggcttttgcccatctccaatagctaacaagaactctttcttttctttacaaatcccaaaacctttactagactttttctgcttctttagcttacttcacctagagtcttctaccttttcttatcattgaatcaacccctttttttttttcttttaaacacatcccaacccaaagtataagcgcccacctagtcctatctagtccgaaaaatgcgaactagaactacatgagacactatctctgtcgttacgaacctaacactttctaccaagcttaatcggaataaaacctcacaaacactcacaggtaatatagggctggaaagaaagcctaggttggggttggg

SEQ ID NO: 2771 - DNA, 575 bp, Triticum aestivum
  Clone ID: uC-tsfl9316015a10b1
taacactttgttacatctagcggatttggatttctttaacaactaaggttcctgtttttaacattttaaagccaagggtttttgcccatctccaatagctaacaagaactctttcttttctttacaaatcccaaaacctttactagactttttctgcttctttagcttacttcacctagagtcttctaccttttcttatcattgaatcaacccctttttttttttcttttaaacacatcccaacccaaagtataagcgcccacctagtcctatctagtccgaaaaatgcgaactagaactacatgagacactatctctgtcgttacgaacctaacactttctaccaagcttaatcggaataagacctcacaaacactcacaagttatatagggcttgaaagaaagtctaggtttgggtttgggttaactgctctaataaggagagtcagctacttggattaaaaagagtgatcaaaatgaataagaaaatccaagtattttacggtatccatgagttcaaatttgatgcagacatgataattaaagattagattcacgctcaaattgatagggaa

SEQ ID NO: 2772 - DNA, 611 bp, Triticum aestivum
  Clone ID: uC-tsfl9316015a11b1
cactttgttacatctagcggatttggatttctttaacaactaaggttcctgtttttaacattttaaagccaagggcttttgcccatctccaatagctaacaagaactctttcttttctttacaaatcccaaaacctttactagactttttctgcttctttagcttacttcacctagagtcttctaccttttcttatcattgaatcaacccctttttttttttcttttaaacacatcccaacccaaagtataagcgcccacctagtcctatctagtccgaaaaatgcgaactagaactacatgagacactatctctgtcgttacgaacctaacactttctaccaagcttaatcggaataagacctcacaaacactcacaagttatatagggcttgaaagaaagtctaggtttgggtttgggttaactgctctaataaggagagtcagctacttggattaaaaagagtgatcaaaatgaataagaaaatccaagtattttacggtatccatgagttcaaatttgatgcagacatgataattaaagattagattcaggttcaaattgatagggaatggtatcagatcatgacaagtgtggcgagtagagcaatc

SEQ ID NO: 2773 - DNA, 583 bp, Triticum aestivum
  Clone ID: uC-tsfl9316015b02b1
gttctccgacctcttcccgcacctagcaaatggtaagccaagaaagccaactgacggcattgcacatgagcagacaaagaaatgctgctgctgctattcaacgagatcgattctaacctcaaagcgcccagatcccaatgacgagctcgtcgacgatgtccaccacgttgcagtcgcgccatgggccccgaatgcgaaccccgtcgacatggcctggtccgttgtgccggtactgcgatccggcgacttgtcccattcgaccatccagttctcgccctcctcgtcggcgcttcagagcttcgccgtgaccctgcaacaggtggccccttcgaagctgtccagccacagccgcagcggcattgagatcctcgtcctcgacgttgctccccttccgctagacacggtgttcgtcaacctggagagcgaattgacaaaacggctggagagcggcgagggcaccttttacaaggaccatccgacaagccccaatgccaaggacgttgccaacatgacgcccgaggagcgtctagccacggcgctcagggcagctctcagcaccctcaagattgtccattccggcgat

SEQ ID NO: 2774 - DNA, 583 bp, Triticum aestivum; identical to SEQ ID NO: 2773
  Clone ID: uC-tsfl9316015b06b1

SEQ ID NO: 2775 - DNA, 409 bp, Triticum aestivum
  Clone ID: uC-tsfl9316015b07b1
cactttgttacatctagcggatttggatttctttaacaactaaggttcctgtttttaacattttaaagccaagggcttttgcccatctccaatagctaacaagaactctttcttttctttacaaatcccaaaacctttactagactttttctgcttctttagcttacttcacctagagtcttctaccttttcttatcattgaatcaacccctttttttttttcttttaaacacatcccaacccaaagtataagcgcccacctagtcctatctagtccgaaaaatgcgaactagaactacatgagacactatctctgtcgttacgaacctaacactttctaccaagcttaatcggaataagacctcacaaacactcacaagttatatagggcttgaaagaaagtctaggt

SEQ ID NO: 2776 - DNA, 639 bp, Triticum aestivum
  Clone ID: uC-tsfl9316015b10b1
taacactttgttacatctagcggatttggatttctttaacaactaaggttcctgtttttaacattttaaatccaagggcttttgcccatctccaatagctaacaagaactctttcttttctttacaaatcccaaaacctttactagactttttctgcttctttagcttacttcacctagagtcttctaccttttcttatcattgaatcaacccctttttttttttcttttaaacacatcccaacccaaagtataagcgcccacctagtcctatctagtccgaaaaatgcgaactagaactacatgagacactatctctgtcgttacgaacctaacactttctaccaagcttaatcggaataagacctcacaaacactcacaagttatatagggcttgaaagaaagtctaggtttgggtttgggttaactgctctaataaggagagtcagctacttggattaaaaagagtgatcaaaatgaataagaaaatccaagtattttacggtatccatgagttcaaatttgatgcagacatgataattaaagattagattcaggttcaaattgatagggaatggtatcagaacatgacagtgtggtcgagtagagcaatctaagcttggtcagtttttttttttt

SEQ ID NO: 2777 - DNA, 498 bp, Triticum aestivum
  Clone ID: uC-tsfl9316015b11b1
taacactttgttacatctagcggatttggatttctttaacaactaaggttcctgtttttaacattttaaagccaagggcttttgcccatctccaatagctaacaagaactctttcttttctttacaaatcccaaaacctttactagactttttctgcttctttagcttacttcacctagagtcttctaccttttcttatcattgaatcaacccctttttttttttcttttaaacacatcccaacccaaagtataagcgcccacctagtcctatctagtccgaaaaatgcgaactagaactacatgagacactatctctgtcgttacgaacctaacactttctaccaagcttaatcggaataagacctcacaaacactcacaagttatatagggcttgaaagaaagtctaggtttgggtttgggttaactgctctaataaggagagtcagctacttggattaaaaagagtgatcaaactgaataaaaaaacccagtttt

SEQ ID NO: 2778 - DNA, 348 bp, Triticum aestivum
  Clone ID: uC-tsfl9316015b12b1
ttagatcatgtggctggatttcatcattaaaacctcactgcttgtttcctgaaaccacaggtgttgaacagatggggatactatccactcattctaataggatcatgggcattcggcactattaaccgtatccatgatttcatcgagccagggcataagatcttctggctctcagatcttgacgctgggacagctgcgctaatggtagcaaacctatcaaataaataagttataaaattcgccatagatcatctttgctcttccaaagaacacgttatgaatgtcggattgtgacgagataatcaattcaattgcctatgggttcaacaggtcagggcgttgagcaat

SEQ ID NO: 2779 - DNA, 582 bp, Triticum aestivum; identical to SEQ ID NO: 2723
  Clone ID: uC-tsfl9316015c01b1

SEQ ID NO: 2780 - DNA, 566 bp, Triticum aestivum
  Clone ID: uC-tsfl9316015c02b1
ttctccgacctcttcccgcacctagcaaatggtaagccaagaaagccaactgacggcattgcacatgagcagacaaagaaatgctgctgctgctattcaacgagatcgattctaacctcaaagcgcccagatcccaatgacgagctcgtcgacgatgtccaccacgttgcagtcgcgccatgggccccgaatgcgaaccccgtcgacatggcctggtccgttgtgccggtactgcgatccggcgacttgtcccattcgaccatccagttctcgccctcctcgtcggcgcttcagagcttcgccgtgaccctgcaacaggtggccccttcgaagctgtccagccacagccgcagcggcattgagatcctcgtcctcgacgttgctccccttccgctagacacggtgttcgtcaacctggagagcgaattgacaaaacggctggagagcggcgagggcaccttttacaaggaccatccgacaagccccaatgccaaggacgttgccaacatgacgcccgaggagcgtctagccacggcgctcagggcagctctcagcaccctcaagat

SEQ ID NO: 2781 - DNA, 590 bp, Triticum aestivum
  Clone ID: uC-tsfl9316015c05b1
aacactctgttacatctagcggatttggatttctttaacaactaaggttcctgtttttaacattttaaagccaagggcttttgcccatctccaatagctaacaagaactctttcttttctttacaaatcccaaaacctttactagactttttctgcttctttagcttacttcacctagagtcttctaccttttcttatcattgaatcaacccctttttttttttcttttaaacacatcccaacccaaagtataagcgcccacctagtcctatctagtccgaaaaatgcgaactagaactacatgagacactatctctgtcgttacgaacctaacactttctaccaagcttaatcggaataagacctcacaaacactcacaagttatatagggcttgaaagaaagtctaggtttgggtttgggttaactgctctaataaggagagtcagctacttggattaaaaagagtgatcaaaatgaataagaaaatccaagtattttacggcatccatgagttcaaattggatgcagacatgataattaaagattagattcaggttcaaattgatagggaatggtatcagatcatga

SEQ ID NO: 2782 - DNA, 609 bp, Triticum aestivum
  Clone ID: uC-tsfl9316015c06b1
caacactctgttacatctagcggatttggatttctttaacaactaaggttcctgtttttaacattttaaagccaagggcttttgcccatctccaatagctaacaagaactctttcttttctttacaaatcccaaaacctttactagactttttctgcttctttagcttacttcacctagagtcttctaccttttcttatcattgaatcaacccctttttttttttcttttaaacacatcccaacccaaagtataagcgcccacctagtcctatctagtccgaaaaatgcgaactagaactacatgagacactatctctgtcgttacgaacctaacactttctaccaagcttaatcggaataagacctcacaaacactcacaagttatatagggcttgaaagaaagtctaggtttgggtttgggttaactgctctaataaggagagtcagctacttggattaaaaagagtgatcaaaatgaataagaaaatccaagtattttacggtatccatgagttcaaatttgatgcagacatgataattaaagattagattcaggttcaaattgatagggaatgtatcagatcatgacagtgtggtcgagtagagc

SEQ ID NO: 2783 - DNA, 555 bp, Triticum aestivum
  Clone ID: uC-tsfl9316015c09b1
aacactttgttacatctagcggatttggatttctttaacaactaaggttcctgtttttaacattttaatgctaagggcttttgcccatctccaatagctaacaagaactctttcttttctttacaaatcccaaaacctttactagactttttctgcttctttagcttacttcacctagagtcttctaccttttcttatcattgaatcaacccctttttttttttcttttaaacacatcccaacccaaagtataagcgcccacctagtcctatctagttcgaaaaatgcgaactagaactacatgagacactatctctgtcgttacgaacctaacactttctaccaagcttaatcggaataagacctcacaaacactcacaagttatatagggcttgaaagaaagtctaggtttgggtttgggttaactgctctaataaggagagtcagctacttggattaaaaagagtgatcaaaatgaataagaacaatccaagtattttacggtattcatgagttcaaatttgatgcagacatgataattaaagattagattc

SEQ ID NO: 2784 - DNA, 203 bp, Triticum aestivum
  Clone ID: uC-tsfl9316015c12b1
attataacctgatggtggtgctagctgaacgtgaagagttggtgtgatgacacactggcgtgataatgggccttgggcgccataggctatctgccgaggaatgcacgaggaaagatgagctgatcggccatctccggtacttgggtgaacaaccatacagtgatggccctcttacggggaccaaaaaagaactggcgctaccc

SEQ ID NO: 2785 - DNA, 524 bp, Triticum aestivum
  unsure (1)..(524): unsure at all n locations
  Clone ID: uC-tsfl9316015d06b1
ctcttcccgcacctagcaaatggtgagccaagaaagccaactgacggcattgcacatgagcagacaaagaaatgctgctgctgctattcaacgagatcgattctaacctcaaagcgcccagatcccaatgacgagctcgtcgacgatgtccaccacgttgcagtcgcgccatgggccccgaatgctaaccccgtcgacatggcctggaccgatgtgccggtactgcgatccggcgacttgtcccattcgaccatccagttctcgccctcctcgtgggcgcttcagagcttcgccgcgaccctgcaacaggtggccccttcgaagctgtccagccacagccgcagcggcattgagatcctcgtcctcgacgttgctacccttacgctagacacggtgttcgtcaacctggagagcgaattgacaaaacggctggagagccgcgagggcaccttttacgaggaccatncgacaagtcccaatgccaaggacgttgccaacatgacgcccgacgagcgtctaaccac

SEQ ID NO: 2786 - DNA, 449 bp, Triticum aestivum
  unsure (1)..(449): unsure at all n locations
  Clone ID: uC-tsfl9316015d08b1
tacatntagcggatttggatttctttaacaactaaggttcctgtttttaacattttaatgttaagggtttttgcccatctccaatagctcacaagaactctttcttttctttacaaatcccaaaacctttactagactatttctgcttctttagcttacttcacctagagtctcctaccttttcttatcattgaatcaacccctttttttttttcttttaaacacatcccaacccaaagtataagcgcccacctagtcctatctagtccgaaaaatgcgaactagaactacatgagacactttctctgtcgttacgaacctaacactttctaccaagcttaatcggaataagacctcacaaacactcacaagttatatagggcttgaaagaaagcttatgtctgggtttgggttaactgctctaataaagagagacagcttcttggatt

SEQ ID NO: 2787 - DNA, 583 bp, Triticum aestivum
  Clone ID: uC-tsfl9316015d09b1
tccgactctcttcccgcacctagcaaatggtaagccaagaaagccaactgacggtattgcacatgagcatacaaagaaatgctgctgctgctattcaacgagatcgattctaacctcaaagcgcccagatcccaatgacgagctcgtcgacgatgtccaccacgttgcagtcgcgccatgggccccgaatgcgaaccccgtcgacatggcctggtccgttgtgccggtactgcgatccggcgacttgtcccattcgaccatccagttctcgccctcctcgtcggcgcttcagagcttcgccgtgaccctgcaacaggtggccccttcgaagctgtccagccacagccgcagcggcattgagatcctcgttctcgacgttgctcccctttcgctagacacggtgttcgtcaacctggagagcgaattgacaaaacggctggagagcggcgagggcaccttttacaaggaccattcgacaagccccaatgccaaggacgttgccaacatgacgcccgaggagcggctagccacggcgctcaaggcagctttcagcaccctcaagattgtccattccggcgatttg

SEQ ID NO: 2788 - DNA, 465 bp, Triticum aestivum
  Clone ID: uC-tsfl9316015d12b1
acactttgttacatctagcggatttggatttctttaacaactaaggttcctgtttttaacattttaaagccaagggcttttgcccatctccaatagctaacaagaactctttcttttctttacaaatcccaaaacctttactagactttttctgcttctttagcttacttcacctagagtcttctaccttttcttatcattgaatcaacccctttttttttttcttttaaacacatcccaacccaaagtataagcgcccacctagtcctatctagtccgaaaaatgcgaactagaactacatgagacactatctctgtcgttacgaacctaacactttctaccaagcttaatcggaataagacctcacaaacactcacaagttatatagggcttgaaagaaagtctaggtttgggtttgggttaactgctctaataaggagagtcagctacttggattaaaaaga

SEQ ID NO: 2789 - DNA, 554 bp, Triticum aestivum
  Clone ID: uC-tsfl9316015e01b1
ctctaaactgttctccgacctcttcccgcacctagcaaatggtaagccaagaaagccaactgacggcattgcacatgagcagacaaagaaatgctgctgctgctattcaacgagatcgattctaacctcaaagcgcccagatcccaatgacgagctcgtcgacgatgtccaccacgttgcagtcgcgccatgggccccgaatgcgaaccccgtcgacatggcctggtccgttgtgccggtactgcgatccggcgacttgtcccattcgaccatccagttctcgccctcctcgtcggcgcttcagagcttcgccgtgaccctgcaacaggtggccccttcgaagctgtgcagccacaggcgcaggggcattgagatcctcgtcctcgacggtgctacccttgcgctagacacggtgttcgtcaacctggagagcgaattgacaaaacggctggagagcggcgagggcaccttttacaaggaccatccgacaagccccaatgccaaggacgttgccaacatgacgcccgaggagcgtctagtcacggcgctcaggg

SEQ ID NO: 2790 - DNA, 564 bp, Triticum aestivum
  unsure (1)..(564): unsure at all n locations
  Clone ID: uC-tsfl9316015e02b1
ttctccgacctcttcccgcacctagcaaatggtaagccaagaaagccaactgacggcattgcacatgagcagtcaaagaaatgctgctgctgctattcaacgagatcgattctaacctcaaagcgcccagatcccaatgacgagctcgtcgacgatgtccaccacgttgcagtcgcgccatgggccccgaatgcgaaccccgtcgacatggcctggtccgttgtgccggtactgcgatccggcgacttgtcccattcgaccatccagttctcgccctcctcgtcggcgcttcagagcttcgccgtgaccctgcaacaggtggccccttcgaagctgtccagccacagccgcagcggcattgagatcctcgtcctcgacgttgctccccttccgctagacacggtgttcgtcaacctggagagcgaattgacaaaacggctggagagcggcgagggcaccttttacaaggaccatccgacaagccccaatgccaaggacgttgccaacatgacgcccgaggagcgtctagccacggcgctcanggcagctctcagcaccctcaag

SEQ ID NO: 2791 - DNA, 549 bp, Triticum aestivum
  Clone ID: uC-tsfl9316015e04b1
gctctaaacctaacactttggtacatctacgcggatttggatttctttaacaactaaggctcctgcttttaacattttaaagccaagggcttttgcccatctccaatagctaacaagaactctttcttttctttacaaatcccaaaacctttactagactttttctgcttatttagcttacttcacctacagtcttctacctgttcttatgatggagacaaccccttttttgatttcttttaaacacatcccaacccaaagtatgagcgcccacctagtcctatctagtccgaaaaatgcaaactagaactacatgagacactatctctgtcgttacgaacctaacactttctaccaagcttaatcggaataagacctcacaaacactcacaagttatatagggcttgaaagaaagtctaggtttgggttcgggctaactgctctaataaggagagtcagctacttggattaaaaagagtgaccaaaatgaattagaaaatccaggtcttttacggtgtccatgagctcaaatttgatgcacacatgat

SEQ ID NO: 2792 - DNA, 438 bp, Triticum aestivum
  Clone ID: uC-tsfl9316015e07b1
ttctccgactctcttcccgcacctagcaaatggtaagccaagaaagccaactgacggcattgctcatgagcttacaaagaaatgctgctgctgctgttcaacgagatcgattctaacctcaaagcgcccagatcccaatgacgagctcgtcgacgatgtccaccacgttgcagtcgcgccatgggccccgaatgcgaaccccgtcgacatggcctggtccgttgtgccggtactgcgatccggcgacttgtcccattcgaccatccagttctcgccctcctcgtcggcgcttcagagcttcgccgtgaccctgcaacaggtggccccttcgaagctgtccagccacagccgcagcggcattgagatcctcgttctcgacgttggtccccttccgctagacacggtgttcgtcaacctggagagcgaattgacaaaacg

SEQ ID NO: 2793 - DNA, 153 bp, Triticum aestivum
  Clone ID: uC-tsfl9316015e09b1
ttctccgactctcttcccgcacctagcaaatggtgagccaagaaagccaactgacggcattgcacatgagctttcaaagaaatgctgctgctgctattcaacgagatcgattctaacctcaaagcgcccagatcccaatgacgagctcgtcga

SEQ ID NO: 2794 - DNA, 651 bp, Triticum aestivum
  Clone ID: uC-tsfl9316015f01b1
gctctaaacgctaacactttgttacatctagcggatttggatttctttaacaactaaggttcctgtttttaacattttaaagccaagggcttttgcccatctccaatagctaacaagaactctttcttttctttacaaatcccaaaacctttactagactttttctgcttctttagcttacttcacctagagtcttctaccttttcttatcattgaatcaacccctttttttttttcttttaaacacatcccaacccaaagtataagcgcccacctagtcctatctagtccgaaaaatgcgaactagaactacatgagacactatctctgtcgttacgaacctaacactttctaccaagcttaatcggaataagacctcacaaacactcacaagttatatagggcttgaaagaaagtctaggtttgggtttgggttaactgctctaataaggagagtcagctacttggattaaaaagagtgatcaaaatgaataagaaaatccaagtattttacggtatccatgagttcaaatttgatgcagacatgataattaaagattagattcaggttcaaattgatagggaatggtatcagatcatgacagtgtggcgagtagagcaatctaagcattggtcaggtttttttttttt

SEQ ID NO: 2795 - DNA, 623 bp, Triticum aestivum
  Clone ID: uC-tsfl9316015f02b1
ctctaaacgctaacactttgttacatctagcggatttggatttctttaacaactaaggttcctgtttttaacattttaaagccaagggcttttgcccatctccaatagctaacaagaactctttcttttctttacaaatcccaaaacctttactagactttttctgcttctttagcttacttcacctagagtcttctaccttttcttatcattgaatcaacccctttttttttttcttttaaacacatcccaacccaaagtataagcgcccacctagtcctatctagtccgaaaaatgcgaactagaactacatgagacactatctctgtcgttacgaacctaacactttctaccaagcttaatcggaataagacctcacaaacactcacaagttatatagggcttgaaagaaagtctaggtttgggtttgggttaactgctctaataaggagagtcagctacttggattaaaaagagtgatcaaaatgaataagaaaatccaagtattttacggtatccatgagttcaaatttgatgcacacatgataattaaagattagattcaggttcaaattgatagggaatggtatcagatcatgacaagtgtggcgagtagagcaat

SEQ ID NO: 2796 - DNA, 464 bp, Triticum aestivum
  Clone ID: uC-tsfl9316015f04b1
tcggcatcatcgagcacgtagcgtccgcgctcggagctgacaccaatgccgtccggagaaagaacctccacagcgtcgagagcctcaggaagttctacggcgacgccgcgggggacgccccgacgtacagccttatcgacatcttcgacatgctggcctcgtcgccggagtaccggagcatggcggaggcagttgaacggttcaatggcgggaacaggtggaagaagcgcggcatttcgtgcgtgcctgatcacctacgaggtgaccctccggccgacgccggggaaggtgtccatcctgaacgaccgctcgatcgctgtggtggtcggctgcgtggagctcgggcaatggctgtataccaaggtgaagcagatgacggagttcgggctgcgggagctctgtaccgacgccgacgggctgctagacacggtgcgcgtcattgaggccgacacgctgagcttgat

SEQ ID NO: 2797 - DNA, 548 bp, Triticum aestivum
  Clone ID: uC-tsfl9316015f05b1
gctctaaacgctaacactttggtacatctacgcggatttggatttctttaacaactaaccgctcctgcttgtaacattttaaagccaccggctcttgcccatctccaatagctaacaagaactctgtcttttctttacaaatcccaaaacctttactagactctttctgcttctttagcttacttcacctacagtcgtctacctgttcttatgatcgagacaacccctttattgatttcttgtatacacatcccaacccaacgtatgaacgcccacctcgtcctatctaggccgaaagatgcaaactagaactacatgagacactatctctggcggtacgaacctaacacttcttaccaagcttaatcgggataagacctcacatacactcacaagttatatagggcttgaaagaaagtctaggttagggttcgggctaactgctctaattaggagagtcagctacttggattaaaaggagtgaccaaaatgaataagaaaatcctaggttgttacggtgtccatgagctcatatttgatgcacacat

SEQ ID NO: 2798 - DNA, 447 bp, Triticum aestivum
  Clone ID: uC-tsfl9316015f06b1
ctctaaacgctaacactttgttacatctagcggatttggatttctttaacaactaaggttcctgtttttaacattttaaagcctagggcttttgcccatctccaatagctaacaagaactctttcttttcttacaaaatgccaaacctttactagactttttctgcttctttagcttacttcacctagagtcttctaccttttcttatcattgaatcaacccctttttttttttgttttaaacacattccaacccaaagtataagcgcccacctagttctatctagtccgaaaaatgcgaactagaactacatgagacactatctctgtcgatacgaacctaacactttctaccaagcttaataggaataagacctaacaaacactcacaagttatatagggcttgaaagaaagcctaggattgggtttgggataactgctctataa

SEQ ID NO: 2799 - DNA, 476 bp, Triticum aestivum
  Clone ID: uC-tsfl9316015f07b1
tcaacactttgttacatctagcggatttggatttctttaacaactaaggttcctgtttttaacattttaaagccaagggcttttgcccatctccaatagctaacaagaactctttcttttctttacaaatcccaaaacctttactagactttttctgcttctttagcttacttcacctagagtcttctaccttttcttatcattgaatcaacccctttttttttttcttttaaacacatcccaacccaaagtataagcgcccacctagtcctatctagttcgaaaaaagcgaactagaactacctgagacactatctctgtgggtaccaacctaacactttctaccaaggttaatcggaataagacctcccaaacactcacaagttatatagggctttgaaaaaaagactaaggttggggttggggtaactgctctaataaagagagtcagcttcttgggtttaaaagagggagcc

SEQ ID NO: 2800 - DNA, 508 bp, Triticum aestivum
  Clone ID: uC-tsfl9316015f08b1
ttctccgacctcttcccgcacctagcaaatggtgagccaagaaagccaactgacggcattgcacatgagcttacaaagaaatgctgctgctgctattcaacgagatcgattctaacctcaaagcgcccagatcccaatgacgagctcgtcgacgatgtccaccacgttgcagacgcgccatgggccccgaatgcgaaccccgtcgacatggcctggtccgttgtgccggtactgcgatccggcgacttgtcccattcgaccatccagttctcgccctcctcgtgggcgcttcagagcttcgccgtgaccctgcaacaggtggccccttcgaagctgtccagccacagccgcagcggcattgagatcctcgtcctcgacgttgctgcccttccgatagacacggtgttcgtcaacctggagagcgaattgacaaaacggctggagagcggctagggcaccttttacaaggaccatacgacaagccccatgccaaggacgttgcaacatg

SEQ ID NO: 2801 - DNA, 511 bp, Triticum aestivum
  unsure (1)..(511): unsure at all n locations
  Clone ID: uC-tsfl9316015f09b1
gttctccgacctcttcccgcacctagcaaatggtaagccaagaaagccaactgacggcattgctcatgagcttacaaagaaatgctgctgctgctattcaacgagatcgattctaacctcaaagcgcccagatcccaatgacgagctcgtcgacgatgtccaccacgttgcagtcgcgccatgggccccgaatgcgaaccccgtcgacatggcctggtccgttgtgccggtactgcgatccggcgacttgtcccattcgaccatccagttctcgccctcctcgtcggcgcttcagagctttgccgtgaccctgcaacagggtggccctttcgaagctggtcagccacagcncgcaggggattggagaacctcgtcctcgacggtggtcccttccggtagacacggtggtcgtcaacctgaagagcgaattgacaaaacggttggagagccgcgagggccctttttcaaggaccattcgaacagccccatgccaaggacgttgccaacatga

SEQ ID NO: 2802 - DNA, 561 bp, Triticum aestivum
  Clone ID: uC-tsfl9316015f10b1
gttctccgacctcttcccgcacctagcaaatggtaagccaagaaagccaactgacggcattgctcatgagctgacaaagaaatgctgctgctgctattcaacgagatcgattctaacctcaaagcgcccagatcccaatgacgagctcgtcgacgatgtccaccacgttgcagtcgcgccatgggccccgaatgcgaaccccgtcgacatggcctggtccgttgtgccggtactgcgatccggcgacttgtcccattcgaccatccagttctcgccctcctcgtcggcgcttcagagcttcgccgtgaccctgcaacaggtggccccttcgaagctgtccagccacagccgcagcggcattgagatcctcgtcctcgacgttgctccccttccgctagacacggtgttcgtcaacctggagagcgaattgacaaaacggctggagagcggcgagggcaccttttacaaggaccattcgacaagccccaatgccaaggacgttgccaacatgacgcccgaggagcgtctagccacggcgctcagggcagcttttagcaccct

SEQ ID NO: 2803 - DNA, 337 bp, Triticum aestivum
  Clone ID: uC-tsfl9316015f11b1
acactttgttacatctagcggatttggatttctttaacaactaaggttcctgtttttaacattttaaagccaagggcttttgcccatctccaatagctaacaagaactctttcttttctttacaaatcccaaaacctttactagactttttctgcttctttagcttacttcacctagagtcttctaccttttcttatcattgaatcaacccctttttttttttcttttaaacacatcccaacccaaagtataagcgcccacctagtcctatctagtccgaaaaatgcgaactagaactacatgagacactatctctgtcgttacgaacctaacactt

SEQ ID NO: 2804 - DNA, 228 bp, Triticum aestivum
  Clone ID: uC-tsfl9316015f12b1
tcaacactttgttacatctagcggatttggatttctttaacaactaaggttcctgtttttaacattttaaagccaagggcttttgcccatctccaatagctaacaagaactctttcttttctttacaaatcccaaaacctttactagactttttctgcttctttagcttactttacctagagtcttctaccttttcttatcattggaccaaccctttttttttttttt

SEQ ID NO: 2805 - DNA, 554 bp, Triticum aestivum
  Clone ID: uC-tsfl9316015g01b1
aaactgttctccgacctcttcccgcacctagcaaatggtaagccaagaaagccaactgacggcattgcacatgagcagttaaagaaatgctgctgctgctattcaacgagatcgattctaacctcaaagcgcccagatcccaatgacgagctcgtcgacgatgtccaccacgttgcagtcgcgccatgggccccgaatgcgaaccccgtcgacatggcctggtccgttgtgccggtactgcgatccggcgacttgtcccattcgaccatccagttctcgccctcctcgtcggcgcttcagagcttcgccgtgaccctgcaacaggtggccccttcgaagctgtccagccacagccgcagcggcattgagatcctcgtcctcgacgttgctccccttccgctagacacggtgttcgtcaacctggagagcgaattgacaaaacggctggagagcggcgagggcaccttttacaaggaccatccgacaagccccaatgccaaggacgttgccaacttgacgcccgaggagcgtctagccacggcgcttagggcagc

SEQ ID NO: 2806 - DNA, 586 bp, Triticum aestivum
  unsure (1)..(586): unsure at all n locations
  Clone ID: uC-tsfl9316015g03b1
gctctaaactgttctccgacctcttcccgcacctagcaaatggtgagccaagaaagccaactgacggcattgcacatgagcagacaaagaaatgctgctgctgctattcaacgagatcgattctaacctcaaagcgcccagatcccaatgacgagctcgtcgacgatgtccaccacgttgcagtcgcgccatgggccccgaatgcgaaccccgtcgacatggcctggtccgttgtgccggtactgcgatccggcgacttgtcccattcgaccatccagttctcgccctcctcgtcggcgcttcagagcttcgccgtgaccctgcaacaggtggccccttcgaagctgtccagccacagccgcagcggcattgagatcctcgtcctcgacgttgctccccttccgctagacacggtgttcgtcaacctggagagcgaattgacaaaacggctggagagcggcgagggcaccttttacaaggaccatccgacaagccccaatgccaaggacgttgccaacatgacgcccgaggagcgtctagccacggcgctcanggcagctctcagcaccctcaagattgtccattc

SEQ ID NO: 2807 - DNA, 583 bp, Triticum aestivum
  Clone ID: uC-tsfl9316015g06b1
aaactgttctccgacctcttcccgcacctagcaaatggtaagccaagaaagccaactgacggcattgcacatgagcagacaaagaaatgctgctgctgctattcaacgagatcgattctaacctcaaagcgcccagatcccaatgacgagctcgtcgacgatgtccaccacgttgcagtcgcgccatgggccccgaatgcgaaccccgtcgacatggcctggtccgttgtgccggtactgcgatccggcgacttgtcccattcgaccatccagttctcgccctcctcgtcggcgcttcagagcttcgccgtgaccctgcaacaggtggccccttcgaagctgtccagccacagccgcagcggcattgagatcctcgtcctcgacgttgctccccttccgctagacacggtgttcgtcaacctggagagcgaattgacaaaacggctggagagcggcgagggcaccttttacaaggaccatccgacaagccccaatgccaaggacgttgccaacatgacgcccgaggagcgtctagccacggcgctcagggcagctctcagcaccctcaagattgtccattccg

SEQ ID NO: 2808 - DNA, 277 bp, Triticum aestivum
  Clone ID: uC-tsfl9316015g08b1
ctctttcgtcgccgtcgattcgaacctcccccaaatcagcagcagtcgaccggaggcgccgccatggcccgtaccaagcagaccggccgcaagttcaccggcgggaaggcgccccgcaagcaggttgccaccaagggggggaggaagtcggggccgaccaccggcggagtgaagaagccccaccgctacaggccggggaccggggcgcttcgggagatccgcaagtaccaaaagagcacggagctgctgatccgcaagctgccttttcagcgcctgg

SEQ ID NO: 2809 - DNA, 590 bp, Triticum aestivum
  unsure (1)..(590): unsure at all n locations
  Clone ID: uC-tsfl9316015g09b1
cactttgttacatctagcggatttggatttctttaacaactaaggttcctgtttttaactttttaaagccaagggcttttgcccatctccaatagctaacaagaactctttcttttctttacaaatcccaaaacctttactagactttttctgcttctttagcttacttcacctagagtcttctaccttttcttatcattgaatcaacccctttttttttttcttttaaacacatcccaacccaaagtataagcgcccacctagtcctatctagtccgaaaaatgcgaactagaactacatgagacactatctctgtcgttacgaacctaacactttctaccaagcttaatcggaataagacctcacaaacactcacaagttatatagggcttgaaagaaagtctaggtttgggtttgggttaactgctctaataaggagagtcagctacttggattaaaaagagtgatcaaaatgaataagaaaatccaagtattttacggtatccatgagttcaaatntgatgcagacatgataattaaagattagattcaagttcaaattgatagggaatggtatcagatcatgaca

SEQ ID NO: 2810 - DNA, 642 bp, Triticum aestivum
  unsure (1)..(642): unsure at all n locations
  Clone ID: uC-tsfl9316015g10b1
tcaacactttgttacatctagcggatttggatttctttaacaactaaggttcctgtttttaacattttaaagccaagggcttttgcccatctccaatagctaacaagaactctttcttttctttacaaatcccaaaacctttactagactttttctgcttctttagcttacttcacctagagtcttctaccttttcttatcattgaatcaacccctttttttttttcttttaaacacatcccaacccaaagtataagcgcccacctagtcctatctagtccgaaaaatgcgaactagaactacatgagacactatctctgtcgttacgaacctaacactttctaccaagcttaatcggaataagacctcacaaacactcacaagttatatagggcttgaaagaaagtctaggtttgggtttgggttaactgctctaataaggagagtcagctacttggattaaaaagagtgatcaaaatgaataagaaaatccaagtattttacggtatccatgagttcaaatntgatgcagacatgataattaaagattagattcaggttcaaattgatagggaatggtatcagatcatgacagtgtgggcgagtagagcaatctaagcatggttcaagtntttttttttt

SEQ ID NO: 2811 - DNA, 602 bp, Triticum aestivum
  Clone ID: uC-tsfl9316015g12b1
ctttagatcatgtggctggatttcatcattaaaacctcactgcttgtttcctgaaaccacaggtgttgaacagatggggatactatccactcattctaataggatcatgggcattcggcactattaaccgtatccatgatttcatcgagccagggcataagatcttctggctctcagttcttgacgttgggacagctgcactaatggtagcaaacctatcaaataaataagttataaaattcgccatagatcatctttgctcttcccgagtcgatgttctgaatgttgtattttcagggcttgttcaattcaatagcctatggtttcaacagctcagtgcgtcgagcaatccatgagagactggagctgtaagtcaccaccgatctctttggtttgctatattattcccaataatcaatgaagcttgatttttatgaaacccttggtctgctagattcttgccagaacggctatatcgatggcttccaagcaatttcagaccaaaaaccatctgattttacatcagcaacaacaacagcgaagcgaaatggtatcactcaagaccgaggaccagcaatgacacttactttcaaactatacat

SEQ ID NO: 2812 - DNA, 622 bp, Triticum aestivum
  Clone ID: uC-tsfl9316015h01b1
ctctaaacctaacactttgttacatctagcggatttggatttctttaacaactaaggttcctgtttttaacattttaaagccaagggcttttgcccatctccaatagctaacaagaactctttcttttctttacaaatcccaaaacctttactagactttttctgcttctttagcttacttcacctagagtcttctaccttttcttatcattgaatcaacccctttttttttttcttttaaacacatcccaacccaaagtataagcgcccacctagtcctatctagtccgaaaaatgcgaactagaactacatgagacactatctctgtcgttacgaacctaacactttctaccaagcttaatcggaataagacctcacaaacactcacaagttatatagggcttgaaagaaagtctaggtttgggtttgggttaactgctctaataaggagagtcagctacttggattaaaaagagtgatcaaaatgaataagaaaatccaagtattttacggtatccatgagttcaaatttgatgcagacatgataattaaagattagattcaggttcaaattgatagggaatggtatcagatcatgacagtgtggcgagtagagcaatc

SEQ ID NO: 2813 - DNA, 561 bp, Triticum aestivum
  Clone ID: uC-tsfl9316015h02b1
gctctaaacctaacactttgttacatctagcggatttggatttctttaacaactaaggttcctgtttttaacattttaaagccaagggcttttgcccatctccaatagctaacaagaactctttcttttctttacaaatcccaaaacctttactagactttttctgcttctttagcttacttcacctagagtcttctaccttttcttatcattgaatcaacccctttttttttttcttttaaacacatcccaacccaaagtataagcgcccacctagtcctatctagtccgaaaaatgcgaactagaactacatgagacactatctctgtcgttacgaacctaacactttctaccaagcttaatcggaataagacctcacaaacactcacaagttatatagggcttgaaagaaagtctaggtttgggtttgggttaactgctctaataaggagagtcagctacttggattaaaaagagtgatcaaaatgaataagaaaatccaagtattttacggtatccatgagttcaaatttgatgcagacatgataattaaagattag

SEQ ID NO: 2814 - DNA, 585 bp, Triticum aestivum
  Clone ID: uC-tsfl9316015h05b1
ctaaactgttctccgacctcttcccgcacctagcaaatggtaagccaagaaagccaactgacggcattgcacatgagcagacaaagaaatgctgctgctgctattcaacgagatcgattctaacctcaaagcgcccagatcccaatgacgagctcgtcgacgatgtccaccacgttgcagtcgcgccatgggccccgaatgcgaaccccgtcgacatggcctggtccgttgtgccggtactgcgatccggcgacttgtcccattcgaccatccagttctcgccctcctcgtcggcgcttcagagcttcgccgtgaccctgcaacaggtggccccttcgaagctgtccagccacagccgcagcggcattgagatcctcgtcctcgacgttgctccccttccgctagacacggtgttcgtcaacctggagagcgaattgacaaaacggctggagagcggcgagggcaccttttacaaggaccatccgacaagccccaatgccaaggacgttgccaacatgacgcccgaggagcgtctagccacggcgctcagggcagctctcagcaccctcaagattgtccattccg

SEQ ID NO: 2815 - DNA, 601 bp, Triticum aestivum
  Clone ID: uC-tsfl9316015h06b1
ctctaaacgctaacactttgttacatctagcggatttggatttctttaacaactaaggttcctgtttttaacattttaaagccaagggcttttgcccatctccaatagctaacaagaactctttcttttctttacaaatcccaaaacctttactagactttttctgcttctttagcttacttcacctagagtcttctaccttttcttatcattgaatcaacccctttttttttttcttttaaacacatcccaacccaaagtataagcgcccacctagtcctatctagtccgaaaaatgcgaactagaactacatgagacactatctctgtcgttacgaacctaacactttctaccaagcttaatcggaataagacctcacaaacactcacaagttatatagggcttgaaagaaagtctaggtttgggtttgggttaactgctctaataaggagagtcagctacttggattaaaaagagtgatcaaaatgaataagaaaatccaagtattttacggtatccatgagttcaaatttgatgcagacatgataattaaagattagattcaggttcaaattgatagggaatggtatcagatcatga

SEQ ID NO: 2816 - DNA, 57 bp, Triticum aestivum
  Clone ID: uC-tsfl9316015h09b1
aatttaaaaaaaaaaaaaataaaaaaaaggaaaattttataaaaaaaaatcctaaaa

SEQ ID NO: 2817 - DNA, 178 bp, Triticum aestivum
  Clone ID: uC-tsfl9316016a02b1
tagcgaggggagtacgaaagtcactgaccgccttgcacatggagcacaccaagttatgctgctggtgatgttcaccgggatcaattataacctgatggggctcatagcccaacgacaagctctggggcgcatgccaccagggtgcacatgggccttgggccccagaaggctaactgcg

SEQ ID NO: 2818 - DNA, 519 bp, Triticum aestivum
  Clone ID: uC-tsfl9316016a05b1
gttctccgacctcttcccgcacctagcaaatggtaagccaagaaagccaactgacggcattgcacatgagcagacaaagaaatgctgctgctgctattcaacgagatcgattctaacctcaaagcgcccagatcccaatgacgagctcgtcgacgatgtccaccacgttgcagtcgcgccatgggccccgaatgcgaaccccgtcgacatggcctggtccgttgtgccggtactgcgatccggcgacttgtcccattcgaccatccagttctcgccctcctcgtcggcgcttcagagcttcgccgtgaccctgcaacaggtggccccttcgaagctgtccagccacagccgcagcggcattgagatcctcgtcctcgacgttgctccccttccgctagacacggtgttcgtcaacctggagagcgaattgacaaaacggctggagagcggcgagggcaccttttacaaggaccattcgacaagccccaatgccaaggacgttgccaacatgacgcccga

SEQ ID NO: 2819 - DNA, 504 bp, Triticum aestivum
  Clone ID: uC-tsfl9316016a09b1
cgacctcttcccgcacctagcaaatggtaagccaagaaagccaactgacggcattgcacatgagcagacaaagttatgctgctgctgctattcaacgagatcgattctaacctcaaagcgcccagatcccaatgacgagctcgtcgacgatgtccaccacgttgcagtcgcgccatgggccccgaatgcgaaccccgtcgacatggcctggtccgttgtgccggtactgcgatccggcgacttgtcccattcgaccatccagttctcgccctcctcgtcggcgcttcagagcttcgccgtgaccctgcaacaggtggccccttcgaagctgttcagccacagccgcagcggcattgagatcctcgtcctcgacgttgctccccttccgctagacacggtgttcgtcaacctggagagcgaattgacaaaacggctggagagcggcgagggcaccttttacaaggaccatccgacaagccccaatgccaggacgttgccacatga

SEQ ID NO: 2820 - DNA, 523 bp, Triticum aestivum; identical to SEQ ID NO: 2074
  Clone ID: uC-tsfl9316016a10b1

SEQ ID NO: 2821 - DNA, 452 bp, Triticum aestivum
  Clone ID: uC-tsfl9316016a11b1
tacgcgcagttggattgctttaacagcctaatgccgctgcccttaacactggaaaggctcacggctatcgcccatgtgcgataactatgaagaactctttattttttttgctgttgcctgaccttgactagactgtgtccgctcaatttggcttacttaaggtactgtgttgtccctgtttttatgatggggagaacccgtctaatgatgaattgtaagcacatctcagctcactgggtgagcacccacctcgtgctatctagctcgcagagagcaaactagaactgcatgtgacactgtctctgttgatacaagcctatcactacctaccagagcttaattggaatatagacctcacaaacactcacaagtgatatagggctcgtgagaaagcctaagttagggttcgggctaactgctctaataatgagagctggcttcttggattaaaa

SEQ ID NO: 2822 - DNA, 615 bp, Triticum aestivum
  Clone ID: uC-tsfl9316016a12b1
gctaacactttgttacatctagcggatttggatttctttaacaactaaggttcctgtttttaacattttaaagccaagggcttttgcccatctccaatagctaacaagaactctttcttttctttacaaatcccaaaacctttactagactttttctgcttctttagcttacttcacctagagtcttctaccttttcttatcattgaatcaacccctttttttttttcttttaaacacatcccaacccaaagtataagcgcccacctagtcctatctagtccgaaaaatgcgaactagaactacatgagacactatctctgtcgttacgaacctaacactttctaccaagcttaatcggaataagacctcacaaacactcacaagttatatagggcttgaaagaaagtctaggtttgggtttgggttaactgctctaataaggagagtcagctacttggattaaaaagagtgatcaaaatgaataagaaaatccaagtattttacggtatccatgagttcaaatttgatgcagacatgataattaaagattagattcaggttcaaattgatagggaatggtatcagatcatgacagtggggcgagtagagcaatc

SEQ ID NO: 2823 - DNA, 369 bp, Triticum aestivum
  Clone ID: uC-tsfl9316016b01b1
aacactttgttacatctagcggatttggatttctttaacaactaaggttcctgtttttaacattttaaagccaagggcttttgcccatctccaatagctaacaagaactctttcttttctttacaaatccccaaaacccttactaaaacttttctggtttctttagcttacttcacctagagtcttctaccttttcttatcattgaatcaacccctttttttttttcttttaaacacatcccaacccaaagtataagcgcccacctagtcctatctagtccgaaaaatgcgaactagaactacatgagacactatctctgtcgttacgaacctaacactttcttaccaagcttaatcggaataagacct

SEQ ID NO: 2824 - DNA, 425 bp, Triticum aestivum
  Clone ID: uC-tsfl9316016b02b1
caacactttgttacatctagcggatttggatttctttaacaactaaggttcctgtttttaacattttaaagccaagggcttttgcccatctccaatagctaacaagaactctttcttttctttacaaatcccaaaacctttactagactttttctgcttctttagcttacttcacctagagtcttctaccttttcttatcattgaatcaacccctttttttttttcttttaaacacatcccaacccaaagtataagcgcccacctagtcctatctagtccgaaaaatgcgaactagaactacatgagacactatctctgtcgttacgaacctaacactttctaccaagcttaatcggaataagaccttacaaaccctcacaagttatatagggctttgaagaaagtctaggtttgggtttggggt

SEQ ID NO: 2825 - DNA, 509 bp, Triticum aestivum
  Clone ID: uC-tsfl9316016b03b1
acactttgttacatctagcggatttggatttctttaacaactaaggttcctgtttttaacattttaaagccaagggcttttgcccatctccaatagctaacaagaactctttcttttctttacaaatcccaaaacctttactagactttttctgcttctttagcttacttcacctagagtcttctaccttttcttatcattgaatcaacccctttttttttttcttttaaacacatcccaacccaaagtataagcgcccacctagtcctatctagtccgaaaaatgcgaactagaactacatgagacactatctctgtcgttacgaacctaacactttctaccaagcttaatcggaataagacctcacaaacactcacaagttatatagggcttgaaagaaagtctaggtttgggtttgggttaactgctctaataggagagtcagctacttggattaaaaagagggatcaaaatgaataagagaatccaagtattttactgtatccat

SEQ ID NO: 2826 - DNA, 390 bp, Triticum aestivum
  Clone ID: uC-tsfl9316016b04b1
cctctctccgcaccttgcagcgggtatggcttgatagcccaccgacggcttcggacatgagcattctaaagataaggtgttgtggccatctacagtggctgacaagaactttttcgtgcctttacacaaacgacaagcttgactagactgtccatgatgctgcagctgacgccagggccaggattgtacacttttcgtatcatggaactgacccgtgtgccttgtctgtgaaacacatactagcccaaagtatacgcgcccacctagtcctatctagtgcgaataatgcgaactagaactacatgagacactatgtctgttggtacgaacctaacactttctaccaagcttattcggactaagacctcacaaacactcacatgttattta

SEQ ID NO: 2827 - DNA, 525 bp, Triticum aestivum
  Clone ID: uC-tsfl9316016b05b1
ttctccgacctcttcccgcacctagcaaatggtaagccaagaaagccaactgacggcattgcacatgagcatacaaagaaatgctgctgctgctattcaacgagatcgattctaacctcaaagcgcccagatcccaatgacgagctcgtcgacgatgtccaccacgttgcagtcgcgccatgggccccgaatgcgaaccccgtcgacatggcctggtccgttgtgccggtactgcgatccggcgacttgtcccattcgaccatccagttctcgccctcctcgtcggcgcttcagagcttcgccgtgaccctgcaacaggtggccccttcgaagctgtccagccacagccgcagcggcattgagatcctcgtcctcgacgttgctccccttccgctagacacggttgttcgtcaacctggagagcgaattgacaaaacggctggagagccgcgagggcaccttttacaaggaccatccgacaagccccaatgccaaggacgttgccaacatgacgcccgaggagcg

SEQ ID NO: 2828 - DNA, 547 bp, Triticum aestivum
  unsure (1)..(547): unsure at all n locations
  Clone ID: uC-tsfl9316016b06b1
ctcaacactttgttacatctagcggatttggatttctttaacaactaaggttcctgtttttaacattttaaagccaagggcttttgcccatctccaatagctaacaagaactctttcttttctttacaaatcccaaaacctttactagactttttctgcttctttagcttacttcacctagagtcttctaccttttcttatcattgaatcaacccctttttttttttcttttaaacacatcccaacccaaagtataagcgcccacctagtcctatctagtccgaaaaatgcgaactagaactacatgagacactatctctgtcgttacgaacctaacactttctaccaagcttaatcggaataagacctcacaaacactcacaagttatatagggcttgaaagaaagtctaggtttgggtttgggttaactgctctaataaggagagtcagctacttggattaaaaagagtgatcaaaatgattanaaaaatccangtattttacggtatccatgagttcaaatttgatgccgacatgataattaaa

SEQ ID NO: 2829 - DNA, 245 bp, Triticum aestivum
  Clone ID: uC-tsfl9316016b07b1
taatatctaacaagaactgtttcttttttttacaaatcccaaaacctttactagactttttctgcttctttagcttactacacctacaatcccctacctttttttatgattgaatcaagcccccttgttcattccctttatacacatcctagcccaaagtataagcgcccaccgagatctatctaccccgaaaaatgctaactagaactacccgagacactatctatgtttgttaccaccctaac

SEQ ID NO: 2830 - DNA, 490 bp, Triticum aestivum
  Clone ID: uC-tsfl9316016b08b1
gttctccgacctcttcccgcacctagcaaatggtaagccaagaaagccaactgacggcattgcacatgagcagacaaagaaatgctgctgctgctattcaacgagatcgattctaacctcaaagcgcccagatcccaatgacgagctcgtcgacgatgtccaccacgttgcagtcgcgccatgggccccgaatgcgaaccccgtcgacatggcctggtccgttgtgccggtactgcgatccggcgacttgtcccattcgaccatccagttctcgccctcctcgtcggcgcttcagagcttcgccgtgaccctgcaacaggtggccccttcgaagctgtccagccacagccgcagcggcattgagatcctcgtcctcgacgttgctccccttccgctagacacggtgttcgtcaacctggagagcgaattgacaaaacggctggagagcggcgagggcaccttttacaaggaccatccgacaagccccaat

SEQ ID NO: 2831 - DNA, 638 bp, Triticum aestivum
  Clone ID: uC-tsfl9316016b09b1
tcaacactttgttacatctagcggatttggatttctttaacaactaaggttcctgtttttaacattttaaagccaagggcttttgcccatctccaatagctaacaagaactctttcttttctttacaaatcccaaaacctttactagactttttctgcttctttagcttacttcacctagagtcttctaccttttcttatcattgaatcaacccctttttttttttcttttaaacacatcccaacccaaagtataagcgcccacctagtcctatctagtccgaaaaatgcgaactagaactacatgagacactatctctgtcgttacgaacctaacactttctaccaagcttaatcggaataagacctcacaaacactcacaagttatatagggcttgaaagaaagtctaggtttgggtttgggttaactgctctaataaggagagtcagctacttggattaaaaagagtgatcaaaatgaataagaaaatccaagtattttacggtatccatgagttcaaatttgatgcagacatgataattaaagattagattcaggttcaaattgatagggaatggtatcagatcatgacagtgtggtcgagtagagcaatctaagcatggttcagttttttttt

SEQ ID NO: 2832 - DNA, 616 bp, Triticum aestivum
  Clone ID: uC-tsfl9316016b10b1
gctaacactttgttacatctagcggatttggatttctttaacaactaaggttcctgtttttaacattttaaagccaagggcttttgcccatctccaatagctaacaagaactctttcttttctttacaaatcccaaaacctttactagactttttctgcttctttagcttacttcacctagagtcttctaccttttcttatcattgaatcaacccctttttttttttcttttaaacacatcccaacccaaagtataagcgcccacctagtcctatctagtccgaaaaatgcgaactagaactacatgagacactatctctgtcgttacgaacctaacactttctaccaagcttaatcggaataagacctcacaaacactcacaagttatatagggcttgaaagaaagtctaggtttgggtttgggttaactgctctaataaggagagtcagctacttggattaaaaagagtgatcaaaatgaataagaaaatccaagtattttacggtatccatgagttcaaatttgatgcagacatgataattaaagattagattcaggttcaaattgatagggaatggtatcagatcatgacagtgtggtcgagtagagcaatc

SEQ ID NO: 2833 - DNA, 568 bp, Triticum aestivum
  Clone ID: uC-tsfl9316016b11b1
gtaatgccacgactgccgactgtgggcattgcacatgagcggacaaggatatggtgctgctgctattcatcgcgagcgattttaaccttattgcgcccagatcccaacgacgagctagtctacgatgttcaccacgttgctgtagctccatgggcccaccttgcgatccccgtggacatggcctggtccgttgtgcctgtacatgcgatccggcgacttgtcccattcgaccatccagttctagctctcctcgaaggcgctaaatagctctgccgggaccatgctacaggtggtccctaacaagctgctcagtcacaggcgtagtgggattgagatcctagaactactcgctggttctcttgcgctagacacagagttcatgaacctggagagcgaatcggcaaaactgctggaaagcggctacggcaccttttacgagggccatacgtcaagccccaatgccaaggacgttgccgacatgacgacctcagaggtgctagccacgtggctcatggcgattatatgcaccctcaaaattgtccattccgcgatttgtttcactgctttg

SEQ ID NO: 2834 - DNA, 607 bp, Triticum aestivum
  unsure (1)..(607): unsure at all n locations
  Clone ID: uC-tsfl9316016b12b1
taacactttgttacatctagcggatttggatttctttaacaactaaggttcctgtttttaacattttaaagccaagggcttttgcccatctccaatagctaacaagaactctttcttttctttacaaatcccaaaacctttactagactttttctgcttctttagcttacttcacctagagtcttctaccttttcttatcattgaatcaacccctttttttttttcttttaaacacatcccaacccaaagtataagcgcccacctagtcctatctagtccgaaaaatgcgaactagaactacatgagacactatctctgtcgttacgaacctaacactttctaccaagcttaatcggaataagacctcacaaacactcacaagttatatagggcttgaaagaaagtctaggtttgggtttgggttaactgctctaataaggagagtcagctacttggattaaaaagagtgatcaaaatgaataagaaaatccaagtattttacggtatccatgagttcaaatntgatgcagacatgataattaaagattagattcacgttcaaattgatagggaatggtattagatcatgacagtgtggtcgagtag

SEQ ID NO: 2835 - DNA, 131 bp, Triticum aestivum
  Clone ID: uC-tsfl9316016c01b1
gcacagtgcgaatgctttaacaacttaatgccgctgccctaaacactgggtatttcacggctatcgcccactgcgtcactaagaagaactctgtctcttttttgctgatggatgaccctgactagactttg

SEQ ID NO: 2836 - DNA, 640 bp, Triticum aestivum
  unsure (1)..(640): unsure at all n locations
  Clone ID: uC-tsfl9316016c02b1
taacactttgttacatctagcggatttggatttctttaacaactaaggttcctgtttttaacattttaaagtcaagggcttttgcccatctccaatagctaacaagaactctttcttttctttacaaatcccaaaacctttactagactttttctgcttctttagcttacttcacctagagtcttctaccttttcttatcattgaatcaacccctttttttttttcttttaaacacatcccaacccaaagtataagcgcccacctagtcctatctagtccgaaaaatgcgaactagaactacatgagacactatctctgtcgttacgaacctaacactttctaccaagcttaatcggaataagacctcacaaacactcacaagttatataggggcttgaaagaaagtctangtttgggtttgggttaactgctctaataaggagagtcagctacttggattaaaaagagtgatcaaaatgaataagaaaatccaagtattttacggtatccatgagttcaaaattgatgcagacatgataattaaagattagattaggttcaaattgatagggaatggtatcagatcatgacagtgtggtcgagtagagcaatctaagcattgttcagnttttttttttt

SEQ ID NO: 2837 - DNA, 445 bp, Triticum aestivum
  Clone ID: uC-tsfl9316016c03b1
tcttaacaaatttacacgctccctgcatttcgtgttctccccaaatatattactgcatctttttttccatccccaccatattatcaccgcaaaaatggtggaccacggtatatcctcacagctactcctatcacacaggttatcatagagccattcaaacagagataccgaaaacgaacccctgctgcctccttcgcggcacaaatctgacccaaatccccaattgagctggacagtctctaagcacgtgaagcacagattcaactccacctttacaaacctgagacacattcgaggcgctaagatgtcttcgatgccgttcctcatctgtcataactatgtccagattggatatatatattgtctggctatacttatatttatatatatttggcctgaatataactattacttttgattatttgttaaacatgtccatggattt

SEQ ID NO: 2838 - DNA, 615 bp, Triticum aestivum
  Clone ID: uC-tsfl9316016c05b1
taacactttgttacatctagcggatttggatttctttaacaactaaggttcctgtttttaacattttaaagccaagggcttttgcccatctccaatagctaacaagaactctttcttttctttacaaatcccaaaacctttactagactttttctgcttctttagcttacttcacctagagtcttctaccttttcttatcattgaatcaacccctttttttttttcttttaaacacatcccaacccaaagtataagcgcccacctagtcctatctagtccgaaaaatgcgaactagaactacatgagacactatctctgtcgttacgaacctaacactttctaccaagcttaatcggaataagacctcacaaacactcacaagttatatagggcttgaaagaaagtctaggtttgggtttgggttaactgctctaataaggagagtcagctacttggattaaaaagagtgatcaaaatgaataagaaaatccaagtattttacggtatccatgagttcaaatttgatgcagacatgataattaaagattagattcaggttcaaattgatagggaatggtatcagatcatgacagtgtgggcgagtagagcaatct

SEQ ID NO: 2839 - DNA, 639 bp, Triticum aestivum
  Clone ID: uC-tsfl9316016c06b1
gctaacactttgttacatctagcggatttggatttctttaacaactaaggttcctgtttttaacattttaaagccaagggcttttgcccatctccaatagctaacaagaactctttcttttctttacaaatcccaaaacctttactagactttttctgcttctttagcttacttcacctagagtcttctaccttttcttatcattgaatcaacccctttttttttttcttttaaacacatcccaacccaaagtataagcgcccacctagtcctatctagtccgaaaaatgcgaactagaactacatgagacactatctctgtcgttacgaacctaacactttctaccaagcttaatcggaataagacctcacaaacactcacaagttatatagggcttgaaagaaagtctaggtttgggtttgggttaactgctctaataaggagagtcagctacttggattaaaaagagtgatcaaaatgaataagaaaatccaagtattttacggtatccatgagttcaaatttgatgcagacatgataattaaagattagattcaggttcaaattgatagggaatggtatcagatcatgacagtgtggtcgagtagagcaatctaaagcatggtcaggtttttttt

SEQ ID NO: 2840 - DNA, 650 bp, Triticum aestivum
  Clone ID: uC-tsfl9316016c07b1
taacactttgttacatctagcggatttggatttctttaacaactaaggttcctgtttttaacattttaaagccaagggcttttgcccatctccaatagctaacaagaactctttcttttctttacaaatcccaaaacctttactagactttttctgcttctttagcttacttcacctagagtcttctaccttttcttatcattgaatcaacccctttttttttttcttttaaacacatcccaacccaaagtataagcgcccacctagtcctatctagtccgaaaaatgcgaactagaactacatgagacactatctctgtcgttacgaacctaacactttctaccaagcttaatcggaataagacctcacaaacactcacaagttatatagggcttgaaagaaagtctaggtttgggtttgggttaactgctctaataaggagagtcagctacttggattaaaaagagtgatcaaaatgaataagaaaatccaagtattttacggtatccatgagttcaaatttgatgcagacatgataattaaagattagattcaggttcaaattgatagggaatggtatcagatcatgacagtgtggtcgagtagagcaatctaagcatggtcacgttttttttttttaaatcattgc

SEQ ID NO: 2841 - DNA, 556 bp, Triticum aestivum
  Clone ID: uC-tsfl9316016c08b1
taacactttgttacatctagcggatttggatttctttaacaactaaggttcctgtttttaacattttaaagtcaagggcttttgcccatctccaatagctaacaagaactctttcttttctttacaaatcccaaaacctttactagactttttctgcttctttagcttacttcacctagagtcttctaccttttcttatcattgaatcaacccctttttttttttcttttaaacacatcccaacccaaagtataagcgcccacctagtcctatctagtccgaaaaatgcgaactagaactacatgagacactatctctgtcgttacgaacctaacactttctaccaagcttaatcggaataagacctcacaaacactcacaagttatatagggcttgaaagaaagtctaggtttgggtttgggttaactgctctaataaggagagtcagctacttggattaaaaagagtgatcaaaatgaataagacaatccaagtattttacgggatccatgagttcaaatttgatgcagacatgataattaaagattagattca

SEQ ID NO: 2842 - DNA, 296 bp, Triticum aestivum
  Clone ID: uC-tsfl9316016c09b1
aacaggaactcagaacttttttttctgtttacaaaaccctaaaccgacactagacgttctctgggcttatagctgacttcagcctagagccttgtacctatgagtgagaatcaccaacccctttttttttttactcaaacacaccccaacccaaagcatccgcgccgcacctatctactatctaggccgaaaaatgcgaactacaactacatgtagacactattgttgtagccacaaacctaacactgtgcaccaaggtgaatcggcctaagacctcacaaacacttacaagggat

SEQ ID NO: 2843 - DNA, 515 bp, Triticum aestivum
  Clone ID: uC-tsfl9316016c10b1
taacactttgttacatctagcggatttggatttctttaacagctaaggttcctgtttttaacattttaaagccaagggcttttgcccatctccaatagctaacaagaactctttcttttctttacaaatcccaaaacctttactagactttttctgcttctttagcttacttcacctagaggcttcttaccttttcttatcattgaatcaaccccttcttgtttttcttttaaacacatcccaacccaaagtttaatcgcccacctagtgctatctagtgcgaaaaaggcgaactcgaactacgtgagacactatctctgtcgttacgaacctaacactttctaccaagcttaatcggaataagaccttacaaacactcacaagttatatagggctggaaagaaagtctaggttcgggtctgggttaactgctctaataaggagagtcagctacttggattaaaaagagtgatcgacatgaataagaaaatcccagtattttacggcatccatga

SEQ ID NO: 2844 - DNA, 508 bp, Triticum aestivum
  Clone ID: uC-tsfl9316016c11b1
ctctttccgcacctagcaagatggtaatgccaagaaagccaactgacggctttggacatgagcatttaaagaaatgctgctgctgctattcaacgagatcgattctaacctcatagcgcccagaccccaatgacgagctctgctacaatgtccaccactttgcagttgcgccatgggccccgtatgcagaaccccgtcgacatggactggtccgttgtgccggttctgcgatccggcgactagtcccattcgaccatgcagatctagccctacttgagggcgcttcagagatttggcgcgaccctgcgacactgtggtcccttggaagctgtccagccacagccgcagcggtattgagatcctcgtcctcgacgatgctcccctttcgcttgacactgtgttccgacaacctggagagggaattgacaaaacggctggagagtggggagggcaccttttacaaggaccataccggcaagccccaatgcctaggacgttgccacatgac

SEQ ID NO: 2845 - DNA, 515 bp, Triticum aestivum
  Clone ID: uC-tsfl9316016d02b1
ccttcgacgtatgcccgcacctcagcgagaggtgcagccacgaaagccgactgacggcattgcacatgagcttacaaagaaatgctgctggtgctattcaacgagatcgattctaacctgaaggcgcccatagccgaacgacaagctcgtctgcgatgtacaccaggttgctaatgggccatgggccccgaatgcgaactccggacgacatgcgcctgctaacgatgagcctgaactgccatccgccgacttgggctatacaaccatacagtgctggccctcctcgggggagctaaaaagatctgccgcgaccctgcagcaagtggccccttgaaagctgtgcacaccacggcctgagctggattgagatcctcgttctcgacgttgctgctgttgcgatagacacggtgtccatcaacctggagagcgaattgacaaaactgttggagagcggcgaggtcaccttttagaaggaccatacgagaagtcccaatgccaaggacgtttccaacatg

SEQ ID NO: 2846 - DNA, 487 bp, Triticum aestivum
  Clone ID: uC-tsfl9316016d03b1
acactttgttacatctagccgtctagcggatttggatttctttaacaactaaggttcctgtttttaacattttaaatccaagggcttttgcccatctccaatagctaacaagaactctttcttttctttacaaatcccaaaacctttactagactttttctgcttctttagcttacttcacctagagtcttctaccttttcttatcattgaatcaacccctttttttttttcttttaaacacatcccagcccaaagtataagcgcccacctagtcctatctagtccgcgaaatgcgacctcgagctacactatacattatctctgtcgttacgaacctaacactttctaccaagcttaatcggaataagacctcacaaacactcacaagttgtttgaggctagaaagagagtcgtggttggggtactgctataatgctgagagacagctacttggattcttgggtgtgatcgagtggtctaagagaa

SEQ ID NO: 2847 - DNA, 550 bp, Triticum aestivum
  Clone ID: uC-tsfl9316016d04b1
ttctccgacctcttcccgcacctagcaaatggtaagccaagaaagccaactgacggcattgcacatgagcagacaaagaaatgctgctgctgctattcaacgagatcgattctaacctcaaagcgcccagatcccaatgacgagctcgtcgacgatgtccaccacgttgcagtcgcgccatgggccccgaatgcgaaccccgtcgacatggcctggtccgttgtgccggtactgcgatccggcgacttgtcccattcgaccatccagttctcgccctcctcgtcggcgcttcagagcttcgccgtgaccctgcaacaggtggccccttcgaagctgtccagccacagccgcagcggcattgagatcctcgtcctcgacgttgctccccttccgctagacacggtgttcgtcaacctggagagcgaattgacaaaacggctggagagcggcgagggcaccttttacaaggaccatccgacaagccccaatgccaaggacgttgccaacatgacgcccgaggagcgtctagccacggcgctcagggcagctc

SEQ ID NO: 2848 - DNA, 541 bp, Triticum aestivum
  Clone ID: uC-tsfl9316016d05b1
gttctccgacctcttcccgcacctagcaaatggtaagccaagaaagccaactgacggcattgcacatgagcagacaaagaaatgctgctgctgctattcaacgagatcgattctaacctcaaagcgcccagatcccaatgacgagctcgtcgacgatgtccaccacgttgcagtcgcgccatgggccccgaatgcgaaccccgtcgacatggcctggtccgttgtgccggtactgcgatccggcgacttgtcccattcgaccatccagttctcgccctcctcgtcggcgcttcagagcttcgccgtgaccctgcaacaggtggccccttcgaagctgtccagccacagccgcagcggcattgagatcctcgtcctcgacgttgctccccttccgctagacacggtgttcgtcaacctggagagcgaattgacaaaacggctggagagcggcgagggcaccttttacaaggaccatccgacaagccccaatgccaaggacgttgccaacatgacgcccgaggagcgtctagccacggcgctc

SEQ ID NO: 2849 - DNA, 541 bp, Triticum aestivum; identical to SEQ ID NO: 2848
  Clone ID: uC-tsfl9316016d06b1

SEQ ID NO: 2850 - DNA, 593 bp, Triticum aestivum
  Clone ID: uC-tsfl9316016d10b1
taacactttgttacatctagcggatttggatttctttaacaactaaggttcctgtttttaacattttaaagtcagggcttttgcccatctccaatagctaacaagaactctttcttttctttacaaatcccaaaacctttactagactttttctgcttctttagcttacttcacctagagtcttctaccttttcttatcattgaatcaacccctttttttttttcttttaaacacatcccaacccaaagtataagcgcccacctagtcctatctagtccgaaaaatgcgaactagaactacatgagacactatctctgtcgttacgaacctaacactttctaccaagcttaatcggaataagacctcacaaacactcacaagttatatagggcttgaaagaaagtctaggtttgggtttggggtaactgctctaataaggagagtcagctacttggattaaaaagagtgatcaaaatgaataagaaaatccaagtattttacggtttccatgagttcaaatttgatgcagacatgataattaaagattagattcaagtccaattgatagggaatggttcagatcatgacagtg

SEQ ID NO: 2851 - DNA, 460 bp, Triticum aestivum
  Clone ID: uC-tsfl9316016e01b1
acactttgttacatctagcggatttggatttctttaacaactaaggttcctgtttttaacattttaaagccaagggcttttgcccatctccaatagctaacaagaactctttcttttctttacaaatcccaaaacctttactagactttttctgcttctttagcttacttcacctagagtcttctaccttttcttatcattgaatcaacccctttttttttttcttttaaacacatcccagcccaaagaataagcccccacctagtcctatctagtgcgaaaaatgcgacctagaactacatgagacactatctctgtgggtacgaacctaccactttctaccaagcttaatgggcataagacctcacaaacactctcaggttatcttgggcttgaaagaaagactaggtttgggtttgggttaactgctctaataaggagagtaacttactgggattaa

SEQ ID NO: 2852 - DNA, 386 bp, Triticum aestivum
  Clone ID: uC-tsfl9316016e02b1
ttctccgacctcttcccgcacctagcaaatggtaagccaagaaagccgactgacggcattgcacatgagctgacaaagaaatgctgctgctgctattcaacgagatcgattctaacctcaaagcgcccagatcccaatgacgagctcgtcgacgatgtccaccacgttgcagtcgcgccatgggccccgaatgcgaaccccgtcgacatggcctggtccgttgtgccggtactgcgatccggcgacttgtcccattcgaccatccagttctcgccctcctcgacggcgcttcagagcttcgccgtgaccctgcaacaggtggcctcttcgaagctgttcagccacaggcgcagcggcattgagatcctcggcctcgacgttggtcc

SEQ ID NO: 2853 - DNA, 597 bp, Triticum aestivum
  unsure (1)..(597): unsure at all n locations
  Clone ID: uC-tsfl9316016e03b1
acaacccactctttaacaaatttcacacgctccctgcatttcgtgttctccccaaatatattactgcatcttttcttccacccccaccatattatcaccgcaaaaatggtggaccacggtatatcctcacagctactcctatcacacaggttatcatagagccattcaaacagagatttcgaaaagaacccctgctgcctccttcgcggcacaaatctgacccaaatccccaattgagctggacagtctctaagcacgtgaagcacagattcaactccacctttacaaacctgagacacattcgaggcgctaagatgtcttcgatgccgttcctcatctgtcataactatgtccagtttggttatatatattttctgtttatacttatatttatatatatttttcctaaatataactattacttttgattatttgttaaacatgtccatggatttaactcaatctcaataaatgcttcttagtcttgtgtctctctatcataatttgntggtgaataacatttttatttaccattgtaaaanaaaaaacttgaaaattgcgtaaaatcattggaactcttcttttcttttctttttg

SEQ ID NO: 2854 - DNA, 336 bp, Triticum aestivum
  Clone ID: uC-tsfl9316016e05b1
gtctaaacctaacactttgttacatgtagcggatttggatttctttaacacctaaggtttctgtcattaacattctaaagtcaacggctgttgcccatctacaatgatctaacactgaacctctattgtttccctttacacaaacgacaagctttactagactgtccatgatgttgtagcttactcaagctccaggattgtaccctctgttatcatggactgaaccgctgtgtcttttctgttaaaacacagacctagcccataggatcagcgagcacctagccttatctagtgcgctaaataggaactacaactacatgagacactgtgtctgtc

SEQ ID NO: 2855 - DNA, 361 bp, Triticum aestivum
  Clone ID: uC-tsfl9316016e06b1
gtgcgctcccctcccccacgcgcattcattccctcgccggcggccgctccgcgccgcgccatggccagcgttaggagcctcgtgctgctcctgctggtgctcgccgacgcgctgtccgcctccgcctcgtccatcgacggcggggaccacctgcagcttggcctcctctccggcggcgctggccgcggggagtgcacgggcaccgcggccgagtgccgcggggaggacgcggagggggagctcgggtcggcgtctgacgaggcgcaccgccgcgtgctgcaggggcgcggctacatcagctaccgcgcgctgcgcaggggcaccgtaccctgcaaccgtcgcggcgccagctactacaact

SEQ ID NO: 2856 - DNA, 651 bp, Triticum aestivum
  Clone ID: uC-tsfl9316016e08b1
ctctaaacctcaacactttgttacatctagcggatttggatttctttaacaactaaggttcctgtttttaacattttaaagccaagggcttttgcccatctccaatagctaacaagaactctttcttttctttacaaatcccaaaacctttactagactttttctgcttctttagcttacttcacctagagtcttctaccttttcttatcattgaatcaacccctttttttttttcttttaaacacatcccaacccaaagtataagcgcccacctagtcctatctagtccgaaaaatgcgaactagaactacatgagacactatctctgtcgttacgaacctaacactttctaccaagcttaatcggaataagacctcacaaacactcacaagttatatagggcttgaaagaaagtctaggtttgggtttgggttaactgctctaataaggagagtcagctacttggattaaaaagagtgatcaaaatgaataagaaaatccaagtattttacggtatccatgagttcaaatttgatgcagacatgataattaaagaatagattcaggttcaaattgatagggaatggtatcagatcatgacagtgtggtcgaggagagcaatctaagcattgttcagttttttttttttt

SEQ ID NO: 2857 - DNA, 649 bp, Triticum aestivum
  unsure (1)..(649): unsure at all n locations
  Clone ID: uC-tsfl9316016e09b1
ctctaaagctcaacactttgttacatctagcggatttggatttctttaacaactaaggttcctgtttttaacattttaaagccaagggcttttgcccatctccaatagctaacaagaactctttcttttctttacaaatcccaaaacctttactagactttttctgcttctttagcttacttcacctagagtcttctaccttttcttatcattgaatcaacccctttttttttttcttttaaacacatcccaacccaaagtataagcgcccacctagtcctatctagtccgaaaaatgcgaactagaactacatgagacactatctctgtcgttacgaacctaacactttctaccaagcttaatcggaataagacctcacaaacactcacaagttatatagggcttgaaagaaagtctaggtttgggtttgggttaactgctctaataaggagagtcagctacttggattaaanagagtgatcaaaatgaataagaaaatccaagtattttacggtatccatgagttcaaatttgatgcagacatgataattaaagattagattcaggttcaaattgatagggaatggtatcagatcatgacagngtggcgagtagagcaatctaaacattggtcaagttttttttttt

SEQ ID NO: 2858 - DNA, 554 bp, Triticum aestivum
  unsure (1)..(554): unsure at all n locations
  Clone ID: uC-tsfl9316016e10b1
cgtctaaacctcaacactttgttacatctagcggatttggatttctttaacaactaaggttcctgtttttaacattttaaagccaagggcttttgcccatctccaatagctaacaagaactctttcttttctttacaaatcccaaaacctttactagactttttctgcttctttagcttacttcacctagagtcttctaccttttcttatcattgaatcaacccctttttttttttcttttaaacacatcccaacccaaagtataagcgcccacctagtcctatctagtccgaaaaatgcgaactagaactacatgagacactatctctgtcgttacgaacctaacactttctaccaagcttaatcggaataagacctcacaaacactcacaagttatatagggcttgaaagaaagtctaggtttgggtttgggttaactgctctaataaggagagtcagctacttggattaaaaagagtgatcanaatgaataagaaaatccaagtattttacggtatccatgagttcaaatttgatgcagacatgataatta

SEQ ID NO: 2859 - DNA, 603 bp, Triticum aestivum
  Clone ID: uC-tsfl9316016e11b1
tttagatcatgtggctggatttcatcattaaaacctcactgcttgtttcctgaaaccacaggtgttgaacagatggggatactatccactcattctaataggatcatgggcattcggcactattaaccgtatccatgatttcatcgagccagggcataagatcttctggctctcagttcttgacgttgggacagctgcactaatggtagcaaacctatcaaataaataagttataaaattcgccatagatcatctttgctcttcccgagtcgatgttctgaatgttgtattttcagggcttgttcaattcaatagcctatggtttcaacagctcagtgcgtcgagcaatccatgagagactggagctgtaagtcaccaccgatctctttggtttgctatattattcccaataatcaatgaagcttgatttttatgaaacccttggtctgctagattcttgccagaacggctatatcgatggctttcaagcaatttcagaccaaaaaaccatctgattctacatcagtcacaacaacagcgaagcgaaatggtatcactcaagagcgaggaccaacaatgacactaacttttcaactatacatt

SEQ ID NO: 2860 - DNA, 506 bp, Triticum aestivum
  Clone ID: uC-tsfl9316016e12b1
gctataaccctaacactttggacatctagcggatttggatcaccttaacaactagggttcctgattttaacattttagagtcaagggcttttgcccatcttcaatagctaacaagaactttcttctcttatttacaaatcccataccctacactagacgctttttgctcttatagctcacttaacctagagccttctaccattattgatcatagcatcaacccctttttttttttactcaaaacacatcccagcctaaaggctcagctcccacctagtactatctagtccgcaaactgcgacctcgagctacactatacactatgtttcgaagctaccaactctaacactttctaccatgcttaatgagcataagacctctcacacactctcaaggtatatagggctagaaagaaagtgtaggtttgggaactggtttactgctgtgagaaagagacgtggatacttggagtgaacagagtgatcaagatgaatcagaaatttcac

SEQ ID NO: 2861 - DNA, 409 bp, Triticum aestivum
  unsure (1)..(409): unsure at all n locations
  Clone ID: uC-tsfl9316016f02b1
ctctaacgctcaacactttgttacatctagcggatttggatttctttaacaactaaggttcctgtttttaacattttaaagccaagggcttttgcccatctccaatagctaacaagaactctttcttttctttacaaatcccaaaacctttactagactttttctgcttctttagcttacttcacctagagtcttctaccttttcttatcattgaatcaacccctttttttttttcttttaaacacatcccaacccaaagtataagcgcccacctagtcctatctagtccgaaaaatgcgaactagaactacatgagacactatctctgtcgttacgaacctaacactntctaccaagcttaatcggaataagacctcacaaacactcacangttatatagggcttgaa

SEQ ID NO: 2862 - DNA, 556 bp, Triticum aestivum
  Clone ID: uC-tsfl9316016f03b1
cactttgttacatctagcggatttggatttctttaacaactaaggttcctgtttttaacattttaaatgtcaagggcttttgcccatctccaatagctaacaagaactctttcttttctttacaaatcccaaaacctttactagactttttctgcttctttagcttacttcacctagagtcttctaccttttcttatcattgaatcaacccctttttttttttcttttaaacacatcccaacccaaagtataagcgcccacctagtcctatctagtccgaaaaatgcgaactagaactacatgagacactatctctgtcgttacgaacctaacactttctaccaagcttaatcggaataagacctcacaaacactcacaagttatatagggcttgaaagaaagtctaggtttgggtttgggttaactgctctaataaggagagtcagctacttggattagaaagagtgatcaaaatgaatcagaaaatccaggttttctacgggttccatgaggtcaattttgtgcagacatgatatttaagatttcattcggttc

SEQ ID NO: 2863 - DNA, 404 bp, Triticum aestivum
  Clone ID: uC-tsfl9316016f04b1
gcgtctaaagctaacactttgttcatctagcggatttggatttctttaacaactaaggttcctgtttttaacattttaaagccaagggcttttgcccatctccaatggctaacaagaactctttcttttctttacaaatcccacaacctttactagactttttctgcttctttagcttacttcacctagagtcttgtaccttttcttatcattgaatcaacccctttttttttttcttttaaacacatcccaacccaaagtataagcgcccacctagtcctatctagtgcgaaaaatgcgaactagaactacatgagacactatctctgtcgttacgaacctaacactttctaccaagcttagtcggaataagacctcacaaacactcacaagttatatagggc

SEQ ID NO: 2864 - DNA, 454 bp, Triticum aestivum
  Clone ID: uC-tsfl9316016f05b1
ctctaaagcgttctccgacctcttcccgcacctagcatatggtcagccaagaaagccaactgacggtgttgcacatgagcagacaacgaaatgctggtgctgctatacaacgagagcgattctaaccttgatgcgcccacatcccaatgacgagctcgtccaccatgtccaccacgttgcattcgcgccatgggcccctaatgcgaaccccgtcaacatggcctggaacgttgtgccggtactgcgatccggcgactagaaccattcgcaccatccagttctcgccctcctcgaaagagctacagagcttccccgtgaccctgctacaggaggcccctgtgagctgatcactcacagtcgcagtggccttgagatcctacggctcgacgttgctccccttgcgctagacacagtgttcgtcaatctggagagcgaatcgactaaacggttggag

SEQ ID NO: 2865 - DNA, 530 bp, Triticum aestivum
  Clone ID: uC-tsfl9316016f07b1
gttctccgacctcttcccgcacctagcaaatggtaagccaagaaagccaactgacggcattgcacatgagcatacaaagaaatgctgctgctgctattcaacgagatcgattctaacctcaaagcgcccagatcccaatgacgagctcgtcgacgatgtccaccacgttgcagtcgcgccatgggccccgaatgcgaaccccgtcgacatggcctggtccgttgtgccggtactgcgatccggcgacttgtcccattcgaccatccagttctcgccctcctcgtcggcgcttcagagcttcgccgtgaccctgcaacaggtggccccttcgaagctgtccagccacagccgcagcggcattgagatcctcgtcctcgacgttgctccccttccgctagacacggtgttcgtcaacctggagagcgaattgacaaaacggctggagagcggcgagggcaccttttacaaggaccatccgacaagccccaatgccaaggacgttgccaacatgacgcccgaagagcgtctag

SEQ ID NO: 2866 - DNA, 647 bp, Triticum aestivum
  Clone ID: uC-tsfl9316016f10b1
ctctaaagctcaacactttgttacatctagcggatttggatttctttaacaactaaggttcctgtttttaacattttaaagccaagggcttttgcccatctccaatagctaacaagaactctttcttttctttacaaatcccaaaacctttactagactttttctgcttctttagcttacttcacctagagtcttctaccttttcttatcattgaatcaacccctttttttttttcttttaaacacatcccaacccaaagtataagcgcccacctagtcctatctagtccgaaaaatgcgaactagaactacatgagacactatctctgtcgttacgaacctaacactttctaccaagcttaatcggaataagacctcacaaacactcacaagttatatagggcttgaaagaaagtctaggtttgggtttgggttaactgctctaataaggagagtcagctacttggattaaaaagagtgatcaaaatgaataagaaaatccaagtattttacggtatccatgagttcaaaattgatgcagacatgataattaaagattagattcaggttcaaattgatagggaatggtatcagatcatgacagtgtggcgagtagagcaatctaagcatgttcagttttttttttt

SEQ ID NO: 2867 - DNA, 563 bp, Triticum aestivum
  Clone ID: uC-tsfl9316016f11b1
ctaaacgctaacactttgttacatctagcggatttggatttctttaacaactaaggttcctgtttttaacattttaaagccaagggcttttgcccatcttcaatagctaacaagaactctttcttttctttacaaatcccaaaacctttactagactttttctgcttttttagcttacttcacctagagtcttctaccttttcttatcattgaatcaacccctttttttttttcttttaaacacatcccaacccaaagtataagcgcccacctagtcctatctagtccgaaaaatgcgaactagaactacatgagacactatctctgtcgttacgaacctaacactttctaccaagcttaatcggaataagacctcacaaacactcacaagttatatagggcttgaaagaaagtctaggtttgggttcgggttaactgctctaataaggagagtcagctacttggattagaacgagtgatcaaaatgaatcagagaatccacgtgttttacggaatccatgagttcgaatttgatgcagacatgataattaaagattagattc

SEQ ID NO: 2868 - DNA, 601 bp, Triticum aestivum
  Clone ID: uC-tsfl9316016f12b1
ctctaaccgctaacactttgttacatctagcggatttggatttctttaacaactaaggttcctgtttttaacattttaaagccaagggcttttgcccatctccaatagctaacaagaactctttcttttctttacaaatcccaaaacctttactagactttttctgcttctttagcttacttcacctagagtcttctaccttttcttatcattgaatcaacccctttttttttttcttttaaacacatcccaacccaaagtataagcgcccacctagtcctatctagtccgaaaaatgcgaactagaactacatgagacactatctctgtcgttacgaacctaacactttctaccaagcttaatcggaataagacctcacaaacactcacaagttatatagggcttgaaagaaagtctaggtttgggtttgggttaactgctctaataaggagagtcagctacttggattaaaaagagtgatcaaaatgaataagaaaatccaagtattttacggtatccatgagttcaaatttgatgcagacatgataattaaagattagattcaggttcaaattgatagggaatggtatcagatcatga

SEQ ID NO: 2869 - DNA, 529 bp, Triticum aestivum
  Clone ID: uC-tsfl9316016g02b1
tcaacactttgttacatctagcggatttggatttctttaacaactaaggttcctgtttttaacattttaaagccaagggcttttgcccatctccaatagctaacaagaactctttcttttctttacaaatcccaaaacctttactagactttttctgcttctttagcttacttcacctagagtcttctaccttttcttatcattgaatcaacccctttttttttttcttttaaacacatcccaacccaaagtataagcgcccacctagtcctatctagtccgaaaaatgcgaactagaactacatgagacactatctctgtcgttacgaacctaacactttctaccaagcttaatcggaataagacctcacaaacactcacaagttatatagggcttgaaagaaagtctaggtttgggtttgggttaactgctctaataaggagagtcagctacttggattaaaaagagtgatcaaaatgaataagaaaatccaagtattttacggtatccatgagttcaaatttgatg

SEQ ID NO: 2870 - DNA, 610 bp, Triticum aestivum
  Clone ID: uC-tsfl9316016g03b1
acactttgttacatctagcggatttggatttctttaacaactaaggttcctgtttttaacattttaaagccaagggcttttgcccatctccaatagctaacaagaactctttcttttctttacaaatcccaaaacctttactagactttttctgcttctttagcttacttcacctagagtcttctaccttttcttatcattgaatcaacccctttttttttttcttttaaacacatcccaacccaaagtataagcgcccacctagtcctatctagtccgaaaaatgcgaactagaactacatgagacactatctctgtcgttacgaacctaacactttctaccaagcttaatcggaataagacctcacaaacactcacaagttatatagggcttgaaagaaagtctaggtttgggtttgggttaactgctctaataaggagagtcagctacttggattaaaaagagtgatcaaaatgaataagaaaatccaagtattttacggtatccatgagttcaaatttgatgcagacatgataattaaagattagattcaggttcaaattgataggggaatgtatcagatcatgacagtgtggcgagtagagcaat

SEQ ID NO: 2871 - DNA, 625 bp, Triticum aestivum
  Clone ID: uC-tsfl9316016g04b1
ctctaaccgctaacactttgttacatctagcggatttggatttctttaacaactaaggttcctgtttttaacattttaaagccaagggcttttgcccatctccaatagctaacaagaactctttcttttctttacaaatcccaaaacctttactagactttttctgcttctttagcttacttcacctagagtcttctaccttttcttatcattgaatcaacccctttttttttttcttttaaacacatcccaacccaaagtataagcgcccacctagtcctatctagtccgaaaaatgcgaactagaactacatgagacactatctctgtcgttacgaacctaacactttctaccaagcttaatcggaataagacctcacaaacactcacaagttatatagggcttgaaagaaagtctaggtttgggtttgggttaactgctctaataaggagagtcagctacttggattaaaaagagtgatcaaaatgaataagaaaatccaagtattttacggtatccatgagttcaaatttgatgcagacatgataattaaagattagattcaggttcaaattgatagggaatggtatcagatcatgaccgtgtggtcgagtagagcaatct

SEQ ID NO: 2872 - DNA, 400 bp, Triticum aestivum
  Clone ID: uC-tsfl9316016g05b1
tcgattgatcgccgcgtcatctggacagctagagcacctgcttcagcgcacttgcggcgctgtcagctcaccgaccaggtgcatcgtcggtcccggagcccctaaggcgaagttaaggatgaacggcctggtgtcgacatacttcgtgaatggcagcagtattcacatctagcagcatggcagcagaccagttttttttcttttcctgcatgtgttattcttttcttttttattttctttagtatggatctatctctctgatcaagcaagaagagatcggcagcttcagcgacatgacgagccgtttccgggtttttatgaagggaactatttggggtcgcgcggaagcaaaactagctagggtttattagggcttgctctagggccgcttgctattcct

SEQ ID NO: 2873 - DNA, 545 bp, Triticum aestivum
  Clone ID: uC-tsfl9316016g06b1
acactttgttacatctagcggatttggatttctttaacaactaagggtcctgtttttaacattttaaagtcaagggcttttgcccatctccaatagctaacaagaactctttcttttctttacaaatcctaaaacctttactagactttttctgcttctttagcttacttcacctagagtcttctaccttttcttatcattgaatcaacccctttttttttttcttttaaacacatcccaacccaaagtataagcgcccacctagtcctatctagtccgaaaaatgcgaactagaactacatgagacactatctttgtcgttacgaacctaacactttttaccaagcttaatcggaataagacctcacaaacactcacaagttatattagggcttgaaagaaagtctaggtttgggtttgggttaactgctctaataaggagagccagctacttgggttaaaaagagggatcaaaatgaagtagaaaatccaagctttttacggtattcatgagttcaaatttgatgctcaccggataattaaag

SEQ ID NO: 2874 - DNA, 442 bp, Triticum aestivum
  Clone ID: uC-tsfl9316016g08b1
tagatcatgtggctggatttcatcattaaaaccttactgctcgtttgctgaaaccacaagcgttgaacagttggggacactatccactcattccaatatgatcatgggcatttggcactattaaccgcatccatgattttattgagcgcagggcttaagatcttctggctctcacttcttgactttgggacagttgaactaatggtagcacacctttcaaataaataagttataaaattcagcatagatcatctccgctctttccgagtctgatgatctgaatgatgtgttctcagggctagatcaattaatatcctatggcttcacacctcaacgcgtctagcaatccatgagagactggagcctgctacacaccaccgagctctttgggtggctgtattattcccaattatcgatagaaggcttgattgttttgaaaccg

SEQ ID NO: 2875 - DNA, 530 bp, Triticum aestivum
  Clone ID: uC-tsfl9316016g09b1
gttctccgacctcttcccgcacctagcaaatggtaagccaagaaagccaactgacggcattgcacatgagctgacaaagaaatgctgctgctgctattcaacgagatcgattctaacctcaaagcgcccagatcccaatgacgagctcgtcgacgatgtccaccacgttgcagtcgcgccatgggccccgaatgcgaaccccgtcgacatggcctggtccgttgtgccggtactgcgatccggcgacttgtcccattcgaccatccagttctcgccctcctcgtcggcgcttcagagcttcgccgtgaccctgcaacaggtggccccttcgaagctgtccagccacagccgcagcggcattgagatcctcgtcctcgacgttgctccccttccgctagacacggtgttcgtcaacctggagagcgaattgacaaaacggctggagagcggcgagggcaccttttacaaggaccatccgacaagccccaatgccaaggacgtttgccacatgacgcccgaggagcgtctag

SEQ ID NO: 2876 - DNA, 379 bp, Triticum aestivum
  Clone ID: uC-tsfl9316016g10b1
ttgtacatctagcggatttggatttactttaagaactaaggtttaagattttaacattttagagttaagggcatttgcacatcttcaataggaaacaagaacttttttttctaatttacaaaacctaaaacctacactagacgctttttgatcctacagcatactaaacctagagtcttttaccattattgaacaaagaatcaacccttttttttttaaactcaaaacacatcccagcctaaagggtcagctaccactaagtactatgaaaaacgaaaactgcgaccaagagctacattatacattatgtttcgaagctaaaacttaatactaagcaccaaggtaaaaaggagataagaactctcacacgcttacaagg

SEQ ID NO: 2877 - DNA, 480 bp, Triticum aestivum
  Clone ID: uC-tsfl9316016h01b1
tttagatcatgtggctggatttcatcattaaaacctcactgcttgtttcctgaaaccacaggtgttgaacagatggggatactatccactcattctaataggatcatgggcattcggcactattaaccgtatccatgatttcatcgagccagggcataagatcttctggctctcagttcttgacgttgggacagctgcactaatggtagcaaacctatcaaataaataagttataaaattcgccatagatcatctttgctcttcccgagtcgatgttctgaatgttgtattttcagggcttgttcaattcaatagcctatggtttcaacagctcagtgcgtctgagcaatccatgagagactggagctgtaagtcaccaccgatctctttgggttgctatattattcccaataatcaatgaagcttgatttttatgaaacccttggtctgctagattcttgccagaacggctatatcgat

SEQ ID NO: 2878 - DNA, 639 bp, Triticum aestivum
  unsure (1)..(639): unsure at all n locations
  Clone ID: uC-tsfl9316016h02b1
tcaacactttgttacatctagcggatttggatttctttaacaactaaggttcctgtttttaacattttaaagccaagggcttttgcccatctccaatagctaacaagaactctttcttttctttacaaatcccaaaacctttactagactttttctgcttctttagcttacttcacctagagtcttctaccttttcttatcattgaatcaacccctttttttttttcttttaaacacatcccaacccaaagtataagcgcccacctagtcctatctagtccgaaaaatgcgaactagaactacatgagacactatctctgtcgttacgaacctaacactttctaccaagcttaatcggaataagacctcacaaacactcacaagttatatagggcttgaaagaaagtctaggtttgggtttgggttaactgctctaataaggagagtcagctacttggattaaaaagagtgatcaaaatgaataagaaaatccaagtattntacggtatccatgagttcaaatttgatgcagacatgantattaaagaatagattcaggttcaaattgatagggatggtatcagatcatgacagtgtggcgagtagagcaatctaagcattgggtcagttttttttttt

SEQ ID NO: 2879 - DNA, 324 bp, Triticum aestivum
  Clone ID: uC-tsfl9316016h03b1
acactttgttacatctagccgtctagcggatttggatttctttaacaactaaggttcctgtttttaacattttaaagccaagggcttttgcccatctccaatagctaacaagaactctttcttttctttacaaatcccaaaacctttactagactttttctgcttctttagcttacttcacctagagtcttctaccttttcttatcattgaatcaacccctttttttttttcttttaaacacatcccaacccaaagtataagcgcccacctagtcctatctagtccgcaaaatgcgacctcgagctacattatacatgttgttt

SEQ ID NO: 2880 - DNA, 563 bp, Triticum aestivum
  Clone ID: uC-tsfl9316016h04b1
ctctaaacctcaacactttgttacatctagcggatttggatttctttaacaactaaggttcctgtttttaacattttaaagccaagggcttttgcccatctccaatagctaacaagaactctttcttttctttacaaatcccaaaacctttactagactttttctgcttctttagcttacttcacctagagtcttctaccttttcttatcattgaatcaacccctttttttttttcttttaaacacatcccaacccaaagtataagcgcccacctagtcctatctagtccgaaaaatgcgaactagaactacatgagacactatctctgtcgttacgaacctaacactttctaccaagcttaatcggaataagacctcacaaacactcacaagttatatagggcttgaaagaaagtctaggtttgggtttgggttaactgctctaataaggagagtcagctacttggattaaaaagagtgatcaaaatgaataaggaaaatcccagtatttacgggcttccatgaggtcaaatttggtgcagacatgataattaaagattaga

SEQ ID NO: 2881 - DNA, 649 bp, Triticum aestivum
  Clone ID: uC-tsfl9316016h05b1
ctctaaagctcaacactttgttacatctagcggatttggatttctttaacaactaaggttcctgtttttaacattttaaagccaagggcttttgcccatctccaatagctaacaagaactctttcttttctttacaaatcccaaaacctttactagactttttctgcttctttagcttacttcacctagagtcttctaccttttcttatcattgaatcaacccctttttttttttcttttaaacacatcccaacccaaagtataagcgcccacctagtcctatctagtccgaaaaatgcgaactagaactacatgagacactatctctgtcgttacgaacctaacactttctaccaagcttaatcggaataagacctcacaaacactcacaagttatatagggcttgaaagaaagtctaggtttgggtttgggttaactgctctaataaggagagtcagctacttggattaaaaagagtgatcaaaatgaataagaaaatccaagtattttacggtatccatgagttcaaatttgatgcagacatgataattaaagattagattcaggtcaaattgatagggaatggtatcagatcatgacagtggggcgagtagagcaatctaagcattgttcagttttttttttttt

SEQ ID NO: 2882 - DNA, 601 bp, Triticum aestivum
  Clone ID: uC-tsfl9316016h06b1
ctctaaagctcaacactttgttacatctagcggatttggatttctttaacaactaaggttcctgtttttaacattttaaagccaagggcttttgcccatctccaatagctaacaagaactctttcttttctttacaaatcccaaaacctttactagactttttctgcttctttagcttacttcacctagagtcttctaccttttcttatcattgaatcaacccctttttttttttcttttaaacacatcccaacccaaagtataagcgcccacctagtcctatctagtccgaaaaatgcgaactagaactacatgagacactatctctgtcgttacgaacctaacactttctaccaagcttaatcggaataagacctcacaaacactcacaagttatatagggcttgaaagaaagtctaggtttgggtttgggttaactgctctaataaggagagtcagctacttggattaaaaagagtgatcaaaatgaataagaaaatccaagtattttacggtatccatgagttcaaatttgatgcagacatgataattaaagattagattcaggttcaaattgatagggaatggtatcagatcatga

SEQ ID NO: 2883 - DNA, 534 bp, Triticum aestivum
  Clone ID: uC-tsfl9316016h07b1
gttctccgacctcttcccgcacctagcaaatggtaagccaagaaagccaactgacggcattgcacatgagcagacaaagaaatgctgctgctgctattcaacgagatcgattctaacctcaaagcgcccagatcccaatgacgagctcgtcgacgatgtccaccacgttgcagtcgcgccatgggccccgaatgcgaaccccgtcgacatggcctggtccgttgtgccggtactgcgatccggcgacttgtcccattcgaccatccagttctcgccctcctcgtcggcgcttcagagcttcgccgtgaccctgcaacaggtggccccttcgaagctgtccagccacagccgcagcggcattgagatcctcgtcctcgacgttgctccccttccgctagacacggtgttcgtcaacctggagagcgaattgacaaaacggctggagagcggcgagggcaccttttacaaggaccatccgacaagccccaatgccaaggacgttgccaacatgacgcccgaggagcgtctagccac

SEQ ID NO: 2884 - DNA, 660 bp, Triticum aestivum
  Clone ID: uC-tsfl9316016h08b1
ctctaaagctcaacactttgttacatctagcggatttggatttctttaacaactaaggttcctgtttttaacattttaaagccaagggcttttgcccatctccaatagctaacaagaactctttcttttctttacaaatcccaaaacctttactagactttttctgcttctttagcttacttcacctagagtcttctaccttttcttatcattgaatcaacccctttttttttttcttttaaacacatcccaacccaaagtataagcgcccacctagtcctatctagtccgaaaaatgcgaactagaactacatgagacactatctctgtcgttacgaacctaacactttctaccaagcttaatcggaataagacctcacaaacactcacaagttatatagggcttgaaagaaagtctaggtttgggtttgggttaactgctctaataaggagagtcagctacttggattaaaaagagtgatcaaaatgaataagaaaatccaagtattttacggtatccatgagttcaaatttgatgcagacatgataattaaagattagattcaggttcaaattgatagggaatggtatcagatcatgacagtgggtcgagtagagcaatctaagcattgggtcagtttttttttttcaaatcattgc

SEQ ID NO: 2885 - DNA, 559 bp, Triticum aestivum
  Clone ID: uC-tsfl9316016h10b1
cgtctaaacctcaacactttgttacatctagcggatttggatttctttaacaactaaggttcctgtttttaacattttaaagccaagggcttttgcccatctccaatagctaacaagaactctttcttttctttacaaatcccaaaacctttactagactttttctgcttctttagcttacttcacctagagtcttctaccttttcttatcattgaatcaacccctttttttttttcttttaaacacatcccaacccaaagtataagcgcccacctagtcctatctagtccgaaaaatgcgaactagaactacatgagacactatctctgtcgttacgaacctaacactttctaccaagcttaatcggaataagacctcacaaacactcacaagttatatagggcttgaaagaaagtctaggtttgggtttgggttaactgctctaataaggagagtcagctacttggattaaaaagagtgatcaaaatgaataagaaaatccaagtattttacggtatccatgagttcaaatttgatgcagacctgataattaaagat

SEQ ID NO: 2886 - DNA, 543 bp, Triticum aestivum
  unsure (1)..(543): unsure at all n locations
  Clone ID: uC-tsfl9316017a02b1
cactctgttacatctagcggatttggatttctttaacaactaaggttcctgtttttaacattttaaagccaagggcttttgcccatctccaatagctaacaagaactctttcttttctttacaaatcccaaaacctttactagactttttctgcttctttagcttacttcacctagagtcttctaccttttcttatcattgaatcaacccctttttttttttcttttaaacacatcccaacccaaagtataagcgcccacctagtcctatctagtccgaaaaatgcgaactagaactacatgagacactatctctgtcgttacgaacctaacactttctaccaagcttaatgggaataagacctcacaaacactcacaagttatatagggcttgaaagaaagtctaggtttgggcttgggataactgctctaataaggagagtcagctacttggattaaaaagagtgatcagaatgaataagaaaatccaagcattttacggtatccatgagttcaaatttgatgcanacatgataattaaag

SEQ ID NO: 2887 - DNA, 505 bp, Triticum aestivum
  unsure (1)..(505): unsure at all n locations
  Clone ID: uC-tsfl9316017a03b1
gcaagaagccgctttcttacaagtggtataacgcggaggaagtgatccttggaaagaaaatgaaagattggttgcggttcagcgtggccttttggcatacgttccggggtactggaggagacccttttggtgcagccacaaagaactggccttgggaggatggcaccaattccttggccatggctaagagaagaatgaaagctcacttcgagttcatggagaagcttggagttgagaggcggtgcttccatgacagggacatcgcccctgatggcaaaacactcgcggaaacaaatgctaacttggatgagatagttgagctggcaaagcaactccagagtgagaccaatataaagccattgtgggggactgcacagcttttcatgcatccacgttacatgcacggagctgctactagcccagaggtcaaggtgtatgcttatgctgctgctcaagtgaagaaagctttggaggttactcactacctaggcggngagaactatgt

SEQ ID NO: 2888 - DNA, 524 bp, Triticum aestivum
  Clone ID: uC-tsfl9316017a04b1
gttctccgacctcttcccgcacctagcaaatggtaagccaagaaagccaactgacggcattgcacatgagctgacaaagaaatgctgctgctgctattcaacgagatcgattctaacctcaaagcgcccagatcccaatgacgagctcgtcgacgatgtccaccacgttgcagtcgcgccatgggccccgaatgcgaaccccgtcgacatggcctggtccgttgtgccggtactgcgatccggcgacttgtcccattcgaccatccagttctcgccctcctcgtcggcgcttcagagcttcgccgtgaccctgcaacaggtggccccttcgaagctgtccagccacagccgcagcggcattgagatcctcgtcctcgacgttgctccccttccgctagacacggtgttcgtcaacctggagagcgaattgacaaaacagctggagagcggcgagggcaccttttacaaggaccatccgacaagccccaatgccaaggacgttgccaacatgacgcccgaggagc

SEQ ID NO: 2889 - DNA, 500 bp, Triticum aestivum
  Clone ID: uC-tsfl9316017a05b1
aacactctgttacatcttgcggatttggatttctttaacaactaaggctcctgttgttaacattttaaagccaagggcttttgcccatctccaatagctaacaagaactctttcttttctttacaaatcccaaaacctttactagacttttactgcttctttagcttacttcacctagagacttctaccttttcttatcattgaatcaacccctttttttttttcttttaaacacatcccaacccaaagtataagcgcccacctagtcctatctagtccgaaaaatgcgaactagaactacatgagacactatctcttgtgttactaaccttacactttttaccatgcttaatcggaataagacctcacaaacactcacaagttatatagggcttgtaagaaagtctaggattgggtttgggttaactgctctaataggagagtcagctacttggatttacaagagtgatcaagatggatcagaaaatccaagtatttta

SEQ ID NO: 2890 - DNA, 384 bp, Triticum aestivum
  Clone ID: uC-tsfl9316017a06b1
acactacgtatcatcgagcggagcaggaggtctgccacaactgccgactgtgggcataacacatgaacgcccagggctttggtgcagctgctatagctcgcgagagctttttatcttattgagcccagccacaaccgacacgcgactttaccaggttcaccagcttactttagctccaggggcccaccttgcgatctcagtggaccaggcccgtttcgttgtgcctgaaccgcatccagccacattgtatcatgcgcccacccagttctatctctcccgaaaagtgctaactagatctacctgaaacactatacatgtggccactaacctaacagtcagtaccaggcttaatgggaatgagaccctacaaccactcacaggttc

SEQ ID NO: 2891 - DNA, 534 bp, Triticum aestivum
  Clone ID: uC-tsfl9316017a07b1
cactctgttacatctagcggatttggatttctttaacaactaaggttcctgtttttaacattttaaagccaagggcttttgcccatctccaatagctaacaagaactctttcttttctttacaaatcccaaaacctttactagactttttctgcttctttagcttacttcacctagagtcttctaccttttcttatcattgaatcaacccctttttttttttcttttaaacacatcccaacccaaagtataagcgcccacctagtcctatctagtccgaaaaatgcgaactagaactacatgagacactatctctgtcgttacgaacctaacactttctaccaagcttaatcggaataagacctcacaaacactcacaagttatatagggcttgaaagaaagtctaggtttgggtttgggttaactgctctaataaggagagtcagctacttggattaaaaagagtgatcaaaatgaataagaaaatccaagtattttacggtatccatgagttcaaatttgatgcagacatga

SEQ ID NO: 2892 - DNA, 366 bp, Triticum aestivum
  Clone ID: uC-tsfl9316017a09b1
caaagcgtcacccctatgcacaagcatgggatgatgcactaagcaaggcaaggtttgagtttagatggttggaccaatttgctttatccctggatccagatactgcaatgtctttccatgatgaaacattaccatctgatggtgctaaagtagcacatttctgctctatgtgtggtcccaagttttgttcgatgaaaatcacggaggatattaggaaatatgccgatgaacatggttacgggacagtagaagaagctgtgaggcaaggaatgagtgagatgagtgctgaatttttggcagcaagaaaaacaattagtggcgaacaacatggtgaagctggaggggaaatctatgtgccataaagct

SEQ ID NO: 2893 - DNA, 529 bp, Triticum aestivum
  Clone ID: uC-tsfl9316017a12b1
cccctcttaacaatttacacgctccctgcatttcgtgttctccccaaatatattactgcatctccacttccacccccaccatattatcaccgcaaaaatggtggaccacggtatatcctcacagctactcctatcacacaggttatcatagagccattcaaacagagatttcgaaaagaacccctgctgcctccttcgcggcacaaatctgacccaaatccccaattgagctggacagtctctaagcacgtgaagcacagattcaactccacctttacaaacctgagacacattcgaggcgctaagatgtcttcgatgccgttcctcatctgtcataactatgtccagtttggatatatatattttctgtttatacttatatttatatatatttttcctaaatataactattacttttgattatttgttaaacatgtccatggatttaactcaatctcaataaatgcttcttagtcttgtgtctctttatcataatttggtggtgaataaattttttatttaccatttg

SEQ ID NO: 2894 - DNA, 621 bp, Triticum aestivum
  Clone ID: uC-tsfl9316017b02b1
gctaacactttgttacatctagcggatttggatttctttaacaactaaggttcctgtttttaacattttaaagccaagggcttttgcccatctccaatagctaacaagaactctttcttttctttacaaatcccaaaacctttactagactttttctgcttctttagcttacttcacctagagtcttctaccttttcttatcattgaatcaacccctttttttttttcttttaaacacatcccaacccaaagtataagcgcccacctagtcctatctagtccgaaaaatgcgaactagaactacatgagacactatctctgtcgttacgaacctaacactttctaccaagcttaatcggaataagacctcacaaacactcacaagttatatagggcttgaaagaaagtctaggtttgggtttgggttaactgctctaataaggagagtcagctacttggattaaaaagagtgatcaaaatgaataagaaaatccaagtattttacggtatccatgagttcaaatttgatgcagacatgataattaaagattagattcaggttcaaattgatagggaatggtatcagatcatgacaggtggtcgagtagagcaatctaagca

SEQ ID NO: 2895 - DNA, 488 bp, Triticum aestivum
  Clone ID: uC-tsfl9316017b04b1
ctattaccgtacctagcaaatgggaagccaagaaagccaactgacgggattgcacatgagctgacaaagttatgctggtgctggtattcaacgagatcgattctaaccttatagcgcccatatcccaatgacgagctcgtagtcgatgttcaccaggttgcaagcgcgccatgggtccagaatgctaaccccgtttacatgggctggaacgctgtgcctgttctgtgatccggacgacttgaaccattcgaccatgcagttatctagctccttgtaggcgcttaagagcttcgctcggaccctgtgacaggctgccccttcgaagacgaacatacacattcgtagcgggattgagagccttgtgatctacgatgctctcattaggcttgacacggtggcgagaacctgtagagcgaattgacagaacagttggatagcgaggagggcaccttttacggggtccatccagcgagccccaatgccaagga

SEQ ID NO: 2896 - DNA, 392 bp, Triticum aestivum
  Clone ID: uC-tsfl9316017b06b1
cgtgttctccgacctcttcccgcacctagcaaatggtaagccaagaaagccaactgacggcattgcacatgagcagacaaagaaatgctgctgctgctattcaacgagatcgattctaacctcaaagcgcccagatcccaatgacgagctcgtcgacgatgtccaccacgttgcagtcgcgccatgggccccgaatgcgaaccccgtcgacatggcctggtccgttgtgccggtactgcgatcccgggacttgtcccattcgaccatccagttctcgccctcctcgtcggcgcttaaaagcttggccgggaccttgcaccagggggccccttcgaagttgtccagccccagccgaaggggaattgaaaccctggtcctgacggtggttccct

SEQ ID NO: 2897 - DNA, 375 bp, Triticum aestivum
  Clone ID: uC-tsfl9316017b07b1
gtctacgtgttctccgacctcttcccgcacctagcaaatggtaagccaagaaagccaactgacggcattgcacatgagcagacaaagaaatgctgctgctgctattcaacgagatcgattctaacctcaaagcgcccagatcccaatgacgagctcgtcgacgatgtccaccacgttgcagtcgcgccatgggccccgaatgcgaaccccgtcgacatggcctggtccgttgtgccggtactgcgatccggcgacttgtcccattcgaccatccagttctcgccctcctcgtcggcgcttcagagcttcgccgtgaccctgcaacagggtggccccttcgaagctgtccagccacagccgcagcggcattgagat

SEQ ID NO: 2898 - DNA, 419 bp, Triticum aestivum
  Clone ID: uC-tsfl9316017b10b1
cactttgttacatctagcggatttggatttctttaacaactaaggttcctgtttttaacattttaaagccaagggcttttgcccatctccaatagctaacaagaactctttattttctttacaaatcccaaaacctttactagactttgtctgcttctttagcttacttcacctagaggcttctaccttttcttatcattgaatcaacccctttttttttttcttttaaacacatcccaacccaaagtataagggcccacctagtgctatctagtgcgaaaaatgcgaactcgaactacatgagacactatctctgtggttacgaacctaacactctctaccaagcttaatcggaataagagcttacaaacactcacaagttatatagggctggaaagaaagtctaggtctgggcttgg

SEQ ID NO: 2899 - DNA, 522 bp, Triticum aestivum
  Clone ID: uC-tsfl9316017b11b1
gttctccgacctcttcccgcacctagcaaatggtaagccaagaaagccaactgacggcattgcacatgagcagacaaagaaatgctgctgctgctattcaacgagatcgattctaacctcaaagcgcccagatcccaatgacgagctcgtcgacgatgtccaccacgttgcagtcgcgccatgggccccgaatgcgaaccccgtcgacatggcctggtccgttgtgccggtactgcgatccggcgacttgtcccattcgaccatccagttctcgccctcctcgtcggcgcttcagagcttcgccgtgaccctgcaacaggtggccccttcgaagctgtccagccacagccgcagcggcattgagatcctcgtcctcgacgttgctccccttccgctagacacggtgttcgtcaacctggagagcgaattgacaaaacggctggagagcggcgagggcaccttttacaaggaccatccgacaagccccaatgccaaggacgttgccaacatgacgcccgagga

SEQ ID NO: 2900 - DNA, 642 bp, Triticum aestivum
  Clone ID: uC-tsfl9316017c01b1
gcacctaacactttgttacatctagcggatttggatttctttaacaactaaggttcctgtttttaacattttaaagccaagggcttttgcccatctccaatagctaacaagaactctttcttttctttacaaatcccaaaacctttactagactttttctgcttctttagcttacttcacctagagtcttctaccttttcttatcattgaatcaacccctttttttttttcttttaaacacatcccaacccaaagtataagcgcccacctagtcctatctagtccgaaaaatgcgaactagaactacatgagacactatctctgtcgttacgaacctaacactttctaccaagcttaatcggaataagacctcacaaacactcacaagttatatagggcttgaaagaaagtctaggtttgggtttgggttaactgctctaataaggagagtcagctacttggattaaaaagagtgatcaaaatgaataagaaaatccaagtattttacggtatccatgagttcaaatttgatgcagacatgataattaaagattagattcaggttcaaattgatagggaatggtattagatcatgacagtgtggtcgagtagagcaatctaagcatggttcaagtttttttt

SEQ ID NO: 2901 - DNA, 582 bp, Triticum aestivum
  Clone ID: uC-tsfl9316017c02b1
ctattaccgtcctagcaaatggtaagccaagaaagccaactgacggcgttgcacatgagcagacaaagaaatgctggtgctgctattcaacgagatcgattctaaccttaaagcgcccatatcccaatgacgagctcgttagacgatgtccaccaggttgcaggcgcgccatgggccccgaatgcgaaccccgtctacatgggctggtccgttgtgccggtactgcgatccggcgacttgtcccattcgaccatgcagttctcgccctcctatgtggcgcttcagagcttagccgtgaccctgcaacaggtggccccttcgaagctgaacagccacagccgcagcgggattgagatgcttgtgctcgacgttgctccccttccgctagacacggtgttcgtgaacctggagagcgaattgacaaaacggctggagagcggcgagggcaccttttacaaggaccatacgacaagccccaatgccaaggacgttgccaacatgacgcccgaggagcgtctagccacggcgctcagggcagctctcagcaccctcaagattgtccattccggcgatttgttttcg

SEQ ID NO: 2902 - DNA, 420 bp, Triticum aestivum
  Clone ID: uC-tsfl9316017c04b1
tgagccctgtagggatgcgggccacattgagaacgaatgacgccgctgtccacaacccaaagaactgggctaccgccgatgatccatcgcgtgcgtgaaccatgatctattctttacacgttgcggctgcctggactaccctgatgagtgcttgttcagccaactggcctagagtggccccctgggccattgttgatatgaggcggagttcatgtataatgaagaacagaccgcccgactgcgttagctgggagatcaacctatctgggatgaaagacgggcactgacactacaagagacgctgtttctggtggtacaaacctaacactgtctacgatgactcatgggcttaagacgtcactggccctcacaagtcatctaggggtcggaagaaagcctagggttgggcaagggataact

SEQ ID NO: 2903 - DNA, 322 bp, Triticum aestivum
  Clone ID: uC-tsfl9316017c07b1
aagccaaaagagttaactgctgtgatcgcacatgagatatacgaagtaacgctggtgatgctgttcaaggagatcccatgtttcattcaagcgcgctgatgctaatgactaactcttgatagatgttgaccacacaactggcgtaataatggcccttaagggccactgtgtctatgtggacgagtccattacgaaagatctgctgattggccacttgcgctatttgagcgtacaactgtacccctatttgagggctgttgagaacaaagaagaaccgtggctcagggtggcccatctgaaataggcactcgcagacacaagg

SEQ ID NO: 2904 - DNA, 498 bp, Triticum aestivum
  Clone ID: uC-tsfl9316017c08b1
gataaagagatcttacatcgaaaggacatcacaggaactaaccgagatagatgctcaaactgtcatggtaagaagaaaccttgataaggagaggaacaagaatgttggttaatactactcccttaacatggctggatttgtgcaggagaaagcctatgaaagtgtgcggtttcttgccgagaaacacaagagagagaacgacgccgctctgatcaaaatcttgctgttagagaagcagctcgatgagaagcatcagctggagctggatattcaacatcttaaaggcaagcttgaggtggtgaatcacatggagggagagggcgtctatgtgaagaaacgtactgaagagctgaacaaggatctacaggatagaattgactcaatggaagacctggaagagctaaatcaagctctgattatcaaggataggatgaccaatgatgaactgcaggatgcaaagaaagagcttatttcgggcttggtggatctgctgggccc

SEQ ID NO: 2905 - DNA, 265 bp, Triticum aestivum
  Clone ID: uC-tsfl9316017c09b1
ttgaacatgagctaaccaagacgtgctgctgctgttattcaacgagatccattcttgcctgctggctgaccctgccgaatgactagctcttcaactaggtccaccatggtgctttcgggccattggccctctatggaagcccccatgacatgggctgaaccgtttggccggctctgctatctgggtaaacagactgattcgaccattcagtcttagcgctactaatgaggacctgagagttcttgcgggacccttgaacaagggg

SEQ ID NO: 2906 - DNA, 474 bp, Triticum aestivum
  Clone ID: uC-tsfl9316017c10b1
aacactttgttacatctagcggatttggatttctttaacaactaaggttcctgtttttaacattttaaagccaagggcttttgcccatctccaatagctaacaagaactctttcttttctttacaaatcccaaaacctttactagactttttctgcttctttagcttacttcacctagagtcttctaccttttcttatcattgaatcaacccctttttttttttcttttaaacacatcccaacccaaagtataagcgcccacctagtcctatctagtccgaaaaatgcgaactagaactacatgagacactatctctgtcgttacgaacctaacactttctaccaagcttaatcggaataagacctcacatacactcacaagttatatagggcttgaaagaaagtctaggcttgggtttgggttaactgctctaataaggagaggcagcttctgggttaaaaagagggtccaaa

SEQ ID NO: 2907 - DNA, 312 bp, Triticum aestivum
  Clone ID: uC-tsfl9316017c12b1
gacctctttccgcacctagcaaatggtaaggcaagaaagccaactgacggcattggacatgagcagacaaagaaatgctgctgctgctattcaacgagatcgattctaaccttaaagcgcccagatcccaatgacgagctcgactacgatgtccaccacgttgtcagttacgccatgggccccgtatgcgaaccccgtatacatggactggtccgttgtgcctgttctgttatccggctacttgtcccattcgaccatccagatctagccctactctttggcgcttaagagcatctccgagaccctgcaaca

SEQ ID NO: 2908 - DNA, 519 bp, Triticum aestivum
  Clone ID: uC-tsfl9316017d01b1
acactctgttacatctagcggatttggatttctttaacaactaaggttcctgttgttaacattttaaagccaagggcttttgcccatctccaatagctaacaagaactctttcttttctttacaaatcccaaaacctttactagactttttctgcttctttagcttacttcacctagagacttctaccttttcttatcattgaatcaacccctttttttttttcttttaaacacatcccaacccaaagtataagcgcccacctagtcctatctagtccgaaaaatgcgaactagaactacatgagacactatctctgttgttacgaacctaacactttctaccaagcttaatcggaataagacctcacaaacactcacaagttatatagggcttgaaagaaagtctaagattgggtttgggttaactgctctaataaggagagtcagctacttggattaaaaagagtgatcaaaatgaataagaaaatccaagtattttacggtatccatgagttcaaa

SEQ ID NO: 2909 - DNA, 305 bp, Triticum aestivum
  Clone ID: uC-tsfl9316017d04b1
tccttgcattgcccaaagatatccccaaccaagattgcttctcctgctcaattggaaagggctggaggctcccatccaatacaacggcatggactacgtattgctctaccctcacactggataggagacctccatggacaaacgactgaaaaacatgctatacgtgctcacggacatgatcaccataatggatctatcctacatgcacttcaggtatccacgaatgaggctacatgaggctactgcccaggagcaggactctggaaatgaggaacgaagatgcaccagcgagggttggcttccca

SEQ ID NO: 2910 - DNA, 553 bp, Triticum aestivum
  Clone ID: uC-tsfl9316017d05b1
ctattactgtacctagcaaatgggaagccaagaaagccaactgacgggattgcacatgagctgacaaagaaatgctggtgctgctattcaacgagatcgattctaacctcaaagcgcccagatcccaatgacgagctcgtcgacgatgtccaccacgttgcagtcgcgccatgggccccgaatgcgaaccccgtcgacatgggctggtccgttgtgccggtactgcgatccggcgacttgtcccattcgaccatgcagttctcgccctccttgtcggcgcttcagagcttcgccgagaccctgcaacaggtggccccttcgaagctgtccagccacagccgcagcggcattgagatccttgtgctcgacgttgctccccttacgctagacacggtgtgcgtcaacctggagagcgaattgacaaaacagctggagagcggcgagggcaccttttacagggaccatccgacgagccccaatgccaaggacgttgccaacatgacgcccgaggagcgtctagccacggcgctcagggcagctctcagcaccctca

SEQ ID NO: 2911 - DNA, 583 bp, Triticum aestivum
  Clone ID: uC-tsfl9316017d06b1
gttctccgacctcttcccgcacctagcaaatggtaagccaagaaagccaactgacggcattgcacatgagctgacaaagaaatgctgctgctgctattcaacgagatcgattctaacctcaaagcgcccagatcccaatgacgagctcgtcgacgatgtccaccacgttgcagtcgcgccatgggccccgaatgcgaaccccgtcgacatggcctggtccgttgtgccggtactgcgatccggcgacttgtcccattcgaccatccagttctcgccctcctcgtcggcgcttcagagcttcgccgtgaccctgcaacaggtggccccttcgaagctgtccagccacagccgcagcggcattgagatcctcgtcctcgacgttgctccccttccgctagacacggtgttcgtcaacctggagagcgaattgacaaaacggctggagagcggcgagggcaccttttacaaggaccatgcgacaagccccaatgccaaggacgttgccaacatgacgcccgaggagcgtctagccacggcgctcatggcagctctcagcaccctcaagattgtccattccggcgat

SEQ ID NO: 2912 - DNA, 501 bp, Triticum aestivum
  Clone ID: uC-tsfl9316017d07b1
cactctgttacatgtagcggatttggattcctttaacaactaaggttcctgtttttaacattctaaagccaaggggtcctgcccatctccaatagctgacaagaactctttcttttctttacaaatgccagagcctttactagactttttgtgcttgtttagcctacttgacctagagtggtctacctttgcttatgattgaatgaaccggtgttcttgtctcttgtaaacacagtcgaacccaaagtataagcgggcacctagccctatctagtccgaaaaacgcgagctggaactacatgagacactatctctgtcgttacgaacctaacactttctaccaagctcaatgggaataagagctcacagacactcacaagctatatagggcctgaaagaaagtctaggtttgggctagggttaactgctctaataaggagagctagctactgggagtaaaaagagtgatcagaccgaatcagaagatccaagtatcttacg

SEQ ID NO: 2913 - DNA, 527 bp, Triticum aestivum
  Clone ID: uC-tsfl9316017d08b1
gaacactctgttacatctagcggatttggatttctttaacaagctaaggactcctgctcttaacattgtaaagccaagggctttcgccgatctgcagtagctgacatgaactgtgagttttctttacaaatacgagaacctatactagagtctagctggttgtctaggttcctcaacctagagtcgcgccccgggccttataagcgaacccagccgacatggtctgtttcgtagagccatgcctgccaaccggatacgcgcccaactcgaccattctagtctggaccttgtgaactgggcctacaagagacactgtgtccgtggatccggaggtcactctgtatacgaagcttcacaggcgtaagagcttagagaccctacaacttaatcttggttcgattgagatgacacggtgggcgtggacctgcagagcgaattgacaaaaccgctggcgagcggcgaaggcaccttttacaaggaccatacgacaagccccaatgccaaggacgctgccaacatgacggccg

SEQ ID NO: 2914 - DNA, 314 bp, Triticum aestivum
  Clone ID: uC-tsfl9316017d10b1
gcataatttagttcctccaagtgatactcgtaatggatctgcacctacaaatctctttgtttctcagttgggtaatgagacccttataccccattcatcatcatcaaaccaactttcaaaagagtctccattgatggaagagactacggtcttatcaaggtgtcagcgccaatgaatacattagctggacaacctcaccaacttgcttcacgagcatttggtcttgacccgccaaggaaatgccatgagtaggaaccggatccaggaaggaatctacatggccatctgtgcgttgataatcctgacactcggca

SEQ ID NO: 2915 - DNA, 174 bp, Triticum aestivum
  Clone ID: uC-tsfl9316017d11b1
gggctatgggccacgtgcgatctccaagaagtactcagaactctttgttgctgttgcaaaaccctgacgagacactggacgctcaatgggcgtactgctggcttcagcctagagacctgctacctatgagtgagagagccccacacccgttttttttgttgcatcaacccacac

SEQ ID NO: 2916 - DNA, 563 bp, Triticum aestivum
  Clone ID: uC-tsfl9316017d12b1
tttagaccatgtggctggatttcatcattaaaacctcactgcttgtttcctgaaaccacaggtgttgaacagatggggatactatccactcattctaataggatcatgggcattcggcactattaaccgtatccatgatttcatcgagccagggcataagatcttctggctctcagctcttgacgttgggacagctgcactaatggtagcaaacctatcaaataaataagttataaaattcgccatagatcatctttgctcttcccgagtcgatgttctgaatgttgtattttcagggcttgttcaattcaatagcctatggtttcaacagctcagagcgtcgagcaatccatgagagactggagctgtaagtcaccaccgatctctctggtttgctatattattcccaataatcaatgaagcttgatttgtatgaaacccttggtctgctagattcttgccagaacggctatatcgatggcttccaagcaatttcagaccaaaaaaccatctgattctacatcagcaacaacaacagcgaagcgaaatggtatcactcaaga

SEQ ID NO: 2917 - DNA, 509 bp, Triticum aestivum
  Clone ID: uC-tsfl9316017e01b1
ttctccgacctctttccgcacctagcaaatggttagccaagaaagccaactgacggcattgcacatgagcttacaaagaaatgctgctgctgctattcaacgagatcgattctaacctcaaagcgcccagatcccaatgacgagctcgtcgacgatgtccaccacgttgcagtcgcgccatgggccccgaatgcgaaccccgtcgacatggcctggtccgttgtgccggtactgcgatccggcgacttgtcccattcgaccatccagttctcgccctcctcgtcggcgctatagagcttcgccgggaccctgcaacaggtggcccctttgaagctgtccagccacaggcgcagcgggattgagatcctcgttctcgacgttgctccccttgcggtagacacggtgttcgtccacctggagagcgaaatgacaaaacggctggagagcggctagggcaccttatacaaggaccatccgacaagccccaatgccaggacgttgccacatga

SEQ ID NO: 2918 - DNA, 418 bp, Triticum aestivum
  Clone ID: uC-tsfl9316017e04b1
acactttgtcacatataggggatgtggatatctttaacaactaaggttcctgatgataacatcaaagatccgcgggcgttggtccatctcgagtagcttacaagaactattgcgttcatatacaaatgacaagacctttactagacttcacctggttgtatagcgtactacaggcccagaatgctacctccgtttataagggcaggaacgctgtgtctgttctgttatacagacactcgaaccaaaagaccatagcgtccatctagctcctatctagtgcgaaaaaggctaactagaaccacgtgacacgctgtctctgtggagacgaacctacccattcgtaccaggcttgagaggcatgagatctcacagacactcacacgttatacacggcttgaaagaaactgtagggctgggt

SEQ ID NO: 2919 - DNA, 275 bp, Triticum aestivum
  Clone ID: uC-tsfl9316017e06b1
ttactatagggaaaggtgggacgcctgccaggaccggcgccggattgcctggccatccactttccggttttggtgctgctgctatacaacgggatcgctttttaccttatagggcccagatcccaacgacaagcgtctttacgatgtccaccacgttgcagtcgctccatgggcccccaatgcgaaccccgtggacatggcctggttcgttgttgcctgtactgcgatcccagcgacatagttctattcgaccatccagttctctcccttctcgg

SEQ ID NO: 2920 - DNA, 382 bp, Triticum aestivum
  Clone ID: uC-tsfl9316017e08b1
gctctaggaggatcacacgcttacgcgcgcggggatgcgacgatgtatctgttatatcgggtgacgttgattgaatgaccctggacgagtgctttacaccgacaacgagtgggaaaacggtgcctttacccacacttgattgccttggaggaatccatgattaacgaggatgtgattgacgcgacataggctccgctgccgagacacaacttgaccaccagatgtcacacctgaatggacaaatggagacaacgtgcctgctagcgtgtggatatagctgcaggaggagctgggggaccccacggctagaccggtccatttgcgagggtcttcaacgccgctactgggaatatcttggctttatttatcttaacggtcgtgg

SEQ ID NO: 2921 - DNA, 383 bp, Triticum aestivum
  Clone ID: uC-tsfl9316017e09b1
gctctaacgctttagatcatgtggctggatttcatcattaaaacctcactgcttgtttcctgaaaccacaggtgttgaacagatggggatactatccactcattctaataggatcatgggcattcggcactattaaccgcatccatgatttcatcgagccagggcataagatcatctggctctcagttccttggcgtgtgacaggtggactaaaggtagcaaacctatcaaataaataagttataaaattcggcataaatcatgtttgctcttcccgagccgatggtctgaatggaggatcttcagggcctggtcgaatcaataacctatgggctcgacaactcaatgcgtagagcaatccatgagagactggagctgtaagt

SEQ ID NO: 2922 - DNA, 480 bp, Triticum aestivum
  Clone ID: uC-tsfl9316017e12b1
taacactttgttacatctagcggatttggatttctttaacaactaaggttcctgtttttaacattttaaagccaagggcttttgcccatctccaatagctaacaagaactctttcttttctttacaaatcccaaaacctttactagactttttctgcttctttagcttacttcacctagagtcttctaccttttcttatcattgaatcaacccctttttttttttcttttaaacacatcccaacccaaagtataagcgcccacctagtcctatctagtccgaaaaatgcgaactagaactacatgagacactatctctgtcgttacgaacctaacactttctaccaagcttaatcggaataagacctcacaaacactcacaagttatatagggcttgaaagaaagtctaagtttgggtttgggttaactgctctcataaggagagacagctacttggattagaaagagtgaccaaaatga

SEQ ID NO: 2923 - DNA, 498 bp, Triticum aestivum
  Clone ID: uC-tsfl9316017f02b1
ctctaacgctaacactttgttacatctagcggatttggatttctttaacaactaaggctcctgtttttaacattttaaagccaagggcttttgcccatctccaatagctaacaagaactctttgttttctttacaaatcccaaaacctttactagactttttctgcttctttagcttacttcacctagagtcttctaccttttcttatcattgaatcaacccctttttttttttcttttaaacacatcccagcccaaagtataagcgcccacctagtcctatctagtccgaaaaatgcgaactagaactacatgagacactatctctgtcgttacgaacctaacactttctaccaagcttaatcggaatcagacctcacaaacactcacaagttatatagggcttgaaagaaagcctaagtttgggtttgggttaactgctctaataaggagagtcagctacttggattaaaaagagtgatcaaaatgaataagaaaa

SEQ ID NO: 2924 - DNA, 584 bp, Triticum aestivum
  Clone ID: uC-tsfl9316017f04b1
taacgctcaacactttgttacatctagcggatttggatttctttaacaactaaggttcctgtttttaacattttaatgccaagggcttttgcccatctccaatagctaacaagaactctttcttttctttacaaatcccaaaacctttactagactttttctgcttctttagcttacttcacctagagtcttctaccttttcttatcattgaatcaacccctttttttttttcttttaaacacatcccaacccaaagtataagcgcccacctagtcctatctagtccgaaaaatgcgaactagaactacatgagacactatctctgtcgttacgaacctaacactttctaccaagcttaatcggaataagacctcacaaacactcacaagttatatagggcttgaaagaaagtctaggtttgggtttgggttaactgctctaataaggagagtcagctacttggattaaaaagagtgatcaaaatgaataagaaaatccaagtattttacggtatccatgagttcaaatttgatgcagacatgataattaaagattagattcaggttcaaattgatagggaatg

SEQ ID NO: 2925 - DNA, 353 bp, Triticum aestivum
  Clone ID: uC-tsfl9316017f06b1
gcctcatccctgcatggatggagacggacaaggcaaaagcgttaactgacgtgatcgcacaccaaacatacgagggaacgccggtgatgctattcaaggggatccaatgttacacttaagcgcccagatgccaatgactagctctgataagatgttcaccacacaacaggcgcgccaatggcccttaatgggcaccgcgtctacatggacgagtccattgtgcaagaactgctaaccggccacttgcgctatttgagcatacaactttagccctacttgagggtgcttgagactaaagaagaaccctggctcaggggggcccatctaagataggcagtcacagacacaagggc

SEQ ID NO: 2926 - DNA, 398 bp, Triticum aestivum
  Clone ID: uC-tsfl9316017f08b1
acgagaaaaacagggtaattagcaaactggatcgccgaactgatgcttaccatgaatctgggcatgctgaagccggatggttattagaacaggcagagcctgttctgaaagtgacaattgttccccgtggaacagctggtataagctgtgcacattatgtaccaaatgagaatcttttgatgacaaatgagcagctatttgatattacatgcatgacaataggaggccgagctgcacaggaggctctgattggaagaatctggactggtgcccataatgatcgggagaaaggtacaaagacgacatatgcgctagtagctgtgtatggtttcagagataaagttggttttgtatacttctcccagcgaggggatggctatgaaatgaacaagccttac

SEQ ID NO: 2927 - DNA, 391 bp, Triticum aestivum
  Clone ID: uC-tsfl9316017f09b1
agcgggaaagcattaacaactcttgtccgtttccgtaaaaacgggattttcccgggctttccccggccgtgcctcaccagggatcacttagggtcagttatgcccggttgctgacccttgattagcctttttacgtcaacttcggacaactatgggtccttttgggcccttggttcctctggggaggattccatggcgaaagatgaacttattgcccgtcttcgctcggtgggtgtaccacctgacccttctatctcgcctcgccgggaccgaagaagaactggggcgtcctggtgcttcagccggagaagcttttatatgaccctgggcctaagttggcaaatgaccgccctttcccacccctttaatggggaaaccctgggaaaaccca

SEQ ID NO: 2928 - DNA, 479 bp, Triticum aestivum
  unsure (1)..(479): unsure at all n locations
  Clone ID: uC-tsfl9316017f10b1
taaactttgttacatntagcggatttggatttctttaacaactaaggttcctgtttttaacattttaaagccaagggcttttgcccatctccaatagctaacaagaactctttcttttctttacaaatcccaaaacctttactagactttttctgcttctttagcttacttcacctagagtcttctaccttttcttatcattgaatcaacccctttttttttttcttttaaacacatcccaacccaaagtataagcgcccacctagtcctatctagtccgaaaaatgcgaactagaactacatgagacactatctctgtcgttacgaacctaacactttctaccaagcttaatcggaataagacctcacaaacactcacaagttatatagggcttgaaagaaagtctaggtttgggtttgggttaactgctctaataaggagagtcagctcttgggttaaaaagagtgatcaaatgaat

SEQ ID NO: 2929 - DNA, 513 bp, Triticum aestivum
  Clone ID: uC-tsfl9316017f11b1
gttctccgacctcttcccgcacctagcaaatggtgagccaagaaagccaactgacggcattgcacatgagcttacaaagaaatgctgctgctgctattcaacgagatcgattctaacctcaaagcgcccagatcccaatgacgagctcgtcgacgatgtccaccacgttgcagtcgcgccatgggccccgaatgcgaaccccgtcgacatggcctggtccgttgtgccggtactgcgatccggcgacttgtcccattcgaccatccagttctcgccctcctcgtgggcgcttcagagcttcgccgtgaccctgcaacaggtggccccttcgaagctgtccagccacagccgcagcggcattgagatcctcgtcctcgacgttgctccccttccgctagacacggtgttcgtcaacctggagagcgaattgacaaaacagctggagagcggcgagggcaccttttacaaggaccatccgacaagccccaatgccaaggacgttgccaacatgac

SEQ ID NO: 2930 - DNA, 542 bp, Triticum aestivum
  Clone ID: uC-tsfl9316017f12b1
taacactttgttacatctagcggatttggatttctttaacaactaaggttcctgtttttaacattttaaagccaagggcttttgcccatctccaatagctaacaagaactctttcttttctttacaaatcccaaaacctttactagactttttctgcttctttagcttacttcacctagagtcttctaccttttcttatcattgaatcaacccctttttttttttcttttaaacacatcccaacccaaagtataagcgcccacctagtcctatctagtccgaaaaatgcgaactagaactacatgagacactatctctgtcgttacgaacctaacactttctaccaagcttaatcggaataagacctcacaaacactcacaagttatatagggcttgaaagaaagtctaggtttgggtttgggttaactgctctaataaggagagtcagctacttggattaaaaagagtgatcaaaatgaataagaaaatccaagtattttacggtatccatgagttcaaatttgatgcagacatgataatt

SEQ ID NO: 2931 - DNA, 546 bp, Triticum aestivum
  Clone ID: uC-tsfl9316017g04b1
ctaacactttgttacatctagcggatttggatttctttaacaactaaggttcctgtttttaacattttaaatccaagggcttttgcccatctccaatagctgacaagaactctttcttttctttacaaatcccaaaacctttactagactttttctgcttctttagcttacttcacctagagtcttctaccttttcttatcattgaatcaacccctttttttttttcttttaaacacatcccaacccaaagtataagcgcccacctagtcctatctagtccgaaaaatgcgaactagaactacatgagacactatctctgtcgttacgaacctaacactttctaccaagcttaatcggaataagacctcacaaacactcacaagttatatagggcttgaaagaaagtctaggtttgggtttgggttaactgctctaataaggagagtcagctacttggattaaaaagagtgatcaaaatgaataagaaaatccaagtattttacggtatccatgagttcaaatctgatgcagacatgataattaaa

SEQ ID NO: 2932 - DNA, 429 bp, Triticum aestivum
  Clone ID: uC-tsfl9316017g06b1
ggcaagccaaaagagctaactgacggcatcgcacatgatttttcaaagaaatgccggtgctgctattcaaggggatccattgtaacctcaaagcgcccagatgccaatgactagctcttatacgatgtccaccacgcaacaggcgcgccatgggccccgaatgcgaaccgcgtctacatggccgggtccgttgtgccggaactgctatctggccacttgccccattcgagcgtacaactctagccctccttgtgggcgcttgagagctacgacgagaccctgccacaggtggccccttctaagctaggcagccacagacgcaagggcattgagatcctcttgctcgacgttgatcaccttccgatagacacagagttcgtcaacctgcagagcgaattgactaaacggctggagagctgcgagggcacc

SEQ ID NO: 2933 - DNA, 528 bp, Triticum aestivum
  Clone ID: uC-tsfl9316017g08b1
agcggatttggatttctttaacaactaaggttcctgtttttaacattttaatgccaagggcttttgcccatctccaatagctaacaagaactctttcttttctttacaaatcccaaaacctttactagactttttctgcttctttagcttacttcacctagagtcttctaccttttcttatcattgaatcaacccctttttttttttcttttaaacacatcccaacccaaagtataagcgcccacctagtcctatctagtccgaaaaatgcgaactagaactacatgagacactatctctgtcgttacgaacctaacactttctaccaagcttaatcggaataagacctcacaaacactcacaagttatatagggcttgaaagaaagtctaggtttgggtttgggttaactgctctaataaggagagtcagctacttggattaaaaagagtgatcaaaatgaataaaaaaatcccagtattttacggtatccatgagttcagatttgatgcagacatgataattaaag

SEQ ID NO: 2934 - DNA, 547 bp, Triticum aestivum
  Clone ID: uC-tsfl9316017g11b1
taacactttgttacatctagcggatttggatttctttaacaactaaggttcctgtttttaacattttaaagccaagggcttttgcccatctccaatagctaacaagaactctttcttttctttacaaatcccaaaacctttactagactttttctgcttctttagcttacttcacctagagtcttctaccttttcttatcattgaatcaacccctttttttttttcttttaaacacatcccaacccaaagtataagcgcccacctagtcctatctagtccgaaaaatgcgaactagaactacatgagacactatctctgtcgttacgaacctaacactttctaccaagcttaatcggaataagacctcacaaacactcacaagttatatagggcttgaaagaaagtctaggtttgggtttgggttaactgctctaataaggagagtcagctacttggattaaaaagagtgatcaaaatgaataagaaaatccaagtattttacggtatccatgagttcaaatttgatgcagacatgataattaaaga

SEQ ID NO: 2935 - DNA, 537 bp, Triticum aestivum
  Clone ID: uC-tsfl9316017g12b1
gctctaaccctcaacactttgttacatctagcggatttggatttctttaacaactaaggttcctgtttttaacattttaaagccaagggcttttgcccatctccaatagctaacaagaactctttcttttctttacaaatcccaaaacctttactagactttttctgcttctttagcttacttcacctagagtcttctaccttttcttatcattgaatcaacccctttttttttttcttttaaacacatcccaacccaaagtataagcgcccacctagtcctatctagtccgaaaaatgcgaactagaactacatgagacactatctctgtcgttacgaacctaacactttctaccaagcttaatcggaataagacctcacaaacactcacaagttatatagggcttgaaagaaagtctaggtttgggtttgggttaactgctctaataaggagagtcagctacttggattaaaaagagtgatcaaaatgaatatgaaaatccaagtattttacgggatccatgagttcaaatttga

SEQ ID NO: 2936 - DNA, 495 bp, Triticum aestivum
  Clone ID: uC-tsfl9316017h01b1
taacactttgttacatctagcggatttggatttctttaacaactaaggttcctgtttttaacattttaaagccaagggcttttgcccatctccaatagctgacaagaactctttcttttctttacaaatcccaaaacctttactagactttttctgcttctttagcttacttcacctagagtcttctaccttttcttatcattgaatcaacccctttttttttttcttttaaacacatcccaacccaaagtataagcgcccacctagtcctatctagtgcgaaaaatgcgaactagaactacatgagacactatctctgtcgttacgaacctaacactttctaccaagcttaatcggaataagacctcacaaacactcacaagttatatagggcttgaaagaaaggctaaggttgggttggggttaactggtctgacaaggagagtcagctacttggatgacaaagagtgatcaaaatgcctaggataatccggg

SEQ ID NO: 2937 - DNA, 596 bp, Triticum aestivum
  Clone ID: uC-tsfl9316017h02b1
ctaacgctaacactttgttacatctagcggatttggatttctttaacaactaagggtcctgtttttaacattttaaagccaagggcttttgcccatctccaatagctaacaagaactctttcttttctttacaaatcccaaaacctttactagactttttctgcttctttagcttacttcacctagagtcttctaccttttcttatcattgaatcaacccctttttttttttcttttaaacacatcccaacccaaagtataagcgcccacctagtcctatctagtccgaaaaatgcgaactagaactacatgagacactatctctgtggttacgaacctaacactttctaccaagcttaatcggaataagacctcacaaacactcacaagttatatagggcttgaaagaaagtctaggtttgggttcgggctaactgctctaataaggagagtcagctacttggattaaaaagagtgatcaaaatgaataagaaaatccaagtgttttacggtatccatgagttcaaatttgatgcacacatgataattaaagattagattcaggttcaaattgatagggaatggtatcagatcat

SEQ ID NO: 2938 - DNA, 449 bp, Triticum aestivum
  Clone ID: uC-tsfl9316017h04b1
cttccccaaaaatttccccaacctcgctcgcttctcctcctcaattggggagggagggaggctccaatccaatccaatccaatccaatccaaaatcgaatcgaatcccactggattggagccagccagcgagatacgactcaaatccgtgtcgtccgcgcgcgcgcgcatgaagacgaagctgctctactctccttgtgcttgaactagccacgactctgcctcctgctgcttcctgcccagtagcaggagccgggcacggagggaggaagatgcgcctgccggtgctgccggcgtacaccttcaactccagcaccgtcgatcgcccgccgacgacgacttaggatcctgctcctcctgctcctcctactactgagggggcagcacctgcagtctacacagtgttcctcaacatctacgacatctcccccatcaacaactacccatact

SEQ ID NO: 2939 - DNA, 591 bp, Triticum aestivum
  Clone ID: uC-tsfl9316017h05b1
ctaacactttgttacatctagcggatttggatttctttaacaactaagggtcctgtttttaacattttaaagccaagggcttttgcccatctccaatagctaacaagaactctttcttttctttacaaatcccaaaacctttactagactttttctgcttctttagcttacttcacctagagtcttctaccttttcttatcattgaatcaacccctttttttttttcttttaaacacatcccaacccaaagtataagcgcccacctagtcctatctagtccgaaaaatgcgaactagaactacatgagacactatctctgtcgttacgaacctaacactttctaccaagcttaatcggaataagacctcacaaacactcacaagttatatagggcttgaaagaaagtctaggtttgggtttgggttaactgctctaataaggagagtcagctacttggattaaaaagagtgatcaaaatgaataagaaaatccaagtattttacggtatccatgagttcaaatttgatgcagacatgataattaaagattagagtcaggttcacatgatagggaatggtatcagatcatga

SEQ ID NO: 2940 - DNA, 577 bp, Triticum aestivum
  Clone ID: uC-tsfl9316017h08b1
gttctccgacctcttcccgcacctagcaaatggtaagccaagaaagccaactgacggcattgcacatgagcagacaaagaaatgctgctgctgctattcaacgagatcgattctaacctcaaagcgcccagatcccaatgacgagctcgtcgacgatgtccaccacgttgcagtcgcgccatgggccccgaatgcgaaccccgtcgacatggcctggtccgttgtgccggtactgcgatccggcgacttgtcccattcgaccatccagttctcgccctcctcgtcggcgcttcagagcttcgccgtgaccctgcaacaggtggccccttcgaagctgtccagccacagccgcagcggcattgagatcctcgtcctcgacgttgctccccttccgctagacacggtgttcgtcaacctggagagcgaattgacaaaacggctggagagcggcgagggcaccttttacaaggaccatccgacaagccccaatgccaaggacgttgccaacatgacgcccgaggagcgtctagccacggcgctcagggcagctctcagcaccctcaagatgtccattccg

SEQ ID NO: 2941 - DNA, 535 bp, Triticum aestivum
  Clone ID: uC-tsfl9316017h09b1
gttctccgactctcttcccgcacctagcaaatggtaagccaagaaagccaactgacggcattgtttcatgagctgacaaagaaatgctgctgctgctattcaacgagatcgattctaacctcaaagcgcccagatcccaatgacgagctcgtcgacgatgtccaccacgttgcagtcgcgccatgggccccgaatgcgaaccccgtcgacatggcctggtccgttgtgccggtactgcgatccggcgacttgttccattcgaccatccagttctcgccctcctcgtcggcgcttcagagcttcgccgtgaccctgcaacaggtggccccttcgaagctgtccagccacagccgcagcggcattgagatcctcgtcctcgacgttgctcccctttcgctagacacggtgttcgtcaacctggagagcgaattgaccaaaccgctggagagcggcgagggcaccttttacaaggaccatccgacaagccccaatgccaaggacgttgccaacatgacgcccgaggagcgtctagcca

SEQ ID NO: 2942 - DNA, 511 bp, Triticum aestivum
  Clone ID: uC-tsfl9316017h10b1
gttctccgacctcttcccgcacctagcaaatggtaagccaagaaagccaactgacggcattgcacatgagctgacaaagaaatgctgctgctgctattcaacgagatcgattctaacctcaaagcgcccagatcccaatgacgagctcgtcgacgatgtccaccacgttgcagtcgcgccatgggccccgaatgcgaaccccgtcgacatggcctggtccgttgtgccggtactgcgatccggcgacttgtcccattcgaccatccagttctcgccctcctcgtcggcgcttcagagcttcgccgtgaccctgcaacaggtggccccttcgaagctgtccagccacagccgcagcggcattgagatcctcgtcctcgacgttgctcccctttcgctagacacggtgttcgtcaacctggagagcgaattgacaaaacggctggagagcggcgagggcaccttttacaaagaccattcgacaagccccaatgccaggacgttgccacatgac

SEQ ID NO: 2943 - DNA, 545 bp, Triticum aestivum
  Clone ID: uC-tsfl9316017h11b1
acactttgttacatctagcggatttggatttctttaacaactaaggttcctgtttttaacattttaaagccaagggcttttgcccatctccaatagctaacaagaactctttcttttctttacaaatcccaaaacctttactagactttttctgcttctttagcttacttcacctagagtcttctaccttttcttatcattgaatcaacccctttttttttttcttttaaacacatcccaacccaaagtataagcgcccacctagtcctatctagtccgaaaaatgcgaactagaactacatgagacactatctctgtcgttacgaacctaacactttctaccaagcttaatcggaataagacctcacaaacactcacaagttatatagggcttgaaagaaagtctaggtttgggtttgggttaactgctctaataaggagagtcagctacttggattaaaaagagtgatcaaaatgaataagacaatcccagtattttacggtatccatgagttcaaatttgatgcagacatgataattaaaga

SEQ ID NO: 2944 - DNA, 391 bp, Triticum aestivum
  Clone ID: uC-tsfl9316018a05b1
atctctgtacctagtagagggtatggacaagatagccaactgacggcattgcacatgaccttacaaagtcatggggttgctgccatccaccgtgaccgacagtaaccttatagtgcccatacccaaacgacaagctcactaacaatgttcacgcacgttgcagtcactccatgtaccgcgaatgccatccccttatacatggactgacccgttgtgccttttctgttatacacatactagccccatgcgaccatgcacatctagccctacttagtggcgcttaagagatctagcgctaccctgagacactgtgtctgttggaaccaacctaaccccttctaccaaggttaatagatcttagacctcaccgacactcacatgtcatttgagg

SEQ ID NO: 2945 - DNA, 602 bp, Triticum aestivum
  Clone ID: uC-tsfl9316018a06b1
ctttagatcatgtggctggatttcatattaaaacctcactgcttgtttcctgaaaccacaggtgttgaacagatggggatactatccactcattctaataggatcatgggcattcggcactattaaccgtatccatgatttcatcgagccagggcataagatcttctggctctcagttcttgacgttgggacagctgcactaatggtagcaaacctatcaaataaataagttataaaattcgccatagatcatctttgctcttcccgagtcgatgttctgaatgttgtattttcagggcttgttcaattcaatagcctatggtttcaacagctcagtgcgtcgagcaatccatgagagactggagctgtaagtcaccaccgatctctttggtttgctatattattcccaataatcaatgaagcttgatttttatgaaacccttggtctgctagattcttgccagaacggctatatcgatggcttccaagcaatttcagaccaaaaaaccatctgattctacatcagcaacaacaacagcgaagcgaaatggtatcactcaagaccgatgacccagcgtgacactaactttcactaatacatt

SEQ ID NO: 2946 - DNA, 592 bp, Triticum aestivum
  Clone ID: uC-tsfl9316018b03b1
taacactttgttacatctagcggatttggatttctttaacaactaaggttcctgtttttaacattttaaagccaagggcttttgcccatctccaatagctaacaagaactctttcttttctttacaaatcccaaaacctttactagactttttctgcttctttagcttacttcacctagagtcttctaccttttcttatcattgaatcaacccctttttttttttcttttaaacacatcccaacccaaagtataagcgcccacctagtcctatctagtccgaaaaatgcgaactagaactacatgagacactatctctgtcgttacgaacctaacactttctaccaagcttaatcggaataagacctcacaaacactcacaagttatatagggcttgaaagaaagtctaggtttgggtctgggttaactgctctaataaggagagtcagctacttggattaaaaagagtgatcaaaatgaataagacaatccaagtattttacggcatccatgagttcaaatttgatgcagacatgataattaaagattagatcaggttcaaattgatagggaatggtatcagatcatgaca

SEQ ID NO: 2947 - DNA, 514 bp, Triticum aestivum
  Clone ID: uC-tsfl9316018b05b1
gttctccgacctcttcccgcacctagcaaatggtaagccaagaaagccaactgacggcattgcacatgagcagacaaagaaatgctgctgctgctattcaacgagatcgattctaacctcaaagcgcccagatcccaatgacgagctcgtcgacgatgtccaccacgttgcagtcgcgccatgggccccgaatgcgaaccccgtcgacatggcctggtccgttgtgccggtactgcgatccggcgacttgtcccattcgaccatccagttctcgccctcctcgtcggcgcttcagagcttcgccgtgaccctgcaacaggtggccccttcgaagctgtccagccacagccgcagcggcattgagatcctcgtcctcgacgttgctccccttccgctagacacggtgttcgtcaacctggagagcgaattgacaaaacggctggagagcggcgagggcaccttttacatggaccatgcgacaagccccaattgccaggacgctgccaacatgacg

SEQ ID NO: 2948 - DNA, 514 bp, Triticum aestivum
  Clone ID: uC-tsfl9316018c02b1
acctagcaaatggtaagccaagaaagccaactgacggcattgcacatgagcttacaaagaaatgctgctgctgctattcaacgagatcgattctaacctcaaagcgcccagatcccaatgacgagctcgtcgacgatgtccaccacgttgcagtcgcgccatgggccccgaatgcgaaccccgtcgacatggcctggtccgttgtgccggtactgcgatccggcgacttgtcccattcgaccatccagttctcgccctcctcgtcggcgcttcagagcttcgccgtgaccctgcaacaggtggccccttcgaagctgtccagccacagccgcagcggcattgagatcctcgtactcgacgttgctcccctttcgctagacacggtgttcgtcaacctggagagcgaattgacaaaacggctggagagcggcgagggcaccttttacaaggaccatacgacaagccccaatgcccaagacgttgccaacattgacgcccgaagagcgtctagcca

SEQ ID NO: 2949 - DNA, 370 bp, Triticum aestivum
  Clone ID: uC-tsfl9316018c05b1
ttggatttctttaacacactaagggtcctggctttaacaccttaaagcccagggctttcgcccatctccaatagctaacaagaactctttcttttatttacaaattccaaaacctttactagactttttctgcttccttagcttacttcacctagaggcttttaccgtttcttatcattgaatcaacccctttttttttttcttttaaacacatcccaacccaaagtttaagcgcccacctagtcctatctattccgaaaaatgcgaacttgaactacatgaggacctatctctgtcgttacgaacctaacacttcttaccaagcttaatctgaataagacctcacccacactcacaagttatatagggc

SEQ ID NO: 2950 - DNA, 322 bp, Triticum aestivum
  Clone ID: uC-tsfl9316018c06b1
cccgactgtcgccgaaagaaagctccggcctttgtgtttccccagaccacccaccagtctcctcccgcctgaacccccattaactgctcggcaccggagaagagatcccccgttctctgacgccagcggacatgtccgtcacgcgggttcttgcgctgctggcggcggcggcgctggtggtcgccgcgccggcgcgcgtggtcgccgcgggggcgtgcgcggcggagaggatctacaagaaccgcgtgtacgcggcctgcaccgacctgcccaccctgtgcgcgtgcgtgcactgtagctactagccggcggcgtactccct

SEQ ID NO: 2951 - DNA, 499 bp, Triticum aestivum
  Clone ID: uC-tsfl9316018d01b1
aacaactaaggttcctgtttttaacattataatgttaagggcttttgcccatctccaatagctaacaagaactctttcttttctttacaaatcccaaaacctttactagactttttctgcttctttagcttacttcacctagaggcttctaccttttcttatcattgaatcaacccctttttttttttcttttaaacacatcccaacccaaagtataagcgcccacctagtcctatctagtccgaaaaatgcgaactagaactacatgagacactatctttgtcgttacgaacctaacactttctaccaagcttaatcggaataagacctcacatacactcacaagttatatagggcttgaaagaaagcctaggttcgggtttggggtaactgctctaataaggagagtcagctacttggtttaataagagtgatcaaaatgaatataaaaatcccgtatttccggattcatgagtcaaattggaggcgacctgattat

SEQ ID NO: 2952 - DNA, 490 bp, Triticum aestivum
  unsure (1)..(490): unsure at all n locations
  Clone ID: uC-tsfl9316018d03b1
aagaccctgttacagtttaggcggattanggatcatctttaacaactaatgttcctgtttctaacacttaaaagttaagggtttttgcccatctccaatagctaacaagaactgtttcttttctttacaaatccgaaaacctttactagacattatctgcttctctagctcactgcacctacatggcccctaccttgccttatcattgaatcaaccccttttttgttttcatttaaacacatcccaacccatagtatgagcgcccacctagtcctatctagtccgaaaaatgcgaactagaactacatgagacactatctctgtcgttacgaacctaacactttttaccaagcttaatcggaataagacctcacaaacactcacaagatatatagggcttgaaagaaagtctaggtttgggtttgggttaactgctctaataaggagagtcagctacttggattaaatagagtgatcgaattgaataaga

SEQ ID NO: 2953 - DNA, 534 bp, Triticum aestivum
  Clone ID: uC-tsfl9316018d04b1
tccaatagctaagaagaagggtttcttttatttacaaatgggcaaacctctactagaggtttgctggtgttctagcatacgtcaccaagagggccctacctggtcttatcattgaatcaacccctttctttttttcttgtaaacacattccaacccaaagtataagggcccacctagtcctatctagtccgaaaaatgcgaactagaactacatgagagactatctttgtgggtacgaacctaacactttctaccaagcttaatcggaataagacctcacaaacactcacaagttatatagggcttgaaagaaagtctagggttgggtttgggttaactgctctaataaggagagacagctacttggaattaaaagagtgatcaaaatgaataagaaaacccagattttacgggatccatgagttccaattgatgcagacctgaaattaaagattacattcaggtcaaattgatagggatggttcagaacatgcagggggtcgagagagcaactaagctgggggggtttttttt

SEQ ID NO: 2954 - DNA, 545 bp, Triticum aestivum
  Clone ID: uC-tsfl9316018e01b1
taacactttgttacatctagcggatttggatttctttaacaactaaggttcctgtttttaacattttaaagccaagggcttttgcccatctccaatagctaacaagaactctttcttttctttacaaatcccaaaacctttactagactttttctgcttctttagcttacttcacctagagtcttctaccttttcttatcattgaatcaacccctttttttttttcttttaaacacatcccaacccaaagtataagcgcccacctagtcctatctagtccgaaaaatgcgaactagaactacatgagacactatctctgtcgttacgaacctaacactttctaccaagcttaatcggaataagacctcacaaacactcacaagttatatagggcttgaaagaaagtctaggtttgggtttgggttaactgctctaataaggagagtcagctacttggattaaaaagagtgatcaaaatgaataagaaaatccaagtatttacggtatccatgagttcaaatttgatgcagacatgattattaaag

SEQ ID NO: 2955 - DNA, 524 bp, Triticum aestivum
  Clone ID: uC-tsfl9316018e02b1
ttctccgacctcttcccgcacctagcaaatggtaagccaagaaagccaactgacggcattgcacatgagctgacaaagaaatgctgctgctgctattcaacgagatcgattctaacctcaaagcgcccagatcccaatgacgagctcgtcgacgatgtccaccacgttgcagtcgcgccatgggccccgaatgcgaaccccgtcgacatggcctggtccgttgtgccggtactgcgatccggcgacttgtcccattcgaccatccagttctcgccctcctcgtcggcgcttcagagcttcgccgtgaccctgcaacaggtggccccttcgaagctgtccagccacagccgcagcggcattgagatcctcgtcctcgacgttgctccccttccgctagacacggtgttcgtcaacctggagagcgaattgacaaaacggctggagagcggcgagggcaccttttacaaggaccatccgacatgccccaatgccaaggacgttgcccacatgacgcccgaggagcg

SEQ ID NO: 2956 - DNA, 524 bp, Triticum aestivum
  Clone ID: uC-tsfl9316018e04b1
ttctccgatctcttcccgcacctagcaaatggtaagccaagaaagccaactgacggcattgcacatgagctgatcaaagaaatgctgctgctgctatgcaacgagatcgattctaacctcaaagcgcccagatcccaatgacgagctcgtcgacgatgtccaccacgttgcagtcgcgccatgggccccgaatgcgaaccccgtcgacatggcctggtccgttgtgccggtactgcgatccggcgacttgtcccattcgaccatccagttctcgccctcctcgtcggcgcttcagagcttcgccgtgaccctgcaacaggtggccccttcgaagctgtccagccacagccgcagcggcattgagatcctcgtcctcgacgttgctccccttccgctagacacggtgttcgtcaacctggagagcgaattgacaaaacggctggagagcggcgagggcaccttttacaaggaccattcgacaagccccaatgccaaggacgttggcaacatgacgcccgaggagc

SEQ ID NO: 2957 - DNA, 657 bp, Triticum aestivum
  Clone ID: uC-tsfl9316018e05b1
tctaacgctaacactttgttacatctagcggatttggatttctttaacaactaaggttcctgtttttaacattttaaagccaagggcttttgcccatctccaatagctaacaagaactctttcttttctttacaaatcccaaaacctttactagactttttctgcttctttagcttacttcacctagagtcttctaccttttcttatcattgaatcaacccctttttttttttcttttaaacacatcccaacccaaagtataagcgcccacctagtcctatctagtccgaaaaatgcgaactagaactacatgagacactatctctgtcgttacgaacctaacactttctaccaagcttaatcggaataagacctcacaaacactcacaagttatatagggcttgaaagaaagtctaggtttgggtttgggttaactgctctaataaggagagtcagctacttggattaaaaagagtgatcaaaatgaataagaaaatcccagtattttacggtatccatgagttcaaatttgatgcagacatgataattaaagattagattcaggttcaaattgatagggcatggcatcagatcatgacagtgtggtcgagtagagcaatctaagcactgttcaattttttttttttcaaatcatt

SEQ ID NO: 2958 - DNA, 523 bp, Triticum aestivum
  Clone ID: uC-tsfl9316018e06b1
gttctccgacctcttcccgcacctagcaaatggtaagccaagaaagccaactgacggcattgcacatgagcttactaagaaatgctgctgctgctattcaacgagatcgattctaacctcaaagcgcccagatcccaatgaccagctcgtcgacgatgtccaccacgttgcagtcgcgccatgggccccgaatgcgaaccccgtcgacatggcctggtccgttgtgccggtactgcgatccggcgacttggcccattcgaccatccagttctcgccctcctagtcggagcttcagagctttgccgtgaccctgcaacaggaggccccttcgaagctgtccagccacagccgcatggggattgagatcctcgtcctcgacgttggttcgctatcgctagacacggagttcgtcaacctggagagcgaattgaccaaacggctggagagcggtgagggcacctttttcaaggaccattcgacaagccctaatgccaaagacgtctccaacattacatcccgagga

SEQ ID NO: 2959 - DNA, 534 bp, Triticum aestivum
  Clone ID: uC-tsfl9316018f03b1
gtataacctgttctccgacctcttcccgcacctagcaaatggtaagccaagaaagccaactgacggcattgcacatgagctgacaaagaaatgctgctgctgctattcaacgagatcgattctaacctcaaagcgcccagatcccaatgacgagctcgtcgacgatgtccaccacgttgcagtcgcgccatgggccccgaatgcgaaccccgtcgacatggcctggtccgttgtgccggtactgcgatccggcgacttgtcccattcgaccatccagttctcgccctcctggtcggcgcttcagagcttcgccgtgaccctgcaacaggtggccccttcgaagctgtccagccacagccgcagcggcattgagatcctcgtcctcgacgttgctccccttccgatagacacggtgttcgtcaacctggagagcgaattgacaaaacggctggagagcggcgagggcaccttttacaaggaccatccgacatgccccaatgccaaggacgttgtcaacatgacgcccgaggagcg

SEQ ID NO: 2960 - DNA, 508 bp, Triticum aestivum
  Clone ID: uC-tsfl9316018f04b1
taacactttgttacatctagcggatgtggatttctttaacaactaaggttcctgttcttaacattttaaagccaagggcttttgcccatctccaatggctaacaagaactctttcttttttttacaaatcccaaaacctttactagactttttctgcttctttagcttacttcacctagagtcttctaccttttcttatcattgaatcaacccctttttttttttcttttaaacacatcccaacccaaagtataagcgcccacctagtcctatctagtccgaaaaatgcgaactagaactacatgagacactatctctgtcgttacgaacctaacactttctaccaagcttaatcggaataagacctcacaaacactcacaagttatatagggcttgaaagaaagtctaggcttgggtttgggttaactgctctaataaggagaagcagctacttggattaaacagagtgatcaaaatgaataagaaaatccaagtattttacggggt

SEQ ID NO: 2961 - DNA, 216 bp, Triticum aestivum
  Clone ID: uC-tsfl9316018g02b1
ggatttggaattctttaacaactaagggtcctgagaataacattttaaagtcaagggcttttgcccatcttcaaaaactaacaagaactctatctttactttacaaaaaccaaaacctttactagactttttctgcttattttaacttactttaactaagaggggtgggaccttttttttatgaagtgaatcaaccccttttttttttttttttaa

SEQ ID NO: 2962 - DNA, 319 bp, Triticum aestivum
  Clone ID: uC-tsfl9316018g06b1
accttctctagccaaagaaagctgaggcctttctatttccccacaccacccaccagtctccttccgcctgcccccacctttactggtcggtaccggagaagagatcctccttcctctgacgccagcggccatgtccgacacgcgggtacttgcgctgctggcggcggtggaactggtggccgccgcgccggtgcgcgcgcacgcaggggcggcttgcgcggaaaaaaggaacttcaagaacccggtgaacgcggcctgggccgaactgaccaaacaggttgcttccaggctcagttggaacaaacctcccaaaaccccc

SEQ ID NO: 2963 - DNA, 472 bp, Triticum aestivum
  Clone ID: uC-tsfl9316018h01b1
taacctaacactttgttacatctagcggatttggatttctttaacaactaaggttcctgtttttaacattttaaagccaagggcttttgcccatctccaatagctaacaagaactctttcttttctttacaaatcccaaaacctttactagactttttctgcttctttagcttacttcacctagagtcttctaccttttcttatcattgaatcaacccctttttttttttcttttaaacacatcccaacccaaagtataagcgcccacctagtcctatctagtccgaaaaatgcgaactagaactacatgagacactatctctgtcgttacgaacctaacactttctaccaagcttaatcggaataagacctcacaaacactcacaagttatatagggcttgaaagaaagactaggtttgggtttgggctaactgctctaataaggagagtcagcttcttggattaaaaaga

SEQ ID NO: 2964 - DNA, 523 bp, Triticum aestivum
  Clone ID: uC-tsfl9316018h02b1
ctctaaccctaacactttgttacatctagcggatttggatttctttaacaactaaggttcctgtttttaacattttaaagccaagggcttttgcccatctccaatagctaacaagaactctttcttttctttacaaatcccaaaacctttactagactttttctgcttctttagcttacttcacctagagtcttctaccttttcttatcattgaatcaacccctttttttttttcttttaaacacatcccaacccaaagtataagcgcccacctagtcctatctagtccgaaaaatgcgaactagaactacatgagacactatctctgtcgttacgaacctaacactttctaccaagcttaatcggaataagacctcacaaacactcacaagttatatagggcttgaaagaaagtctaggtttgggtttgggttaactgctctaataaggagagtcagctacttggattaaaaagagtgatcaaaatgaataagaaaatccaagtattttacggtatccatga

SEQ ID NO: 2965 - DNA, 460 bp, Triticum aestivum
  Clone ID: uC-tsfl9316018h04b1
tcgctttctcccccctcttgcgaaggtctagggtttggctgagtagagaagagagacttgcccctcgtccagtagggagccgccatgagccgatcggggcagccgccggatctgaagaagtacatggacaagaagctccaaatcaagctgaatgcgaaccgtgttgtcattggcacgcttcgtggatttgatcagttcatgaatttggtggtggacaacactgtggaggtcaatggagatgagaagaccgacatagggatggtggttctgagaggaaatagtgttgtgatgattgaagcccttgaaccaattgccaggtctcagtgatattttggcttgcctgcttctgggttagcactacttgagctaatagtgtttggtcaaaacctatgcgcatgcaattgggcaaattgtatcctaatatttgtattgtgtgagattcagcacttattgtatagtt

SEQ ID NO: 2966 - DNA, 310 bp, Triticum aestivum
  unsure (1)..(310): unsure at all n locations
  Clone ID: uC-tsfl9316019a01b1
ttatcgaatccttcgcgcnggngncaccaaggagaaagattaagacatggagaatggagaacgccgcnnacgccgccaanancngcaagaagcccgccccacaaggcnacaagagcggaagnnacacaaaccccccgcaggcgnagggacacnagnccagccgcgggaggagaagcgncggcnnacaaaacccaggngccnagccccaaaanagcngaccttncagaacnagagcgaggccgcgcccagaaaagaccacgccaagcactccgnacgagaacgcncangaaacaaanaaagccttctcctc

SEQ ID NO: 2967 - DNA, 85 bp, Triticum aestivum
  Clone ID: uC-tsfl9316019a02b1
aagatgagctgaaagcccgtccccgctcaatgggtgaacaaccaacccgtgctgtctatctggcagggagcaaacaagaactgcc

SEQ ID NO: 2968 - DNA, 320 bp, Triticum aestivum
  Clone ID: uC-tsfl9316019a05b1
ccggacacggaagccgggggcgacccagctcacgcatatcacggaggagggccggcggcgacgccccggaagagagcaacccgcgaacacgccgagccccacccaggcggacacgcaacgagcccgacagcggggccacagaggagagggaaccccaggccgacaaacgaggaacccacacccagcaaagccacgcagacgacaccaagcaacaagggcgagcaacacgacgaggccagcgggcgcgcggaacggacacgagaaaaacacggaaaacacaaaccaagaggacacaaaccaaaaaaacaccaacaggggcg

SEQ ID NO: 2969 - DNA, 520 bp, Triticum aestivum
  Clone ID: uC-tsfl9316019a06b1
gccggcacctagcaaatgggcagccaagaaagccaactgacggcattgctcatgagtttgtcaaagaaatgctgctgctgctattcaacgagatcgattctaacctcaaagcgcccagatcccaatgacgagctcgtcgacgatgtccaccacgttgcagatcgcgccatgggccccgaatgcgaaccccgtcgacatggcctggaccgatgtgccggtactgcgatccggcgacttgtgccattcagaccatacagttctcgccctcctcgtgggcgcttcagagcttcgccgcgaccctgcaacaggtggccccttcgaagctgtccagccacagccgcagcggcattgagatcctcgtcctcgacgttgctgcccttccgatagacacggtgttcgtcaacctggagagcgaattgacaaaacggctggagagcggcgagggcaccttttacaaggaccatgcgacaagctccaatgccaggacgttgcaacatgacgcccgagagcgctagccacg

SEQ ID NO: 2970 - DNA, 562 bp, Triticum aestivum
  Clone ID: uC-tsfl9316019b01b1
cctagcaaatggtaatgccaagaatgccaactgacggcattgcacatgagctgtcaagttttgctgctgctgctattcaacgagatcgattctaacctcaaagcgcccagatcccaatgacgagctcgtcgacgatgtccaccacgttgcagtcgcgccatgggccccgaatgcgaaccccgtcgacatggcctggtccgttgtgccggtactgcgatccggcgacttgtcccattcgaccatccagttctcgccctcctcgtcggcgcttcagagcttcgccgtgaccctgcaacaggtggccccttcgaagctgtccagccacagccgcagcggcattgagatcctcgtactcgacgttgctccccttgcgctagacacggtgttcgtcaacctggagagcgaattgacaaaactgctggagagcggcgagggcaccttttacaaggaccatgcgacaagccccaatgccaaggacgttgccaacatgacgcccgacgagcgtctagccacggcgctcagggcagctctcagcaccctcaagattgtccattccggcgat

SEQ ID NO: 2971 - DNA, 570 bp, Triticum aestivum
  Clone ID: uC-tsfl9316019b03b1
cttcccgtacctagcaaatggtaagccaagaaagccaactgacggcattgcacatgagctgacaagtaatgctgctgctgctattcaacgagatcgattctaacctcaaagcgcccagatcccaatgacgagctcgtcgacgatgtccaccacgttgcagtcgcgccatgggccccgaatgcgaaccccgtcgacatggcctggtccgttgtgccggtactgcgatccggcgacttgtcccattcgaccatccagttctcgccctcctcgtcggcgcttcagagcttcgccgtgaccctgcaacaggtggccccttcgaagctgtccagccacagccgcagcggcattgagatcctcgtcctcgacgttgctccccttccgctagacacggtgttcgtcaacctggagagcgaattgacaaaacggctggagagcggcgagggcaccttttacaaggaccatccgacaagccccaatgccaaggacgttgccaacatgacgcccgaggagcgtctagccacggcgctcagggcagctctcagcaccctcaagattgtccattcccgcgat

SEQ ID NO: 2972 - DNA, 638 bp, Triticum aestivum
  Clone ID: uC-tsfl9316019c01b1
aacaccttgttacatctagcggatttggatttctttaacaactaaggttcctgtttttaacattttaaatccagggtttttgcccatctccaatagctaacaagaactctttcttttctttacaaatcccaaaacctttactagactttttctgcttctttagcttacttcacctagagtcttctaccttttcttatcattgaatcaacccctttttttttttcttttaaacacatcccaacccaaagtataagcgcccacctagtcctatctagtccgaaaaatgcgaactagaactacatgagacactatctctgtcgttacgaacctaacactttctaccaagcttaatcggaataagacctcacaaacactcacaagttatatagggcttgaaagaaagtctaggtttgggtttgggttaactgctctaataaggagagtcagctacttggattaaaaagagtgatcaaaatgaataagaaaatccaagtattttacggtatccatgagttcaaatttgatgcagacatgataattaaagattagattcacgttcaaattgatagggaatggtatcagatcatgacagtgtggtcgagtagagcaatctaaagcatggtcagtttttttttttt

SEQ ID NO: 2973 - DNA, 588 bp, Triticum aestivum
  unsure (1)..(588): unsure at all n locations
  Clone ID: uC-tsfl9316019c03b1
cctttaacaactaaggctcctgtttttaacacccgaaatccgagggtatttgcccananccaacagcgaacaagaactcaggcttttctttacaaatcccaaaaccttcactagactttgtgtgcttctttagcttacttcacctagaggcttctaccttttcttatcatcgaatcaacccctttctttttttcttttaaacacatcccaacccaaagtataagcgcccacctagtcctatctagtccgaaaaatgcgaactagaactacatgagacactatctctgtcgttacgaacctaacactttctaccaagcttaatcggaataagacctcacaaacactcacaagctatatagggcttgaaagaaagtctaggtttgggtatgggataactgctctaataaggagagtcagctacttggattaaaaagagtgatcaaaatgaataagaaaatccaagtattttacggcatccatgagttcaaattggacgcagacgtgagtattaaagattagattcaggttcaaattgatagggaatggtatcagatcatgacagtgcggtcgagtagagcaatctaagca

SEQ ID NO: 2974 - DNA, 558 bp, Triticum aestivum
  unsure (1)..(558): unsure at all n locations
  Clone ID: uC-tsfl9316019c04b1
ctctcttcccgcacctagcaaatggtaagccaagaaagccaactgacggcattgcacatgagtttacaaagttatgctgctgctgctattcaacgagatcgattctaacctcaaagcgcccagatcccaatgacgagctcgtcgacgatgtccaccacgttgcagtcgcgccatgggccccgaatgcgaaccccgtcgacatggcctggtccgttgtgccggtactgcgatccggcgacttgtcccattcgaccatccagttctcgccctcctcgtcggcgcttcagagcttcgccgtgaccctgcaacaggtggccccttcgaagctgtccagccacagccgcagcggcattgagatcctcgtcctcgacgttgctccccttccgctagacacggtgttcgtcaacctggagagcgaattgacaaaacggctggagagcggcgagggcaccttttacaaggaccatccgacaagccccaatgccaaggacgttgccaacatgacgcccgaggagcgtctagccacggcgctcanggcagctctcagcaccctcaaga

SEQ ID NO: 2975 - DNA, 661 bp, Triticum aestivum
  Clone ID: uC-tsfl9316019c05b1
tacatctagcggatttggatttctttaacaactaaggctcctgtttttaacattttaaattcaagggctccttgcccatctccaatagctaacaagaactctttcttttctttacaaatcccaaaacctttactagactttttctgcttctttagcttacttcacctagagtcttctaccttttcttatcattgaatcaacccctttttttttttcttttaaacacatcccaacccaaagtataagcgcccacctagtcctatctagtccgaaaaatgcgaactagaactacatgagacactatctctgtcgttacgaacctaacactttctaccaagcttaatcggaataagacctcacaaacactcacaagttatatagggcttgaaagaaagtctaggtttgggtttgggttaactgctctaataaggagagtcagctacttggattaaaaagagtgatcaaaatgaataagaaaatccaagtattttacggtatccatgagttcaaatttgatgcagacatgataattaaagattagattcaggttcaaattgatagggaatggtatcagatcatgacagtgcggtcgagtagagcaatctaagcctagctcaggttttttttttttcaaattcttgactatgcaacagacactagc

SEQ ID NO: 2976 - DNA, 460 bp, Triticum aestivum
  Clone ID: uC-tsfl9316019c06b1
acgtctagaagtccattcaccacagcgagaaggccttaggtccgggcagctacataccgggcgcgacgaacggcagcaattcggctgggagatcaggcgggatgcactcgatcggcgaccacaccgtcattgagctcaaggggcccgacagaaccggccttctctccgagatcttcgtcgtgctggaggagctacagtgcaacgtcatggcggccgaggcgaggacacacacgacgagggtggcctgcgtgttgtactttaactacgagtcctccgcgcacgacatcgaggactcgtgccgcctgcccacgatcgatgagcggctgttgcacgtgctccacaggcactgcggtggagactacgactactgctactatcggggagcgcacactaactggttcgacggatgcacccacgtggaccgacggctgcaccagctgatgcacgcccacatagacct

SEQ ID NO: 2977 - DNA, 436 bp, Triticum aestivum
  unsure (1)..(436): unsure at all n locations
  Clone ID: uC-tsfl9316019d01b1
aacgagagcgttagagacctcaaagcgcccagcccccaacgacgagcgagncgacgagggccaccacgnngcagccgcgccaggggccacgaaggcgaaccccnggaacatggccagaaccgcngngccggcaccgcgaaccggcgaccaggcccattcgaccatccagtactcgcccttctcgagggcgctaaagagctccgccgggaccctgcaacaggtggccccttagaagcagaccagccacagccgcagcggcaatgagagcctaggaccccacagagcgtccctagcgctagacacggagtacgagaacctggagagcgaaacggcaaaactgctggagagcggcgagggcgcctcttacgaggaccatacgagaagccccaaagccaaggacgttgccgacatgacgcccgaagagcggctagccacg

SEQ ID NO: 2978 - DNA, 470 bp, Triticum aestivum
  unsure (1)..(470): unsure at all n locations
  Clone ID: uC-tsfl9316019d04b1
ccacgaaagccaactgacggcaacgcacacgagatgacaaagtaacgccgcagcggccacgcaacgagagcgaggggaaccaaaaagcgcccagaccccaaggacaagcnacgcgacgaggaccaccagcgggcagccgcgccaagggcccccgaancgccaacccacgcaagacaaaggcacagggcccgaagagcacggcacgcgccgaacccagcgacccagacccagacgaccagccagngagacggccgccccgagggcgcgaaagagcaacgacgagaccccgcaacagggggccccgacgaagaagccagccacagacggagcggcaaagagagcccccgaccccacggagacccccgaccgccagacacggagcacgacaacccggagagcgaacagacaaaacggccggagagcggcgagggcaccccaaacaaggagcagccgacaagccccaaagccaa

SEQ ID NO: 2979 - DNA, 478 bp, Triticum aestivum
  Clone ID: uC-tsfl9316019d05b1
tttttgcccagctgcaatagctagcaagaactctttcttttcttgacaaatgccaaaaccgttactagactttgtgtggtactttagctgacttcacctagaggggtctaccttgtcttatcattgaatcagcccctttttttttttgcttttaaacacatcccagcccaaagtataagcgcccacctagtcctatctagtccgaaaaatgcgaactagaactacatgagacactatctctgtggttacgaacctaacactttctaccaagcttaatcggaataagacctcacaaacactcacaagttatatagggcttgaaagaaagtctaggattgggtttgggttaactgctctaatgaggagaggcagctacggggattaaaaagagtgatcagaatgaataagaaaatccaaggattttacggtatccatgagttcaaagttgatgcagacatgataatgaagattagattca

SEQ ID NO: 2980 - DNA, 650 bp, Triticum aestivum
  unsure (1)..(650): unsure at all n locations
  Clone ID: uC-tsfl9316019f01b1
tcaacactttgttacatctagcggatttggatttctttaacaactaaggttcctgtttttaactttttaaatccaagggcttttgcccatctccaatagctaacaagaactctttcttttctttacaaatcccaaaacctttactagactttttctgcttctttagcttacttcacctagagtcttctaccttttcttatcattgaatcaacccctttttttttttcttttaaacacatcccaacccaaagtataagcgcccacctagtcctatctagtccgaaaaatgcgaactagaactacatgagacactatctctgtcgttacgaacctaacactttctaccaagcttaatcggaataagacctcacaaacactcacaagttatatagggcttgaaagaaagtctaggtttgggtttgggttaactgctctaataaggagagtcagctacttggattaaaaagagtgatcaaaatgaataagaaaatccaagtattttacggtatccatgagttcaaatttgatgcagacatgataattaaagattagattcaggttcaaattgatagggaatggtatcagatcatgacagtngtggcgagtagagcaatctaagcaatggtcagtttttttttttttttaaattc

SEQ ID NO: 2981 - DNA, 490 bp, Triticum aestivum
  unsure (1)..(490): unsure at all n locations
  Clone ID: uC-tsfl9316019f04b1
cccagcgaaaggccagccaagaaagccgacggacggccagctcaggaatgacacagaaangccgccgccgcgaaacaaggagagcgagacgaaccgcaaagcgcccagacccaaangacgagcgcggggaccaggggcaccagccgggcagaacgcgccaagggccccgaaagcgaacccagaggacacggcccgggccgangagccggaaccgcgaaccggcgacaaggaccaaccgaccagccacggcncgccccccgaggcggagcaacagagcaccgccgagacccagcgacaaggggccccaaagaagcaggccagccacagacgcaagggcgacgagagccgagagcacgacgcgggnccccaggcgcgagacacgagagccgccaaccaggagagcgaanggacaaaacagccggagagcggcgagggcaccgacaacaaggaccaaacgacaagccccaaggccaaggacgccaccaacacg

SEQ ID NO: 2982 - DNA, 209 bp, Triticum aestivum
  unsure (1)..(209): unsure at all n locations
  Clone ID: uC-tsfl9316019f05b1
cggcccctgaaaccacaagtgccgaacataaggggaaaccacccacgcagggaaaaacgggcaggggcaaggggcacnaccagccgcacccccaaanncagagagccagggcagaagacccaccggagacgaggccacgacggngaaacagcggacacaaacgggagcaaaccaagcagaaaaaacagccaaacaaaccggcaaagagc

SEQ ID NO: 2983 - DNA, 539 bp, Triticum aestivum
  unsure (1)..(539): unsure at all n locations
  Clone ID: uC-tsfl9316019f06b1
ccaggatggatgccggcacccagcaagagggcagccacgacaagccgactgacggccgagttttggagcttatacagaaangccgctggtgcgattcaacgagagcgattctaacctcaaagcgcccagagcccaacgacgagcgcgtcgaccaggcccaccaggttagcaacggcgccatgggccccaaaggcgaaccccgaggaatggccaggaacgatgagcctgaacggccatccggcgacttggcccatacgaccatccagtgctggccctcctcgggggagctaaaaagaactgcgcgcgaccctgggacaagtggccactgggaagctgtgcagccacaggctgagcgggaatgagatcctcgatcacgacgctgctgcctttgcgctcgacacggtgtccgaagcacctggagagcggaacgacaaaactgctggcgagcggcgagggcacctataagaaggaccatacgacaagtcccaatgccaaggacgttgccaacatgacgcgcgacgagcggctagccacggcgc

SEQ ID NO: 2984 - DNA, 558 bp, Triticum aestivum
  Clone ID: uC-tsfl9316019g01b1
accgatctatccccgcacctagcagaaggtaagccacgaaagccgactgacggcattgtttatgagtgtcaaggaaatgctgctgctgctattcaacgagagcgattctaacctcaaagcgcccagatcccaatgacgagctcgtcgacgaggtccaccacgttgcagtcgcgccatgggccccgaatgcgaaccccgtcgacatggcctggtccgttgtgccggtactgcgatccggcgacttgtcccattcgaccatccagttctagccctcctcgaaggcgctaaagagctctgccgggaccctgcaacaggtggcccctaagaagctgttcagccacagccgcagcgggattgagatcctcgacctacacgctgctcctcttgcgctagacacagagttcgtgaacctggagagcgaatcgacaaaacggctggagagcggcgagggcaccttttacaaggaccatccgacaagccccaatgccaaggacgttgccaacatgacgcccgaagagcggctagccacggcgctcatggcagctctcagcaccctca

SEQ ID NO: 2985 - DNA, 574 bp, Triticum aestivum
  unsure (1)..(574): unsure at all n locations
  Clone ID: uC-tsfl9316019g03b1
agcggatttggattgctttaacaactaaggctgcagccccgaattcntgagttcctagggcgcncgcccatctgcgatagctgacaagaactctgtcttttctttacaaagcccaaaaccttgactagactttttctgcttctctagctgacttcacctagagtctggtacctgttcttatcatggggtcaaccccttttttgttgtctttgaagcacatcccaacccaaaggatgagcgcccacctagtgctatctagcccgaaaaaggcgaactagaactgcatgagacactagctctggggttacgaacctaacactttctaccaagcttaatgggaataagacctcacaaacactcacaagttatatagggcttgaaagaaagcctaggtttgggtgtgggttaactgctctaataaggagagtcagctacttggattaaaaagagtgatcaaaatgaataagaaaatccaaggatttcacggagtccatgaggtcaaagttgaggcagacatgattatcaaagatgtgattcaggttcaaactgataggggatggatcagatcatgaca

SEQ ID NO: 2986 - DNA, 413 bp, Triticum aestivum
  unsure (1)..(413): unsure at all n locations
  Clone ID: uC-tsfl9316019g04b1
attaaaaccttactgcttgattgctgaaaccacaggtttttgacttattggggcacnagccacccagaggaaacggagcaggggcatgcggcactatgacccgcacccaagagngcagagagccagggcagaagaacagcgggcccacagcgcacgacggcgggacagcngcacaaaagggagcaaacccagcaaaaaaaccagncacacaacgcgccacagagcaccaaagcccgacccgagccgacgngcggaaagaggagatacgaagagccgccgcaaccagtagcccatgggaaaaacagctcagacgcgcgagcaagccatgagagactggagctgacagtcaccaccgagcgcttgggggtgcgatagtattcccaaaaatcaaagaagcttgacttttatgaaac

SEQ ID NO: 2987 - DNA, 665 bp, Triticum aestivum
  unsure (1)..(665): unsure at all n locations
  Clone ID: uC-tsfl9316019g06b1
aacactgtgttacatgtagcggatttggatttctttaacagactaagcgcctcctcggcccgaactantttaaatttcagggctnncgcccatctgcaatagctaacaagaactctttcttttctttacaaatcccaaaacctttactagactttttctgcttctttagcttacttcacctagagtcttctaccttttcttatcatggaatcaacccctttttttttttcttttaaacacatcccaacccaaagtataagcgcccacctagtcctatctagtccgaaaaatgcgaactagaactacatgagacactatctctgtcgctacgaacctaacactttctaccaagcttaatcggaataagacctcacaaacactcacaagttatatagggcttgaaagaaagactaggtttgggtttgggttaactgctctaataaggagagtcagctacttggattaaaaagagtgatcaaaatgaataagaaaatccaagtattttacggtatccatgagttcaaatttgatgcagacatgataattaaagattagattcaggttcaaattgatagggaatggtatcagatcattgacagtgtggtcgagtagagcaatctaagcatggctcagttttttttttttcaaattattgacttgcacag

SEQ ID NO: 2988 - DNA, 593 bp, Triticum aestivum
  Clone ID: uC-tsfl9316019h01b1
taacactttgttacatctagcggatttggatttctttaacaactaaggttcctgggcgtaactctttaaatcctagggctatggcccatctgcaatagctaacaagaactctttcttttctttacaaatcccaaaacctttactagactttttctgcttctttagcttacttcacctagagtcttctaccttttcttatcattgaatcaacccctttttttttttcttttaaacacatcccaacccaaagtataagcgcccacctagtcctatctagtccgaaaaatgcgaactagaactacatgagacactatctctgtcgttacgaacctaacactttctaccaagcttaatcggaataagacctcacaaacactcacaagttatatagggcttgaaagaaagtctaggtttgggtttgggttaactgctctaataaggagagtcagctacttggattaaaaagagtgatcaaaatgaataagaaaatccaagtattttacggtatccatgagttcaaatttgatgcacacatgataattaaagattagattcacgctcaaattgatagggaatggtatcagatcatgaca

SEQ ID NO: 2989 - DNA, 425 bp, Triticum aestivum
  unsure (1)..(425): unsure at all n locations
  Clone ID: uC-tsfl9316019h03b1
gaacacgagggaaccggacgcgcagcagagaggcgcgccacgacagccgacggagcgcagaagctctggagcggacagggcaangccgcagcgtgcgatacaacgagagcgagccgaaccgcaaagcgcccagaccccaacgacgagcgcgccgaccaggaccaccagggtgcagacgcgccaggggcccccgaaagcgaaccccagggacaaggcccggaccagtgagccggaaccgcaaaccggcgacaagcaccaagcgcccacccaggcccagcccgaccggaaagcgcgaacaagaactgccggggccacgaacccggaggacacgaaccagacacacaccaccacagcgaacgggaaacgaccccacaaacacccccaagcaacacagggctggaaagaaagaccaggagagggcacgg

SEQ ID NO: 2990 - DNA, 544 bp, Triticum aestivum
  unsure (1)..(544): unsure at all n locations
  Clone ID: uC-tsfl9316019h04b1
agcccatttggattcctttaacaactaaggctgctgccccaaattctgaaattcctagggcgcncgcccatcaccaatagctgacaagaactcttccctttctttacaaatcccaaaaccttgactagactttgtctgcttctttagctgactccacctagaggcgtctacctcgtcttatcattgagtcaaccccttttttgttttcttttaaacacatcccaacccaaagtataagcgcccacctagtcctatctagtccgaagaatgcgaactagaactgcatgagacactatctctgtcgttacgaacctaacactttctaccaagcttaatcggaataagacctcacaaacactcacaagttatatagggcttgaaagaaagtctaggtttgggtgtgggttaactgctctaataaggagagtcagctacttggattaaaaagagtgatcaaaatgaataagaaaatccaaggattttacggaatccatgagttcaaagttgatgcacacatgattattaaagattggattcacgctca

SEQ ID NO: 2991 - DNA, 395 bp, Triticum aestivum
  unsure (1)..(395): unsure at all n locations
  Clone ID: uC-tsfl9316019h06b1
ccggggcgacccacgttgccgcgttggtcccgcngacgcccacgaacaaggactttgaaaaaccgaagccggcncacaccacagcgagaaacggaggcgagaagcccacgagcgccacaagaagaggggggcaccacaggccccaaaccaagaaaacaacagnccgacnaacaggaaccccgaggaaaanggggcgaaggcagcccgagacgagcccgggaaaacaccgaccgcacagaccccaaaagcccaaggcgccccgacaggaaaanacaccccagcgaagccaccaacaggaccccgaggacggaganacaccaccgacagccagcccaagcaccaaccgcgcaccaacaaagacagggagaaaggaggaagcaangacaaaaccccaa

SEQ ID NO: 2992 - DNA, 500 bp, Triticum aestivum
  unsure (1)..(500): unsure at all n locations
  Clone ID: uC-tsfl9316020a05b1
aagccaagaaagccaactgacggcatngcacattagcagtcatgaaangcngcngcngctatggaacgagatcgattttaacctcaaagcgcccagatcccaatgacgagctcgttgacgatgtccaccacgttgcagtcgcgccatgggccccgaatgcgaaccccgtcgacatggcctggtccgttgtgccggtactgcgatccggcgacttgtcccattcgaccatccagttctcgccctcctcgtcggcgcttcagagcttcgccgtgaccctgcaacaggtggccccttcgaagctgttcagccacagccgcagcggcattgagatcctcgttctcgacgttgctccccttccgctagacacggtgttcgtcaacctggagagcgaatcgacaaaaccgctggagagcggcgagggcaccttttacaaggaccattcgacaagccccaatgccaaggacgttgccaacatgacgcccgaggagcggctagccacg

SEQ ID NO: 2993 - DNA, 549 bp, Triticum aestivum
  unsure (1)..(549): unsure at all n locations
  Clone ID: uC-tsfl9316020a06b1
ccgcacctcgcaaatggtacagccaagaaagtcaactgacggcattgcacattagcagtcatgaaangccgcngcngctatncaacgagatcgattttaacctcaaagcgcccagatcccaatgacgagctcgtcgacgatgtccaccacgttgcagtcgcgccatgggccccgaatgcgaaccccgtcgacatggcctggtccgttgtgccggtactgcgatccggcgacttgtcccattcgaccatccagttctcgccctcctcgtcggcgcttcagagctttgccgtgaccctgcaacaggtggccccttcgaagctgtccagccacagccgcagcggcattgagatcctcgtcctcgacgttgctccccttccgctagacacggtgttcgtcaacctggagagcgaattgacaaaacggctggagagcggcgagggcaccttttacaaggaccattcgacaagccccaatgctcaggacgttgccaacttgacgcccgaggagcgtctagccacggcgctcagggcagctctcagcaccctcaag

SEQ ID NO: 2994 - DNA, 280 bp, Triticum aestivum
  unsure (1)..(280): unsure at all n locations
  Clone ID: uC-tsfl9316020a07b1
caaaagggcagccacgaaagccgaccgacggcaccgcacaatagcaatcaaagaaacgccgcgcggccaggggcgagagcaaagagaaacgccggagcccacaccccaacgacgagcgagncgacgaggaccaccacagcgcagacgggccaggggccccgaaggcgaaccccggcgacaaggccgaggaaagacgagccggaacgagcgaacacgggcgacgaggaccaaacagaccagaacagagcaagcccaaccgacggggagagcaaaaaaagaa

SEQ ID NO: 2995 - DNA, 469 bp, Triticum aestivum
  unsure (1)..(469): unsure at all n locations
  Clone ID: uC-tsfl9316020a09b1
caaccccgcaaagggccagccaagaaagccaactgacggcanngcacaatagcagtcatagaaangccgccgccgccanggaacgagatcgaagctaaccgcaaagcgcccacancccaangacgagcgcgnngacgaggaccaccacgcggcagacgcgccaggggccccgaaggcgaaccccgacgacacggcccggaccagagagccggaacggcgacccggcgacgaggcccaaacgaccaaccagcgcacgcccgccgcgggggcgccacagagacacgccgcgaccccgcaacaggcggccccgacgaagcagaccagccacagccgcagcggcaaagagaaccacgaccacgacagagccccccggccgccagacacggaggacgacaacccggagagcgaanagacaaaacggcaggagagcggcgagggcaccnanaacaaggaccaaccgacaagcccc

SEQ ID NO: 2996 - DNA, 613 bp, Triticum aestivum
  Clone ID: uC-tsfl9316020a11b1
cactttgttacatctagcgcatttggatggctttaacaactaaggctcctgcctttaacatcttatagctaagggctatcgcccatctgcaatagctaacaagaactctttcttttctttacaaatcccaaaacctttactagactttttctgcttctttagcttacttcacctagagtcttctaccttttcttatcattgaatcaacccctttttttttttcttttaaacacatcccaacccaaagtataagcgcccacctagtcctatctagtccgaaaaatgcgaactagaactacatgagacactatctctgtcgttacgaacctaacactttctaccaagcttaatcggaataagacctcacaaacactcacaagttatatagggcttgaaagaaagtctaggtttgggtttgggctaactgctctaataaggagagtcagctacttggattaaaaagagtgatcaaaatgaataagaaaatccaagtattttacggtatccatgagttcaaagttgatgcacacatgattattaaagattagattcacgctcaaattgatagggaatggtatcagatcaatgacagtgtgggcgagtagagcaatct

SEQ ID NO: 2997 - DNA, 480 bp, Triticum aestivum
  Clone ID: uC-tsfl9316020a12b1
tgccgcagctgcaattcaccgcgagcgcttctaacctcatagagcccagagccccaccgacgagcgcgtcgacgaggtccaccagcttacagaaccgccaggggccccccatgcgaaccccgtcgcaagccctggtccgtagtgcctgtacacgccatccgagcgacttgtgctatgcgaccatccagttctagccctcctggaaggagctaactagaactgccgggaccactctacaggtggtcactaacaagctactcaaccacaggcgaagtgggaatgagatcctcgaaccacacgcaggttctcttgcgcttgacacagagtccagcgacctgtagagcgaaacgacacaactgatggggagcggcgagggcgcctataacgagggccctacgacaagccccaaagccaaggacgttaccgacatgacgcccgcagagcggctagccacagtactatggcagatgcagcacgctc

SEQ ID NO: 2998 - DNA, 437 bp, Triticum aestivum
  unsure (1)..(437): unsure at all n locations
  Clone ID: uC-tsfl9316020b04b1
cggatttggacggctttaacaactaaggctcctgtctttaacactggaaagcttagggctattgcccatctgcaatagctaacgaggaactctttattttctttgggagtgccaaaacctttactagactttgtctgcttctttagcttacttcacctagaggcgtgtaccttttcttatcattgagtcaacccctttttttttttcttgtaaacacatcccaacccaaaggatgagcgcccacctagtcctatctagtccgaaaaatgcgaactagaactacatgagacactatctctggcgatacgaacctaacactntctaccaagcttaatcggaataagacctcacaaacactcacaagttatatagggcttgaaagaaagtctaggttcgggttcgggttaactgctctaataaggagagtcggctacttg

SEQ ID NO: 2999 - DNA, 478 bp, Triticum aestivum
  unsure (1)..(478): unsure at all n locations
  Clone ID: uC-tsfl9316020b05b1
acatttagcggatatggactgctttaacaactaaggttcctgtttttaacatctgaaagcttagggcttttgcccatctccaanagctaacaggaactctttcttttctttacaaatcccaaaacctttactagactttgtctgcttctttagcttacttcacctagaggcttctaccttttcttatcattgaatcaaccccttttttgttttcttttaaacacatcccaacccaaagtataagcgcccacctagtcctatctagtccgaaaaatgcgaactagaactacatgagacactatctctgtcggtacgaacctaacactttctaccaagcttaatcggaataagacctcacaaacactcacaagttatatagggcttgaaagaaagtctaggtttgggtttgggttaactgctctaataaggagagtcagctacttggattaaaaagagtgatcaaaatgaataagaaaat

SEQ ID NO: 3000 - DNA, 507 bp, Triticum aestivum
  Clone ID: uC-tsfl9316020b06b1
acatgtagcgcactttggattcctttaacaactaaggttcctgtttttaacattaaaagctagggtttttgcccatctccaatagctaacaagaactctttcttttctttacaaatcccaaaacctttactagactttttctgcttctttagcttacttcacctagagtcttctaccttttcttatcattgaatcaacccctttttttttttcttttaaacacatcccaacccaaagtataagcgcccacctagtcctatctagtccgaaaaatgcgaactagaactacatgagacactatctctgtcgttacgaacctaacactttctaccaagcttaatcggaataagacctcacaaacactcacaagttatatagggcttgaaagaaagtctaggtttgggtttgggttaactgctctaataggagagtcagctacttggataaaaagagtgatcaaaatgaataagaaaattcaagttttttacggtatccatgagttcaaat

SEQ ID NO: 3001 - DNA, 487 bp, Triticum aestivum
  Clone ID: uC-tsfl9316020b07b1
tagcggatgtggactcctttaacagctaagggtgctgtccttaacattggagagctaagggctattgcccagcggcaatagctaacaagaactctttcttttttttacgatccgcaaaacctttactagactttgtctggttctttagcttacttcacctagagtgttctaccttttcttatcatggagtcaaccccttttttgttttcttttaaacacatcccaacccaaagggtgagcgcccacctagtcctatctagtccgaagaatgcgaactagaactacatgagacactatctctgtcgttacgaacctaacgactttctaccaagcttaatcggaataagacctcacaaacactcacaagttatatagggcttgaaagaaaggctaggtttgggtttgggctaactgctctaataaggagagggaggtacttggattaaagagagtgatcaaaatgaataagaaaattcaagggttttac

SEQ ID NO: 3002 - DNA, 480 bp, Triticum aestivum
  unsure (1)..(480): unsure at all n locations
  Clone ID: uC-tsfl9316020b08b1
tacatctagcggatttggatttctttaacaactaaggttcctgtttttaacattttaaagcttangggctaatgcccatctccaatagctaacaggaactctttcttttctttacaaatcccaaaacctttactagactttttctgcttctttagcttacttcacctagagtcttctaccttttcttatcattgaatcaacccctttttttttttcttttaaacacatcccaacccaaagtataagcgcccacctagtcctatctagtccgaaaaatgcgaactagaactacatgagacactatctctgtcgttacgaacctaacactttctaccaagcttaatcggaataagacctcacaaacactcacaagttatatagggcttgaaagaaagtctaggtttgggtttggggtaactgctctaataaggagagtcagctacttggattaaaaagagtgatcaaaatgaataagaaaat

SEQ ID NO: 3003 - DNA, 515 bp, Triticum aestivum
  unsure (1)..(515): unsure at all n locations
  Clone ID: uC-tsfl9316020b09b1
catctagcggatttggatttctttaacaactaaggttcctgtttttaacattttaaagctaagggactantgcccatctccaatagctaacaagaactctttcttttctttacaaatcccaaaacctttactagactttttctgcttctttagcttacttcacctagagtcttctaccttttcttatcattgaatcaacccctttttttttttcttttaaacacatcccaacccaaagtataagcgcccacctagtcctatctagtccgaaaaatgcgaactagaactacatgagacactatctctgtcgttacgaacctaacactttctaccaagcttaatcggaataagacctcacaaacactcacaagttatatagggcttgaaagaaagtctaggtttgggtttgggttaactgctctaataaggagagtcagctacttggattaaaaagagtgatcaaaatgaataagaaaatccaagtattttacggtatccatgagttcaaatttgat

SEQ ID NO: 3004 - DNA, 362 bp, Triticum aestivum
  Clone ID: uC-tsfl9316020b10b1
acctagcagagaggtaagtcacgacagccgactgtcggcattgcacatgagcggtaaggttttgctgctgctgctatacaacgagagcgattttaacctcatagcgcccagatcccaatgacgagctcgtcgacgaggtccaccacgttgcagtagcgccatgggcccccaatgcgaaccccgtggacatggcctggttcgttgtgccggtacagcgatccggcgactagtcccatgcgaccatccagttctagccctcctcgacagcgctaaagagctctgccgggaccctgcaacaggtggcccctaagaagctgttcagtcacaggcgtagtgggattgagatcctccaactagacgta

SEQ ID NO: 3005 - DNA, 625 bp, Triticum aestivum
  Clone ID: uC-tsfl9316020b11b1
tgttacatctagcggatttggatttctttaacaactaaggttcctgtttttaacatttaaagctagggcatttgcccatctccaatagctaacaagaactctttcttttctttacaaatcccaaaacctttactagactttttctgcttctttagcttacttcacctagagtcttctaccttttcttatcattgaatcaacccctttttttttttcttttaaacacatcccaacccaaagtataagcgcccacctagtcctatctagtccgaaaaatgcgaactagaactacatgagacactatctctgtcgttacgaacctaacactttctaccaagcttaatcggaataagacctcacaaacactcacaagttatatagggcttgaaagaaagtctaggtttgggtttgggttaactgctctaataaggagagtcagctacttggattaaaaagagtgatcaaaatgaataagaaaatccaagtattttacggattccatgagttcaaatttgatgcagacttgataattaaagattagattcaggtcaaattgatagggaatggtttcagatcatgacagtgtgggcgagtagagaatttaagcatggtcagtttttttttt

SEQ ID NO: 3006 - DNA, 92 bp, Triticum aestivum
  Clone ID: uC-tsfl9316020c06b1
gcggtcgaggaaccaagcttataaacgcttttgtgcgacgccaaagcccaacgagaacgatacctaatttcaaggcactggcacaaccggta

SEQ ID NO: 3007 - DNA, 273 bp, Triticum aestivum
  unsure (1)..(273): unsure at all n locations
  Clone ID: uC-tsfl9316020c07b1
gagcttctgcattatttcacggcgaccgccggcaaggacgagaagaacgctctcggaggcgaggcccaaccgaccaaggcccncgacaagggccccacgnagaagaacccggacgacgcccccggcccnaacacgggggagagcacgacggagccngacacggacgccagcggacagacgaacgagaggagaagcacccagaagnggccggacagcggggagaggacaagcccgaagacgcagcagccacgggcgcaccaaacgcaggcgccc

SEQ ID NO: 3008 - DNA, 292 bp, Triticum aestivum
  unsure (1)..(292): unsure at all n locations
  Clone ID: uC-tsfl9316020c08b1
ggggccagccacgaaagccgactgacgggctagcacatgagcattaaagatatggtgcagcggccacccaccgagagcgagagtaaccttaaagcgcccagaccccaacgacaagcgcgncgacgagggccaccacggnagcagcgccccacgggccccgaaggcgaaccccggggacaaggccgggaccgccgagccgggacggccagccggagacgagccccaagcgaccaaccagngctcgcccgccccgacggcgcgagaaagaaccgccgggacccggagacagggg

SEQ ID NO: 3009 - DNA, 529 bp, Triticum aestivum
  Clone ID: uC-tsfl9316020c10b1
caccgtaccttttatcggaagcaccaaccatggcggcggcggcgaagatagcgccgaccatgctctcgtcggacttcgccaacctcgcctcggaggccgagcgcatggtccacctcggcgccgactggctccacatggacgtcatggatgggcacttcgttcctaatttaactattggagctccagtgattgagagcttgaggaagcacacaaaggcatatttggactgccatctcatggtcacaaatccttccgattatgtagaggcatttggaaaagctggtgcctcaggattcacattccatatagaagtagcgagggataactggaaagagctcacccaaagcattaaagcaaagggcatgcggtctggtgtatcattgaagcctggtactcctgtggaggatgttttcctcctggaggaagcagaaacccctgtagagttggttctcgtgatgacggtcgagcctggctttggtggccagaagttcatgcccgagatgatggataagtacgtacgctgaggaag

SEQ ID NO: 3010 - DNA, 609 bp, Triticum aestivum
  unsure (1)..(609): unsure at all n locations
  Clone ID: uC-tsfl9316020c11b1
catttagcggatttggacttctttaacaactaaggttcctgtttttaacattttaaagcataagggcatanttcccatcnccaatagctaacaagaactctttcttttctttacaaatcccaaaacctttactagactttttctgcttctttagcttacttcacctagagtcttctaccttttcttatcattgaatcaacccctttttttttttcttttaaacacatcccaacccaaagtataagcgcccacctagtcctatctagtccgaaaaatgcgaactagaactacatgagacactatctctgtcgttacgaacctaacactttctaccaagcttaatcggaataagacctcacaaacactcacaagttatatagggcttgaaagaaagtctaggtttgggtttgggttaactgctctaataaggagagtcagctacttggattaaaaagagtgatcaaaatgaataagaaaatccaagtattttacggtatccatgagttcaaatttgatgcagacatgataattaaagattagattcaggttcaaattgatagggaatggtatcagatcatgacagtgtggtcgagtagagcaatctaagca

SEQ ID NO: 3011 - DNA, 548 bp, Triticum aestivum
  Clone ID: uC-tsfl9316020c12b1
aacactttgttacatctagcggctttggatttctttaacaactaaggttcctgtttttaacatttaaagctagggtttttgcccatctccaatagctaacaagaactctttcttttctttacaaatcccaaaacctttactagactttttctgcttctttagcttacttcacctagagtcttctaccttttcttatcattgaatcaacccctttttttttttcttttaaacacatcccaacccaaagtataagcgcccacctagtcctatctagtccgaaaaatgcgaactagaactacatgagacactatctctgtcgttacgaacctaacactttctaccaagcttaatcggaataagacctcacaaacactcacaagttatatagggcttgaaagaaagtctaggtttgggtttgggttaactgctctaataaggagagtcagctacttggattaaaaagagtgatcaaaatgaataaaaaaatccaagtattttacggtatccatgagttcaaatttgatgcagacatgataaataaaagatta

SEQ ID NO: 3012 - DNA, 321 bp, Triticum aestivum
  unsure (1)..(321): unsure at all n locations
  Clone ID: uC-tsfl9316020d04b1
agccaagacagccgactgacggcatagcacacgagcagataaagaattgccgcngcngcaanncaacgagggcgangcgaaccggaaagcgcccagaccccaacgacgagcgcgnngacgaggaccaccacgccgcagccgcgccaggggccccgaaagcgaaccccggcgacacggcccggaccggagggccgggaccgagaaccggcgacaagggccaaccgaccacccagggcncgcccgccccgacggcgcgaaagagcaccgccgggacccagcaacagggggccccgacaaaggaagcccaaccacagccgcagc

SEQ ID NO: 3013 - DNA, 629 bp, Triticum aestivum
  Clone ID: uC-tsfl9316020d05b1
acatctagcggctttggatttctttaacaactaaggtttttgtttttaacattggaaagaatagggtttttgcccatctccaatagctaacaagaactctttcttttctttacacatcccaaaacctttactagactttttctgcttctttagcttacttcacctagagtcttctaccttttcttatcattgaatcaacccctttttttttttcttttaaacacatcccaacccaaagtataagcgcccacctagtcctatctagtccgaaaaatgcgaactagaactacatgagacactatctctgtcgttacgaacctaacactttctaccaagcttaatcggaataagacctcacaaacactcacaagttatatagggcttgaaagaaagtctaggtttgggtttgggttaactgctctaataaggagagccagctacttggattaaaaagagtgatcaaaatgaataagaaaatccacgttttttacggtatccatgagttcaaatttgatgcagacatgataattaaagattagattcaggttcaaattgatagggaatggtatcagatcatgacggggtgggcgagtagagcaatctaagcatggttcacatttttttttttt

SEQ ID NO: 3014 - DNA, 368 bp, Triticum aestivum
  unsure (1)..(368): unsure at all n locations
  Clone ID: uC-tsfl9316020d06b1
taacaactaaggggcttggatttaacattcnaaagcttagggtttttgcccancnccaaaagccaacaagaacgctttcggggcnaaacacagcccaaaaccngnacgagacgggggccgcggcnanagcacacgacacccagaggcagcaaccccggcagaacaacgaagcaaccccggngcgncnggacgagaaacacagcccaacccaaagnagaagcgcccacccaggccnaacnaggccgaaaaaggcgaaccagaaccacaggagacacnancncgggcgnnacgaaccnaacaccgccnaccaagccnaancggaaaaagaccncacaaacacccacaagnnaaanagggcgcgaaagaaa

SEQ ID NO: 3015 - DNA, 376 bp, Triticum aestivum
  unsure (1)..(376): unsure at all n locations
  Clone ID: uC-tsfl9316020d08b1
gagggctttaacaactgaggccgctgcgcttaacacaggaaagataagggttttcgcccagcngcaatagctcacgggaactcttaattttcttgacccaacccaaaaccgtgacgagactgtgcccggtccattagcttactgcaccgcgagggggctacctggccttatcagggaatcaaccccaggaatgtgtgcctgtaaacacatcccaacccagagggtaagcgcccacccagtgctatctagcccgaaaagtgcgaactagaactacaggagacactatccctgtggttacgaacctaacgcttcctaccaggcttaatcggaataagacctcacaaacactcacaggtgatatagggcttgaaagaaa

SEQ ID NO: 3016 - DNA, 100 bp, Triticum aestivum
  unsure (1)..(100): unsure at all n locations
  Clone ID: uC-tsfl9316020d11b1
acgcctcagcccgttaccctaaaaacagggagacttccagatgattcggcgcgcgagnccaccaagaagcagggtgcacctaaaaagccgcaggcggacc

SEQ ID NO: 3017 - DNA, 163 bp, Triticum aestivum
  Clone ID: uC-tsfl9316020e04b1
cagaaggcgaaccgcggaggcaagcacgaggaacgacgagacggaacggcgacccggggacgcggggagaacaaccaaccagggaaggccccccgacggggagcgaaaaagaaccggcgcgaacccgggggcagagcggacccgaggaaagccagcgcacacc

SEQ ID NO: 3018 - DNA, 296 bp, Triticum aestivum
  unsure (1)..(296): unsure at all n locations
  Clone ID: uC-tsfl9316020e05b1
cagccaagaaagccaaccgacggcatcgcacacgagcaataaagattgccgccgngccaccaacgagagcgagggaaccgaaagcgcccgagcccacgaccagcccgnngcgaagccaccacgacgcagacgcccaagggccccgaaggcgaaccccgaagacgggacaggccgaaggccggacagcgaccggcgacgagcccaaacgaccaacagagccgccccccgggggcgcggcagagcaacgccagaccccgcacaggcggccccaagaagcaggccgccacagccgagcg

SEQ ID NO: 3019 - DNA, 403 bp, Triticum aestivum
  unsure (1)..(403): unsure at all n locations
  Clone ID: uC-tsfl9316020e06b1
cganggaccccaagggagacaacggttttatcaattcgcccaagatgaccgtcggggtcaacaaatatcccaataatcagaatgggaaggaaacagacggcaaacacaatggtgttaacaacaacaatggaggcaacagcaacaacaactctgttgacaagcgcttcaaaacattgccaacaagcgagatgctaccgaggaatgaagttcttggtggatacatctttgtctgcaacaatgataccatgcaggaggatctcaagagacagctttttggcttgccagcaagatatcgtgattcagtccgagccatcactcctggtctacctctttttctctacaactacacgacccatcagctacatggggtgtttgaggctcccagttttggaggatcaaacat

SEQ ID NO: 3020 - DNA, 449 bp, Triticum aestivum
  unsure (1)..(449): unsure at all n locations
  Clone ID: uC-tsfl9316020e08b1
aagacagccgactgacggcatagcacangagcagctaaagatttggngcagcngcnanncaacgagagcgantttaaccgcaaagagcccagaccccaccgacgagcgcgnngacgagggccaccacgccgcagncgcgccaggggccccgaaggcgaaccccgacgacaaggcccgggccgaagnggccggacagcgaaccggcgacaaggcccaagcgaccacccagnncncgcccgccccgaaggcgcgaaagagcaccgccgggaccccgcaacagggggccccnaagaagccagccagccacaggcgcagcggcgaagagacccccgaccccgacgcagcgcccccaccggcagacacggaggncgggaacccggagagcgaaacgacaaaacggcgggagagcggcgagggcaccnnnaacaaggaccanccgacaagcccca

SEQ ID NO: 3021 - DNA, 609 bp, Triticum aestivum
  unsure (1)..(609): unsure at all n locations
  Clone ID: uC-tsfl9316020e09b1
gacgcctttaacaactaaggtttttgtttttaacacangaaagataaggttttttgcccagcnccaanagcnaacaagaactctttcttttctttacaaatcccacaacctttactagactttttctgcttctttagcttacttcacctagaggcttctaccttttcttatcattgaatcaacccctttttttttttcttttaaacacatcccaacccaaagtataagcgcccacctagtcctatctagtccgaaaaatgcgaactagaactacatgagacactatctctgtcgttacgaacctaacactttctaccaagcttaatcggaataagacctcacaaacactcacaagttatatagggcttgaaagaaagtctaggtttgggtttggggtaactgctctaataaggagagtcagctacttggattaaaaagagtgatcaaaatgaataagaaaatccaaggattttacggtatccatgagttcaaagttgatgcagacatgataattaaagattagattcaggctcaaattgatagggaatggtatcagatcatgacagtgtggtcgagtagagcaatctaagcatggttcagttttttttt

SEQ ID NO: 3022 - DNA, 586 bp, Triticum aestivum
  unsure (1)..(586): unsure at all n locations
  Clone ID: uC-tsfl9316020e10b1
gatggctttaacagctaaggttcttgcccttaacacnggaaagcttagggtttttgcccaccngcaatagctaacaggaactctttattttctttacacatcccaaaacctttactagactttgtctgcttctttagcttacttcacctagagtcttctaccttttcttatcattgaatcaacccctttttttttttcttgtaaacacatcccaacccaaagtataagcgcccacctagtcctatctagcccgaagaatgcgaactagaactacatgagacactatctctgtcgttacgaacctaacactttctaccaggcttaatcggaataagacctcacaaacactcacaagttatatagggcttgaaagaaagcctaggtttgggtttgggttaactgctctaataaggagagtcagctacttggattaaaaagagtgatcaaaatgaataagaaaatccaagtcttttacggtatccatgagttcacagttgatgcagacatgataattaaagattagatgcacgctcaaattgtagggaatggatcagatcatgacagtgtgggcgagtagagcaatcta

SEQ ID NO: 3023 - DNA, 496 bp, Triticum aestivum
  unsure (1)..(496): unsure at all n locations
  Clone ID: uC-tsfl9316020e11b1
aagaaagccaactgtcggcattgcacangagcagtcaaagatattttgcngcngcnatncaacgagagcgattttaaccttaaagcgcccagatcccaatgacgagctcgtcgacgatgtccaccacgttgcagtcgcgccatgggccccgaatgcgaaccccgtcgacatggcctggtccgttgtgccggtactgcgatccggcgacttgtcccattcgaccatccagttctcgccctcctcgtcggcgcttcagagcttcgccgtgaccctgcaacaggtggccccttcgaagctgtccagccacagccgcagcggcattgagatcctcgttctcgacgttgctccccttccgctagacacggtgttcgtcaacctggagagcgaattgacaaaacggctggagagcggcgagggcaccttttacatggaccattcgacaagccccaatgccaaggacgttgccaacatgacgcccgaggagcgtctagccacg

SEQ ID NO: 3024 - DNA, 177 bp, Triticum aestivum
  unsure (1)..(177): unsure at all n locations
  Clone ID: uC-tsfl9316020f04b1
ccaagggccccaaaggcgaaccccgcggcgnggccgaggaacgagagccggaacgcgcganccgcggagcgagggccaaacaaccacacagagatggcccnccgccggggagcaacaaagaaccgccgcgacccggcaacaagcggcccgagggaagcggaccacccacagccgcag

SEQ ID NO: 3025 - DNA, 231 bp, Triticum aestivum
  unsure (1)..(231): unsure at all n locations
  Clone ID: uC-tsfl9316020f08b1
gaggcggccaccaggccagagcagggaaccaaccccgggncggggagcaggcaaacacaacccaacccaaaggagaagcgcccacccagnccganccagnccgaaaaacgcgaacnagaacgacaggagacacnagccggggcgcacgaacccaacacncacgaccaagcggaangggaanaagaccccacaaacacacacaagngacanagggccagaaagaaagcccag

SEQ ID NO: 3026 - DNA, 236 bp, Triticum aestivum
  Clone ID: uC-tsfl9316020g04b1
agcagatgagagattcctggcgaaggacgagaccaaacaggaaccaggggagatgaagaccaaaaggccaacccgcaaccggcggccgaggcgcacggaggagacgacaagctagcagggcgaaacgggaaagagccctaaaccggccaggcggcaagagactgacaaacagcacccagccccaagagccagggcccacccacaccaaccagatgcgcctccagccaagtggaaca

SEQ ID NO: 3027 - DNA, 578 bp, Triticum aestivum
  Clone ID: uC-tsfl9316020g07b1
tacatctagcggatttggatttctttaacaactaaggttcctgcttttaacatattaaagcttagggctatcgcccatctccaataggtaacaatgaactctttcttttctttacaaatcccaaaacctttactagactgtttctgcttctttagcttacttcacctagagtcttctaccttttcttatcattgaatcaacccctttttttttttcttttaaacacatcccaacccaaagtataagcgcccacctagtcctatctagtccgaaaaatgcgaactagaactacatgagacactatctctgtcgttacgaacctaacactttctaccaagcttaatcggaataagacctcacaaacactcacaagttatatagggcttgaaagaaagtctaggtttgggtttgggttaactgctctaataaggagagccagcttcttggataaaaagagtgatcaaaatgaataagaaaatccaagcgttttacgggatccatgagttcagatttgatgcagacatgataattaaagaatagattcaggttcaaattgatagggaatggtttcagatcat

SEQ ID NO: 3028 - DNA, 578 bp, Triticum aestivum
  unsure (1)..(578): unsure at all n locations
  Clone ID: uC-tsfl9316020g08b1
tacatctagcggatttggatttctttaacaactaaggttcctgcnctaacatatatagcctagggctatcgcccatctccaatagctaacaagaactctttcttttctttacaaatcccaaaacctttactagactttttctgcttctttagcttacttcacctagagtcttctaccttttcttatcattgaatcaacccctttttttttttcttttaaacacatcccaacccaaagtataagcgcccacctagtcctatctagtccgaaaaatgcgaactagaactacatgagacactatctctgtcgttacgaacctaacactttctaccaagcttaatcggaataagacctcacaaacactcacaagttatatagggcttgaaagaaagtctaggtttgggtttgggttaactgctctaataaggagagtcagctacttggattaaaaagagtgatcaaaatgaataagaaaatccaagtattttacggaatccatgagttcaaatttgatgcagacatgataattaaagattagattcaggttcaaattgatagggaatggtatcagatcatga

SEQ ID NO: 3029 - DNA, 465 bp, Triticum aestivum
  unsure (1)..(465): unsure at all n locations
  Clone ID: uC-tsfl9316020g12b1
cggatttggattgctttaacaactaatgctcctgccttaacatattattgttatggctancgcccatctgcaatagctaacatgaactctttcttttctttacaaatcccaaaacctttactagactttgtctgcttctttagcttacttcacctagagtcttctaccttttcttatcatggagtcaacccctttttttttttcttttaaacacatcccaacccaaaggataagcgcccacctagtcctatctagcccgaaaaatgcgaactagaactacatgagacactatctctgtcgttacgaacctaacactttctaccaagcttaatcggaataagacctcacaaacactcacaagttatatagggctcgaaagaaagtctaggtttgggttcgggttaactgctctaataaggagagtcagctacttggattaaaaagagtgatcaaaatgaataacaa

SEQ ID NO: 3030 - DNA, 258 bp, Triticum aestivum
  unsure (1)..(258): unsure at all n locations
  Clone ID: uC-tsfl9316020h04b1
ccccacccacaaccggcacgagacggggccagcgccaccagcggacagcaccgagaggggcccaccaggccaaaccagagaaacaaccccgggccggagagccgggaaacacaccccaacccaaaggacaagcgcccacccagncctagccagcccgaaaagagcgaacaagaaccgcaggagacacgaaccaggggggcacgaaccaaacgcncaccaccaagcgcaangggaacaagaccccacaaacacacacaa

SEQ ID NO: 3031 - DNA, 233 bp, Triticum aestivum
  unsure (1)..(233): unsure at all n locations
  Clone ID: uC-tsfl9316020h06b1
aaccgcacggcgcccacaccccaacgacgagcgcggcgacgagggccaccacgnngcagccgcgccaggggccccgcaggcgaaccccgaggacaaggcccggacacgaggggccggacagcgaaccggcgacaaagaccaagcgaccacccaggcctagcccgcccggagggcgcgaaagagaaccgccgggaccccgcaacagggggccccgaagaagccgcccagccaca

SEQ ID NO: 3032 - DNA, 316 bp, Triticum aestivum
  unsure (1)..(316): unsure at all n locations
  Clone ID: uC-tsfl9316020h07b1
acggcgcagcngcaaaggggaacgagagatgttaacctccgggacccccccccccaccgacaagagactggacgaggtccaccagcttacttaaccgcgaggggcccaccatgcgaaaccagtgaaccaggcccggtccgttgtgctggtacacgcatcccagcgccaaaggccaaagcgcccacccagtcctagcccggccgaaaagcgcgaacgagaactgccggggacacggtacatggggacacgaaccagacgctcagtaccagagcgaaaggggaaggagaccctacaaacactcacaggtgacataggg

SEQ ID NO: 3033 - DNA, 560 bp, Triticum aestivum
  unsure (1)..(560): unsure at all n locations
  Clone ID: uC-tsfl9316020h08b1
ttccgacttatgcccgcacccagcagatggtgagccacgaaagccgactgacggcattgcacaatagcagtcatggaaangccgctgctgctatacaacgagatcgattttaacctcaaagcgcccagatcccaatgacgagctcgtcgacgatgtccaccacgttgcagtcgcgccatgggccccgaatgcgaaccccgtcgacatggcctggtccgttgtgccggtactgccatccggcgacttgtcccattcgaccatccagttctcgccctcctcgtcggcgctaaagagcttcgccgtgaccctgcaacaggtggccccttcgaagctgtccagccacagccgcagcgggattgagatcctcgacctcgacgctgctccccttgcgctagacacggagttcgtcaacctggagagcgaatcgacaaaacggctggagagcggcgagggcaccttttacaaggaccatccgacaagccccaatgccaaggacgttgccaacatgacgcccgaggagcgtctagccacggcgcttatggcagctctcagcaccctca

SEQ ID NO: 3034 - DNA, 543 bp, Triticum aestivum
  unsure (1)..(543): unsure at all n locations
  Clone ID: uC-tsfl9316020h09b1
cccagcagagagggcagccaacgaaagccgactgacggcagagcacattagcagtcaaagaaangccgccgctgcgatacaacgagatcgagtttaacctcaaagcgcccagagcccaacgacgagcgcgccggcgaggcccaccacggngcagacgcgccaggggccccgaaggcgaaccccggcagcatggccgggaccggagagccggaacggccacccggcgacgaggggccaacgaccacccagngctggccctcctcgggggcgcaaaagagaactgccgcgaccctgcaacaagcggccccagggaagctgtgcagccacagccgcagcgggaatgagatcctcgtcctagacgttgctccccttgcgatagacacggaggccgtcaacctggagagcgaaatgacaaaaccgctggagagcggcgagggcaccttaaacaaggaccatgcgagcagccccaatgccaaggacgttgccaacatgacgcccgacgagcggctagccacggcgctcagggaagctctcagcaccctc

SEQ ID NO: 3035 - DNA, 65 bp, Triticum aestivum
  Clone ID: uC-tsfl9316020h11b1
agctggcacgcatgcgggggccggtcaccgaatttccggggcgcccgaggaacctggcgtatatt

SEQ ID NO: 3036 - DNA, 501 bp, Triticum aestivum
  Clone ID: uC-tsfl9316022a06b1
gcgcttccttgccagggaaaacaccaccgcacatctgcccggccaagtagcagcagcggcatccatggcccccaaggcggagaagaagccggtggcggagaaggccgagaagaccacggaggcgaagaagaccaaggccgagaagcgaccgccggcgtccaaggagggcggcgagaagaaggggaagaagaagtccaagaagagcgtggagacgtacaagatctacatcttgaaggtgctgaagcaggtgcacccggacatcggcatcttctacaaggccatgtccatcatgagctccttcatcaacgacatcttcgagaagctcgccggcgagtccgccaagctcgcccgctacaacaagaagcccaccatgacgtccagggagatccagacgtgcgtgcgtctcgtgctgcccggcgagctcgccaagcacgccgtctgcgagggcaccaaggcctgcaccaagatcacctgctcctagatgggctgttccctgtcatg

SEQ ID NO: 3037 - DNA, 434 bp, Triticum aestivum
  Clone ID: uC-tsfl9316022d04b1
gcgggttgagtcagagtatgaaactgaaggcgaggacattgagcactcgcccaccggtggaagggaagagctggatgaggagggatgcatctcgggccctggcattgatgtcatttgaccttaatgacctgactggagacttggaaggcctgagcccagacgaactggaggttttacaagactgggaagagaagtttaaagagaggtaccctgtggtgggtcatcttcctggtgaaaacggaacagctggtgcccagcctgatcacgaggcagagaaggcctaactctgtgtctgggttcttgtcccgttgcctgtaagttgatgtgtcttttactactgctggactgtgagcggtagagagatgtaatgcgctgacaggtgatgttgtttgtatgtgtgctgcatgagtgtgtgctactgatgcacctgcttt

SEQ ID NO: 3038 - DNA, 545 bp, Triticum aestivum
  Clone ID: uC-tsfl9316022d10b1
cccacgcgtccggtttcagtctcttgagcttttatgttcaggaagatttgctacaagtttgagcacacatttgacactctgaatgccaatgttgtttgacagcacacatttgacactctgaatgccaatgttgtttgacagcacacatttgacactctgaatgccaatgttgtttgacatgacacatttgacactctgaatgccaatgttgtttgacatgacacatttgacactctgaatgccaatgttgtttgtcagtttgtcacttagcttttattatatgctcagcaagatttgatagaaggttgtgcgcctatttgacactctgcatgtttctttgcagttaccacttgtaccactgagagactgttggggcatttcaggccagactgcacccgagctgttcatcatctgtcgtgcaataaactggatccatgttgttgcccttgactaatgagtcgctattgtgatacatcctgtgtaaatgttttgctggctggatgggtatcgctggaacatgaaagtttaccttactgatgcatttt

SEQ ID NO: 3039 - DNA, 325 bp, Triticum aestivum
  Clone ID: uC-tsfl9316022f09b1
gcgaccacgcgtgcggaagccgtcaaggttcgaatccagacccagccggtattggctggacgcctaaccgatgggctcccgcagcttgtccggtccgaaggtgcctttgggctttacaagggaatagttgctctctggggccagcaaataccttacactatgatgaaatttgcatgctaagagaccatcggtgagatggggctcacgcatgctgtggcagaaccaaaagatcaatgcagtaaaccattagaggtagcagatgagctctgaggtgggctcattgctggcgtcttgtgtgctcgtggctattatgctgaccacaacc

SEQ ID NO: 3040 - DNA, 125 bp, Triticum aestivum
  Clone ID: uC-tsfl9316022f10b1
agccggcggaacagggctggaggtcctctagtgggatgtactatccaaccaagctggtgattgtccctgaaaaattatggtacagccaactgtgagtgtcttcgtcctggacttgactttgccaa

SEQ ID NO: 3041 - DNA, 431 bp, Triticum aestivum
  unsure (1)..(431): unsure at all n locations
  Clone ID: uC-tsfl9316022h10b1
gctgcagttctgcactatacatacaccaaattttcagacttaacatccagacgtgatcgctgtggatgcaagcccacgaaggaagatgttaaaagatgtttcatgttggattttgacagagcagcttttataattgcatcaacagctagtgaagaggatatgcttcgctggtacaacgagcgcgtcgtgtggaacgataagcagctcaacctaaagcttctgagaaaaggagtattaacccgcatctatgccccaatggcgatcgtgcaaggcctgcgggagtctggcgtcttcacctccgtcatcagagcggccgtcgacaatgctaaagttcgactgaaggaaagcgttgaccgaaacagcactgatcctgaccatgaagatgaacctagggcattcgtcgcagctaacgctaggaagaantctgacgt

SEQ ID NO: 3042 - DNA, 414 bp, Triticum aestivum
  Clone ID: uC-tsfl9316024a09b1
ccctcgcgtccgcttaagccccccacccaacccccgagcccctcgtctccggcggcggaaggaagcggcagtcatggtgaagggacgcactggacagcgcgtcaggctctacgtccggggcaccatcctcggcttcaagaggtcgaagtcgaaccagtacgagagcacgtcgctggtgcaggtcgagggggtgaacaccaaggaggacgtggcgtggtacgccgggaagcgcctggcgtacgtgtacaaggccaagaccaagagcaacgggacccactaccgctgcctgtggggcaagatcacctcgccgcacggcaactccggcgtcgttcgcgcccagctcaagtccaacctcctcgtcgagttcatggggcgcacggtcagggtattcatgtacccgagcagcatataagg

SEQ ID NO: 3043 - DNA, 344 bp, Triticum aestivum
  Clone ID: uC-tsfl9316024a12b1
ggccaccgttgctcgcgtaccggcggtgggtgggtggcggagtccgtcacgcgtctgcttatcatgtgatggacgctggcggcgggggcttaggcggattacacaggaccgtggaggaggcttccaccatcgggggcatcgcgacggtgtagctgatgcactacttcatccccacgcactggcttctgttatccatcgtcgggcgcgcccagcgctggacgatctaccgaacactactagttactgcatttggagcagtccttcatgttggatcaaccgctcttgtctggataactgcaggtactatggcaaacactatagcaggcgaggagacagtgcataaa

SEQ ID NO: 3044 - DNA, 436 bp, Triticum aestivum
  Clone ID: uC-tsfl9316024c04b1
tcgctctctctctctcggtcggccagtgtcacgaactcgtcgcggcggaggggagagaggggggctgagctcgccgtcgattccaggggagaggaggcggcaagagaggggcggtcaccccggaggaccgaaccctatcggccgcggtcccccctgcatcgaccgccagtcgccgccggtcatggcaggggcggcgccggatcgggcggcgctgaccgtcggcccgggcatggacatgcctatcatgcacgacagcgaccgatacgagctggtgcgggacatctgctccggaacttgggcgtcgcccgcctcatgcgcgaccgccgcaccatggagctagtccccgtcaagtacattgagcgcggtgagaagatagacgagaatgtccagcgtgagatgattcaccatagatcactgtaacatccgaacatcatta

SEQ ID NO: 3045 - DNA, 433 bp, Triticum aestivum
  Clone ID: uC-tsfl9316024e05b1
cggacgcgtggggggcgaggcgagcgagcagcaactccaacaagctacgcagcacacaaccctctccacccccagcaatccatccatccaccccacccccaccccgttttcctcttccctccccggaggattccctgcccgagctcgacaatggcaaacgcttcatcaggagctgggatccatgatgactgcatgctgaggtgtcgggagctcaagtccaacaggatgcaccgtttcataacctacaggctggagaaccagacggagggcattgtggaccaaactggggagcgtgaggcaacctatgacgacttcaccaagaccctacctgagaacgactgccgattcgcagtgtttgacttcgacttcaccaccccggaggatgtgccaaagagcaggatcttctatatcttctggtccccctgcacggcaa

SEQ ID NO: 3046 - DNA, 363 bp, Triticum aestivum
  Clone ID: uC-tsfl9316024f09b1
atgtgttggcttctcctccccactcagtcctcggttcccggcccggttcggttcgttagggtttagtagtggggaagaggaggaagaatggcggacgtcgagtaccgctgcttcgtcggcggtctcgcctgggccaccgacgaccagtccctccagaacgccttgttcaagtacggagacgtcatcgactccaagatcatcactgacagggagacgggccgttcccgtgggttcgggttcgttaccttcgcgtcggacgaggcgatgcgccaggcgatcgaggccatgaacggtcaggacctgtacggtcgtaacatcaccgtgaacgaggcccagtcccgccgctacggcggaggcggtggc

SEQ ID NO: 3047 - DNA, 490 bp, Triticum aestivum
  unsure (1)..(490): unsure at all n locations
  Clone ID: uC-tsfl9316024f11b1
tcggtggaagattcggccttttgcctggtgttttgttccactcttgccgccctagtttccgtcataccggtgttatgttcccggattttgcgttccttacacggttgggtgatttatgggacccccttgactgtttgctttgaataaaactcctccagcaaggcccaaccttggttttaccatttgcctacctaagcctttttcccttgggttctgcagactcaagggtgatctttattttaccccccgggccagtgctcgtcgtgagtgttggtccaacttgtcaaccgccggtggccaccaggggcaactttgtgctggcctaccggaagtttggacaattcggtgtgccctgagaacgagatatgtgcagctcctatcangatttgtcggcacagcgggaggctttgctggtcttgttataccattggcgaaatgtcttggtaaccgggattccgagtctgatcgggtcttcctgggagaaggcata

SEQ ID NO: 3048 - DNA, 418 bp, Triticum aestivum
  Clone ID: uC-tsfl9316024g12b1
cggatgccaacgcacaggcaaagcattacgcctgtgcccgatacccgaaaaattgcattaccaccgccgatccggagtcgaagatgaccaatgaacaaccagtaccgctgatgcttgtgcctgaccaggatgagttcgtgcacctgcaactggcatggtcatggcccttcattgccattgtgtgtatgaggacgagaccatagataaagaggaagtgcgtgtccgcttgctgtgtgatcaacaacaactggacctgaatctgaccctgacgaaagaaaaacaagaactgcctgctgccagagctaaaagcatgagctatgatgacacaagacctaagtctgaactgggcagctggtctacaacgtacagactggtgaatcccaaaaccctcccaactcacaactttagcagcacatac

SEQ ID NO: 3049 - DNA, 452 bp, Triticum aestivum
  unsure (1)..(452): unsure at all n locations
  Clone ID: uC-tsfl9316024h01b1
cacagtcgcagcatcctctcagtcctcaccttcctcccctcgccaccacccaccaaggaaaggaggatgtcttgctgcggcggcaactgcggatgcggcgccggctgcaagtgcggcaacggctgcggcgggtgcaagatgttccccgacgttgaggccaccgccggcgccgccgccatggtcatgcccaccgcctcccacaaggggagctccggcgggttcgagacggccggcggggagaccggcggctgcgactgcaccacctgcaagtgcggcacggcctgcggctgctcctgctgcagctgcaactgagccggcgcccaagaagcccgctcgcgaggcgagcacgaggatgaagaggacaactggacanngcaccaccatcaccaccaccaccatnactagcccgctgatgcgcccgcccgcgcgcgcgctgaataaaataaaaccgc

SEQ ID NO: 3050 - DNA, 295 bp, Triticum aestivum
  Clone ID: uC-tsfl9316025b07b1
aattttaaaatttaaaaaaaaaaaagagaaaaaaaagaaaaaataaaaaaaaataaaacatgataaataggcctggggagttagtgtacagacacctggcgtccccatggtccttcggggcctttgttttttgggggggccgtttttgggttccctggtttcggcccggcggcctccggtttttggtttttcttttggggccccttgtttgttttttcggggccggttttttccccggcggtgggggtggcacccctgggggccgccctttttgtcccttggtactaatctccct

SEQ ID NO: 3051 - DNA, 348 bp, Triticum aestivum
  Clone ID: uC-tsfl9316025c10b1
gttttacatctttggagccatataagtttgtggacttgaatgctgaggccccagaatccggcgacgacgaggaagatgagattgactgggaagaaggctaaagtacagcgactagttgccccgtcttgaattttcatgaagtcagatcacagtgggatgttaaatgataataataatgctgccagatgtatgcatcatatcaaggcttggctgcaaataacatttttctcccagatttgtgaaaagttactataatgtgaagtatgatagtattgatgaagtatgatattgacatccatgcgacgccaaggaattcaaaagaatttgaaagaacttgttcccttttaa

SEQ ID NO: 3052 - DNA, 510 bp, Triticum aestivum
  unsure (1)..(510): unsure at all n locations
  Clone ID: uC-tsfl9316025c12b1
tcgctttcgcctcctttcctctcccccgacgtcaccccctccccgcatcgtctgccacgccaagaccgccgccgccgcccgtcaagatggtgctgcagaacgacatcgaccgtcttaacccgccggtggagctcgagaagctcaagcacaagaagaagcgcctcgtgcagtcccccaactccttcttcatggatgtcaagtgccagggctgcttcaacataacgactgtgttcagccactctcagaccgtggtggtgtgccctggctgccagacggcgctttgcctacccaccggaggaaaggcgaggctcaccgagggatgctccttccgccggaagggcgactaagctacactcctgtttatgtgaaaatgaaacccaggcgaaccttacttttcaagtaactaagtatccccgatgtgtactgggcaaattctgctaattatgcttgcccatctgccagcctgaacgttgnatcaacgtgttctatgtcatgcactcctgatttgcc

SEQ ID NO: 3053 - DNA, 85 bp, Triticum aestivum
  Clone ID: uC-tsfl9316025d04b1
aaaaaaaaaaaaaaaaaaaaaaaaaaaaaaaaaaaaaaaaaaaaaaaaaaaaaaaaaaaaaaaaaaaaaaaaaaaaaaaaaaaaa

SEQ ID NO: 3054 - DNA, 224 bp, Triticum aestivum
  Clone ID: uC-tsfl9316025d05b1
acaaaaatgaaacattattactaagatttcttaatcattgcgcacacatgaatgcttgagggaaatcgacctctattagtttatccatcctcatgtacaaatcagagaaacacacatgcatgccctcgatcggtgtctacacggtgcatctgtgaggaaatctgcatttaattcaccggccggccgtgtctatttatgcgacgctgaatgatcctgcggagttc

SEQ ID NO: 3055 - DNA, 476 bp, Triticum aestivum
  Clone ID: uC-tsfl9316025d09b1
ccgtaccaaagctggagcgagtcccttctagagagccccttgagagtcgcctgtagcttccccgatcccgcccgatccccaatctccgacgacggcgatgccggccggacgagagatgggagaggtgtgtggagatctgtaaatagcaggtctaggattagatcgagtcttgcccaagtggtgtctggcgctatgccgcggtggagcgcgccgccggcgcacgcgagctgcgcctggtggctagcgtcggcgtttctgatggttgcggtggcgaggtgctgcgtgcaaccggaggaaatgacggcggcgactccttcaataagctcgttgtgtttcctgttaaggaggaggcccggctgctcttccctttcttttcaagccatcgtggtggtggatggaggaagaaggagaggcggcgagcttgactctgcagtttgagaaggagctcatcctcaatgggtttgagacgaggcaac

SEQ ID NO: 3056 - DNA, 501 bp, Triticum aestivum
  Clone ID: uC-tsfl9316025d11b1
cttgcgccttctttcctctcccccgacgccaccccctccccgcatcgtctcccacgccatgaccgccgccgccgtccgtcaagatggtgctgcagaacgacatcgacctcctcaacccgccggcggagctcgagaagctcaagcacaagaagaagcgcctcgtgcagtcccccaactccttcttcatggatgtcaagtgccagggctgcttcaacataacgactgtgttcagccactctcagaccgtggtggtgtgccctggctgccagacggtgctttgccaacccaccggaggaaaggcgaggctcaccgagggatgctccttccgccggaagggcgactaagctacactcctgtttatgtgaaaatgaagcccagccgaaccttacttttcaagtaactagttatccccgatgtgtactggtcaaattttgttaattatgcttgcccatttgccagcctgaacgttgtagcaacgtgttctatgtcatgcacttttga

SEQ ID NO: 3057 - DNA, 420 bp, Triticum aestivum
  Clone ID: uC-tsfl9316025f06b1
tcgttttcttcccaagaaggccggatggggcaccacgcgccaggccgacgaccgctagtcggtgaccgtgtccatggttggtcgtgccagcgcatacgccgatgagcttgtcaaaaccgcgaaaactattggatcgccaggcaggggtatacttgccatggatgagtcgaacgccacctgtggcaagagacttgcctcgattgggcttgagaacacccaggctaaccaccaggcttaccggaccctttttgtcactacaccagggttgggaaactacatatgtggtgctatggtctttgaggagacgctctaccagtcgactgttgatggaaagaagcatgttgacatccttgtcgagcagggaatttttcccggtgtcaaggttgacaagggtcttgtgccacttgctgtttccaatga

SEQ ID NO: 3058 - DNA, 303 bp, Triticum aestivum
  unsure (1)..(303): unsure at all n locations
  Clone ID: uC-tsfl9316025f11b1
gccctgcagggacgcggacgcacagcgtgaacgcctttacgcctttgcccgataacccgaaaaatccgggtgtaccatcncgagcgatgccggagcgcgacgagtgacatccaatgattcaccgcatgcacgctgtgtggctgactgcttagaacgtgaggagtcggacaacgggcatctggatggaccatgggcgccatgggccatctgtggtggagggcatgacgaatgatgaactgagtgccggtctcccgtcgttggttgaacaactgacacctgaagccagactgacggcgaccaaag

SEQ ID NO: 3059 - DNA, 415 bp, Triticum aestivum
  Clone ID: uC-tsfl9316025f12b1
agggctgcagggacgcggacgcacagcgtgaaggcctttacgcctctgcccgaaacctgaaaatctgggtgtctcaccggcgacgccggtgcacgagtgaaccaggatgcactgatgacgctgttggctgacggctagcagtgcggagccggacaactggcaacaggatggaccatgggcgccaggggccatcggtggaggggggcagaacccaagacgaacggagagccggtcgcccgtctctgggtgatcaacgaacccgtgatgcgagacggacggcgaccaaagacgaactaggacttggcgctgcatagctgaaagaggagctaggtgactcgaggcccaaggtcgtcactgtgcgctggtcacaacgttacagactgggaaaacgctgaaagcacccaacttaataacc

SEQ ID NO: 3060 - DNA, 429 bp, Triticum aestivum
  Clone ID: uC-tsfl9316025g12b1
ttttcgcttttctctcggggatgccctgccctgccctggcgtgctgaggaccgatgatgccctgtcttcccctggcgtgctggggatctggtggcgcccgtcgaacgtcgagaggtggcacagcccctccacacacttgttcctcctccacaggatcctcaattcctcatttaaaagctgtgatatttccctacttcatggatgtatggaactgcgtgaatgggacagcgaagccactgtcatgaaacttgcagaatgatgatagagatatcgaaagactctctaacatgaggtgtgaaataaaaggcaaatgcgaagctcttgcatcaatcctcatactgattcctgcatatattcctacagaactacaacatgtttggagatgacaagatcgaacaggacggtgctctcaggtaagcggtgagtgga

SEQ ID NO: 3061 - DNA, 493 bp, Triticum aestivum
  unsure (1)..(493): unsure at all n locations
  Clone ID: uC-tsfl9316025h03b1
catcttcaagctcgtcatcgtcggcgatggcgggactggcaaaaccacttttgtgaagaggcatctcactggagagtttgagaagaaatacgagcccaccattggtgttgaagttcacccattggatttcaccactaactgcggaaagatccgtttctactgctgggacactgctgggcaagagaagtttggtggccttagagatggatactatatccatggtcagtgtgcgattatcatgtttgatgtcacttcaaggctgacctacaagaatgttcctacgtggcacagggacctgtgcagggtttgtgagaacatccccattgtcctgtgcggcaacaaggttgatgtgaagaacagcatgttaaggccaagcaggtgacattccacaggaagaagaacctgcagtactatgagatctctgccaagagcaaactacactntgagaagccctttctttaccttgcanggaagctgggctgtgatcccaaca

SEQ ID NO: 3062 - DNA, 468 bp, Triticum aestivum
  Clone ID: uC-tsfl9316025h11b1
tttcgtttttctctcggggatgccctgccctcccctggcgtgctggggaccgatgatgccctgccttcccctggcgtgctggggatctggaggcgcccgtcgaacgtcgagaggtggcacaggcccgccacacacttgttcctactactcaggatcctgaactcctcatctaaaagctgtgatatttccctccttcatggatgtatggaactgcgcgactgggacagcgaagccactgtcatgaaacttgcagaatgatgatagagatatcgaaagacttcctaacatgaggtgtgaaataaaaggcaaatgtgaagcttttgcatcaatgctcagactgattcctgcaaatttttctacagaactacaccatgcatggcgatgacaagatcgaaaaggacggtgatataaggacagcggagagtggaggaggaagaaaaggtgggatgccaatcatcaatagaatat

SEQ ID NO: 3063 - DNA, 287 bp, Triticum aestivum
  Clone ID: uC-tsfl9316026b08b1
gtacaaccttcttccttcctccttgatcgatcgctccatcggcccccggtcagagcgcgatcgccggccggccagagcaggcgcacgcagcaatggggctcacggtgcgcatcgtcgtcggcgccctcctcctcctcctcctcctggcggcgccggcggcggcggcgggcgagtgggactcgccggagtcgtgcgccacccctgtgagcgtgtaggcggcgtgcctgggcgcttccgtcacgcaccaccgcgtggactacgagcactgcgtgcggttcctgtactcg

SEQ ID NO: 3064 - DNA, 496 bp, Triticum aestivum
  Clone ID: uC-tsfl9316026d10b1
cctttgctttactgttttacttaccctgtgttgtcgtcacatgttatattttcttgtctcttttttatgacttgttgggaaaggggagcccacaggacgacgcccggagcacgctgacgccgaggaacgccgttaggcgcgagctgcagaccacaatcacggcagcgacgtctacacaagcgcatcaaaagcccgggcttaggccgccaccgtaaatccgcgaaggaccaccccccgaatcgatcggcggaccggaatgctccgttccgcatccgaccaggacgcaacgccggcccccatccgcgttcctcccgacaatttcaagcacccctcgactctatcttcaaagcccttctcatctttaccaccgaggcacctagcacgctaatcggtcgctcgcccgcatttcagccttggacggaatttaccgcccgaatggccgccccacaccgccgaacggcctaggcacaggcggacacggttaccttcgcccctt

SEQ ID NO: 3065 - DNA, 580 bp, Triticum aestivum
  Clone ID: uC-tsfl9316026e11b1
agacacatggtaatttctttcttttgttgggttcaaatttactattttagtatcgtttttttgttttaatttctaacatacagaccacacaatttcaactaagacaaagccaaagcatataaaacatcggcccaagtagcaaccaaagcccgttatggacaggacacggtccaagccgcacaaggaatggtctgtgtggtcgtgggattgtaaccaccaccaccttcggtgaatggggttggtgtagtggtgccaccagctacaccgtttgaagagttctacgcgactgtgactgcgagctttatactcttcagcgcattggctcggtgatttcacagattgaagtatcgaggaccagtggttgtgagagctatgttcgtggttccgctgatgtcgtacttaatgtagttccctagtatgcaactcttgtagtcgttcttgcttcactttattcatcgtgtgacccgtaccataattgaacattgtgtaacccctttgtatcacctatgtcatgtaccttttattgagcgtatttgtactattgtttcgtactttttcttgtcatcctatgctttatata

SEQ ID NO: 3066 - DNA, 324 bp, Triticum aestivum
  Clone ID: uC-tsfl9316026g08b1
atgattagagaatccagcgtacggttttttcatagcttaaaatgctatgaagaccgacttattatgaactgtgatccaatttattgaatactccctccgtccagaaatacttgtcgcataaatggatgaaaatggatgtatctagaattaaaagtacatctagatacattcatttcaatgacaagtattttcggacggaggtagtatttttttacagttctttggaattcttatttttatgcttaacaagaatatgctgaatgtcgttctaatttatctttagtaagcaggcaaattcaaattggctgaatgttgtttcaagtt

SEQ ID NO: 3067 - DNA, 436 bp, Triticum aestivum
  Clone ID: uC-tsfl9316026g09b1
gtggaggcacacggctgatctcgtgaccgttgaggttcaccatgtaacattatagaacccatgatgctgacgtatgaccctgacaagattaagtccgtacaaaaggcgtgatcttggggatttgcggccaaagaaattttgggcacgagatcaagacatgagatattcagatggacgaactacattttatgatatatcaacagaacccaggagtcggactgacggaagcagaaggcgctctgtgtgatccgagacatgtaactcaaagacgaggttgccgagcacgactgcctaccataggctcagtccatggctctacaacacacatgctgggataacgctatccttactatacgataatttctaagaataacatctcataatattgtgatagggtaatattggatatgcatatataaactgtattttccaacat

SEQ ID NO: 3068 - DNA, 485 bp, Triticum aestivum
  Clone ID: uC-tsfl9316026g10b1
tataccgaaaaagctgaattatgaatactgcatagataagagaaatctggattacaaaaggtctagaacacatggtttgcggaataaaactagataagaacttgttttcaaaaatgtaaagtacatgctacttatagcaaaatattctgaaaccctaatactcaaaatgacgcagtattgggacggattaagaactgtactcgacccaggtggtcgagtggacggacgagtgataagctggagtcttcttctctttcttgtgctcaagtgtctggttgagtgcggaatggagaaaactctgaagctggtagtctagtaaggacgtccagtgaatgatgataagggactcgaccatgtaggagagtgattggccgagtggatggaggtggtagcactcgactaactggcagagcgaatggtcgagtgaatgatgatagtgattctcggccatgctggcagagtgactgagagagcgactgataatg

SEQ ID NO: 3069 - DNA, 428 bp, Triticum aestivum
  Clone ID: uC-tsfl9316026h07b1
tttcgtttgaaactaaggatactgatatctgggcagcattccgagtaagtcctcagcctggggttccgcccgaagaagcaggggctgcagtagctgccgaatcttctactggtacatggacaactgtttggactgatggacttaccagtcttgatcgttacaaaggacgatgctatcacatcgagcctgttgctggggaagacagccaatggatctgttatgtagcttatccattagacctatttgaagagggttacgttactaacatgtttacttccattgtaggtaacgtatttggtttcaaagccctacgtgctctacgtttggaggatctacgaattccccctacttattcaaaaactttccaaggcccgcctcatggtatccaagttgaaagagataagttgaacaagtatggtcgtccttta

SEQ ID NO: 3070 - DNA, 432 bp, Triticum aestivum
  Clone ID: uC-tsfl9316026h10b1
tcaaggttactcccccctttcatgattttgcatctgagaatcgatgctggacagataaacaaaaaaagacccacgttctggttgatgcatgactgtgatgtgaaggtgtaaactcagctgtcattcactatgaccttttatgacataaagatatgaaagaggcaaactgcgcaagctctgatctgtgggtcaatgcccaaatattaagtagagctcattcgcctttatgttggctgtcgtgaccggcctatagctgttcttgattacctatctttattgacttgtgctatttgacattaggcttgaactgggaccgggacttcgtcttagcaacctctataatggaaaggaactgtttttgcaagaccctacttaactaatcaattgaaaccttagatagatacgagaaccacgataatgtaatgaaacttt

SEQ ID NO: 3071 - DNA, 554 bp, Triticum aestivum
  Clone ID: uC-tsfl9316027a02b1
ccctcgcgtcctcacccgacctcgcctcccgtcggatcgccgccggccccgcccgccgtggctgtccccgtcctcaccgcctccatccaagccggctccggatccaggccgctcagtccccgcccgcgcccccacacgtaaatctccgccgcctacggccccgcccgtcacgacctccccgcgtgcagatccacagtcgtcgacctacccggcccccgatctgcccggcccgcgctcctccccgtccacagcatagaaagagggaacccaggaacccctgtacggcctcagcttggtcataagtatttcgagaaaccccaagaaatctgaagaaacccggagggagggacaccacagaggaggccggacaagatgatcggcgtggggaaggcgaaacagtacgcaaacgtgctcgacaagcctctcgggcgtgggagacaggaggtcagtttgagtgcttttgcattcctgttctcagaattgggtcaatacaaccagacacaagttgacaacatcgctgagctggaacgaaggctggagggacctggtatgct

SEQ ID NO: 3072 - DNA, 467 bp, Triticum aestivum
  Clone ID: uC-tsfl9316027b01b1
ctcacagagctacatagctaatcacacgcctcaccttctcttcccggcagctccgagcttgtatgtagtgcgaggctgccactgctagctgacacaacagcttgctcatcgatcatatctcatagtccgggatcgagagatctctaggatcaacctcaagggtagtcgaccggaggagatcaagcaacccaaccgaagatgtcggtgacctccaacaccccgacgagggccaactcgcgagtgaactactcgaacgagatccacgacctgtccacggtgcaggacggcgcccccagcctcgcccccagcatgtactaccaggagaagtccttcgccgacttcttccctccccacctcggaagaaggtgatctcggagtggtgccgacgttcctgctggtgttcgtgacgtgcggagcggcgtccatctacagcgccgacgtgacgcgcgtctcgcagctgggccagt

SEQ ID NO: 3073 - DNA, 528 bp, Triticum aestivum
  Clone ID: uC-tsfl9316027b02b1
ccctcgcgtccgcacccgacctcgcctcccgtcggatcgccgccggccccgcccgccgtggctgtccccgtcctcaccgcctccatccaagccggctccggatccaggccgctcagtccccgcccgcgcccccacacgtcaatctccgccgcctccggccccgcccgtcacgacctccccgcgtgcagatccacagtcgtcgacctacccggcccccgatctgcccggcccgcgctcctccccgtccacagcatagaaagagggaacccaggaacccctgtacggcctcagcttggtcataagtatttcgagaaaccccaagaaatctgaagaaacccggagggagggacaccacagaggaggccggacaagatgatcggcgtgtggaaggcgaaacagtacgcaaacgtgctcgacaagcctctcggtcgtgggagacaggaggtcagtttgagtgcttttgcattcctgttctcggaattggttcaatacaaccagacacaagttgacaacatcgctgagctggaa

SEQ ID NO: 3074 - DNA, 495 bp, Triticum aestivum
  Clone ID: uC-tsfl9316027b06b1
cccacgcgtccgcccacgcgtccgatttcaccgaggagggggggatctccggcgccgggcctagcagcccaaagtcgctccggtgcttggcggagcccaaagtggtcaggaggatgagggttgtcgctgagaagactccgattcagcatgtccttcaaccgccgaccatcgcctccttgctggccatcatcatcggcatggtccccgtgctcaaggctttcgtgtttggggctgatgcgccgctctcgttcttcaccgacagtttggagatcctggctgctgccgtggttccctcggtgatgttgattctcggaggcatgctcgcagaaggcccaaatgacaacgcactgggtatgcggactatcgtcggtataaccgtcgcaaggctcctgatactcccctgcattggcatcggcatcgtgatgctagcagacaggttgcatctgctcgtcgagaacgaccagatgtaccggttggtgctctcactgcaatact

SEQ ID NO: 3075 - DNA, 515 bp, Triticum aestivum
  unsure (1)..(515): unsure at all n locations
  Clone ID: uC-tsfl9316027c07b1
cccacgcgtccgcccacgcgtccgctgcacttgaaaaggatcgatataagatccgccaagcttttgttgcagctccagggaactctcttgttgttgctgattatggccagctggagctgagaatcttagcccatcttactagttgtaaaagcatgctggatgctttcaaggctggtggtgactttcattctagaacagccatgaatatgtacgagcatgtacgtgatgctgttcacgaaaagaaagtacttcttgagtggcaacctcaaccaggtcaagagaagcctccagtgccattgttgaaggatgcttttggtgctgagagaaggaaggctaaaatgcttaatttctctattgcatatggaaagacagctcanggactatcccgtgattggcaggtgtctgtcaaggaggcaagggatacactcaaactctggtacagagatcgaaaagaagtttcagcttggcaaaagaggcagaaagagcttgctcgtgaaaaatgggaagtatacaca

SEQ ID NO: 3076 - DNA, 515 bp, Triticum aestivum
  Clone ID: uC-tsfl9316027c08b1
cccacgcgtccgcccacgcgtccgctgcacttgaaaaggatcgatataagatccgccaagcttttgttgcagctccagggaactctcttgttgttgctgattatggccagctggagctgagaatcttagcccatcttactagttgtaaaagcatgctggatgctttcaaggctggtggtgactttcattctagaacagccatgaatatgtacgagcatgtacgtgatgctgttcacgaaaagaaagtacttcttgagtggcaacctcaaccaggtcaagagaagcctccagtgccattgttgaaggatgcttttggtgctgagagaaggaaggctaaaatgcttaatttctctattgcatatggaaagacagctcagggactatcccgtgattggcaggtgtctgtcaaggaggcaagggatacactcaaactctggtacagagatcgaaaagatgtttcagcttggcaaaagaggcagaaagagcttgctcgtgaaaaatgcgaagtatacaca

SEQ ID NO: 3077 - DNA, 465 bp, Triticum aestivum
  unsure (1)..(465): unsure at all n locations
  Clone ID: uC-tsfl9316027d03b1
gtgtagtcactttcagaaccattcaaacagaacctggcatttgacctctcacttgctgctttattgggtgacaacatatacaacttcggggagttgcttgcccatccaattatccacagccttgtgggaacatcggtggagtggatttatcatatattgcaagcgttcaactctggcaatctagcgtcctaccaggaactctgcaaagttcacgccgccgctttgagtgcgcagcctgctttggtacagaaggagagggaacttcttgaaaagatcaatatcctttgcttgatggaaatcattttcagtcgagcatcccaagaccgtacaatcccgttgagcactatagctgaacagaccaggctctcagttgaagatgtggagtatctactaatgaagagcctctctgctcatcttatcgaatgcattattgatggngtcgacgggactgtccatgtttcatgg

SEQ ID NO: 3078 - DNA, 333 bp, Triticum aestivum
  Clone ID: uC-tsfl9316027d10b1
tcgctcacacgtggggttgatgccggtgctcatggcgatcggcaaccggtcccgcgacagctccggcgacgtctccaggtcctcctcgagggacacgacgggggagtcgaatgtcgtccaggagctcgggggctactgcttgagctactcctacgtcatggcgaacatgatggaggacaggaggtgcagttacgagagtgctcaggtgtctagcgagatgccaacgacgccgacaacggagcgagctggggagacgactgcggtgacgaagggggtaggggagggaccaagcgccaaaccggaagcggcgccgggagcgccgaacggagggat

SEQ ID NO: 3079 - DNA, 465 bp, Triticum aestivum
  unsure (1)..(465): unsure at all n locations
  Clone ID: uC-tsfl9316027d12b1
aactacgcagattccacatggcagcaaatggtgacctttcaatcttggtctcttcagttaagaagacaatccgttggagggaaacttttcacatacttacattgcaagaacttgagaaatggtcccatttggtcttttggcatgggtttgacactacacttcggccttgcttagtaatccgtcttggactcgcgtgctctagcatagcccctcgtgatagaccttgttttgggcaagcagtagtttctcagattgaccatggtattatacatttgaccaacgaagaagatccaagaattactgttttgctggattgccacgggatttctccattcaaatttccgatgcaaatgatgaggtcgcttgtcaacttggttcaagaaaactacccaaatcgtcttggagtattaattgttgtccgtctttctccagttgtcagagttattgcacagactnttattcaac

SEQ ID NO: 3080 - DNA, 474 bp, Triticum aestivum
  Clone ID: uC-tsfl9316027e01b1
ctctctgagctacatagctaatcacacgcctcaccttctcttcccggcagctccgagcttgtatgtagtgcgaggctgccactgctagctgacacaacagcttgctcatcgatcatatctcatagtccgggatcgagagatctctaggatcaacctcaagggtagtcgaccggaggagatcaagcaacccaaccgaagatgtcggtgacctccaacaccccgacgagggccaactcgcgagtgaactactcgaacgagatccacgacctgtccacggtgcaggacggcgcccccagcctcgcccccagcatgtactaccaggagaagtccttcgccgacttcttccctccccacctcggaaagaaggtgatctcggagtggtggcgacgttcctgctggtgttcgtgacgtgcggtgcggagttcatctacagcgccgacgtgacgcgcgtcttgcagctgggccagtccgttg

SEQ ID NO: 3081 - DNA, 269 bp, Triticum aestivum
  Clone ID: uC-tsfl9316027e02b1
ttttcgtcttgagcgtgcattgcggtacgcaggactgtgttgcgcacggtggcgggaagaggtgcgctatttttgattgcaccaagagtgctagatggcggacggagcactgagtgcgccatggtggtggcaagagatgcaggttcgacggttgggtgaagagtgcgcagagcagcactgatttctacacagagcacgggggatgccaagcgctgctaatgggggctgccggactctagcttgtgtcttggtacaaagaaggatgctaa

SEQ ID NO: 3082 - DNA, 453 bp, Triticum aestivum
  Clone ID: uC-tsfl9316027f01b1
gttttgagtttcttaactaatcacaccgccttacctgtctcttggccggcgagctcctatgcttgtatgtagtgcgaggctgccactgcttgctgacacaacagcttgctcatcgatcatatctcatagtccgggatcgagagatctctaagatcaacctcacgggtagtcgaccggaggagatcaagcaacccaaccgaagatgtcggtgacctccaacaccccgacgagggccaactcgcgagtgaactactctaacgaaatcgcaaacctgtgcacggagcaagacggcgccccgagccttgcgcccagcatgtactaccaagagaaaggcttgggcgacgttttccctccccaccttggaaagaaggtgatctcggagtggaggcgacggtccatgtggcgttcttgacgtgcggggcggcgttcatctacagcagcaacgtgacgcgc

SEQ ID NO: 3083 - DNA, 391 bp, Triticum aestivum
  Clone ID: uC-tsfl9316027g08b1
tgcctgcccaatcagggcaatgaagatctctgtgtcccctgttgtgcgtgttgccgttcattgcaaggtggcatctgatcttcctaagcttgttgagggtttgaagcggctggcgaagtctgaccctatggttctctgtaacattgaagagtctggcgagcatatcattgctggagctggagagcttcaccttgtaatctgtttgaaggatctgcaggaggactccatgggtggtgctgaaattattgttacccctaccacagtatgcttacgctagactgttcttgagaagtgcctgcgcactgtcttgaacaagtctcgcaacaagcataaacgtctttacatggatgctcccccattggaggagggattggctgaagctattgatgat

SEQ ID NO: 3084 - DNA, 420 bp, Triticum aestivum
  Clone ID: uC-tsfl9316027h06b1
cacaccttccaaccaagctccaccgccgtcgaagcacccatggcgcccaaggccgcagagaagaagccggtggagaagaccccggcgggcaagaagcccaaggcggagaagaaggtgccggcgtccaaggagggcggaggcgagaagaaggggaagaagaaggccaagaagagcgtggagacgtacaagatctacatcttcaaggtgctgaagcaggtgcacccggacatcggcatctcctccaaggccatgtccatcatgaactccttcatcaacgacatcttcgagaagctcgccggcgagtccgccaagctcgcgcggtacaacaagaagcccaccatcacgtcgagggagatccagacctccgttcgcctcgtcctccccggcgagcttgccaagcacgccgtctctgagggcacc

SEQ ID NO: 3085 - DNA, 422 bp, Triticum aestivum
  Clone ID: uC-tsfl9316027h08b1
tgcggacgcacttcgcgactgcgttaacgcctctgaccgttgcccgttcactgggtgtccaccgcggatgcggagcgtgagtcaaccatgatcgattctgctgctgtgtggctgttgggtgaccctgatgcagtcaatgtggcgtacaacatggcgcctatcagtggccacttggttctcctatggatggatctgcatggacgagatgatgaactgagaggccctcgttcgctccgttggcgatcaatggaacaccaactgtaccctgacggagacctgagagggactagcgatgaactggggctacctgtgagaggactttgataacacctggcctacactaggcactggccggcgactgacaccgttttgactgggaaaacgactgggaaaaccatgttaatacccatgttaaacatcct

SEQ ID NO: 3086 - DNA, 386 bp, Triticum aestivum
  Clone ID: uC-tsfl9316028a04b1
tttattctgccaactggcaaccacctttggactttcaagaaacagtttgcaatccaagtggctctgtcctgcttcatgtcatacatgttgcagattggtggcagggctcctaataaaattctgtttgcgaaaaataccgggaagatcttccagactgacttccatccagcttatgatccaaatggattgatcgagttcagtgagctagttccatttaggctgacacgcaacatgcaagctttcttctcaaattttggcgttgaaggtctcatcgcttctgccatgtgttctgctgcccagtctgtggtttcacctaaacaaacccaacacatatggcatcatttggctatgtttttccgcgacgagctgttatcttggtcatggaa

SEQ ID NO: 3087 - DNA, 458 bp, Triticum aestivum
  Clone ID: uC-tsfl9316028a05b1
gttgcaagaagcagagtattgcaaggaggcggggcagagcatagcagaggggaggagatggcggcaccgcgcccgcagccgctgctgctgctcctagtctcgctgctcgccgcctccgcgccccgccgcgccgacgcgtggggcaaggagggccacatcatggtctgcaagatcgccgagaagtacctgtcggaggaggcggcggcggcggtgcatgacctgctgccggagtcggcgggcggggagctgtcgacgatgtgcccgtgggcagacaccatgcgcttccgctaccactgggccagcccgctccactacgccaacacccccaacgtctggaacttcaacttctcccgggattgccacaactcacgcggtgagcaggggatgtgcgtcgtcggggcccataacaactacacggaccagctctacacctacggggactcccccaagagctcgta

SEQ ID NO: 3088 - DNA, 525 bp, Triticum aestivum
  Clone ID: uC-tsfl9316028a08b1
ttttaagcacccaagcccatttcagttctaagccttgtagctgctcgacctagagaggagagaggaagtcaggtaggaggctctgctgcgaagggagatggccgggaagggaggcaaggggctgcttgcggcgaagaccacggcggccaagggcgccgccgacaaggacaaggacaagaagaaggcgcctgtgtcccgctcctcccgcgccgggattcagttcccggtgggccgtatacacaggcagctcaagcagagggtctcggctaatggccgtgtgggtgccactgccgctgtgtactctgcagcaatccttgagtaccttactgctgaggtccttgagctggccggcaacgccagcaaggatctcaaggtgaagcgtatcacccctcgccacctgcagcttgcgatccgtggagatgaggagctggacaccctcatcagggcaccatcgctggtggtggtgacatccctcaattcacaagtccctatcacaagacctcaggagtgatgaaagcaataccg

SEQ ID NO: 3089 - DNA, 389 bp, Triticum aestivum
  Clone ID: uC-tsfl9316028e04b1
cggaggcgttaccgcctttgcgggtcgccccacgcacttttttactaccggcgatccgccacgtgaggtcaccatggatacagcaggcccgccaaggggcgtctgccctgcttcatgtcatacatgttcgacatagggggcagggcatgctaataaaagttctgtttgcgaaaaagacgcggaaggaccttccagacgagactatcatccagcttatgatccaaatggagtgaacaactgcaccgagctggctgcatttcggctgccacagaacatgcgggccttcttgtgaaatatcggcgagaagggtctgatcacacgtggcctgagctctgctgtgcagcgtgtggttccacctaaacaaatgggaacacatatggcattaccca

SEQ ID NO: 3090 - DNA, 223 bp, Triticum aestivum
  Clone ID: uC-tsfl9316028e05b1
ttgccacgccaagggagaggagagctcggagagcaccggcagcgccgtagccccccgtgaatccgcgcccggatctcccgggccggcggcgatggcgctctccgatctctcccgcgactcgctgctccccagcttactgtactccccgagctccttcgtcgccgccgtcttcgcgcgcttgcactgctccccgtggccctaccaggcgcccgacgaggccccg

SEQ ID NO: 3091 - DNA, 439 bp, Triticum aestivum
  Clone ID: uC-tsfl9316028e11b1
tctcaaaggacttggtgggtttcttatccgatagcaacattgaaggctccccagatattgcagaggtcatctatgctggtcttgatattgtgactcccttgatatctttggatcttctcaagtaccctaaactaagtcgtgattattttgtacttatgtcgcacttgttggaagtgcaccctgagaaggttgctcactcaaacagggatgcttttggaagaattactggtagtcttgaatttggcctgcgtaatcaggatggcgatgttgttgagaggtgcctcacagcactaaatgcccttgcctcgtaccatttcaaagaaagacttggaggcataggagggcttggctcgcaggctatggaatctgaaggatcgaatgggaaacttcaggaaagcatatcaagtcacttcttgaggcttctactgcaactacttct

SEQ ID NO: 3092 - DNA, 90 bp, Triticum aestivum
  Clone ID: uC-tsfl9316028f11b1
gacgcgccctgcagcggcacattaaacacggcggtgttagcgaactcactcagcttgaccgcttcacttgtcagccccctagcgcccgat

SEQ ID NO: 3093 - DNA, 415 bp, Triticum aestivum
  Clone ID: uC-tsfl9316028g07b1
gcaccatgagtctctcctggaggcgcttgctggtgacaacgttggcttcaatgtcaagaatgttgccgtgaaggatctgaagcgtggttttgttgcatccaactccaaggatgaccctgccaaggaggcagccaacttcacctcccaggtcatcatcatgaaccaccctggtcagattggcaacggctacgccccagtgctggactgccacacctcgcacattgctgtcaagtttgctgagctggtgaccaagatcgacaggcgatctggtaaggatctggaggccctgcccaagctcctcaagaatggtgatgctggcatagtgaagatgattcccaccaagcccatggttgtggagacctttgctacttacccacctcttgggcgttttgctgtccgtgacatgaggcacact

SEQ ID NO: 3094 - DNA, 379 bp, Triticum aestivum
  Clone ID: uC-tsfl9316028g10b1
tcgttcctctcgtccagtctcttctcggcaaggaccaggaaggagatgacacgggcaagaagaagaagaagaagaaggggaaaggcaaggccggcaatgagaggaagaagccagcaccggcgtacattctgtggtgcaaagaccagtgggcggagatcaagaagagccccgatgcacacttcaaggaggtgtcgaacgccctgggcgccaaatggaagaccctgagcagcgaggagaagcatccgtacgaggagaggtaccggcaggagaaggaggcctacctgcaggtggttggccaggaagatgcgcgaggacgatgcgattaagctgctggacgaagagcagatgctctggactgcgaaagaaattgctgaacagt

SEQ ID NO: 3095 - DNA, 440 bp, Triticum aestivum
  Clone ID: uC-tsfl9316028h04b1
tttgtgagacaagggtgaaacagaataagctcatttttgtggtgagttccctaggccccagaactagcattttaattacaaaattcagtctttgatcacgttatttcagtttcattatagaccttataatattttttatgcattaatataaggtttataatattttgtggagcaatcagctgtgcatagaaaagagctcacctaaattaatgacacgttcatcttatcttcgattaaaaaaatttgccccctaatattcagttctactgagagttgtagaaggcaaaaatccagcatattaactcaagtaagtgtttttggtatttcccaacgtaattaaaaaatttcttctcaaaatacgacatggtcattgtcggaaaaagatatttagcatgaatgtaggtgctctcatatgaagctggacatgtttacaatgatcg

SEQ ID NO: 3096 - DNA, 485 bp, Triticum aestivum
  Clone ID: uC-tsfl9316028h08b1
ttggattgctggaattatatttatgcatgagcaagactacaatgaggctctcaagcacacacacactggggggactctggacctgcatgcactgaacgtccaaatcttccttaagatgcaccggtcagattatgctgacaaacaactgaagatcatgcaacaaactgacgaggaccatacactgacacaactagcaaatgcttggctcgatattgctgttggtggctctaagatccgggaagcttatctcatattccaggactttgctgaaaagtaccctatgaccggaatggctcttaatggcaaggcagatcgctgtatgcatatggggagctttgaggaggctgaaactctattgcttgaagccctaaacaaggatgcaaaaggatcctgaaacttcttgcaatcttaatggatgtaatctccaccttggcaaaccgtcggcacgatacttcagccagcttgaagctgcgcaccctgatcac

SEQ ID NO: 3097 - DNA, 341 bp, Triticum aestivum
  Clone ID: uC-tsfl9316042a04b1
cgggatttctcgaagccataaagagaggaagaggccccaaaaggaggaggcttaccaacactccggtccgtgcaagcagccgcagagcccgcctctagtaccgcaaggaaaggagggtaaaggaacctgttgcccccaatggcttcctcgcgcgccgccgccgggcccttcgcgctctgcattctgctgctcgcgtccccggccgtctccgccacgttcctgttcgacggcgggaagtcggcggcgaagagcaagggcaagggcaaggaggcggtcgacgtggagtggcggccggccaccgcgaacgtggtaccggcgaaagccgaggggcgacgggcagc

SEQ ID NO: 3098 - DNA, 490 bp, Triticum aestivum
  Clone ID: uC-tsfl9316042d07b1
tagaattcccaagtctagctagtcagagtaaaagttccatgacgaaagaccagtcttcagtaaaccgtcacaagtctcaggctagcaagttgccactttcaacggctcctagtgctaacctcattgggaaagggaaggcagaggcagcaaacaagcagacagaggcaatggacttccgggattggtgcgacagcgagtggtccaggctcactggaacaaatgatacaagtttccttgagttctgcattaagcagtcgactgctgaagcagaaatgcttctccgggagaacgttggctctcttgaccgcaacggtcagttcatcgacaggttcctcaactacaaggcttttctgtccacagatgtgatcgagatggcattcagagcgcccagcaaccgcgctccccgtctgaaccccgcttctgcagccaaaggagggccaagtgccgaggcagagcatgatacaggaggaaagaaaaaagggaagaaagg

SEQ ID NO: 3099 - DNA, 461 bp, Triticum aestivum
  unsure (1)..(461): unsure at all n locations
  Clone ID: uC-tsfl9316042e04b1
taaaataaagtatgtcctgtgatagtttgggcgcaggcctgtatcatgaatacatactgctcacagtgcatttgcatgagaagcccttcacaagaaaaaactatacattcacatttttttctgcggaaactatatatttacttattattcagagctcactgtataaaatccgagtggtgctcaagatgttaattaactagctttgtgaatggggtggtgaaaaatactgctcactttatttgtttggtcgcaagcctatatcatgtacacatactgctcaatttatttgaaccttcagaaaataaatcaatttgctcaagcctttctgctgttgattccagntcattggagtaactttaatatttcttctcattgcatcagttaacatgaatgcaaaataatttgttggtctatgcgatcccgtttanggatgatgccactaagttgctataattatgctt

SEQ ID NO: 3100 - DNA, 460 bp, Triticum aestivum
  unsure (1)..(460): unsure at all n locations
  Clone ID: uC-tsfl9316044c05b1
cactggcagtcgcttccctttcccaccacgttgacatctcttccgctccgggaaggaggcaggcacgtagacgtagcgannccgccgcgtttactggcgtgcttcggcaggggcggcgcgacggcctcggcgccggagcctgtggaggacctggccccgggcccggtgctggtggagctcttctcctcgcaggggtgcgcggcgtcgtctgaggcggacgcccttgtggcgcggctggcgcaggagtcctccgaggccggcggcggcgagcgagcgatggtggtgctggggttccacgtcgactactgggactaccgcgggtggaaggaccccttcgcgtacagcgcctggaccgtgcggcagaaggcgtacgtggaggcgctccggctggacacgctcttcacgccgcangtcgtcgtgcaaggccgcgcggactgcgtcggcaccgagcaggacaagc

SEQ ID NO: 3101 - DNA, 330 bp, Triticum aestivum
  unsure (1)..(330): unsure at all n locations
  Clone ID: uC-tsfl9316044c09b1
tcgggccacgtccctcgtccgccgggctacagccctaccaaggggcccatcacgcgtacgccggtcaccgnnnnaggggtcgtcgtcggtccaccggtcacctacccgtccatcaccaaccctccgtccaaggggcccaccccgcgcccgacggtcaccactcctaccgtcgtcgtcgggccgccggtcacataccccgcgccaccggtgatcgctccctgcggtcaccactccaccgtcggcgccggccaccactcccactccaccgtctccgtcggtcaccgctcccccgtcgacgccggggaacactcccccgtcgtcgacggggtg

SEQ ID NO: 3102 - DNA, 400 bp, Triticum aestivum
  unsure (1)..(400): unsure at all n locations
  Clone ID: uC-tsfl9316044d04b1
cagggcaaatggaaggcacctatgattgccaacccagacttcaaggatgatccttacatctatgctttcgacanccnnnaccacatcggaattgagctgtggcaggttaagtcaggaactttgtttgacaacattctcatcaccgacgatgctgctttggccaagacatttgccgaagagacctgggccaagcataaggaggctgagaaggctgctttcgatgctgctgaaaagaagaaggaagaggaggatgcttccaaggctggtgaggatgatgatgacttggatgatgaggaagccgatgaggaggacaaggatgacaaggctgggtctgatgcggagtctgatgacgagatgcacgatgagctctagatggatggcgaggaaagatgagaggagt

SEQ ID NO: 3103 - DNA, 450 bp, Triticum aestivum
  unsure (1)..(450): unsure at all n locations
  Clone ID: uC-tsfl9316044d07b1
tcgcaagctcatcgtcaccgaccccgacgccgtgctcgacgtcctcacctacgaggagaccgtcgtnnnnnnccatggtgtggaggtgactaacactgtgccggctgtcacccctgaggttaaggatgccctggtcaagaacataaggaggagaatgacaccacagccactcaagattcgtgctgatgttgagatgaaatgcttccagtttgatggtgttctccacattaaggaagccatgaggaaagctgaagctgctggaaatgctgattgccctgtgaagattaagctagttgctcctccgctttatgttctgaccacacagacacttgacaaagaccaggggatagcagttctgacaaatgcaaccaaagtttgtgcagaggcaattgaaaagcacaaggngaaattggtggtgaaagaagcagccagagctgtgagcgagagaga

SEQ ID NO: 3104 - DNA, 541 bp, Triticum aestivum
  unsure (1)..(541): unsure at all n locations
  Clone ID: uC-tsfl9316044f07b1
tcgtgggaaaattctagggtggccacccctagctacgccactgcctctgcctcggggtcgcacaggcgatgaccgccgcggcggccgtcgtggtcctcgcggggggttccctcgcatttctgggccggtgcctcgtcgccagcgcgctcgtagttgccgccagcaacacgtaccttctctgcagagtcgtctacaaggtggcagtcgtcgccggtgggcacgtcctcgacgtctggacccacatctccatcgcctcctccttcttcgccttcttctgcgccagcctcgccgccgacctctcggtctaacgtcgccggccgtcacctttagtagcgtaaataagctggccttgtagcgcgagttcggttcactctcgctctgccgcacaccttgctgtttgcatgtactacgtagagccataagtgccagctcgcagcatcgatctatcttcttctacggttctaccaagcaacactacatccatggatcttagtgattatacagtaatnggcataattactggaagtagagtattattctt

SEQ ID NO: 3105 - DNA, 477 bp, Triticum aestivum
  unsure (1)..(477): unsure at all n locations
  Clone ID: uC-tsfl9316044f08b1
tcgcaaagttggctggagagaattattatttccacgctggacaggatatgaacgtgggcacgtcatggaatatnnncagacccgagactgtggaatcactcatgtacctggggcgccttacggggaacaaaacataccaagattggggatgggacatattccaggcatttgagaagaactcccgcatagcatctggatatgtgggactaagagatgtgaatagtggtgaaaaggacgacaagatgcagaccttcttcctagcagagacgctcaagtacctctatctgctgttctcccctccgtcagtcgtatctttcgacgagtgggtcttcaacactgaagctcaccctatgagaatcgttccaacacatggtagcaacggccagtcaattgaaactggaacaccagtggtccgaccgttcggtaggaagcaagggaaacaggngtaggcctgaacaacagagcagagaatttttg

SEQ ID NO: 3106 - DNA, 435 bp, Triticum aestivum
  unsure (1)..(435): unsure at all n locations
  Clone ID: uC-tsfl9316044g05b1
cgtcaaacattctgctggatgaagactggaacgccaagctttcagacttcggcatggctagggaaggcccaacggagggcctcacacacgtctccacagcggtggttggcaccctggggtacgcggcaccggagtacatccagacggggcggctgaacgccaagagcgacatctggagctacggcgtgctgctctacgagctcatcacggggcggcggcccatcgacggggagcggccgaggggcgagcagaagctgctggactgggtgaagccctacatctccgacaccaacaggctgcggctgatcgtggaccccaagctggagggccgctacagcatcaagtcggtggccaagctggtcaccgtcgccaaccgctgcctcgccaggctgcccaaggcgcgctccaggatggnggaggtgctggacatggtgc

SEQ ID NO: 3107 - DNA, 374 bp, Triticum aestivum
  unsure (1)..(374): unsure at all n locations
  Clone ID: uC-tsfl9316044h05b1
tcgggcggctgcaacatgtacccagaggccgaggccgccggcgccaccctactcgtgttcgtcaccgnnngnnccggggcgagctccggcggcctggagatggcggcggagaacggcggctgcggctgcacccagtgcaagtgcggcaccagctgcggctgctcctgctgcagctgctagatcgatcatcgaccatatgcatgcaccgtgccgcgcgtgcatcatcgatcatatcgatctactactaccataccatgtaaccgcaacctgatcgagggcctttatctatgcacctgacctgcatcagcagtcaggtgccatgccatgattgtaaacaggcccccctaaataaaatttcccctgattaactcttt

SEQ ID NO: 3108 - DNA, 473 bp, Triticum aestivum
  Clone ID: uC-tsfl9316044h10b1
tctagcaattttttaaggacccatctgggataaaagttaacgcaaccaagtccatgatagggcattgcctaggtgcagcaggtggtttggaagccattgctactattaaagcgataaacactggcttggtgcatccgagcataaaccagtttgagcgggagcctgcggttgaattcgacacggtacccaacgtaaaggtccaacatgaaatcaatgttggtatgtcaaattgctttggatttggaggacacaactcggtggtcgtattcaccccattcaagccttaatgcggtacatgctcgacgaatcttggccagaacagtggaggttttttttcaggaagctcttgagttatttcgatgtggtctcttccgggaagcaactgacgatctgacaggcagcaacattacagtgaacagaggatccaagatccattgcattttagatacacccatccgattcgatttgaaaca

SEQ ID NO: 3109 - DNA, 69 bp, Triticum aestivum
  Clone ID: uC-tsfl9316045a01b1
cagtgggacacgcccgagtaactggcactacgcgcggcggatgtggagatacgctcaatgacaccaggt

SEQ ID NO: 3110 - DNA, 425 bp, Triticum aestivum
  Clone ID: uC-tsfl9316045a12b1
tctggcagctgctggggaggcctctgcagtcctacatctccaggtcgtcttcctcccggaagtcccccttcgtcgtcagggcatcgtccagcccccctgccaagcaaaatgacaacaggcagctgtggttcgcgtccaagcagtccctcacctacctcgacggcacgctgcccggtgactttggtttcgaccccttggggctgtccgacccggagggcaccggcgggttcatcgagcccaggtggctggcctacggcgagatcttcaacggccggaccgcgatgatggtggtggtgtgcatgatcgccccggaggccctgagcaaggtgggcctggtgcccccggagacggcgatcccgtggttccaggcaggcgcgatcccgacggagggcacctaccagtactgggccgacccatacacgctc

SEQ ID NO: 3111 - DNA, 472 bp, Triticum aestivum
  Clone ID: uC-tsfl9316045b03b1
ttctcgattcttcgtggacaacggaacatacctcactgagcaggggaggtttttccttgcatggtactccaataatctgatcaagcacggtgacaagatcttggatgaagcaaacaaggtcttcttgggacacagagtgcaactggcaatcaaaatctccggcattcactggtggtacaaggctccaagccatgcggccgagctcacagctgggtactacaacttacatgacagagacggctacagacccatagcacgcatgctcaaaaggcaccatgctagccttaacttcacttgcgccgagatgagggactcggagcaaagctcgcaggcgaggagcgcaccagaagaactagtccacaggtgttgagtgctggttggagagagggcctaaatgtggcatgcgaaaacgcacttcctcgatatgatccaactgcttacaacaccatactcaggaatgcgaggcctcatg

SEQ ID NO: 3112 - DNA, 458 bp, Triticum aestivum
  Clone ID: uC-tsfl9316045b05b1
taacattttgggagctgtgtacagatacaagaagttaaaggaaatgagcgcagcagacaggcagaaggttacaccgcgcactgtcatggtaggagggaaagcatttgcaacatacaccaacgccaaaagaatagtgaaattggtaaatgatgttggtgctgtggtgaacaacgatgctgacgtcaacaaatatctgaaggtggtgttcattccaaactacaatgtatcagtggctgaagtgctcattcctggcagtgaactgtcacagcacatcagtactgcaggcatggaagcaagtggaacaagtaacatgaagttctctctgaatggctgtgttatcattggaactctcgatggagccaatgttgaaatcagagaagaagtgggacaagacaacttcttccttttcggtgccaaagcagatcaagttgctggtctgaggaaggatagagaaaatg

SEQ ID NO: 3113 - DNA, 476 bp, Triticum aestivum
  Clone ID: uC-tsfl9316045b06b1
ttgatgaacgaggtggagcgggtgagcaaggcgcactacgcggcgtgccgagaggacaagttcaaggagttcgcggcgaagacgctggaggccggcgagaagggcgccgacgtgaaggacgtggactgggagagcaccttcttcgtccgccacctccccgcctccaacctcgccgacctgcccgacctcgaccaccactacaggcaagtgatgaaggaattcgcggcggagatcgagaagctggcggagaaggtgctggacctgctgtgcgagaacctgggcctggagcagggctacctgaagcgagcattcgccggttcaaggggcccgacgttcggcaccaaggtgagcagctacccaccgtgcccacgccccgacctggtcgccggcctccgcgcgcacaccgacgccggcggcgtcatcctgctgttccaggacgaccaggtgagcgggctccagctcctcaggatggaaca

SEQ ID NO: 3114 - DNA, 501 bp, Triticum aestivum
  unsure (1)..(501): unsure at all n locations
  Clone ID: uC-tsfl9316045d03b1
ttgaacaagtccatgagttaccagccttgtgatcaagaaggtgatcctcttccagggaccgagctaaaagaggtctggaaagccgctcctgctccaccgaatgacaagtaccagtatacatactttgcgcacaaaataaatagctttgatacagcacctaagaagctcttgccttcagactcccgattaaggcccgacagatatgcccttgagaagggcgacatgtctaaatctggggcacacaagagcaggcttgaagaacaacaaagagctgagaagaaaattcgggacaccaagggggagcaatttactccaaaatggttcaaaatgaccgaagacatctcccctacgccgtggggcgatctggaggtgtatgagtacaatggcagatacgccgagcaccgggctgcgatagacagctctagcgtcgttcgcgaggagacagacgtgagctccatcgagttcaaccngtggcagtatggtgactcgccttcccaatga

SEQ ID NO: 3115 - DNA, 443 bp, Triticum aestivum
  Clone ID: uC-tsfl9316045d09b1
tttgggaagctggagggcacggccaagagcatgtacgcggcgggcaaggtgcggctggcgatgctgcaggagcctgccggagcgggccacgccaacggaaacgccgggcggcgccacgaggggagcttcgtggtctggcagctcgcgcccggcatgtggctcgtcgagatggccgtggccggccacagcgtcgccgccggcagcgacggccgtgttgcctggcgccgcacgccctggctcggcgcgcacgccgcgcggggcggatcgcgcccactccgacgcgcccttcagggcctggacccggtgatgatcgcgtccatcttctagacggccgagcacgccggcgagaagcatgtcgacggggaggactgtttcgtgctgcgcctcgacgtgggcccctcgacgctgtcgagctggagtgaccgcacggcggaggtgatccg

SEQ ID NO: 3116 - DNA, 312 bp, Triticum aestivum
  Clone ID: uC-tsfl9316045f06b1
tgttaacacaaaaaaaacaaaaaagaagaaaaatacattaataaaacaacaccacataatactaaaaactaacacctgatatgttcctatcccgggcgggcggtcttatctatcccctcctccgtccccgtccctgcgcggccgtgtcttttcttttgtttggccttgcttgacttccttggccggcccgttgctccaccgcgccgggatttccccctccctgccccaccccaattgctttgccttgcatccccctcccttttggtgggcgtttgttgacacgaggcgtcccgttcccccttcccttccttt

SEQ ID NO: 3117 - DNA, 455 bp, Triticum aestivum
  Clone ID: uC-tsfl9316045g05b1
tcggacgcgtgggcagaaaacgaaacgcaggcatccatggaggtggtgggaggggtatcgctgaggccggcgcggctccggcacctgacgcccggggaggccagcgcgggctccttcctgccgcggaggctgcagctggcacggaccgccgcgaggccagcgaggcgcgcgctggtggtggaggcccgcgggggcaggggctggtcggaccggcagtcccagcagcagcggcgcatgccgcagctccccaagatcgaggacgacggcaacccccgcttcgtcatcttcatccgcaccgccaatgtgtacttctggtacccgctcaacatcgtcaccggcggcaccaccgccaagatcatgctcgccgccaggacaacttcctcggcaagtacatctacaaggacacgctcgcccggaaacctcgcaccgtcatttacaaagacgaggacgacata

SEQ ID NO: 3118 - DNA, 326 bp, Triticum aestivum
  Clone ID: uC-tsfl9316045g07b1
aaggcagaaagcatcaacgcccgcgacccaaaacagttttacactacgaccacaagcggagccgggaagcgggcgcaggaccacagaacagagaccagccgccgctgacgcggcgacgccagacccaggacggggtcccgaccacccacatggcgaaggcacggcccggccgagggcaacgctgcgctggggaggaggccaagacaaaagatgaacggaccgccccccaccgcgggcggagagaacaaccgaaccgcgaggccgaccggacggagacaaaagaagaaccggcgcgcggcggggcagaacgaagagaggggccacga

SEQ ID NO: 3119 - DNA, 478 bp, Triticum aestivum
  Clone ID: uC-tsfl9316046a02b1
cgcggataaacaagctggactctacgaaagacaaagaacaaaagtctgtagggtcctactactacctgtgatacaggcaccacggttgatactttggtaccgttgcaactgcaacgcactctgcctgggttgcttgttgctggagaagaaactgaactggatttgtccaaaggggaggcgagacacggcaagggagcgacggctggagcgtctcgaggagcaagacaacatggaggacgtcggagcaaggagacaggccaacgccgccagcaggcggagcatgctaacctcccatggaatctggtgaaggaatgcagagaaagggaagcatgaagtgctgcaaggttggatcggatcaaggagcctgcgccagaagatgtaatcccaacctttcgaacccctcctgaacctggagtgttctgtcgggcttcggccacagtcattgcaggatgctgtgagatgaatcacacgtttgatg

SEQ ID NO: 3120 - DNA, 490 bp, Triticum aestivum
  Clone ID: uC-tsfl9316046a10b1
ttcgtccgtgcaagctctcctcttgcgctataccacacaggagagcattacacgagctgatttgctgaaggtgagttggcatggcgaggtttgctgccctcgccgtgtgcgccgctgcgcttctgctcgccgtggcggtgggcggcgccacggcgcagggcgtgggctcggtcatcacgcggtcggtgtacgcgagcatgctgcccaaccgcgacaactcgctgtgcccggcccgggggttctacacgtacgacgccttcatcgtcgccgtcaacaccttcccgggcttcggcaccaccggcagcgccgacgacatcaagcgcgacctcgctgccttcttcggccagacctcgcacgagaccaccggagggacgagaggcgctgccgaccagttccaatggggctactgcttcaaggaagagataagcaaggccacgtctccaccctactatggacggagacccatccaattgacagggcggtccaacta

SEQ ID NO: 3121 - DNA, 406 bp, Triticum aestivum
  Clone ID: uC-tsfl9316046c01b1
cgcggagcgggagcgggagatgatcaagacagaaccggcaccgctgatgacggaggctgacgaggacgtgtacgagcacgtagagcaggcatggtcacggggcgccagggccactgagtggaggaggccgagacgaaggagaaagaggaagtgcgcgcacgcccgcggggggagcaagagcaacgggacggaagactgagggggacgggggcagaacaggaactgggagtggaagaggcgaaagaggaggaggaagacgccagaacgaaggccgaaactggcagtggccaaacaacgacaagagtgggaaaagggaagaagcaggcaacagaaaagacatgcggcaaacacccaatcccccagccggcggaagagggaagagggccgaagcgagcgcccatccaac

SEQ ID NO: 3122 - DNA, 119 bp, Triticum aestivum
  Clone ID: uC-tsfl9316046c11b1
tccactgtcttccgggtaatttccattcctttgtagtacattctctgctattgggatgcgtgaattgtgatactcctacgtttaacaatttatatttatgatggcttctctctttgaat

SEQ ID NO: 3123 - DNA, 408 bp, Triticum aestivum
  Clone ID: uC-tsfl9316046c12b1
tctccactcttccggttgtgaggacaaagccacccacccaccaagagtgagtctctcccggtcccggctctccctccctccctcccctcgtgcggtagcctccaaatcatgcaacgtccaatccacttccaacaagataccgccaccatcctgcgcctgatccgacctctcttccatcagcgacagcgacctcgcaacccccggctccatcgggcgagggaatggaggaggagggcgcgaggaaggcggtgctcttcaggctgttcggcgtcgaggtccgcggcgcggaggaggatgatgacgcggagcccatggagctcaagaagagcaccagcatgcccaacctcgcctgcgcctacatcgtgccgattctcctgcccggcgaggccagcaacgacaagggctacg

SEQ ID NO: 3124 - DNA, 294 bp, Triticum aestivum
  Clone ID: uC-tsfl9316046d07b1
tacttattagtttataggctcccagaaagccttagctgtctgtacgccagtcagaaaccagtcagaaagaagaaacagcagaagcaaggaactgtgcctagtaaccggtttggtgtcatcttggagtgggagggagttgttgtggaagatgatgatcctgacctggaccccctggtgtggtacgttctgttactggacaaggcgacaattttttcttccgatgaaatgctgaaggaaattgagggaatgagaactgaccaggctatttaagaagtctttagttggtcgaaagat

SEQ ID NO: 3125 - DNA, 330 bp, Triticum aestivum
  Clone ID: uC-tsfl9316046e09b1
aatccccgaaaagctcccacttttcacccatttttccggctggtcaagataacgggggtgacagagaacacctagggctggtgcctgaaccatgtgaggtgaatgtcaaacagactggcgcaatgcatgggctgtccgagcccatgagtcactgtggaggatggcatgacgaacaagctactgctctaccggctccactcgatgggagaacaactggaccgtgatgtcaatcaggcagctacacaggaagaacagacgcaacgagtggtaacactgaaagaggagccatatgacatgctgcccaagctaaccactgtacgcatgtaacaa

SEQ ID NO: 3126 - DNA, 526 bp, Triticum aestivum
  Clone ID: uC-tsfl9316046f03b1
ttcgtcctcgcggcgactagcgtcgttgcgcagctggacactacatgcagccagggctatgggcaatgccaacagcagccacaacaacaggtgaacacatgcgctgctctcctgcagcagtgtagcccgacaccatatgtccagtcacaaatgtggcaggcaagcggttgccagttgatgcggcaacagtgctgccaaccgctggcccagatctcggagcaggctcggtgccatgccgtctgcggtgtggcccaggtcatcatgcggcagcagcaagggcaaagtttcggtcagcctcagcagcagcaagggcaaagttttggccagcctcaacagcaggctcccattgagataagaaggatggtgcttcagacccttccatcgatgtgcaacgtgaacatcccgcaatattgcaccaccaccccatgcagcaccatcactcagacccggtacaacgtgcctatggccactacctgtgatggtgggacctgctaagatctgtgatgcgctaactagaccgacacca

SEQ ID NO: 3127 - DNA, 421 bp, Triticum aestivum
  Clone ID: uC-tsfl9316046g03b1
tcagcaccagtgcacgcgccggcgccggcccccgaggaggtgagcagccctgacgcgaaggagaagaagggcctgctgggcaagatcatggacaagctgcctggttaccacaagacaggggaggaggacaaggccgccgccgctacaggcgagcacaagcccagcgcttgatcgccgccgtgcccgagacccgtgaccggacctcgattgaattgttggcgtgtgttgtgtttgctttacgtctaagttggtgtcaaggtgggaggggttcgatcgtctttgaaggtccggtccgtgaagcccgttcagtgacgggtgcttctgtttcagtttgcttcagagtcaggtcctggatgttgtcaagtttgtttacttatgggcacttgtgtattggcttattgctgggcattttgccttgata

SEQ ID NO: 3128 - DNA, 412 bp, Triticum aestivum
  Clone ID: uC-tsfl9316046g05b1
ccttaggttaattgagatgaagaagagaggcaagtctgatatggatgcttatgggtatgctagtatcgcaggcgaaaacgatcaagatcctcctccagaaaatgtttcagttcccttgcctgacatggtgctgcctccttcatttgattgtgacaatccgacataccgttaccgctttctggaaccaacctctactgtccttgcagggcctgttctagatgcgcatgggtgggatcatgactgtggctatgatggagtaagcgttgaagagtcgcttgctctccttaacaaattcccaggtactgtggcagttcaggttaccaaggccaggagggaatttagcatccatttggattcttccatctcagcaaagcatggggaggatgcgtcttcccttgctggttttgacatc

SEQ ID NO: 3129 - DNA, 69 bp, Triticum aestivum
  Clone ID: uC-tsfl9316046g06b1
acctctcattctaccggtgtgacgccaaaggcatccaccgggcaagagggagtgtttttccggtgcccg

SEQ ID NO: 3130 - DNA, 53 bp, Triticum aestivum
  Clone ID: uC-tsfl9316046g12b1
gatttgagaggtatcccggttacccgcgccggcatgcgaccatgtttcactgg

SEQ ID NO: 3131 - DNA, 401 bp, Triticum aestivum
  Clone ID: uC-tsfl9316047a09b1
ctcaaatctgttaaagtgccgtctatcacctaccatccgctgcctctcccacgctagcgcacatgtacgagcgctcagcatgtccgtcctccgtgacatcttgaacagtgggccactaggttccactaagatcattcaaggcgagcaacggaacggcatccaaagcccgaactaccaatgcgcagcagcaaacacggtgaactggcaagcggatgtggagagatgtatagactgggaagcccgcagccggcgcgccaccgggatgaccctcgccttcctcaccgctgcggctaacgagctcggctgcccccttccttgctgacaaggccatatttggagctgacaatcagcgacacttgacagttggcgcgagcagttgctgcatggtcagcgagcaggat

SEQ ID NO: 3132 - DNA, 531 bp, Triticum aestivum
  Clone ID: uC-tsfl9316047b08b1
gccgtcctagtctccatctttgccgccgttgccgccatcggcaatgaagattgcaccccatggatgagtactctgatcactccactcccaagctgccgtgactatgtggaacaacaagcatgtcgcatcgaaacgcccgggtcgccgtacctcgccaagcagcagtgctgtggggagcttgcaaacattccgcagcagtgccgatgccaggcgctgcgctacttcatggggccgaagtctcgtccggatcagagcggcctcatggaactccccggatgccctagggaggtgcagatggacttcgtgaggatactcgtcacgccggggtactgcaacttgacgaccgttcacaacactccgtactgcctcgctatggaggagtctcagtggagctagagacaattctctcgctcatgaataaataagcatgttgcgaccatacatgtgtgacatgcatatatgcatataggacgaggctcgcgcgctcatcatgtgtggtgctatgtgctacatatatggataagaataaag

SEQ ID NO: 3133 - DNA, 64 bp, Triticum aestivum
  Clone ID: uC-tsfl9316047b11b1
tcgttaaaaaaaaaaaaaaaaaaaaaaaaaaaaaaaaaaaaaaaaaaaaaaaaaaaaaataata

SEQ ID NO: 3134 - DNA, 342 bp, Triticum aestivum
  Clone ID: uC-tsfl9316047c11b1
ttccacgcgtccgaagaggctcaatgccccgtctcactggatgcttgacaagcttggtggagcttttgcccccaagccatcatctggtcctcacaaggccagggagtgccttcctctgatcctcatcctgaggaacagactgaaatatgctctcacctaccgtgaagtgcagtctatccttatgcagcgtcatatcatggttgatggaaaggtccgcactgacaagacctaccctgctggtttcatggacatcatttccattcccaagactggtgagaactacaggcttttgtatgacaccaagggccgcttccgccttcactctgtcagggatgaggatgc

SEQ ID NO: 3135 - DNA, 78 bp, Triticum aestivum
  Clone ID: uC-tsfl9316047d08b1
gacgcgaaagcatctataaaagtgaaacctaaaaccaatccacaggacgaatgatcacaacgcaacgactggaaaaac

SEQ ID NO: 3136 - DNA, 485 bp, Triticum aestivum
  Clone ID: uC-tsfl9316047e02b1
tgggctgcttggaggggcaaggactttagcttccttggtcctttcctatttgcttctctgatgattttgctcgtctttgctttcattcagatcttcttcccgctgggcaagctctctcacatgatctatggcacgctggcggcactcatcttcagtggctacattgtctatgacacgggcagcatcatcaagcgttacaagtatgacgagtatgtctgggctgccgtcacgctctaccttgacatcatcaatctgctcctgggcctgctgactctgtttagggcgtgtgacaactaggcacgtctccctgcccctgctctctcgtgcctcaaatcccgtcgacgaatttggtatcctgatgagtctttgacatgaacaattgtatagtctggtctgtcccgctggcacggcgaaaatgttgcttactttaaatgagttgatccctagtagagagaaaacgttagaaaaccgtgcgcccgttttat

SEQ ID NO: 3137 - DNA, 254 bp, Triticum aestivum
  Clone ID: uC-tsfl9316047e07b1
tcttgcgttttttcacgcgtccgaccacgcgttcgcaccacgcgttcggatcgtggacggtcccggcgccgggaagcatctccaggccggctccaagaaggtcatcatcaccgctcctgccaagggcgccgacttccccacctacgtcgttagtgacaacgagggcgactaccaccatgacgtcgtgtacatcaacaggaacgttgtttgcaccaccaactggtttgagccatacaccaaggttctggacgagg

SEQ ID NO: 3138 - DNA, 403 bp, Triticum aestivum
  Clone ID: uC-tsfl9316047f02b1
gtggagaggaaacactgctaacgtcatccgttacttcccaactcaggctttgaactttgctttcaaggattacttcaagaggatgttcaactttaagaaggacaaggatggttactggaagtggtttggtggcaaccttgcttctggtggtgccgctggtgcttactcgctgttctttgtgtactcccttgactatgctaggacaaggctggccaatgacgcaaaggcatccaagggtggaggtgaaaggcaattcaatggcctggttgatgtctaccgcaagactctcaagtcagatggtattgctgggctttaccgtggattcaacatctactgtgttggaatcattgtctaccgcggtctgtactttggactctatgattctctgaagccagttctcctc

SEQ ID NO: 3139 - DNA, 292 bp, Triticum aestivum
  Clone ID: uC-tsfl9316047g02b1
tcttttggcgtttttacactgataacgttatccgatacttcccaactcaagctttgaactttggttaaacggattacttcaagaggatgttcaactttaagaaggacaaggatggttactggacgtgggttggtggcaaccttgcttatggcggtgccgttggtgattcctcgctgctctttgtgtactgccttgactatgctaggacaagggtggccaatgacgcaataggcatccaagggtggaggtgaaaggcattataacggtcaacttgatgtttaccgcacgactc

SEQ ID NO: 3140 - DNA, 321 bp, Triticum aestivum
  Clone ID: uC-tsfl9316047g05b1
tttttaggaggtggtggtgtttagagctcaatagtggatgtcaagggggttcgtcgtggtcgcggccgagtgcgactaggatttgaactcgaacacggccggcatggtggtggaccgtgcttctgcctataacagagactgaacgtcgcggacctgaccggatccctgcatggtatcaggaaatggaagacctctacaagcttaagcttattggggacttaagcgattgcgagtcatgtgatgatgctcaggaaaggagacaactcatactctgggggttcgatcagtactattggagttgattataaaatacggatccgt

SEQ ID NO: 3141 - DNA, 289 bp, Triticum aestivum
  Clone ID: uC-tsfl9316047h01b1
ggcgaatcggtgcgtgagtacaccatgaactaggcagcaccggtgtagctgacggctaaccctgtacaattctagtccggccaaccggagtaaacatggcccaattgggccctcggttattggtggaggagtatcatgaccaacgatgaactgattgtccaactctgttccgttgggtggacatctgatccgggatgttagtccagacggggacgaaaggagaactggtgctctcggtggctaaagcctaaagaggggcttggagacactaggtcttaagctagggctc

SEQ ID NO: 3142 - DNA, 267 bp, Triticum aestivum
  Clone ID: uC-tsfl9316047h09b1
ttctcactttttccaagctggcgacggcggaggtgcggaacatggccgtcagtcagccgccccatgcggtaaaggcgcacgatcgatcacctatgggagcgccacatgtgcaacaagtggggttctgtgctggggtccgcctggagggacgagcggaggtaatacctgtcattgtgcaccgctgccgtcggtggcgcatcaacttgccggtctgtgtggctgcggcaagcaccagaggaggcttgccgcgctgtgctgcatatgtcc

SEQ ID NO: 3143 - DNA, 322 bp, Triticum aestivum
  Clone ID: uC-tsfl9316048b01b1
tcgggttaccttgtctgaaaacttcctctcggccgacatatgatgacggacagcagctgcggatatgaaatgtgccttgttggatttgttggttcgttaggaagatatatctgcgtacgtttttttcgtgctgatggtggttacagcaaaagaagagtgcgtttggagtagcagctcgtgttagcatgtcgtgcgtgtccttgctctcccacctaggctgaagcgagaattggatcgtgtgtgcgcctctgtattcggcaagaagattacatgcatgtaatttgacgaagaaacatatgatggaaagactttggtctgctac

SEQ ID NO: 3144 - DNA, 481 bp, Triticum aestivum
  Clone ID: uC-tsfl9316048b02b1
tcgggcgtctccaagtccccctccaagtgcgccaccgtcggcatccagggcatcgcatggtccttcggcggcatgatcttcgcgctcgtctactgcaccgccggcatctcaggaggacacatcaacccagcggtgacctttgggctgttcttggccaggaagctgtccctgaccagggccgtcttctacataattatgcaatgcctgggggccatctgtggagctggagtggtgaagggcttccagcagggtctgtacatgggcaacggtggcggcgccaatgtagtcgccagtggctacaccaagggcgatggccttggtgctgagatcatcggcaccttcgtcctggtctacaccgtcttctcggctaccgatgccaagaggaatgccagagactcccatgttcctatcctggcccctctgccgatcgggttcgcggtgttcctggtccacctggccaccatccccatcactggcaccg

SEQ ID NO: 3145 - DNA, 489 bp, Triticum aestivum
  Clone ID: uC-tsfl9316048c05b1
gcactaagaaaaagaaagagaacaccagcaattgtgccggacagcgcagccggaaaagcgttaaaaaaaacacaccagttggtgagttggaaaatactccctccgttcctaaatatttgtctttctaggtatttcaacaagtgactacatacggagcaaaatgaatgaatctacattctaaaatatgtctatatacatccgtatgtgatagttcattgaaatatctagaaagacaaatatttaggaacggaggaagtactacagatagagaagctgcaaacacgcggagctgcaaacacgcgggaagttcatgttatgccgctgcttcatattctccttggaggtggatggagcgtgcagatatcattttcttcttggtgggtggtttcgatcactctccaccatctgtgcattaatccaatacaattacagggactagttcttccggctcccttccaccgcatgcgtgggcatggctacgccatacct

SEQ ID NO: 3146 - DNA, 453 bp, Triticum aestivum
  Clone ID: uC-tsfl9316048c10b1
ttttaatctgcatttctccagaacaatggcattaattcaacggtacctcctgtgatgggtgatgctaatgttgatcttgccgacttggagccatacatgaagttactgatggacgatggatcagatgagtcaattgacagcattctaagctgagatgtactgtaggacgttatcgtcaacatgggcctatggacctttgatgacatgcccttgtctgatggattatactgagggaatcgaggtcgctgggtgcctgtatatatagacaaaggaataagtattctggacatcaacaagtgcttgtgtctggtgcctatagaatagagcattagcgacctcagtctatggttatgtctagctataatggtcaggagacctaagtcttatgcaatagacctctgtcttgtgccctcagactatattatatctatatatgaaaccagggtgtgatgg

SEQ ID NO: 3147 - DNA, 498 bp, Triticum aestivum
  Clone ID: uC-tsfl9316048d08b1
tcgttaacatcaaactggcaaagttgggggttcttggagccctcgaagtaattgatgctgcaagaaaagctggtgttgcacttatgattggtggtatggtcgagactaggattgccatgggctttgctggccatctcgccgctgggcttggttgtttcagttttattgacctgcacacacctcttttattgtctgaagatccagtttatggtggctatgaagcttctggacctgtctacaagtttaagaatgctcgaggccatggtggttttcttcatttggacaacaataatggatggaaatgaagatggttaacgcacgccttatactccgggtttatagagcatatcagcgcattcagtatagagtgtagaagttatcacacccgacgactatcgtgtgggactcaaatgtaacacaatcaattgtaagcataatggtaaagctcacgtgtatgtactggctgaactgtaagccctgtgaggcctatgatatttg

SEQ ID NO: 3148 - DNA, 472 bp, Triticum aestivum
  Clone ID: uC-tsfl9316048d11b1
tcgcagcttctcccccttccccactatacttccaagcaaaggcgagaaccctagcctcacgagcaccgtgcagcggagatcccgaccatcaccgcgatgcaggccccgacgaacccccccgtcgaccttccgccgctggtggcgccgccgccgagggtgaaggcgccgaccccgcgcccccctgcgacggactggctccagcccgactccccgggcgtattattcaccaacgccgccgtagccgtcccactgggctccgaccaccgccgtatcgccatcgccgtcgatctgtcagaccagtccgcctacaccgtaagctgggccgaagccaactacctccggcccggggacgccggcatcctactgcacgttcgctccaccaatgttctctacggcgccgattggggctccgtcacccccacattccccgaggacgacgctgaggtcgccgcgcgcacgatggaggaggact

SEQ ID NO: 3149 - DNA, 81 bp, Triticum aestivum
  unsure (1)..(81): unsure at all n locations
  Clone ID: uC-tsfl9316048e10b1
ggcctgagccttgctgggagtgtcggcacgcacanggcagcgaaggtcattacacgtctctctgctctcgttagccacgaa

SEQ ID NO: 3150 - DNA, 560 bp, Triticum aestivum
  unsure (1)..(560): unsure at all n locations
  Clone ID: uC-tsfl9316048f04b1
cccacgcgtccggaacccgcaccacatggctgggatgttttcaaccagaaaaccttgtatgatgcatacaagaagaggaccaaaaacatagaagtcgacatggatgcatacaatagagcgaaagaaaccgatcctgaattctaccgtgaggcttcaagtcttcaatatgggaaggtgtctagggtggcggaaccaaacatcgaccgaatggttaatgagctcaaggagcgggacgagaagcgcaaggcgttcagcaggaggcgcaagttcaacgaagacaaggacgttgactcgatcaacgaccggaacgagcacttcaacaagaagatcgagagggcctttggcaaatacacgctcgagatcaagaacaacttggaaagagggacggccttgccagattaaggttctggcgtttggggtcgcccactcaactctgcggtactgtttcccacctggtttctttgcttgtaacctgtgttcagaatatantttctgaagtgtaagaaagtgaaacctgcatgtaatgtaatgatgatgctgtgactgatacatgtacaaca

SEQ ID NO: 3151 - DNA, 468 bp, Triticum aestivum
  Clone ID: uC-tsfl9316048f08b1
tttcttttgaccgcaatgcagtcgctcaagaagctgaccttggctgagaacgagctgaaggatgccggggcggtggcggtcgcaaagtctctgcaagagggccacccagatttgaaggagcttgacgtgagcaccaatctgtttcagaggtctggagcccgctgttttgcccaggcggtcgccaacaagccaggctttgtgctgctgaacatgaacgcgaactacatacccgaggaagggattgacgaggtgaggaagatcctgaaggcaggcgagaacttggcggacgtgcttggcccgctggacgagaacgagcccgaggggaacccggatgacgaggatgaagaagaggactatgatgatgaggcaaagtatggggacgataacgggaaggatgctggcctcggctcgaagctgcaagacctgaaggtggaggcggaggaagactaaaccccccccccctgcttt

SEQ ID NO: 3152 - DNA, 372 bp, Triticum aestivum
  Clone ID: uC-tsfl9316049a08b1
tcgcccacgcgtgcggggacgcgtgggcgagcatgaatgcgaccaggagcggataataaatttgggccaggagcggcagatcgatccagtaatggaggcggcaaggggggatcctgacgacccattggtcgtcttccgcccagagcgggtcggaggatggtgggcgcgtaaccaggacttcatacggagacgcgcggagacgctgaggcgacccgacggccacgcggaggccgatgccgctgccgagcgtagcagagagccggcagcctgcaagaactacatggagggactgcatcttgccggcggtggacgaggtgcggaatgtggagtgcgcggtgtgactggaggacctggtggtcggaggcaggaagc

SEQ ID NO: 3153 - DNA, 535 bp, Triticum aestivum
  Clone ID: uC-tsfl9316049b05b1
tttcacaggcccccgttgcagcagcagagcagatcgatccagtacgtctcgggtgaaccagctgagcagatcgatggcgctcactcgtcgcatggccgcatccgccctcctgctgctgctcctcctcgtcgccacagagatggggacgacgaggaccaagacggcggaggcgcgggactgcctgtcgcagagccacaagttcaagggcgcctgcctcagcagcagcaactgcgccggcgtctgccgcaccgagaacttccccgacggcgagtgccacacgcacaacttcgcccgcaagtgcttctgcaagagggcctgctagccggcctgctcgccccggccgccctgccggccagcgccgagacgtccgatctgttcgtcagtgctgtctgtagatctgttcttagtgcgttcggttcgcggcagagctgtcgtgtgacgactgtgcccgataagaggaaacaccggctctgagttgttcgctctgctagagcggttgtgtgttggtgtgactggagagataggcgtgttagat

SEQ ID NO: 3154 - DNA, 506 bp, Triticum aestivum
  unsure (1)..(506): unsure at all n locations
  Clone ID: uC-tsfl9316049b06b1
ttgattgcactatcactgcggcatgagatcaaccggggcttctttaccttgagagagattggtcatggtcgtgatctgaagaaattcctcattgtgactggagggctctggcttctttctgttcttgggagctgctgcaactttttgacattgtcatatatagtctttgtggtgctgtacactgtgccagttctgtatgagaagtacgatgacaaggttgatgcttttggtgagaaggccatgatcgaattgaagaagtattatgccatctttgaagagaaggtcctgtcgaagatcccgaagaacaagaagcactagatcacaagagttaccctgccgcgtattgccatctgtgttaccctcaacttgtcgcctcattttgaaggatggctctgtgtcattgcgtctgtctttaggtaatactactttgatagtacatatagatgttggtgtgcctgatctttttgtggggttttccgctgaagatggntgatcctcattttttt

SEQ ID NO: 3155 - DNA, 278 bp, Triticum aestivum
  Clone ID: uC-tsfl9316049c02b1
tcggctgatcattgccctccaaccaggaccctgacagttggtcatgatggtttcttggaggatgtctggtgcccatgtgtgaccgtggggaggcgtgtcagatcccgtggggatggcgtcgacgttatgaagatctagttgtactcagaggagtgcatcaacactgaatacactgtggccacctcttctgtagttaccgaacaattggaccgaaagactatgcttacgaggaccatgggactgctaccgcttggagatgcatgccttgaatgggtgca

SEQ ID NO: 3156 - DNA, 140 bp, Triticum aestivum
  Clone ID: uC-tsfl9316049c10b1
ctggcgcgcatgctggtacccttaccgaatcctgcccgtgcgccccacgcatttgccgaccacctgtgagccgggcggcgcgcacaacgtgaggtgagcccgatacagtgaggccctgcggtgaccctgcctgaccctaa

SEQ ID NO: 3157 - DNA, 513 bp, Triticum aestivum
  Clone ID: uC-tsfl9316049d09b1
tcgcgcctgggtgcttgacaagctgaaggccgagcgtgagaggggtatcaccattgatattgccctgtggaagttcgagaccaccaagtactactgcaccgtcattgatgcccctggtcaccgtgacttcatcaagaacatgattactggtacctcccaggctgactgtgctgtgctcatcattgactccaccactggtggttttgaggctggtatctccaaggatggccagacccgtgagcacgccctccttgctttcacccttggagtgaagcagatgatctgctgctgcaacaagatggacgccaccactcccaagtactcaaaggcccgttatgaggaaattgtcaaggaagtctcttcgtacctgaagaaggtcggctacaaccctgacaaggttcccttcgttcccatctctgggtttgagggtgacaacatgattgagaggtccaccaaccttgactggtacaagggccctacccttcttgaggctcttgaccagatcaatgagcc

SEQ ID NO: 3158 - DNA, 404 bp, Triticum aestivum
  Clone ID: uC-tsfl9316049d10b1
tcgggaaagggatctcgccgaaacgcaccatggagctcgccgcaaccagcgctgctgccctccggtgatcgtgggggttggcgcttacgagggtccctacggacaggaggagtggtatgcgccctagggtgtccttggttgtctctggaggaatacatgatgaaagatggactgattgccaggctcccctcagggactaaccagctgccccgaaggcggtggatgacggggacaaggatctaaccaagcttcggggcatgggccttgtcggcggcgacccatccaaggaaaagatcctcttggaagtcactgagctgctgctacaggaggagtatcagatgaatgatgcatacgacctgctgtagaataagcagaatgaggagaatgctgggatgaaagcactg

SEQ ID NO: 3159 - DNA, 435 bp, Triticum aestivum
  Clone ID: uC-tsfl9316049d12b1
tcggccaaaggttatccaatccgcacagaaatccccatctcaaaaccctagccctcatccccgatcccggcgagcgagatggccaacccgagggtgttcttcgacatgaccgtcggcggcgcgccggcggggcgcatcgtgatggagctgtacaaggacgcggtgccgtggacggtggagaacttccgcgcgctctgcaccggcgagaagggcgttggcaagagcggcaagccgctgcactacaagggcagtgccttccaccgagtgatccccgactttatgtgccagggcggctactttaccaggggcaacggcaccggaggcgagtccatctacggcgagaagttcgtcgacgagaagttcgttcacaagcacaccaagccccgggatcctctgcatggacaacgcctggcccaacaccaacgggttccagtt

SEQ ID NO: 3160 - DNA, 268 bp, Triticum aestivum
  Clone ID: uC-tsfl9316049e05b1
ttggccgagcacttgaagaaacactggagaagttagaccgattaattgatgagatattacagttgcaagacttcctggatggagtatgtaccaacatcatgcacatgcacatcacgaagctggagctggacactgggaatttggaccagtgtgtacagacccgatctgagctggaggagaaccagatgaagcacaacaggtgggagcaggaccagattgcgtgaatgaaggagaacatcgggcgctttgggcacaggtacaacaagat

SEQ ID NO: 3161 - DNA, 297 bp, Triticum aestivum
  Clone ID: uC-tsfl9316049e06b1
tttgaaccggacgctgagcggagactttggtatccaccccttggggctgctcgaccctgagggtaccgagggcttgatcgagcccagggggttggcctggggctagagcgtcaacggtcgtacggggaggattgcgtgaggagagatgaactgactggacgccttcggtaggggggtgaacagcgtgaaccgagacggcagatctgacggggacaaaagaggaactggccgctccgcgtggcacataccaaagaggagccggacgacacacggtctaagcttgggacatggcgctga

SEQ ID NO: 3162 - DNA, 400 bp, Triticum aestivum
  Clone ID: uC-tsfl9316049f09b1
tcgctcctccaagaccaccaaggaggagaagaaggacctcaaggacctcaccggcaagctcttcgccaccctcgacgggcttgaccatgcagccaagatcaagagccccaccgaggccgagaagtactacggcgagaccaagactgatctcggcgatgtcctcgccaagctaggctagatggatcggaataatggccgcgttgcttccaggccttttatgttagttcatatttggaagccagcaatgtaacttccctgttgataatatgtcaacaagcacttaagtatgattctatcttgagattcagtcatatgaagagtcaacattaagacaaactgcgcacaaatccgatgtaacaacgaatagtaacttgcagttagagctcaacaagcacgagtc

SEQ ID NO: 3163 - DNA, 466 bp, Triticum aestivum
  Clone ID: uC-tsfl9316049h02b1
tcgctcgctatgttgcttgacgagaatcaaatgaagcatgacaaatggaaacaggaacagatagctaatatgaaggagtacattgcccgatgtgcacatggatctgcgaagcttgctcgtggggctcagagcaaagagaagactcttgcaaagatggagcgtggaggtcttgctgagaaggctgttaatgacaggattcttgcttttcgctttacagatgttggcaaactaccaccaccagtgctgtagttcgctgatgtgacatttggttacactcccgataatctaatctgcaagaaccttgacttcggcgttgaccttgactcgagagtcgcactggtcgctcccaatggcgcaggtaagagcacacttttgaagctcatgacaggtgacctatctacgttggatgggatggtcagacgccacaaccacctaaccattggacaattccatcaacatttcactg

SEQ ID NO: 3164 - DNA, 354 bp, Triticum aestivum
  Clone ID: uC-tsfl9316050b04b1
tgtgcgcagacttgatatactattgcttgggttgctgaggaaaagggcgaggggcatttaatccaagacacaagcaaccagtgtttaggtaaaaatgagattgcaaggtcatgctgcaatcatagccagtgtttcgcacacctgcttagataatattgcaggtgtgccgtgtcggtattgagttgatgcttgacagtaaaggctgtttgttggtgcattcacttgtacagattggacaaaagcgaagtcttgtaataagtaaatcatttgtacatgcttacataatagtgacgtttttctggattgttagtcgaaacaaacccctttaaacagctggttgtatagcgaagaggc

SEQ ID NO: 3165 - DNA, 133 bp, Triticum aestivum
  Clone ID: uC-tsfl9316050c04b1
tcgtccacatcggcgaagaagggcggtaggttctagttcgagcggaagctcggtgacttcttcaagcaccagatcgagtcggacacctacgctgtgtacggagacagcttaagagctgtgaaccgcattgctc

SEQ ID NO: 3166 - DNA, 259 bp, Triticum aestivum
  Clone ID: uC-tsfl9316050e04b1
tcgaaaaacaaaaaaaagagaaaaccatgaaaaaaacaaaacacaataaaactcaaagatgaccctgaagagattcttgtgcgtacaactggcgtcaacatggcccattcaaggccaatggggcgccctttttgggggacccaagtttccatcccctggctgcccccctttgctcttttttttagcgtcccctcattgcagttccccggccggggttctccaacgacctgacggggaaaccccgcgcgttccccaattt

SEQ ID NO: 3167 - DNA, 511 bp, Triticum aestivum
  Clone ID: uC-tsfl9316050g03b1
tcgtctcaacgttgtacgcccctctcatccgtgatggtcgtatggagaagttctactgggctcccacccgcgacgaccgtatcggtgtctgcaagggtatcttccagaccgacaatgtcagcgacgagtccgtcgtcaagatcgtcgacaccttcccaggacaatccatcgactttttcggtgctctgcgtgctcgggtgtacgacgacgaggtgcgcaagtgggtgacctctaccggtatcgagaacattggcaagaagcttgtgaactcgcgggacggaccagtgacctttgagcagccaaagatgacagtcgagaagctgctagagtacgggcacatgctcgtccaggagcaggacaatgtcaagcgtgtgcagcttgctgacacctacatgagccaggcagctctgggtgatgctaaccaggatgcgatgaagactggttccttctacggttagaacattctccatacacacccaccatctcttgctgcataagaagaggttaaggg

SEQ ID NO: 3168 - DNA, 507 bp, Triticum aestivum
  Clone ID: uC-tsfl9316050h05b1
tcggtcggcggcggaactgaaggagatagcgcacgggctggagaactccggccaccgcttcctgtgggtcgtgcgtacccctccggctgacccggccaaattcttcctgccgcgtccggagccagacatggacgcgctcctcccggaggggttcacggagaggacacgagacagggggatggtgctgaagatgtgggcgccgcaggtggaggtgctgcggcacgccgccacccgcgcgtttgtgacgcactgcgggtggaactccgtcctggaagcggcgtcggccggggtgccgatgctgtgctggccgcagtacgcggagcagaggctgaacaaggtgttcgtggtggacgagctgaaggtcggagtggtgatggaagggtacgacgagcagcttgtgaaggccggggaggtggaaacgaacgtgaggctggtgatggggtcagaagaaggggaaaagctgatggataggctggcattggccaaggagaacgcttgccaaaacgc

SEQ ID NO: 3169 - DNA, 397 bp, Triticum aestivum
  Clone ID: uC-tsfl9316051b06b1
ggatgcggacgcacagggcgacggcattaacggctttgaccgctctgcaaaaactgttagaactgtgtgaccaccgcgcatgcgttgcccgtgatcacacatgattacacgctgcagctgttgtgcgtccgtgtgaccctgatgagcgcacaaccggacaactgatggacttatggccccacggggccattgtggctgtgtgcaggactacataacaactgatgagaccgactgccctccttcggtgaacagctgaacaactgtaccgtgctgacagccacacaggaacaacagaagatctggggctccgagctgcaaaactaacagaggaactcgaggacacaaggcgtaactttgcgactgtccacaacgttacaactgggagaccggtaaaacc

SEQ ID NO: 3170 - DNA, 222 bp, Triticum aestivum
  Clone ID: uC-tsfl9316051b08b1
gcgacagggccgcaccctctacgggttcggcggctaggccgcgccggtccgggcaagaaggacccgtctcgcaccaccggatttgtgctagtagctacgcgttgtctgatggtggtgttcatgtcctcggtgtaatggccgcatctcgctgctgtttgccctggatttgtttgttgtttggatgtactaggatggaatggaaatcgcagcattttacccctg

SEQ ID NO: 3171 - DNA, 485 bp, Triticum aestivum
  Clone ID: uC-tsfl9316051e06b1
gcgcaatgtccgctttggagtcagggagcacggaatgggcgccatttgcaacggcattgcgctgcacaccccagggctcattccatactgtgcaactttctttgttttcaccgactacatgagaggtgccatgaggatctcagccttgtctgaagctggagttatctatgtcatgacccatgactctattggtctgggagaagatggtccgacccatcaacccattgagcacttggtgagcttccgtgcgatgccaaacatgctgatgttccgtcctgctgatggcaaggagactgccggggcatacaaggtggctgtcctcaacaggaagaggccatctattctggctctctccaggcaaaagcttcctcatctgcctggtacctcaattgagggcgctgcgaagggtggatacactatctctgacaactcgaccgacaacaagcctgacttcatcataatgagcactggttctgaggtagaga

SEQ ID NO: 3172 - DNA, 459 bp, Triticum aestivum
  Clone ID: uC-tsfl9316051e11b1
ttgctcgacgccaagatcatcaacgaccgcgagacgggcaggtcccgtggcttcggcttcgtcacgttcggcagcgaggagtctatgcgccaggccatcgaggagatgaacggccaggagctcgacgggcgcaacatcaccgtcaacgaggcccagtcccgccggtccggctgtgggggcggcggcggcggctacagaggccagcgcggcggtagcggaggctacggcggcggcggcggtggctactgcggccagggcggtggcggctacggccagggaggcggtggcggctacggccagggcggtggtggctacggcggccagcgcggtggcggcggctacggcggtcagcgtggtggcggtgactccggcggccagtggaggaactgagcggtggggcccttcagttatcgatctatctaccatcttgttgtctatcgcagcaagttatcttcagtt

SEQ ID NO: 3173 - DNA, 233 bp, Triticum aestivum
  Clone ID: uC-tsfl9316051f08b1
ttttaaaaaaaaaaaaatgagaaaaaaaatgattaaaaaaaaaccgataatgcatgatggatgaccatgatgagttcgtgtgggggcagctggagtaattatgggctttcggggccattgttgctatgtggaggatttcatgtagagagatgaactgaatgtccgtgtccgctcgctgggagaacaactgaagcgagatgcctgtctgaccgggactaaagaagaactggcgc

SEQ ID NO: 3174 - DNA, 485 bp, Triticum aestivum
  Clone ID: uC-tsfl9316051g06b1
gttgtggcaaacttcagcgcttcgtggtgtgggccatgccgtgtcattgcacctgtttatgctgagatgtccaagacttaccctcaactcatgttcttgacaattgatgttgatgacctaatggatttcagctcaacatgggacatccgtgcaaccccgacgttcttcttcctcaaaaacggccagcagatcgacaagctcgtcggcgccaacaaacctgagctcgagaagaaagtacaagctcttggtgatggcagttgaaccatgctacagaattagaacagagccagcttgtcattgcttatatatctgtattgccatgcttgtgtgtcttatgtgttgcatgatagtttcctggtgtacagtttccgtgtcttttccgtctagacaatgttttacaattttgcgacacgcatatgcatatgctgtgaaactgtaagatgaccctgctggtaaaatgctagttttgtgagagtgtcatctgc

SEQ ID NO: 3175 - DNA, 481 bp, Triticum aestivum
  Clone ID: uC-tsfl9316051h09b1
tcggatctccttgatttgtacatttgctccagctccagtttgatgttctgatgccgacggtgacggatcttaccagttgcggtgaaggtgctgaacatcttctgcagagcaatggagaggtccttgtaggtgttgtacatcttgagatccaccttgcgcagtggaatctgccaagaaatggaaagtgtatgcaacatcattttcttgccctctctgacatgtaccggctgccgcacaaagcaggcatcaagtgcgcatatgtttatggttcggaaaggcgttaataattcgcgtcggcgctatggaggcgacaaacaacacacagcggatggtgtcgccttgcgcgctttctgccatgggatctcctttgtggatattttgccctacttaaagcgtttgcccatttgcatgtcatgttttattcaacatcctgtaagtatataacgaatgcaaactcgagaaaactagtttataatgggga

SEQ ID NO: 3176 - DNA, 483 bp, Triticum aestivum
  Clone ID: uC-tsfl9316051h10b1
tcggagagaccgagcgaggaaagttgccgtgtgagacctgagagttaggagatatggctgggattggtcctatcaggcaggactgggagccgatagtggtgcggaagaaggcgcataacgccgtcgacaagaaggacgaaaaggccgtcaacgctgcccgccgctccggcgccgatatcgacaccaccaagaagtacaacgctggaacgaacaaggctgcatctagcggaacttccctcaacaccaagcggatcgacgacgacaccgagaacctttcccatgagcgtgtttcaagtgacctcaagaaaaaccttatgcaagcaaggctggataagaagatgacccaggcacaacttgctcagatgatcaatgagaagccacaggtgatccaggagtacgagtcgggcaaagcgattccgaacaatcagataattggaaagcttgagagggcacttggagctaagctgcgtagcaagaagtaat

SEQ ID NO: 3177 - DNA, 374 bp, Triticum aestivum
  Clone ID: uC-tsfl9316052a02b1
tgatgctgcagatctctttcttggatcaaagctacaatcatcagacatctctaaagacaaacaggccgatcctgctctagcggacatactaaagctgtccttctcaagctccgaggtccccatggcactccgttatgttgccatgtcagacgacaaagcactagagaactcattgctatctggatttactgagaatcgcgaggacggttctggaggaaatcatatcacttacacagacacttgtactgcaagcagcgaaagtgtgaagaaacatctgagcctggattccgttcaagacttggtgacgtcacggatgggaaacaaccaaccaactgaggtgatcgtattctgcagcggtggctttaaggacaatg

SEQ ID NO: 3178 - DNA, 327 bp, Triticum aestivum
  Clone ID: uC-tsfl9316052a04b1
ttcaacctaaagaagcacatttgctgccattgcgggaggatcaaaggtctcatctaagactggtgtgatcgagtctgtgctggccaaggttgatatcctcctacttggtggaggattgaccttcacattctacaaggcccagggattaactgcaggacagactattgaggaggaagacaaactcgatctggtaactacactgtgtgacccggaagaagccatggcgggacaactgatgataccgactgttgttgttgcagatgtcaaggatgcactagatgacacaaggactattgttgctgccactggtatccctgcaaggtggat

SEQ ID NO: 3179 - DNA, 403 bp, Triticum aestivum
  Clone ID: uC-tsfl9316052a08b1
cccttgcggctcggcgccgcccctcgtgagtgaggtaagacgcccgcaagagggagcggcccagcaaggcggggtcgtgcccgtgctgtgtccatctgctgacgagtgcatcgattatgggactcgtggggcgttgccgatgcctgcttgaatccaacccgaatgattatctgatcatggatctgcgttcggtagaggtacaacagagccgacctgccaagataccggggaccaaggcccaaactatcatccgtgtactagagatatctggggagcttatgtgacggattggctcagctacgcactgagcgagaggcttgaacacgacaaatgattgaggcctggtgccaccgacctgaatgagcttgcttcagactcctcctacgacacttgaggtactacc

SEQ ID NO: 3180 - DNA, 52 bp, Triticum aestivum
  Clone ID: uC-tsfl9316052c09b1
taaaaaaattaaaaaaaaagaaagaaaaaaaaaaaagaaaacaacctaaaag

SEQ ID NO: 3181 - DNA, 517 bp, Triticum aestivum
  Clone ID: uC-tsfl9316052d05b1
gcagaaaagccatgattcaactcgcaggggaactatttcggaaaatgggtgaagatttggatagcattgcgaaagattatacagcttctctcgactcatttatctcccagttgcccctgcagcaacacgttgatttgaagttccttctctttcgtttggacttcactgaatactacagccgtgtttcgtccaacaaatgaaatgagtgtgtgcttctaatgcggaagaaataggtgttagatacactttttggttggggctcatgaaaaaactgatgaagcaacactctaaaatccaggatgtacatgaacagttgaaaaggaagttatgatctcaaagctaagcctaatgatgaaagtgtatcagttatgtcatctgacgcacagattgttgattggcaaggaaatgattatctttctaatttctaaatatatactccctctgtcaggaaatacttgcatttttatccatttctcccgatagtattttcggatggagtattctgctagtactactc

SEQ ID NO: 3182 - DNA, 325 bp, Triticum aestivum
  Clone ID: uC-tsfl9316052e11b1
cagggaggcgacgccgacgcaaagggagaaacgccaacgcccgtagcccgaaaaacggttttgagttttgggcgaaccggcgcgggagcgcaccatgaaaaagaaagaaccggcgacgctgaaggcggaccctgaagaggacgagtccgtacaactggagcaggcaaggccccggggggccatagacaaactgcggaggaggacgagaccaaagaggaagagaaagcgcgcgaccgcccgcggggggagcaagagaaacgggacgggaacctgagggggacgaaagaaaaacaggagctgcgcgtggccagagcgtgaaaagagg

SEQ ID NO: 3183 - DNA, 453 bp, Triticum aestivum
  Clone ID: uC-tsfl9316052e12b1
caggcctgagccctgcagggatgccgacgcacagggcgaaagcatcaacgcctgtgccccgaacccgattaactgtttgaccaccgccgatccggagcgtgagatgactaagatacaaccagtaccgctgatgcttgtgcctgaccatgatgagttcgtgcacctgcaactggcatggtcctggccctccagtgccattgtgtgtatgaggacgagaccaagaataaagatgaagtgattgcccgcctgctgtgggaacaagaacaactgaaccgtaatctgaccctgacgaaaacaaaacaagaactgcctctcgcagaggtaaaagaggaagatgatctcgctgacactaagcctgaacctggccctggtctacaacttacaacattgtgaaaggcaaaaccctgccaatacacaacttaagcggctcataccacattccccatttggcag

SEQ ID NO: 3184 - DNA, 518 bp, Triticum aestivum
  Clone ID: uC-tsfl9316052g01b1
acggccccccatcctcatcctgctccctaaccaagaagcgagacgacggtgaccagtccccagagcgcactcccaccccatggatctgcagaccttcgtgctgagggtgaccatccactgccatggctgcaagaagaaggtccggaaggtgctcaagagcgtcgaaggcgtgcaggacgtgaaggtggatgcccagctgcacaaggtgatggtgaccggcaccgtggacgccgagacgctcatcaagcggctgcacaagtcgggcaagcaggccctgccatggcaacacacgcctgccaagaatcccgaccctgcgccgacagccccagccgacgcccccgcgccggccgaggacggcagcaaggatgctgctgtagcggagaagaagccggcggagcctgtgaaggagccgcaggccgacagctcggacatgaagccggagcaggagacggccccggagaagaagcctgaggcggagaatgatgcacaatctgagaagaggctgacaggaggaggag

SEQ ID NO: 3185 - DNA, 422 bp, Triticum aestivum
  Clone ID: uC-tsfl9316053a04b1
ttgcagtaacacacacacagagaagccaatctcgccggagagggaagcgtcgacgatgtcgggccgtggcaagggagggaaggggctcggcaagggcggcgccaagcgccaccggaaggtgctccgggacaacatccagggcatcaccaagccggcgatccgccgtctggctcgcaggggcggcgtgaagcgcatctcggggctcatctacgaggagacccggggcgtgctcaagatcttcctcgagaacgtcatccgcgacgccgtcacctacaccgagcacgcccgccgcaagaccgtcaccgccatggacgtcgtctacgccctcaagcgccagggacgcaccctctacggattcggcggctaggccacgccggtccagcagaacccaccttgcgccccagattcactagctagccatg

SEQ ID NO: 3186 - DNA, 463 bp, Triticum aestivum
  unsure (1)..(463): unsure at all n locations
  Clone ID: uC-tsfl9316053a06b1
gcaggttctccctggacatcgagaggcccacctacaccaacctgaaccgcctcgtctctcaggtgatctcatccctgaccacctccctgaggttcgacggtgccctgaacgtggatgtgactgagttccagaccaacctggtcccatacccgaggatccacttcatgctctcgtcctatgcgccggtcatctcggccgagaaggcgtaccacgagcagctgtcggtgtctgagatcaccaacagcgcgttcgagccgtcgtccatgatggccaagtgcgacccgcgccacggcaagtacatggcgtgctgcctcatgtaccggggcgacgtggtgcccaaggacgtgaacgcggcggtggccaccatcaagaccaagcgcaccatccagttcgtggactggtgccccacggngttcaagtgcggcatcaactaccagccgcccaccgtggtgcctggcggcga

SEQ ID NO: 3187 - DNA, 511 bp, Triticum aestivum
  Clone ID: uC-tsfl9316053b02b1
tttacaaggattcccctagtaacggcgagcgaaccgggagcagaccagcggagaaggagggaaagcggaagcagaagcaaccgagcgaacggcggcgacgacccgaagagggagaagaagatggtgatgcccacggacccgatgctatggcacaaggtggccgccgtctccggggtcgctgctcttggactgggcacctatggagcgcacatgttccgcccccagaaccctagatacaaagagatttggcagaccgcgtccctgtaccatctcgtccacaccgcggcgctgctcggggctcccatgaccaagcgccccaacatcttcggaggccttctgacaactggaattgtgctcttctctggaacgtgctacactgtggcttaccttgaagacaggaagttctcttcaccagcaccgatcggtggctttgcattcattgctgcttgggccagcctgctcttctgattgtattgtgttttatcgggtgaaaactatgtctaccttacac

SEQ ID NO: 3188 - DNA, 521 bp, Triticum aestivum
  Clone ID: uC-tsfl9316053c07b1
tgcggattagtgctcccaccgccggcgccatgagtaagttgcagagtgacgccctgagggaggcaatcacaaacattatcaatgactgccgtgagaagaaccgcaagttcgttgaaaccattgagctgcagattggtctgaagaactatgacccgcaaaaggacaagcgtttcagtggttctgttaagcttcctcacatccctcgcccaaagatgagggtttgcatgcttggtgatgcccagcatgttgaagaggcagggaaaatgggcctagactgcatggatgtggaatctcttaagaagatgaacaaaaacacgaagctagtcatgaagcttgcaaagaagtatcatgctttacttgcatctgaggctatcattaagcagattccccgtcttcttggacctggtcttaacaaggcaggaaagtttccaactttggtgtctcaccaggaatcctttgagtccaaggctaatgagaccaatgccacagtcaagttccagttgaaaaaggtgctttgcatg

SEQ ID NO: 3189 - DNA, 486 bp, Triticum aestivum
  unsure (1)..(486): unsure at all n locations
  Clone ID: uC-tsfl9316053c09b1
cacacacaccgaacgcgtttgacattttccgcccaccaccaccggagggagcgagctccagccatggccggcaagtgctacccgacggtcagagacgagtacctggcggcggtcgccaaggccaagcgcaagctccgaggcttcatcgcccagaagaactgcgcgcccctcatgctccgcctcgcgtggcactcggccgggaccttcgacgtgggcaccaagaccggcggccccttcggcaccatgaaatgccccggggagctcgcgcacggcgccaacgcccggctacacatcgccgtaaggctgctcgagcccatcaaggagcagttcctcattctctcctacgccgacttttaccagctcgctggagtcgtcgacgtcgaggtgactcgggggcctgaggtaccctttccccggggagacaggacaagaccgaggcttctgcagaaggncgacttcctgatgctacccaagggtctgaccacc

SEQ ID NO: 3190 - DNA, 405 bp, Triticum aestivum
  Clone ID: uC-tsfl9316053d05b1
taggatttgtgggtcggaatccagacactgttaaaaggctaaatgatgttgagaaggctaagaaagacttggagcaacaagagaattatgacccgaagttagctgatgaggagagggagaaaggtcatgagatgttcaagcagcagaattatccagaagcaataaagcattacaatgaggctatcaggaggaacccaacggatgctagggtgtacagtaatagggctgcatgctacaccaagtcgggagccatgcctgaaggtcttaaagactcatagaagcgtattgagctatacccaaccttcaccaaagggtatacaagaaaaggtgcagttcagtttttaatgcaggaatattgaaagggtaatggaaacttaccatgctgggttgaagcatgaccccaat

SEQ ID NO: 3191 - DNA, 480 bp, Triticum aestivum
  Clone ID: uC-tsfl9316053d10b1
tctatgaggatgatgatgacgaggatgacaaagatgatgatgttgagggagttgatgcaagtggaagatctaagcagagtatgagtgagaagaagagcaggaaggccatgctgaatcttggcatgaagactatcactggcgtgagccgagtaactgacaagaagagcacgaatatcctgtttgtcatctccaagccagatgtattcaagagccctgcctctgacacctatctaattttcggtgaggctaacattgaggatctgagctcacagctgcagtcccaggctgcccagcaattcaaagctgcctcgatcttagcagcgtcatctcaaaccctgaggcttctacagctgttcaggaggatgactaggattgtgatgagactggagttgagcctaaggacattgaactggcgatgacccacgccggtgtgcctaggcccaaggctgtgaaggcgctcaaatctgctgacggtgacat

SEQ ID NO: 3192 - DNA, 466 bp, Triticum aestivum
  Clone ID: uC-tsfl9316053f07b1
agggatgcggacgcagcagggccaaccgcgttaacccctttccccgttaccggaaaaactgtttgacctttgggtaccctgggcgagagcgcaccaggaggcaacgatagcacgctaccagctcgtgactgactgtggccagaagtacttcaagcgactgtaccaaaggttggccatggccaacgttgatactgtccccaacaactactgaaggaacaagaacagaatgcccgccttcgctaactgcaggagcaagttaaccaaagatgggacgctagctgtttctaaagaggaacgggagctaagctagtaagacgttagctacacatttgtcactatgatgacatagcttggcacttatcgctgtgaacaaggttaccacagttacagcccgggcggtacatatgtacatggatttgcatcacgtacaaattttatcagttaatgtgatagttgagagagcgct

SEQ ID NO: 3193 - DNA, 523 bp, Triticum aestivum
  Clone ID: uC-tsfl9316053g04b1
tttgcaacaacatccttgtcatgtgcgattgctacaccccagctggagtgccaatccccaccaacaagagatacaacgctgctaagatctttagcaaccctgatgttgccaaggaggagccatggtacggtatcgagcaggagtacaccctcctacagaaggacatcaactggcctctcggctggcctgttggtggattccctggtcctcagggtccttactactgtagtattggtgctgacaagtcgtttgggcgtgacatagttgactcccactacaaggcctgcctctttgccggcgtcaacatcagtggcatcaacggcgaggtcatgcccggacagtgggagttccaagttggcccgactgtcggcatctctgctggtgaccaagtgtgggttgctcgctaccttcttgagaggatcactgagatcgccggagttgtcgtcacatttgaccccaagcccatcccaggcgactggaacggtgctggtgctcacacaaactacagtaccgagtcgatgag

SEQ ID NO: 3194 - DNA, 417 bp, Triticum aestivum
  Clone ID: uC-tsfl9316054a03b1
cgacgtcgagtgccaccagtgatatcagtgcagcaccgatgatgctggtggctgaccctggagagtgcggagccggacaactggcaaaaggatggaccatgggcgtcatgggtcattggtggaggagggcagaacgaatgatgaacggagagccggtcgcccgtctctggttgaacaacgaacaagtgatgcgagactgacggctgccaaagacgaactagcaattggcgctgcataggtgaaagatgagctaggagacacggaggcctaaggtcgtaactggcgctggtcacaacgttacagactgggagaatgctgaaactacgcaactaaatagcttaagagcacagccgcatatcgccagttggccagatagcgaagaagccaagagggatcgacctgatcaacatttgcaac

SEQ ID NO: 3195 - DNA, 365 bp, Triticum aestivum
  Clone ID: uC-tsfl9316054b12b1
aggccgctgcccgccggatgcagccgcacacgggcgttggcggttacgcccacgcccgcgactctgactactggtttgaccaccggacactgctgtgcagcgagcaccgacgagtcagtcaataccggtgatgctggtgcctgtccgtgacgagctcgtggacgtacaacaggccgtgatatgctctttcagggccattgtgtctgtgtggaggaggccatgacaaaggatgatctgattgccctgctccgctcgctgatagaacaactgaacctacacgtcaggcatgctgggaccaactgagaactggcgctgcgtgtggtatagctgaaagaggagcgtgatgacacctggccttagcttgg

SEQ ID NO: 3196 - DNA, 146 bp, Triticum aestivum
  Clone ID: uC-tsfl9316054e06b1
caggcctgagccctgcagggatgacagacgcacacgcgcgaatggcacttaacgcctatagaccggtacctcgcaaacactgggtgcaccaccgggagatccacgcagcgtgagattcacgcatgatttcaatgagtgactcgctg

SEQ ID NO: 3197 - DNA, 359 bp, Triticum aestivum
  Clone ID: uC-tsfl9316054e10b1
gcgttctcacgcgttcgttcacgcgtgcgattttactgactattcacgctgtcttcatcttgcctcttggcatgatccagctgagatcggcagagatggagatccggcggcaggaggctctggcgacggccctggtgtcggtgctggcccaagaggctggagctaatgtgggcaccgctgcgatgagttacacaggcgggggacgccaggaacgggcatgtcgggacagtgcacaacaggactaatgctcgggtcgggcgctgcctgccagagactgttacaaccccggttacaacatcaacgtcacgtactggagggagctgcacgacacgacggagggggtcaaggaccgctaccac

SEQ ID NO: 3198 - DNA, 109 bp, Triticum aestivum
  Clone ID: uC-tsfl9316054g07b1
gtcaccagaagaactgctgctataagagggaaaactgaaagaggtgcttgttgaccataggcctaagctcgttactggctgttgtgcggcaacgtgcctacttggaaaa

SEQ ID NO: 3199 - DNA, 435 bp, Triticum aestivum
  Clone ID: uC-tsfl9316054g12b1
gtctcgactgccgccgccgcccgagatggcgatccgccgtgggccctcctgcgccgccctcgccctgctcgcgctcgcctccgtcgccgcggtctccgccgacgtcttcttccaggagaagttcgaagatggttgggaaagccggtgggtcaagtctgagtggaagaaggatgagaacatggctggtgaatggaaccacacatctggaaaatggcatggagatgctgaggacaaaggtatccaaacctcagaggactacaggttctacgccatctcggcggagtaccctgagttcagcaacaaggacaagacactcgtcctgcagttcacggtgaagcatgagcagaagcttgactgcggtggtggttatgtcaagttgcttggaggtgatgttgaccagaagaaattcggtggcgacacaccatacagcattat

SEQ ID NO: 3200 - DNA, 172 bp, Triticum aestivum
  Clone ID: uC-tsfl9316054h02b1
acaggcctgagccctgcagggactgcggacgcacagctgcgaaggcattatacgcctctgctccgttacctgtattaactgtggtgactcaccggcgatgccggtgtcatgagtgtcatcatgatgtcacctgcagcacgcgctgagtgctgctcggttgacacgctgagga

SEQ ID NO: 3201 - DNA, 494 bp, Triticum aestivum
  unsure (1)..(494): unsure at all n locations
  Clone ID: uC-tsfl9316054h12b1
ggtgtctgagggcaccaccttcggggtcgttgccggcgccaagacgaacgtgctggcatcgccagagtgtgcgtcggcgaccctgtgcgggccgatcaagaagcacatcatcgagcacttccatcacaagaagcccgtgccgcccaagccggagcccaagccccagccccacccggactacggccccgtgcccaagcccgagcccaagccgcagccccacccggactaccaccccgtccctcccacgcccacctacggcggcggcagcggcggcggtggataccatggacaccactgactccgatctgccaccgtccggcctagcagtgaaatttcatggcttgttgctgtcagtgagtgagcgacgttgctatttatgtcacgggttagcttgatcttctatcattcagaataacagttgtgagggataagtatgtgtgtcaggcaaatgtacgggtaatgggtcagttnttttttacaaggtttggaatatc

SEQ ID NO: 3202 - DNA, 96 bp, Triticum aestivum
  Clone ID: uC-tsfl9316056b11b1
gggaacgcgcatgcgtatggcgatgcggagggcggatatattcgtgtgccgatcgtgagcgaaccgatcgtgctcgattcgctgtagttgcaacgc

SEQ ID NO: 3203 - DNA, 294 bp, Triticum aestivum
  Clone ID: uC-tsfl9316056c08b1
ggcctgagccctgagggactcccagcgcgcaggccgaaagcgtctacgcccgttgcccgaaacacagatttgagttttggccaccgcggagcctgagcgcgcgatgaccaagattgaaccagtaccgctgatggtgtggcctgaccatgatgaggtcgtgcaccacaactggcatggcatggcccttccagggcatcgctgctgtggagaggaggacatgagaagagatgaacggattgcccggctccgttcgctgacagaacaaccgaaccgtgatgccaacctgaccgagac

SEQ ID NO: 3204 - DNA, 404 bp, Triticum aestivum
  Clone ID: uC-tsfl9316056c12b1
tccttggtatcgcgacctctgtcagcagtttcttcggcgagagcagtctgcttgggaagaaagagggtggagagcagcacgaccctgctgctgcttctgttcctccccaggtgggcttacaaactcagcaggagaacacgaggtttggtcgcataatgaggggtggatttggagacatgttgcgaggcaaagcaaagggcggtgatgaacccagctgatattatcaacgttgtcaatcaatacaatattttccaagcttgatttcggtcgtcacagcatgaataagttaatgtagaacaacatgtttgctcattgtttgtacttcgtagtgagatggtatccatgaggatgctgcgctttccctagctaagcgatccaaaactaacgaggtgtaatctcagacc

SEQ ID NO: 3205 - DNA, 303 bp, Triticum aestivum
  Clone ID: uC-tsfl9316056d07b1
cgacgcggcgccggagcgggccatgagccagacagaatccccaccgctgctggtgcaggctgaccaggataagtcgtagccgtgcactgaggatggcactgccctccctggcattgatgctttggggaggagaccaaaagaaaagatgaacggactgcccctctccgcgggctgggagaacaaccgagccgtgatgttagcctgaccgagacgaaagaagaacctgcgcggcgcgcggcagatctagaagagggactcgatgacaccaaggctaagctcggcactggcctgtgaactacaacg

SEQ ID NO: 3206 - DNA, 419 bp, Triticum aestivum
  Clone ID: uC-tsfl9316056d08b1
ctcctccctccagacgcagctcttcgagaccgtcgccgagctgcaggagaccctcgacctgcaggacgcgcgcgccaagctcgctcgcgaggcgcgcgccaaggatgcttcgctgctcgccttcgcgaagaagctgcgcgaggcccaccacgtgctcgaccgcctcgtcgacgactacgccgactaccgccgcgatcccaagcgcccgcgcggcgccgacgctgttgacgagcccgagccggtgtcgcagggcgacttcagcgcatccctgcactccaagctcaagctggatgacatcttgacctatgcacatcgcataagctacacgacctttgcaccgccggagcatggtgctgggctgcctctgaggggtgcattgccgcctgcgccacaggataacgagctgcgggatgtcacag

SEQ ID NO: 3207 - DNA, 474 bp, Triticum aestivum
  unsure (1)..(474): unsure at all n locations
  Clone ID: uC-tsfl9316056e12b1
gtcgtcttcttctcctcggcggcggcggtgaaaggcgaacgagcgaggaaccctaaccctaaccctaaccagttccgatccgcacggtagggcctgcgatgatggcggcttccctccgcgcggcggcgacgaggatgctgcgcccggcggagcttacaggggaggggcgttggctgctcgtacacacccagcaggtttccaaatccacccgcgcctacaaggaaggaaaccatgccttggatgaataccgagcgggggttatccagcacaggaaggagcagctgtactgtctcattgccggcgccgaggccaatggccgcaccttgttgctgaacaaaagtctgctcaaggatctctctacacaagtcacgcctagaccagangaccctaagtggcgcaagatatgtataaccaacagaggtgaccgactgtactaggacggcgggtgatgttgtattttctgggctcacttat

SEQ ID NO: 3208 - DNA, 299 bp, Triticum aestivum
  Clone ID: uC-tsfl9316056g01b1
tactatagggaaagctgatacccgctgcacaacgcgaaaccgtatacgcctgtcgcgcgtgaaccactgtttgagttctcgccaccgcggagccagagttcgccatgattaagtgtgaaccaataccgctgctgccggaccctgacgagttagtgtacgggcccctgccgtacacatggtcattgggggacattgtcactgtgtggaggagaaccagactaaagaagaactgaatgtccacagccggtctctgtgcgaacaagcgcacaccgatctcaatttcgaacatgacgagcaga

SEQ ID NO: 3209 - DNA, 377 bp, Triticum aestivum
  Clone ID: uC-tsfl9316056g07b1
tttgtccttccacgcgtccgcccacgcgtccggcctcctgccgctccgccgccagcgtcgacgtcgtccagtccaagaagccccaaggtgctggcggtggcggcgaggggacatcgtcggcggcggcgccggggattaggccggccaagggggagtcgctgtcgctggtggcgcggctgctccgggggttcaagaacctgtcccaccagatcttcgcggtgtacgacgaggaggacgaggaggaggaggagccggagaatggtgatcgggctccccacggacgtcaagcacgtcgcgcacattcggttgggacggcagcaccagcaccacctccagcgtccgctcctggaaccgtgccgcccctcctcctggcacca

SEQ ID NO: 3210 - DNA, 531 bp, Triticum aestivum
  unsure (1)..(531): unsure at all n locations
  Clone ID: uC-tsfl9316056h06b1
ttcgtccttcgagatggcagcctccatgatcacctcgccgattgtggcgccgacgagcgtgccgtccctctcccgccggggctcctccttcgccgtcgtctgcagcggtggcaagaagatcaaggtcgataagcccctcggactcggaggcggcttgacagtcgacatcgacgccaacggcaggaaggtcggcaagaagggcgtgtaccagtttgttgacaagtacggtgccaacgtcgacggctacagcccaatctacacgccagaggaatggtctgagtctggtgaccgctacgccggcggaacgaccgggcttattatctggagccgtcaccctcgccggcctactcggcggtagcggtctnctcgtctacaacaccagcgctctcgccggctaagagagatntaacgtgtaacacagggccncggtctctgctagcatgcacgtctctgtatcctgcgtagctaccttnctgtgaatgtatgcaatcaacgatgcatagtnatggatctaacagattgtttatgtgt

SEQ ID NO: 3211 - DNA, 355 bp, Triticum aestivum
  Clone ID: uC-tsfl9316056h11b1
tcttctctttttcgcgacctctggcaccagtttatttggcaagagcagtcatgctagagaagaaagaggggggagagcagcacgaccctgctgctgcttatgttcctccgcaaccgggcttactaacttagcaggacatcaccatgtttgctcatatcatgaggggtggatttggagacatgttgcgagttaccaacacaggcgcagactaaccgaactgatattatcaacgttgagcgtcacatcaatctctgcgaatgtggagtttgcgcgccacaggatgactaagcttaggagcgacctagggcccgctccttgagcgttcttacctgcgtgactcgacacatgaggatgc

SEQ ID NO: 3212 - DNA, 255 bp, Triticum aestivum
  Clone ID: uC-tsfl9316058b03b1
tctggaattcattgatgatctgacataccaagttaagaacaacattatccccatgagcagaattgacgatgctgtctacaggattgttcgggtgaagttcaccatgggtctatatgagagcccctatgctgacccatgcctgggtggtgaactcgggaagcaggaacaccgcgatcttgctcgtgaggccgtcaggaaggcattggtgctgctgaaaaatggaaaatctgcctccagcccattgttgcctctccc

SEQ ID NO: 3213 - DNA, 130 bp, Triticum aestivum
  Clone ID: uC-tsfl9316058d03b1
aatgttatagcttttgtatagcgtaacctaatttacagtccgtggacgaacaccaacagcattgtgactgccaaaaccctgccgataccaatcgtaatggtactaagccacattcccctttctccagttg

SEQ ID NO: 3214 - DNA, 502 bp, Triticum aestivum
  Clone ID: uC-tsfl9316058g05b1
ttacccgcctagaccacaacagggcactcggtcagatttctgagagacttggtgtccaagtttctgacgtgaagaatgctattatctggggtaatcactcgtccagtcagtaccctgatgttaaccacgccactgtgaagacttccagtggagagaagcctgttcgtgaacttgttcaagatgatgaatggctaaacggggagttcattgccactgtccagcagcgtggtgctgcaatcatcaaagcgaggaagctctccagtgctctctctgctgccagctcagcttgtgatcacatccgtgactgggttctgggaaccgccgagggaacatttgtttccatgggtgtgtactctgatggttcatacggtgtgcctgctggtcttatctactccttcccagtaacgtgcagtggtggtgaatggacaattgttcaagggctcccgatcgatgagttctctaggaagaagatggatgccaccgcccaggagctgtcggagga

SEQ ID NO: 3215 - DNA, 317 bp, Triticum aestivum
  Clone ID: uC-tsfl9316058h02b1
gatgagttcgtgttcgtacggctggcgtatttatgggctccaagcttacctactggtgtatggaagattatatgtcttatgtatgagctgctaaatcgacttcactggctgtgtgttcacaaggaccggattgtcaaacccacggggacaaccaactaaatggcagtttggaaagacccacttttaaacaggtgcttgattacacaagggctccgcttggatgtgccttccaatcaacaacgaagtgtatgtgacaaatgtgacgctccctaaattaatctttttgcagcacaacttgcttttggttactcgcagtg

SEQ ID NO: 3216 - DNA, 576 bp, Triticum aestivum
  Clone ID: uC-tsfl9316059b07b1
ttaagaggtaccttgaggatgttctcgctcacaagcaagcgattcccttccggagatactgcagaggtgtgggtcgtaccgcgcaagtaaagaaccaccagccaaatgggcagggtcgctggcctgcaaagtcggcccagttcgtgttggatttgctgaagaatgctgagagtaacgctgaggttaaaggcttggacgtcgacaacctgtacatttcacacatacaggtgaaccaagcccaaaagcagaggcgccgtacataccaggctcatggacgcatcaatccttacatgtgcaacccctgccacattgagctgatcttgtcagagaaggaagagcctgtgaagaaggaggctgacaacgtcgccgcaccaaggaaagctatctaagctaacggagtggctgcattcgtccaagaatcttagttgtaggtcttctcaagtatctttagtggcagcgtttgctgcctccttgatgttcttgttaccaacatggagtaaggatttgttaaggctgatgctatccctgcgatcgcgagtggtctttatatgctaagacagtttcagatatttgagc

SEQ ID NO: 3217 - DNA, 474 bp, Triticum aestivum
  unsure (1)..(474): unsure at all n locations
  Clone ID: uC-tsfl9316059c07b1
atgcggtcttcctccctgagacgcacgcaccgcacctcaccgccccgcgtcgcgagatctcaaatccccgatccgaccccaccggcggcgatggccggcaaggagctgagcgacgagcaggttgcgtcgatgcgggaggccttctccctcttcgacactgacggcgacggccgcatcgccccctcggagctcggcgtcctcatgcgctccctgggtgggaacccgacgcaggcgcagctccgctgacatcaccgcccaggagaagctcacggcgcccttcgacttcaagcgattgctcgaactcatgcgcgcccacctccgcccggagccgttcgaccgcccgctccgagacgccttccgcgtactcgacaaggacgcgtcgggcaccgtctccgtcgaggacctccgccacgttctcacctccataggngagaagctcgagccccatgagttcgacgagtggatccgctaggt

SEQ ID NO: 3218 - DNA, 508 bp, Triticum aestivum
  unsure (1)..(508): unsure at all n locations
  Clone ID: uC-tsfl9316059c11b1
taagattcgcccatggctccgtcgcagcccaagtcgggcctcttcgtcggcatcaacaagggccacgtcgtcaccaagcgcgagctgccgccgcgcccgtccgaccgcaaggggaaaggtaccaagagggtgcatttcgtcaggaacttgatcagggaggtcgctgggtttgctccgtatgagaagcgtatcactgagcttctcaaggttggcaaggacaagcgtgccctgaaggcggcgaagcgaaagttgggtacccacaagagggccaagaacaagagagaggagatgtccagtgtcctcaggaagatgagatctgctggaactggaacagacaagaagaaatagagcatcccaggctcattaagttgatggcaatcttctgttctggtgtccagtctttactgcatgtcgaacctactagacctgaaactgttatccgctagctaaacattatgctatgttgaaccttctgtctggngagatttctgatctaacttgcactgca

SEQ ID NO: 3219 - DNA, 474 bp, Triticum aestivum
  Clone ID: uC-tsfl9316059d05b1
tttaataccccctgtttttctcctctagggagcccattcagcaagatgcttggtggaagagctgaagtaggctctccgtcttgcggggcgagtagtcccccgaaagtgaggattgaaggctttgcctgcgggaacaaagagaaccattgtgcagtcacctttgcctgagagcatttttgccataccaccaattcaccattgaccattagcgccattttgcacccgcaccccacccccccgaacatgtaaattttccgcccccgagatacagctagtccctctaatgctaagctaagctagtagtacctattcgagtcagagattatctagttgagctgagttgagtcctcattgacgcccgtctggttgacgctcttgaaactgcgcaatcacagagagcattgggttatgtacataggcgaggtctcccgtgcgttgtgttctgtatctacatattgagtaatgtgtgtgtgt

SEQ ID NO: 3220 - DNA, 494 bp, Triticum aestivum
  Clone ID: uC-tsfl9316059e06b1
acttttgactgagacctgaatcgctctgggaccgcgcctgacaaaaaggaatgtgcggcagcattgtcaactgtgaacatgcaagaagtattgcgctcaacaggctgtcttgaggagcttgaaatgcatacggaggctaaggagatgcccaggcaacacaaggaacacgtccagattgcatcctttcatgtgtggagcaacacagactcttgcccaatttgtggatgtgactagactaccactgagtctaagaaccgatgtgaatcaagcagagctggtggaacagagagctctgatggagactatgctgagtcaagcaacagtgatacatgaaagagctcaccatgatggaagcagtatgctcgatgaaagcacaatacatgatacagatgtgacgtatgcgaagaacgccatcttcggagatggatcctaatgatgctcatctgatgaaaatgaagcatgccctattgagagcttaagccatcatcatcctg

SEQ ID NO: 3221 - DNA, 454 bp, Triticum aestivum
  Clone ID: uC-tsfl9316059e11b1
tacattctttgacctgacctgctgcccaggccatggtatcaacattgaaagcctctgcaggtacacggtcgacatggactggtccgatatcaccaacacgaactgcgttctcaagggcttcaccaatggtctctgcattaaggcgcacgacgacaccaaaactgacctcgtatgcatccaatatccactacaagaacataactatggactaactctgctacccaatcatcatcaaccagaattactgtccgaacaaactatgcacctgtaaggtcgacccccaccgggtcaccgctatggacgttaccttacaaaacatcagctggacctacgacacccctgaggacatcaatctgctctgctccgaaaagaatccctgcaaatgcattacaatgtacgacgtcaagatcgagtactcttgccagtacaatcagactatgactgtctatagcca

SEQ ID NO: 3222 - DNA, 435 bp, Triticum aestivum
  Clone ID: uC-tsfl9316059e12b1
gcgctgacgcgtggggcaaatctagctaattacccaccctctccctgcgagccctccaccacaactacaggtaactcggtcgagatggctcgcactgcagcaacaaagctcgtgctggacggcctggtggcggcagtgctcctggcagcctacgacgcggcgatctcctgcggtcaggtgaactatgacctgacctgctgcgtctcctacgcaaaaggcagagaagacagcccgcctggggcctgctgttccggagataggagattggacgccttagcgcggagcaccgccgacaagcaagcgacatgcacgtgcatgaagagtgctggcggtgggctcaacccaggaaaggctgcaagaatcccctccaagtgcggggtgagcatgccctactgcatcagcgcatccgtggactgctctaagatccactgatcg

SEQ ID NO: 3223 - DNA, 405 bp, Triticum aestivum
  Clone ID: uC-tsfl9316059f09b1
ttacgtttcgctgtgcgctcccctcccccacgcgcattcattccctcgccgccgcccgttccgcgccgcgccatggccagcgttaggagcctcgtgctgctcctactggcgctcgccgtcacgctgtccgtctccgcctcgtccatcgccgggggggaccacctgcagctcggcctctctctccggcggcgctggccgcggggagtgcaggggcaccgtgcccgagagcaactgggaggacgcgtagggggagctcaggtcgacgtcggccgaggcgcaccgacgcgtgctgcaggggcgcggctacatcagctacggctcgctgagcaggggcaccgtccactgcaaccgccgtggagccagctactacaactgccgccccggcgcccaggacaacgcctacca

SEQ ID NO: 3224 - DNA, 378 bp, Triticum aestivum
  Clone ID: uC-tsfl9316059h05b1
tcgttaaaaataaacaaaaaaaaaacgagagatgagcaaaaaaaaatcaaaaccgctgatgctgttggtgtgtccctgacgtgatcaggtccggacaactcagctgatcatggccttgccgtgccatggcatttctgctgtgtagtggattacaaaagatgagctgatctgcctgctccgctctcttggctaacagaacaactcgaatgtgatcctgtcgtgaacgagagaaaagctgaactgtcgctgcgcgttgctgaaatagaagagttgctacacgacacctgagcttggctctggcctggcctttacaacataacgactggaatagccaagcccttacccaacttaactgtattgctttgcagccccctttcg

SEQ ID NO: 3225 - DNA, 535 bp, Triticum aestivum
  Clone ID: uC-tsfl9316059h07b1
gttaagctgagccccgacggcgcggcgaccccggccggcctgatctcggcggcgatagcgcacgccttcgcgctgttcgtggcggtgtccgcgggcgccaacatctccggcgggcacgtgaacccggccgtgaccttgggcgccttcgtgggcggcaacatgaccctcttccgcggcctgctctactgggtcgcccagctcctgggctccaccgccgcctgcttactcctgcgcttctccaccggcgggctccccaccggcaccttcgggctgaccggcatcggcgcgtgggaggcggtggtgctggagatcgtgatgaccttcgggctggtgtacacggtgtacgccacggccgtggaccccaagaagggcagtctgggcaccatcgcgcccatcggcatcggcttcatcgtgggcgccaacattctggtcggcggcgccttctccggcgcgtgcatgaaccccgtcgtctacttcggccccgccctcgtcagctgagagtgggggtaccagtgggtgtactgggtcggccccc

SEQ ID NO: 3226 - DNA, 440 bp, Triticum aestivum
  Clone ID: uC-tsfl9316060a07b1
ttggaaagctaggctgcaggcacagttttcacaaatgcgtcctgttccaatggctcaaactgttggtcctcgtatgcaaatgttacctcctggtgttccagttggtcagcaaatgttctatggccagccaccagcgtttattaacccacagcctggatttggcttccagcaacctttcatgccgggaatgaggccaggtggtgctccgatgccaaactttatgatgcctatggttcagcaaggacaacaaccacaacgcccagctggtaggcgagctggtgctggtggaatgcagcaatccatgcagatgggtcagcagcagatgctgggtagggaggtgagtcgtggttaccgctattcagaccgggcgtggcatgcctgatcctgcgatgcatggtgttggtcgtgttaatgacatccccatatgagatgggagggat

SEQ ID NO: 3227 - DNA, 501 bp, Triticum aestivum
  Clone ID: uC-tsfl9316060a08b1
tcggttggaacagcccccaggctctcaacaactggggccttggactgcaggaattgagtgcgattgttcctgctaaagacaagcaaacaatcataaaaacagctataagtaagtttcgttctgccatccagttgcagtttgacttccaccgggctatttacaaccttggaactgtcctgtatggcttggcagaggatacctcgaggtctggaggggccgatacctctcctaatgatctgtatagtcagtctgctatttacgttgcagctgctcatgcattgaagccaaattattcggtttatcgcagtgctctacggttggtccgctcaatgctaccgttgccatatttgaaagtgggatatttgactgctccttcggcagacgaccccattgcaccacacaaacattgggagaggtcacagttcatcttacaccacatggaactccagcaggtcaatgattccgaaagcgcacctgtcaagcaaacgcgctcgtggagaa

SEQ ID NO: 3228 - DNA, 312 bp, Triticum aestivum
  Clone ID: uC-tsfl9316060a09b1
tcgtttggatgacgcagcaggttttgaggctgtcaactgcaacggcgcggaggtgcaatgtcagggcaccgcaccgacaatatcaatccacaacacagctgggtgtcagttatactcgaacaaagagtcactgggcgcttccattacttcggataaatgcagtgaaatgaatgtattggttcctagcgacaagactgatggcgactggctggagcatccttagccgaacaggacatccattttttccaggacagacaggagcaccacatacacaaggtctcatttcggcgcataaataaattcgaagatatc

SEQ ID NO: 3229 - DNA, 457 bp, Triticum aestivum
  Clone ID: uC-tsfl9316060c07b1
tcgttagcctgccagccatgggaagcaagggcctcaagggtgtgatggtgtgtttactcatactggggttggttctggaacaggtgcaagtagaaggcaagagttgctgcaagagcaccctaggaagaaactgctacaacctttgccgcgcccgtggtgctcagaagttatgcgcaaacgtttgcaggtgtaaactcacaagtggcctaagctgccctaaggacttccctaaattggtccttgagtccaactcagatgaaccagacaccatggagtactgcaacttgggatgtaggtcttccctatgtgactacatggtcaacgcagctgctgacgatgaagagatgaaactctatgtggaacagtgtggtgatgcttgtgtcaatttctgtaacgctgatgctggcctcacatcccttgatgcgtaatgatgcgtatccatggtctgagatttcac

SEQ ID NO: 3230 - DNA, 424 bp, Triticum aestivum
  Clone ID: uC-tsfl9316060d04b1
gttggattctcatggtggacggcgagctcggaggaaccagcgcgtggggtcagtagccggaatcccaggtttcgtgtatccccgccatgccggagtcgagctcggatccgggcaatggcaagggcaagaggagcctcccttcctggatgggctccggcgacggcggcggcggcgggggaagtccgggcaagaagaagcacgcggaggcggcccgcgagaaggccccaacaagggccgatttcttccaacttttggatggggtggtcttttgtgcttgcagggttcgtgaaccctgagaggggcaggctgcgctcccaggcgctggatatggaggccggtgtaccggcccgattggtcgtcggattgcacgcttcttgtttgcgcgtttgccaacacccccaagtttcggcaggtgcagtcggag

SEQ ID NO: 3231 - DNA, 532 bp, Triticum aestivum
  Clone ID: uC-tsfl9316060e07b1
ccactattgctgatgaggtgaagcagttggcttcaagagcaaaggataacagtctaaaaccagaagattatgagggtggcactttcaccgtctctaatctgggaggtcctttcggaatcaagcaattctgcgccatcgtaaaccctccccaatcggcaatcttggctatcggctctgctgagaagagggtagtccccggggcggctgagggccagtacgaaatcgggtccttcatgtcagccacgctaagctgcgaccaccgggtcatcgacggtgccatgggtgcggaatggctcaaggcgttcaagggctacctcgaggacccgacgaccatgctgctgtaggagtactctttctttgctgtaaatgatgatgatgagagcagtttttctgtgtaggctctcacaaataaagaccacaataaccacgcctcattttttggcaatgagggctggaaacccagagcacacatacggatcatagaccgcacaagatgtttaacctatttatcggcaaatggccgatacacctt

SEQ ID NO: 3232 - DNA, 365 bp, Triticum aestivum
  Clone ID: uC-tsfl9316060f12b1
cgtacgtttcatttaggaagcacaagaaggatatcaggggaaaccccaggtctttgagaaggctcaggacttcttgcgagagggcgaaaaggaccctctcttccactggccaaaccaccatcgtgatcgattcactctttgagggagttgatttctattccaccatcaccagtgccaggtttgtggagctcaacatggacctcctcaggaagtgcatggagccagcggagacgagcctgaagcatgccactacggacaagagcactatccatgatgctcggctacgcgagggctacaccaggatccccacagttcatcacactgctgcaggacttcttcaacgtgaaggaactctgcaagagcat

SEQ ID NO: 3233 - DNA, 436 bp, Triticum aestivum
  Clone ID: uC-tsfl9316060h11b1
gttgcatagactaatattagcgggaaggtccttccgacgatcattggaagcaatgttacagtaggtcatagtgctgttttacatgcatgcaccattgaggatgaagcttttgttggtatgggtgccactttgcttgacggagtggttgttgaaaagcacagcatggttggcgctggatctcttgtcaagcagaatacaaggattccttctggggaggtctgggttggtaatcctgccaagttcctaaggaagctgacagaggaggtgatcacattcatcgcccaatcgggagccaactacatcaacttagctcatgttcacgccactgagaattccaagagcttcgatgagattgagctcgagaagaagctgaggaagaagtttgctcacaaagatgaggagtacgactcgatgctcggagtggtccgtgagatcc

SEQ ID NO: 3234 - DNA, 418 bp, Triticum aestivum
  Clone ID: uC-tsfl9316061b01b1
gttgacctccgcgcgcagctagatcaggcggctcgaaggggactagagatccatcgcgcgctctccggtgatgctgcgccctcggcagcagtggagactttttgctgcgggctgcaagtcaccgttggctgccgttccatgtggtgcaggtcgactacggcgtcgacgttgtgctgtgatgggcggagccagcgagagttgctgcgtccgacgtttggcaaagatgcatccgtcggggggtggtgctgaaacgatgggggatgaggaagggtgtgcagcgacgaccaattggagctgctgagagaggcggcgagcggtggagatccgactagcggcggagatccggcgggtcaagtagctctatcatggcgctcgcgtgatttgcagagtagaagacggcgtggacatggtcacatat

SEQ ID NO: 3235 - DNA, 198 bp, Triticum aestivum
  Clone ID: uC-tsfl9316061b05b1
ttttttggaaagataaagctctctgtcaaagagctagctatcagattgttttcgtgggtgttaaattgtccgtggcgctgtttgtttgcccatcatggttttactatgtccgctctgtactctgtacccgccactccgacagacttgatacattgtagtattgacttgtcttggcatattttgtcagtgtgtcttctg

SEQ ID NO: 3236 - DNA, 538 bp, Triticum aestivum
  Clone ID: uC-tsfl9316061b09b1
tcttgtctccttggaagcagagagaggaggaggaggaggaggaggaggagaccatgtcgtcgtccggtggcaagctcttcaccctggaggaggtcgccaagcacagctccaaggacgactgctggctcgtcatcggcggcaaggtgtacaatgtgaccaagtttcttgatgaccaccctggaggcgacgacgtcttgctgtcttcaactgccaaggacgcgaccgacgactttgaggacgtgggacacagcacaaccgcccgggcgatgatggacgagtactacgtcggcgagatcgacgcgaccacgatacccaccaaggtcaagtacacgccgtccaagcagccgcactacaaccaggacaagacccccgagttcgtcatcaagatcctccagttcttggtccccctcgcgatactgggcctggccgtcgccgtacggatctacaccaaggcagactctgtctagcaccgtcatcttataccagtcagtcagtcattcggaagtgtccaagagcttgaataagttttagtggggat

SEQ ID NO: 3237 - DNA, 94 bp, Triticum aestivum
  Clone ID: uC-tsfl9316061b12b1
tcttaaaaaaaaaaaaaaaaaaaaaaaaaaaaaaaaaaaaaaaaaaaaaaaaaaaaaaaaaaaaaaaaaaaaaaaaaaaaaaaaaaaaaacagg

SEQ ID NO: 3238 - DNA, 486 bp, Triticum aestivum
  Clone ID: uC-tsfl9316061c03b1
ttaagcacttcatgtacatggtcaaatgcttcagaaacagtagtatgctacttcactttttatcttcctgggggttctgattcatctgtattaactaaagaagcttgtgatattattttcattagcacagtgcaaatcaaaccgaaaaaatgcacatgcttgccctttgtaaagaaccactattactatatatgctctactttgtacagaatcatatgtatattatgcttgcccctaaattgttgctttatgctgaaccactattactatattatgatttgatatgagattcggtgcttgaatcaagtatttatggagaccatgcccttatgcaagtcttcaggccttgctgggttgttttattgttctgaaggcatcatcatgtgtgattgtagatacattgcctccttcacacttacatccaccatcaatcagttagacactcccttttttgcaaataaaatcaagtgaatggtgtactcccaa

SEQ ID NO: 3239 - DNA, 171 bp, Triticum aestivum
  Clone ID: uC-tsfl9316061d04b1
tttcgttgaccaccgacagatccggagcgtgagatgaccatgattgaaacagcaccgctggtggtgctgtctgaccgtgccaagcttccgtccgctcgcctgggaagatcttggtccttatgggcaccctaattgaggaggagcctgagaaaacagactgacggcaaatcc

SEQ ID NO: 3240 - DNA, 417 bp, Triticum aestivum
  Clone ID: uC-tsfl9316061d11b1
tcacattcttcagctcatccttgcctcttgcgttctcttctccgtagcttgcagataagtaagcttgtccgttgtgcggagaggggaggcggataggtacatacacatggaagggttgcagagatcgtcctccactttcagaaggtccggctcgtcgggcctggtgtgggacgagcggttcctgaccgagggcgccgaggcgaaggccgccggcgagggcggcacggatgaagcccatccggagatgcggcgctcccggagcaccggcggcgtcgggatgatgctgcgccgtggcggcgacgacaagaagcagcagcagcagaaaaaggagcagcaaggccagaagaagaaggacgaggagcgcgatccccaggtgttccggaccaaggaggtggccccggacgtggacccgccgtc

SEQ ID NO: 3241 - DNA, 464 bp, Triticum aestivum
  Clone ID: uC-tsfl9316061e08b1
ttgtttttaagtgcaccctgacaacaggattaccggcaaggccatgtccatcatgaaacacctccatcaaacgacaatctgtcgagatagcctcgtccgcgggaggccttgtcaatgctaagcccgctacaacaagaagcccaccataacctccagggagatccagacctccgtacgccatgtactccctggggaggtcgccaagcacgacgtgtccgagggcaccaaggccgtcaccaagagtacctactattagaacgcgttgcctgaatctagcagcaaaagtagctccctgcagacggcttaaaggtcgtctgaggactctggaaatactggaagaaaatacagccctactgaaggaagaaaaatgctgaatcattgcaaatggactggcggctcgaaggccacccgcacagaagtgaggcacgcccgctggtctattggccaacgaagattccagaaac

SEQ ID NO: 3242 - DNA, 421 bp, Triticum aestivum
  Clone ID: uC-tsfl9316061f01b1
aggccctgcatggatgtggacgcactgggcgaaggcgttagcgtctacgcctgtgaccggtaccactggttgtgtttgaccacacgcggagccggagcgtgcgatgaccaagattagaatcgctgctgctgttgtgtgtgcttgccctgatgaggtccggtccacacaactgacgatagcatggccctgccatggcattgctgctgtggggaggaggacatgagaaaagatgaacggcctgccccgctccgttcgctggcagaacaaccgaaccgtgatgctagcctgaccgagacaaaagatgaactggcgctccgcgtggctgagctaggagaggagctagacgacaccagggctaagctctggactgggcgttacatcacaacgactggactgagaataccctgacgctacccaactt

SEQ ID NO: 3243 - DNA, 359 bp, Triticum aestivum
  Clone ID: uC-tsfl9316061f02b1
ttacgttcacgcgtccggccacgcggtcgaccacgcgtccgatcgaaatgctggtgacctttcttacagcgctttaagcatacttgctagcaagatgcctatgtactacgagtgcaatgattcatgcacttgtttacataatcgccggaaccgatttgctcataaaggtattcagatccactttgaagcgtctaagacgggagatcgaggttggggcctgcaaagatgagatccaattccagcaggcacatttatctgagaatatgcaggtgtcattgccgacaagaatgcttttgatgcagaagacgactatatgtctgagacccctccttcggagcagaacttaatatggatctatg

SEQ ID NO: 3244 - DNA, 407 bp, Triticum aestivum
  Clone ID: uC-tsfl9316061f05b1
gcggacgcgcacgcacagaccgatggcgtttacgcctgtggccccaacccgaagttttgcttcaccaccccggatcctgagcgtgagttcacgatgctagagacacaaccgccgctgctggtggctgaccctgccgagttcgtgcccgtacaactgagtgtgatcactgccccgtcaccgccattgttcgtctgatgtggagcccatgaactacgatgatctcattgccctcctacggtcggtgccagaacaactggaccgtgacgtcagtcggacaagaaccatacaagaactggcgctgcttgtgccatagctgaaaaaggagctcgacaacaccaagcctaagcctgtccctggacatacatctacaacactgtgaccaacaaaacgctgacgatccccaactt

SEQ ID NO: 3245 - DNA, 281 bp, Triticum aestivum
  Clone ID: uC-tsfl9316061f12b1
tttcttctgacgcgtgggtcgcgcggctgtacgagctgtgcacccggcgcgtgatcttctcggggacggggatgatcgggtgcgtgccggccgagctggccctgcacagcctttacgggtcctgcgcgccgtacctcacgcgggccgacgacctattaaacccgtagctggagcggatgctgacggagctcaacggacaggtctgtcacgacgacgtgttcataggcggcaacaccaacagggtcagcttagacttcatgtgcaacccgcagcagtacggg

SEQ ID NO: 3246 - DNA, 517 bp, Triticum aestivum
  Clone ID: uC-tsfl9316061g03b1
tcgggttcctcgctcagacctcccacgagaccaccggcgggtggccaacggcgcccgacggcccctactcgtggggctactgcttcaaccaggagcgcggtgccgcctccgactactgctcgccgaactcacagtggccgtgcgcgccgggcaagaagtacttcggtcgcgtgcccatccagatctcatacaactacaactacgggccggctgggcgggccataggtaccgacctgctcaacaacccggacctagtggcgacggatgcgaccgtgtcatttaagacggcgctgtggttctggatgacgccgaattcacctaaaccttcgagccacgacgtgattacggtccggtggagcccctctggcgccgaccaggcggaggggagggtgcctgggtacggtgtgatcactaacatcatcaacggtgggctcgagtgcgggcgcggacaggactgtcgtgttgccgaccggatcgggttctacaagcgctactgggacctactcggcgtcagcta

SEQ ID NO: 3247 - DNA, 417 bp, Triticum aestivum
  Clone ID: uC-tsfl9316061g05b1
gttgaaggacatggagaagaagggcgtgacgttcgcctgcatcaacagcaccggcgactcgccgggcaggctcaccacgttcgccctcaagttcaaggacactggcgtcagggatgatttcaaagccgcggtggaggcgcacaaggcgaagaaggccttggacgcgatgcccaagacgcctgagagctcccccaaggtgtctgatgactgaaagagaccgccctggttgcgtgtttcgatgatgtgtatgcgggtttggaggggggagaggggctggctgaagttgtcctcgttcattcggagtctaaagtgcaccattttctgtattctgtatccccatgtcgtgatgccttaagatacattttgcatgcacgcggttacttggtttcctgctgccgttttggaacggtgggtggt

SEQ ID NO: 3248 - DNA, 333 bp, Triticum aestivum
  Clone ID: uC-tsfl9316061g11b1
ctttgtgtggggaactgaactggctttcctcctcggcagattcatgcgaggaggacaacttcagaaggtatctagcattcacgacagcggatgtagataatggctggtacagtggagcactgctatacgatcaagatgagaacagcggtgcttataaacattactcagaattttgccagggtccagtcatggatcctttcgagcacgaccccgagaaagaagggcactacagggaggctcttagcatggacattgaacttacagacgatgcacaggtggaggcagaaatgaaagccgctctggacgactaccaggtgataggttcagatctga

SEQ ID NO: 3249 - DNA, 468 bp, Triticum aestivum
  Clone ID: uC-tsfl9316062a01b1
gcaggtgcaccctgacatcggcatctcctccaaggccatgtccatcatgaactccttcatcaacgacatcttcgagaagctcgccggggaggctgccaagctcgcccgctacaacaagaagcccaccatcacctccagggagatccagacctccgtacgcctcgtcctccctggggagctcgccaagcacgccgtctccgagggcaccaaggccgtcaccaagtttacctcctcttagatcgcgtcgcctgtatctagtagcaaatgtagttccttgctgttggcttagtgcttgtctgtggactctggttatctgcaagtaatattagtcctactgttggatgaaaattgctgaatcattgcaaatggcttgttggctcgttggccacctgcaagaagtgagttatgtccgctggtctattggccaatgaagatttcggaaacaatgttgcgttgctggttctattt

SEQ ID NO: 3250 - DNA, 446 bp, Triticum aestivum
  Clone ID: uC-tsfl9316062a04b1
ccctggttggaaggcggcgccccggggggagggattaaaggctttggccggtacccgaaaaaatgggtggacaacggggaacccgggcggggggtcaaccatgattaatcaagaacggttgtggttgtgggttgcccttgagaggtcctggtcctaccactgggggaaataagggcctttgggggcaatggtttttttggggggaagtcaagaacaaaggataaacggatggcccgcttccgttggttggtggaccaatgaacccgggaggtaagcttgccgggaccaaagaaaaaactgggcttcgggggggcaaacttaaagaaggagttggttaccccaaggcttaagttgggaattggccgcggtttaccaccgtcggaatgggaaaaaccttggggtacccaaattaaatggcttggaagacaatccccttttggccagtt

SEQ ID NO: 3251 - DNA, 329 bp, Triticum aestivum
  Clone ID: uC-tsfl9316062a07b1
cccctcccctcggaagaaacgttgccgtgagagagatccccgcccagagccatgccgggcgagatggggttcattggtgaccaggtggagtcgatccggtcgatgcaggtccgtcaggtcgtcacgcagatcatcagtcttggtatgattgttacctcagcattgatcattatggaagggattgatggttgcgacagggatcgaatcaccagctgtggtggttctttttggttgcatggagcctggatttaaaaggggtgatattctgtttttgcacatgagcaatgaacctattcgcactggtgaaatagttgtctttaatattgacg

SEQ ID NO: 3252 - DNA, 454 bp, Triticum aestivum
  Clone ID: uC-tsfl9316062a09b1
tgtacattctgcggctggagtagatcgagagctgggcaattccgagccgtgtagggtgcaacaggatgccggggatgcgcggctctgctccggtgcttgcactggcgctgctcgtcggagtcttcatcgcccaggcccctgcaggtgtgcaatccgttggcgtgtgctactgcatcatcggaaacaacctcccgccgccgagcgacgtggtccagttctacagattgttggggatcaccaacatgcgcgtctactacgtccagctccaggcgctcgacgcgctccgtggctgcggcatcagcctcagcctcgggaccaccaacaacgacgtggccgttctcgcagtagactatacgccgccgtcgcctgggtgcaggccaacgataaggcctactaccgtgccgccgtggacgtgcgctacatcttcgatggcaacgagcttgtcagcgacacc

SEQ ID NO: 3253 - DNA, 524 bp, Triticum aestivum
  Clone ID: uC-tsfl9316062c01b1
tcccgtggctcacgtcgaccctgtccctggccgccggctccgccatcatgctcgtgtcctgggccaccaggatcgccgaggcgccccagacggacctcgatttctggaaggctctctctccggtggcgattgcgcacacgatcgggcacgtggcggcgacggtgagcatggcgaaggtggccgtgtccttcacgcacatcatcaagagcgcggagccggcgttcagcgtcctcgtctcgaggttcttcctcggcgagcacttcccgttgccggtctacttctccctcctgccgatcattggtggatgcgctctcgcggacgtcaccgagctcaatttcaacatgattggattcctgggggcgatgatctccaacctggcgttcgtgttccggaacatattctccaagaaggggatgaagggcacgtcggtgagcgggatgaactactatgcctgcctctccatgctgtccctggtgatgcttctccctttcgccttcgccatggagggccccaaggtgtgggct

SEQ ID NO: 3254 - DNA, 515 bp, Triticum aestivum
  Clone ID: uC-tsfl9316062c08b1
taataaattttaaaaaaaaggaatataaaaagaaaattgaaaaaaaaaaaaaaaaaaaacaaataaacctacttcataactgggtggcctgttttctcggtctccttgcttttttagggggggggggggcctttttgggttcctcggtttccttccggcgcgtggcgcggctttttttttttttcggggctccctgtgtacacttgctgggcggtggtttcctgcggtgggggtggggtaccccctggggcccccctcttcttgtgcttgggggcgcttcccctttttcctgtttggcttttgttcgggcggccccttttgtgttgccttttctcatgtgggcctcccttcggggcgtgggggtctcccccctttggggtgcctttttccctcgggggggggggtggttttggcccgtggtctttttctcttgccttggtctctgttccgggtgttttgggtttttcctttttttttggcctttccccggtttccctcttttttttatggggggg

SEQ ID NO: 3255 - DNA, 515 bp, Triticum aestivum
  Clone ID: uC-tsfl9316062e03b1
tcccacgcgtccggacactgtctgctgatcatcgtatatttgatgggcaagtaggaggcaagtttttcacggagctggcattgaacttcagtgacatcaggaggctgcttttgtaaatgaaaggtgctgtgttatcgtgtttcaaagaattctttcaagaaggtggcccaagaaaagacactaggtgcaaatttagtttcagttgcttgatcaccagtgcataagaagtaaccagttttgtaaattaataagagagttggcaactccacggcgttttttcctccttaatttgggaggtgagccctgagaagttacggccatttcatgtttgatgtggttacacaaacatcaactcttgaggctgaggtttgttgccacgtttcctgaggatttctggcaacataagaagtttttgcccatgacttcgatacatggcttgatgacagtaataagtgatgattctttctacaatattgatatacatacttctgagcatctcagattgtttgtcagtt

SEQ ID NO: 3256 - DNA, 263 bp, Triticum aestivum
  Clone ID: uC-tsfl9316062e10b1
ttctgcgttctgttgaaaaccggagcgacagttcagcgaataattcaatgattaacgcagaagctattatgttgccgtctgtccgtggggtgcttgccaaccgtgcgcaatgcatggtcctatggagctccttgtttctttgttgctgagttcatgaccctaggcgaactgattgaccgtctgccctggttaggtcgttgagtgaaccattttactcgggctgtcagcctcaccgggtttactgaggttctgttttttccgaa

SEQ ID NO: 3257 - DNA, 549 bp, Triticum aestivum
  Clone ID: uC-tsfl9316062f06b1
ttttcccttgctctcttcggtgcttttgtgagccgcgctgggatcacaactgttgatgttctgacaccaaacgttttcattggccttcttgttggcgctatgctcccgtactggttgtctgcgatgaccatgaagagtgttggaagcgcggctctcaagatggtggaggaagtgcggaggcagtccaacacgatccctgggctcatggagggcaccgtccagcctgactatgcgacatgtgtgaagatctccaccgttgcgtccatcaaggagacgatccccccgggttctcttgtcatgctgaccacctcttatcgtcgggacctttttcggtgttgagaccctctttggcgtacttgccggtgcttctggtttctggcgtttagattgccatttcagcatcaaacactggtggtgcctgtgacactgcgaagaaatacattgaggctggcgcatcttagcacgcaagagcctgtgcccaatggttatattgcccaaggtgcttggttcgtgaccccttgggaccctttaggacacctggcccttgtt

SEQ ID NO: 3258 - DNA, 237 bp, Triticum aestivum
  Clone ID: uC-tsfl9316062g11b1
ttaaaaaaaaggaataaaatgatggaaaagtgataaaaataaataaaaggggcgcgtttatcagggggggtcgcatttttttcctggtgttctgtctctctctctggggggggggggcggctctgggggttcctggtttgcgcccgggggctggcctcggttgtcttttttttgggtggcgcctattttcatttggggggcgggcgctttcccgtttggggggggggaacctctggg

SEQ ID NO: 3259 - DNA, 56 bp, Triticum aestivum
  Clone ID: uC-tsfl9316063a03b1
taatttttaaaaaaaaaaaaaaaaaaataaaaaaaaaaaaatttaaaaaaataaaa

SEQ ID NO: 3260 - DNA, 206 bp, Triticum aestivum
  Clone ID: uC-tsfl9316063b02b1
gccgagcgcgttcgctcgatcgcggcatacggcgcgcggatcgtgcggatcgcggggaattacgacgaatcggtcgtgtgcgccgcacagctcgcgcaggcgaacggctggtacgtcgtgtcggatacgtcgtacgacggctacgaagcgattccgcgcgacgtgatgcagggttatggcgtgatcgccgccgaggccgctgcaca

SEQ ID NO: 3261 - DNA, 343 bp, Triticum aestivum
  Clone ID: uC-tsfl9316063c04b1
tctcaagttggttttccggtggaaaaaaaatttgtaggtcagtcaaacgcgatctatctctatcgctcccgaacccacctctttcccttccgatctggtcgccgccgaatccggcgtcgccccccaccccccacccccgcgctcggttcccgtccagattctgccacctacgacggagcgaggccgccgaagccggcgacaaaaggattcgaagcagtcggccggagctactttgacttcgacgttgaggagggcgtcggcctcagcttctggcctcccagggcccgccgccgctgggctcgaccatgtcaggtgctggcgactcggagaggagctttggccg

SEQ ID NO: 3262 - DNA, 517 bp, Triticum aestivum
  Clone ID: uC-tsfl9316063e12b1
tgtcttgtctctctggagtcggtgcgcatagcatgggagtcgtatgcgctcctccgcccgctgatcaaggagtcgtggatttgggtatgcccgcagctgaaaatcctctcggacgtggcaggcttgtcattggaaatccaaaagctcgagcatgatgtgttaccccagctcaagcttcaggaggctaagctggaaatgggcgccctggaagccgtcctactcatgaagaactcagctgttgcgctcttacatttgaggaagtgctttaaggaagacttgggcgtattgttttgcgaggatcatctggtctcagccaaagtcaaaaggctgagcaaaatgctaaaggatattgctgtccggttgcttcaggagcgtgaatgcaacattgtcgggcttaggagcgtgtccggttgctggtccagctggtcaccgaggtggtggacacccccgttcatttcgatgattctgatgagtcttctgatgagtcttctgatgagtagacttatcagctagctcg

SEQ ID NO: 3263 - DNA, 430 bp, Triticum aestivum
  Clone ID: uC-tsfl9316063f02b1
ggccagacccctgcagggatgcggtcgcacacgcgcgaaggcattgacgcctctgcccggtccccgaccaacagttctatttccgcacctccggcccgtgcgtgagcatgaataattcagaccgaccaggttggctgctggctgtcccgagtgagtgcgcgtacaaccgactggagcatggatgtcccttgccagccattgtctgtgtgggggggaatgcctgacgaaagacggactgaccgcccgccttcgctgggtgaataaacaacccaacctggatgcctgcctgacacgaacgaaagactaactgtccctgcgggtgacataaaagaggaacgagcttacagacgggctgcctttgcttgtgactggccgttaacaaccaacggactgagaagaaacaagcctggcgccacctaaattaatttgc

SEQ ID NO: 3264 - DNA, 503 bp, Triticum aestivum
  Clone ID: uC-tsfl9316063f10b1
gcaccttctcccctcctgcccccgagcaccgcagccgccgccgccgccgccgccgccgccgactgcagccatgtcgctgatcgcgggtgaggagttccagcacatccttcgtgtgctcaacaccaacgtcgacggtaagcagaagatcatgttcgcgctgacctccatcaagggtgtgggccgccgcttctccaacatcgtctgcaagaaggccgacatcgacatgaacaagagggctggagagctttccgcggaggagatggaccgcctgatggcggtggtgcacaacccgcgccagttcaaggtgccggactggttcctcaacaggaagaaggattataaggacggcaggttctcccaggtcgtctccaacgccgtggacatgaagctcagggatgaccttgagaggctcaagaagatcaggaaccatcgtggtcttcgtcactactggggcgtgcgtgtccgtggtcagcacacacagacctaccgcaggagaggaaaga

SEQ ID NO: 3265 - DNA, 188 bp, Triticum aestivum
  unsure (1)..(188): unsure at all n locations
  Clone ID: uC-tsfl9316063f12b1
tcttttctcagtcgtcttgagataagtttatcgtcgcgtcgtttagcgtttagctgtgctccttccagatccaagtcgttgtctgtctgtgtaatgtttacctggtactgattcagtcatttggacatggtgtttatgttggttcgctgactctgtgattggactctgaatgcaaaaacctttnttac

SEQ ID NO: 3266 - DNA, 484 bp, Triticum aestivum
  Clone ID: uC-tsfl9316063g02b1
ttaatgttactcacggaacttcagagaatggctcatttcccagctatgcaattcacacaccagacttcaagttcgatagccccattgcgacaaatatcacacaaggtttcatcccaaggggcgatataccaagctcgccgaatcctcaactggcagatcatgttgtggtaccagtttctggagatgtgaatcagcttgctcctagaccccaacggagggatgactgggatatactgaaagccatagtgtatggaggcttagtggagtcagtcaccagcctctcagttgtttcggcagcagcgtcgagcggcgccaaaacattggacatattcatcctgggaatagccaacctcatcggaggacttcctctcattctccacaatatcgctgatctaagagacatccgagacgtggacggtgacgacgagcaggtcggccactactggctgcagctcgggaggcgggccaaagcccggctccacat

SEQ ID NO: 3267 - DNA, 511 bp, Triticum aestivum
  Clone ID: uC-tsfl9316063g12b1
tcccacgcgtccgccgccgccgccgcctcgccaaaatccggcgtcaactgatcggcggcagccatgagtaagctccaaagtgacgctgttaaggatgccatcacccagattgttggggaggcgagagaaaagaagcgcaagttcactgagactgtggagcttcagatcggtctcaaaaactacgacccacaaaaggacaaacgtttcagcggctcagtgaagctgccccatatcccccgcccaaagatgagggtgtgcatgcttggtgatgcccagcatgtcgaccaggctgagaaaatgggacttgactacatggatgttgaaagtctcaagaagatgaacaagaacaagaagcttgttaagaagctagccaagaagtaccatgctttcttggcatcagaggccataatcaagcagatccctcgtctccttggccctggtcttaacaaggcaggcaagtttcccactctggttagtcaccaggaatctcttgagcccaggtcaacgagac

SEQ ID NO: 3268 - DNA, 410 bp, Triticum aestivum
  Clone ID: uC-tsfl9316063h01b1
tcttccttatcgaagctcttgctagcttgaactaggaaaaggcaacttaaaaggtcagcggtttgacctggaaaatgtaaagttggacgcagactgaataagattgtgtggtgattggcgcctattggtcagatcttgctccaaagaagggtgtatttaaggggagagaaaaagaaaaacgatgcttagagtgtgtgtgaaatgccggcttgcatgccatcagctacatgtccttgacctgcatggaaacctggctccaataaaattgatagatcttcggagcggatacagcgcgtgcgatgtgatttgctgatgccgtgttcttttttcgttctttgcgtttctgatgctttggtgaatggtggccatttgcttttctgattccagagccatattttcaccttttgttc

SEQ ID NO: 3269 - DNA, 454 bp, Triticum aestivum
  Clone ID: uC-tsfl9316064a11b1
caacctctcgccagtcgccaacgcagacctcagatctcgctctcgcctccttgcgcagccatcgtcgagaggagcaagagaatggcggcgagcaacggcctcgagggtgtgctcctggggatgggcaacccccttctcgacatctccgccgtcgtcgacgaggccttcctcgctaagtatgatgtcaagctgaacaatgccattctcgccgaggacaagcacttgcccatgtatgatgagttgtccagcaagggcaatgttgaatatattgctggaggagccacgcagaactctatcagggttgcccaatggatgcttcatactcctggtgcaacaagttacatgggttgcattggaaaggacatgtatggtgaggagatgaagagtgccgctaaagctgcagagtcactggtcactactatgaggatgaggctgttccacagggacatgtgct

SEQ ID NO: 3270 - DNA, 427 bp, Triticum aestivum
  Clone ID: uC-tsfl9316064b07b1
ttcaacgccggctgccacagctacgtcacctaccacgaggccgacgagcaccggagcgcctgcgcgcacgcgccctgccgctgcgcggagcccggctgcgccttcgtcggcgcggcgccggacctcgccgcccacctcagcgccgcccacgccgtgcccgtgcgcgccatccactacggcaaggtgagccggctccaggtccccgtgtcgacgccgcggctgctgctggtcaacgaggacgacggccgcgtgttcgtgctcaccgtgggcgcgctcggcgccgcggcgaccgccgtgtccgtggtgtgcgccagggggagcgcggccaacaagccgcggttcacgtgcaagatgtgggtgaacctggcggcggcgaacggcggcaaggcggacatcgtgctggtggagatgcaggtgaggagcaaca

SEQ ID NO: 3271 - DNA, 437 bp, Triticum aestivum
  unsure (1)..(437): unsure at all n locations
  Clone ID: uC-tsfl9316064c07b1
tcccacgcgtccgtagcatttcctgcaaaaactagaacagaaagagatctccaagcacgcgaccatatgtcaacgccggcgatgaagatgggcccgtatggcggcccaggagggaatcactgggacattaatgctctcaatccgcccaaaaagattgtgagcatccagatttggagcactgattcctcatgcgaaggggccagcggggtcatcaacggcatctcgttcagctatcttgacatggcagggcaactaatcccctcgggtccatggggctcccagaccggtaaaccccacgtgattaacattggtgaagacgagcgcctgatcactgtctacggcaccagcgatggcaaatttgtcacctcgcttaaatttgtcactgacagggctttcgatccgtatgggccatacggngcaccgtctaccataagtac

SEQ ID NO: 3272 - DNA, 439 bp, Triticum aestivum
  unsure (1)..(439): unsure at all n locations
  Clone ID: uC-tsfl9316064e10b1
tcccacgcgtccgctcccttcttgctgagctgagcacgccccttctctctcaactttgggctgaggcaatggcggcgctcgctccgacgaagatgctcggcacccggctcaacttcgccggatcctccaggtatgccacagcggcaccaactgctggcgcacagaagatcgtctccctctttgatcgcttcaagaagaagcccgccccgaagccgaagcccgcacccgttgccacctcgagcgtaggcatcgacgacgagctcgccaagtggtacggccctgacaggaggatctacttgcccaacggtctccttgaccggtcggaggtgccggagtacctcaacggagaggttcccggagactaccgctatgatccttttggtctgggcaagaagccagaggacttcgcccagtaccaggcccttgagctcatncatgc

SEQ ID NO: 3273 - DNA, 407 bp, Triticum aestivum
  Clone ID: uC-tsfl9316064h01b1
tcgcaggctgagactcgcgcaaccttcccatcccatattaaactcgccccaccccatctagggtttggccctcccaagagacccgcgacccccttaatccctctcccaacccttatctgcatccctctccatggccacggcggcggcggcgaagcggaagccggtgttcgtcaaggtggaccagctcaagcccgtcaccagcggccacacgctcgtcgccaaggtgctcagctccaagaccgtcctccagaaggcccgcgccgctggcggccccggcccggccgccaagcccaccaggatcgccgagtgcctcatcggcgacgagaccggctgcgtcctcttcaccgtccgcaacgaccaggttgatgttctgaagcctggcacactgtcatatacgcatgcaagat

SEQ ID NO: 3274 - DNA, 451 bp, Triticum aestivum
  Clone ID: uC-tsfl9316064h08b1
tctggagaaggagaccctgcagcaaggccaaggaggactcacccgacccccgctcgccaacggcaggtctggaatgttgccaatgtcgagccctccagcaaatccgggacagcttaccattttttatggtgggtcagtatgtgtgtatgactcagtgccaccagagaaggctcaagcaatcatgctcattgcagcagcagcagctgcggcctcaaaaagcaatggcaccgctgctgttaagcctccagcgatgtctgcgaccaatgctatccaagccatgcttacgcggtcgctcttactacagagcacttttgtagcaaatggacaacctcaggctgttgcggatcctggctcgatttgcaagcttcaggctgatcttcccatcgccaggagacactcccttcagcgctttctggagaagcgccgtgacggggtggtgagcaaagctcct

SEQ ID NO: 3275 - DNA, 404 bp, Triticum aestivum
  Clone ID: uC-tsfl9316065a03b1
attttgttctctgggatccaacatctgttctaccggcggggctgatgacattctatggcaataccaagccacttgataagtcatggcatgtgatgggtcttggatataatccaagcatcagccctgaggttatccgtggtgctgcagtgatacactttaatggaaatatgaagccatggcttgatgttgctttcaaccagtacaaggcactgtggaccaagcatgtagacactgaaatggagttcctcacactatgtaactttggtctctgaagaaatgctccaaaaataaggcaaccaccaatatattgttcttttatgggcaaagagcccgcacgggaattatctatttttatctgtagcgaagtttcttacctttgtggtggacaactattttcgggtaga

SEQ ID NO: 3276 - DNA, 472 bp, Triticum aestivum
  Clone ID: uC-tsfl9316065c09b1
ttttgtttacgcgcgcctcctcttcctctcctgggaggccgtctgcaccggcaccggctgggcgcccgtcgcctccggccagaccccgccctcctacgtcgtgcgcgccgggctcggctcgccggcccagcccatgctcctggccctcgacaccagcgccgacgccacctgggcgcactgctccccgtgcggcacctgccccgccagcagcctcttcgtcccggccaactcctcctcctacgcgcccctcccctgctcctcgtccatgtgccccatcctccagggccagccctgcccggaccgggaccccttcgacagcgcggcgcccgtgccgtcgtgcgccttttccaagccgttcgccgacgccttcttccaggcggcgctggccagcgactggctgcatttgggcaaggacttcatccccaatacgcgttcgggtgcgtgggcttggtgagcgggccgactttcaacc

SEQ ID NO: 3277 - DNA, 480 bp, Triticum aestivum
  Clone ID: uC-tsfl9316065c12b1
agccaagaaggatcaaaacaaaggctgtttcttctcatattgtttgcgtccatgatttacctatatcaaactggagcgattacacctttcttaagatggctccagcgggcgggaggtgtggccgctcgtccgccacaggctcctgctaaccgtgctcctctggctgcccagaatgatggcaacgagcaacctggtggaaacctcgcagatcctgcaaaccctgaccaagccgcggagaaccaggaaccaggagcagcagcgggcaacgagaaccagcaaggtgcagagggagaagcaaaccggcgcagctggctcggcggcatcttgaaagaggtccagctggtcgttgtagggttcgtcgcgtcgcttcttcctggttttcagcacaatgactaggtgaaagtcttcccgtggcagaatcgaatattggcaccgtaactgtttgtgtgacatagggaggaagtacaagcagaggatata

SEQ ID NO: 3278 - DNA, 462 bp, Triticum aestivum
  Clone ID: uC-tsfl9316065d07b1
tcgctagatatgaaagatgattatctgcattgggagtgttcgtactaccattgttatccaagattaaaacacctaacgcgtgcctttttttaagtatctttaatgcagcctatcggttcttaacttactaccaactactagcggagatagctttctgaaataagcatgctaagcatgaacgttgttctacttatgggaagaaccctcaggtgatgataggtcatggttctttgccatttcctttacaaaatcggctgaatcttgtgattctaagttagtatcaagtcctatatacctttctgtttgtataaattcacaactttcatggaaactgtcgaattgcgagtattaatctcaggctgctgggtatgtttgctgattgtatgctgccatgcattcactgagccatttcctgggattctacttgggaagacccatttgtaaaccgtcccttttgggaat

SEQ ID NO: 3279 - DNA, 390 bp, Triticum aestivum
  Clone ID: uC-tsfl9316065f01b1
ctgggtttacttaatccactccccgcgtgacaaccgcaggcatgacgtgcgcctgctgcggctgcaccgtgaccacggacggcgcgctcgccgcgaaccggaagccatgacggggcgccgcagtgactattgctttcgcgaggcgtccacaggcactgacgactcggcgtcgccggctcgaggacgtgcagggacaacagattcgtgacccgagccggacgcgaacacaacctgacgttggtggggaacaaggagaccgacttgacgagggaggccgcgctcgaccaggagttcatacacgtcaagctatcagaacacattgggaagaagaaagcgagtctttccttaaaccatctggactgcaccttagtctgcccaactgagattacg

SEQ ID NO: 3280 - DNA, 469 bp, Triticum aestivum
  unsure (1)..(469): unsure at all n locations
  Clone ID: uC-tsfl9316065g06b1
cnctcctttagctcgcagccgccgcgcgtgactgcagatctcccgcggcgcgaccatggcggcggaaggcaaggtcccgacgctggccgaggaatattcactcccacccaaggaggtccctgtggaaaaaccagctgaggagaaatctgctacgatcactgaggcctcaccagctgatgagcctgctgctgatgttgaggaaaaaagtgaaactcctgaggtgaaagagccagaagcggaagaaactgttcctgctgcagaggaaagcgatgcggctcctgaggaaactgaagagaaaccagaaattgtgattgagacggctccagcagattttcgtttccccacaacaaatcaaacaagacattgcttcacacgctatgttgaataccataggtgcgtaactgcaaaaggagatgatgctcctgagtgtgaaaagtttgcaaagtactaccgatcactatgcccaagt

SEQ ID NO: 3281 - DNA, 436 bp, Triticum aestivum
  Clone ID: uC-tsfl9316065g07b1
tttttctcacaatcgttttgagtggtcattcactcaatttggttcagccgtttaggcggggcgataaaaaaaagttgctgctctgtttctgcaaaacagcatttctgttgtttttgcccatagcttttcaggatcttcgagggctgataaattgatgctatacaattgtatagctacctgataccttttagttcatagatcaattttatttacttactccccatgagtattggtgttgctatggatttccaaagtccgcttcctcattattcctaaatctgaaaacagcagagatgtttttgctggttttgacacctgtaacctcataatctgaggttgaatagttggagttatttgtagatgagttccccatgaatccataaccattttgtttgcatgttttagagcttcctagcttgaagagctttgaattttt

SEQ ID NO: 3282 - DNA, 84 bp, Triticum aestivum
  Clone ID: uC-tsfl9316065h01b1
attaattttaaaaaaaaaaaaaaaaaaatacaaggggggttaataaaaaaattgggggcagattaaataaccctaattagttct

SEQ ID NO: 3283 - DNA, 176 bp, Triticum aestivum
  Clone ID: uC-tsfl9316066d03b1
gctggcacgccggccgaagccggtaccgtctatcccggtcgcccgacacgttgggttttgtcacgcgcaccagcacgggagctgaccatgatttagtccgtctcgatggagccgttggcggaccaccacgggtcccggttcggccagatgacggcgtatgtgatgataccaaacca

SEQ ID NO: 3284 - DNA, 502 bp, Triticum aestivum
  Clone ID: uC-tsfl9316066e01b1
tcgtttttcctttataaaaagatctcagaagctgaattcacatgcccctcttggttttctactggagctaagaagttgattaccagaattttggaccctaatcctgcaactcgtatcaccattcctcagatactggaggatccttggttcaaaaagggattcaagccacctgtttttgacgacaagtatgaaactagcttcgaagatgtctatgctgcatttggagactcagaggaccagcatgtgaaagaggagactgaacataagccaacctcaatgaatgcatttgaactgatttcactgaatcagggattgaatctggacaatttgttcgaggcaaaggaggagcataaaagagagacacgattcacgtcgcaatgccctccaaaagaaatcatcagcaagattgcggaagctgcaaggccacttggatttgacattcagaagaaaaactacaagatgcgggtggagaacctccaagcaggttgaaaaggcaatctca

SEQ ID NO: 3285 - DNA, 421 bp, Triticum aestivum
  Clone ID: uC-tsfl9316066e02b1
tcttttttcctttataaaaagatctcagaagcggaattcacatgcccctcttggttctctactggagctaagaagcagattaccagaattgtggaccctaatcctgcaactcgtatcaccattcctcaaatactggcggatcctcggatcaaaaagggaaacaagccacctgttcttgacgacatggatgaaactcgctctgaagatgtctatgctgcatttgcagactaacaggaccagcatgtgaaagaggagactgaacataagccagcctcaatgaatgcattttaactgacttcactgaatcagggatcgaatctggacaatttgctcgaggccaaggaggagcataaaagagagacacgattcacgtcgcaacgccctccaaaagaaaccattagcaagattgcggaagctgcat

SEQ ID NO: 3286 - DNA, 349 bp, Triticum aestivum
  Clone ID: uC-tsfl9316066e11b1
tcgcgccctttgttttatatgatgaggcgctcaggttagtttcatgatgagcagtcgcaactcatgtaacgcaattctcaagaggtcgtacatcaaaactcaatttatgtcagctcacagctcattacaaactaccctaagggccatattcttttaacgattgggggcttaagtcgtacaagatgatgcgacacgtgggcatatttgtatgttgctggtaacggccataagtagattcatgacgagcgaacgcggacagattgtttttcgtgaggggcctcagagttattacatgacaagcgagcgctactcaagaaacgcaatggcggcctacaccgggagcgacccg

SEQ ID NO: 3287 - DNA, 346 bp, Triticum aestivum
  Clone ID: uC-tsfl9316066f03b1
tttttgtatgggatcaaagaggcctggtcattctatatgattgatagagcatttgccctcacagtagcctttctgatcaacatctgtatcatatctgctagtggtgctgtttgcagcgcagataatttgaaccctgaagaccggatgaattgcattgatctagatcttaacaaagctttattcttgataaagaatgtcctcggaaattggtgctcaaaggtgaccgctatagccttattggtatctgggcagagttctaccattacaggaacttatgcaggacaatatgacatgccagggtttctggatcttcagatgacaccctgggtacgaaaccttttaacta

SEQ ID NO: 3288 - DNA, 311 bp, Triticum aestivum
  unsure (1)..(311): unsure at all n locations
  Clone ID: uC-tsfl9316066g08b1
tttctatgggcctctagccctagtggatgagggcctccccatcatcgtcattgcgaacacgcgacgcatgcttcagcaagcaacagtccgtgatccagcagctcctttctcgcaaggggcgtctgatcataatgtgttcaaagggagatgcctctgctgtcaatcccggcggatcttgtagagtgattgaagttccaaaggttgcggactgtctccagccagtgattaacataataccattacagttgctcgcataccatctaaccgtatcttngtggattcgatgttgaccaaccaaggaaggctgccga

SEQ ID NO: 3289 - DNA, 545 bp, Triticum aestivum
  unsure (1)..(545): unsure at all n locations
  Clone ID: uC-tsfl9316066g11b1
ttttaagagagagcaagccagccaaggcgattggatcttgcacctgccaacaaggtacggggaagatcatggcgtccgatggcaagagcaagatccttgtgatcggcgcgacggggtacatcggcaggcacgtcgtcgcggccagcgcgcggctcggccaccccaccctggcgctcgtccgggacgccgccccctccgacccggccaaggcgcagctgctcaagaccttccaggactcgggcgtcacgctcctcacgggcgacctctacgaccacggcagcctggtgagcgccgtcaaggcggccgacgtcgtcatctccacgctgggctcgatgcagatcgccgaccagaccaagctcatcgccgtcatcaaggaggccggcaacgtgaagaggttcttcccgtcggagttcgggctggacgtggaccgcaccggcgccgtggagccggtcaagtacatcttcgccctcaaggcggtcatccgccgcgccgtcgaggccgagggcatnccctacacctacgtggtggccaactaacttcgcggt

SEQ ID NO: 3290 - DNA, 500 bp, Triticum aestivum
  Clone ID: uC-tsfl9316066g12b1
caccacccagggctttgatgaccttggcaggcgctgcgccaagtactatgaggctggtgcccgcttcgccaagtggcgtgcagtcctcaagatcggcgccaccgagccatcgcaggtctccatcgaccagaacgctcagggtctggctcgctatgccatcatctgccaggagaatggtctggtgcccattgaggagcctgagatccttgttgatggacctcatgacattgaccgctgtgcttacgtcaccgagatcgagcttgctgactgctataaggccctcaacgaccagcatgttctcctcgagggcactctcctgaagcccaacatggtcacccctggctctgactgcaagaaggtggcccctgaggtgattgatgagcacaccgctcgcaccctccagaggaccgttcctgctgcccgacccgtcattggctttctctctggtggacagagcgaggaggaggcgacccttaacctgaacgccatgaacaagcttc

SEQ ID NO: 3291 - DNA, 374 bp, Triticum aestivum
  Clone ID: uC-tsfl9316066h01b1
aggagatgcacaggcaaggtaccccgctctacatcatcaaggcctagctgcctgttatcgagtccttcgggttctcgagcaccctgagggccgcgacgtccggccaggccttcccccagtgggtgttcgaccactgggacgtcatgggctcctatcctttggaccctggcacccagtcggcgacgctcgagacggagatccgcaggaggaagggtctcaaggagcagatgacccctctatccgacttcgaggacaagctctaaattttggggcttcgaggacaaggtctaaattttggggccatgttttgggactggctcttgctgagaagggaggcgcggtaattttctacctatgagactcacttactatga

SEQ ID NO: 3292 - DNA, 314 bp, Triticum aestivum
  Clone ID: uC-tsfl9316066h03b1
aattcccttttccacccacccatactttatcttacagctcgtccccaacctcctcggtgagctattattaactctgaagggcctcatctacacgccctccctccactcgctgcaccacacccactttacgaccaactactcgctgttcgcgcccttctactactacctgaactcaaccatgaacaagactagcgaccacctctactatcgcacgctgaacagctcagcacgaagcccccgacttcgtccacctcaaccacctcaccactcccggctccctcctccacctccgcctctggttcgcctccctcacc

SEQ ID NO: 3293 - DNA, 483 bp, Triticum aestivum
  Clone ID: uC-tsfl9316066h08b1
tttctccagggtttagctagggttctaccgacgaccaccgtcgacgcccgccccgccgtcgtcgtagccatggccggcgccggcgccggagaggaggacgcggcgtgggagcgcgccatcagcgcggccgttaagagcgcgccgctctgccccttctccgcccccaaaaccctaaccctcgacggggccatcaagtcctccaccggccgcctcccctcgccggcgctcttcgaccgcttcccctcgctcgaggagctctccgtcgcgggcgcccgcctctcctcgctcgccggcctgtcccgcctcccggacctccgccgtctctccctccccgacaaccgcctcgcgggggccggctccctcgccgtcgtcgtcgagtcctgcggcgggaccatccgccacctcgacctcggcaacaaccgcttcgccgcggtcgaggagctcgccccgctcgcaccgatcggggtcgagtcgctggacctg

SEQ ID NO: 3294 - DNA, 453 bp, Triticum aestivum
  Clone ID: uC-tsfl9316067b01b1
caagaagctcatagccattcaaagcctcttcatctccgaagctccaacccaaccgaggatgtcttgctgcggaggaaactgcggctgcggcaccgcctgcaagtgcggcaacggctgcggcggctgcaacatgtacccagaggccgaggccgccggcgccaccctcctcgtctccgccaccgccacccacaaggcgagctccggcggcatggagatggcggcggagaacggcggctgcggctgcacccagtgcaagtgcggcaccagctgcggctgctcctgctgcagctgctagatcgatcatcgaccatatgcatgcaccgtgccgtgcgtgcatcatcgatcatatcgatctactactaccataccatgtaaccgcaacctgatcgagggcctttatctatgcacctgacctgcatcagcagtcaggtgccgctgatgaacagccctaat

SEQ ID NO: 3295 - DNA, 470 bp, Triticum aestivum
  Clone ID: uC-tsfl9316067b11b1
ctctggctgagaagaatgaacggcacatgaatgttcaaagagagcaggcagaaagagatagaatttcggaaagtttacacttcgagattaagcgatgggctgctggaaaagaaggcaccttgcgggcactgctatcaactatgcaatatgcactttggccagaatgtggatggcagcctgtatccctaacagatctgatcactgctgctgcggctaacaaggtgtaccgaaaggcaaccttgtgcatccatcctgataaggtgcaacaaaagggtgcagatctacagcctaaatatatcgccgagaaggtttttgctcttcttaaggtggcctggcacagatttaactccgctgagctcttctagacattactatgaggaccatcttcacctgcgtgaggtactagaggagaagtgcacccaccgcgcatcatacctgctttggctgtttgaggtgctcaaggagggaca

SEQ ID NO: 3296 - DNA, 470 bp, Triticum aestivum
  Clone ID: uC-tsfl9316067c03b1
gaccctgacgacaagaagccagaggactgggacgagagagctaaaatccctgacccagctgcagtgaagcctgatgactgggatgaggatgccccaacagaaattctggatgaggaggccaccaagccagaaggatggttggatgatgagcctgaggaagttgatgacccagaggctgctaagcccgaagactgggatgatgaggaggatggcgaatgggaggcaccgaagatcgacaaccccaagtgtgaagaggcacctggatgtggcgaatggaagaggccaatgaagcagaaccctgcctacaagggcaagtggcatgcacccatgattgacaaccccaactacaagggaatctggaagccccaagaaatccccaaccctgaatactttgagcttgacaagcctgactttgatccgattgccgctattggaattgagatgcatgcagagatctttgcacatctatg

SEQ ID NO: 3297 - DNA, 478 bp, Triticum aestivum
  Clone ID: uC-tsfl9316067d01b1
ctactcgacgggagcaggagcaatgggaccgagcgaccagggcaaccaccggtggcattgatgtcatactaagggagtcgcagcagaaagtgcagctgaaaggggaccctaaggtggtggcagctgaggccagagagcaatacctaaagttgaaagaaaggttgcagctgcttactttaggtattggtggcgtcggggtggtttctgcttatgtttcatacactcctgaaattgctgggagctttagtgcagggctgattggatctctggtgtatctccgcatgcttggaaccagtgcggattctttagcgggtggaactaaagcagctgccaagggtgctgcggcacagccaagattgcttattccaatggttcttgtgatgatgtacaatcgatggaatgcgatactagtttcagagtacggcttcatgcaccagtgtccatgcgtggtttactcagatgttgttctagcatagat

SEQ ID NO: 3298 - DNA, 451 bp, Triticum aestivum
  Clone ID: uC-tsfl9316067d02b1
gagcagcaagcagaaggccaagaagcgcgggcgcaagcccaagaacctccccgcccacccgtccagcgccacggaggccacccagagcgaccggcgctgcagccactgcggcgtgcagaagaccccgcagtggcgcgcggggccggagggcgccaagacgctgtgcaacgcgtgcggcgtgcgctacaagtccggccggctgctccccgagtaccgtccggcgtgcagcccgacgtacgtgagcagcgtccactccaactcccaccgcaaggtgctcgagatgaggcgcaagaaggaggacggcccgctcacagtcaccgccaccgcgcccgccgtggcgtcgttctagctcgctcgctcgctggctggctggccactccgtccgcggtgggtgtacattttcccgcccgtatcagtctttgtactaccgtactcgaacccttttcaaaaa

SEQ ID NO: 3299 - DNA, 546 bp, Triticum aestivum
  Clone ID: uC-tsfl9316067d07b1
tacagtcacttcactgatcaagtagctggcaagaggtttgaccgcagtacaaccttgcatcccggtcgatcgatggcgtccaaggtcgagctggtggtggaggtgaagtcgccggcggagaagctgtggacggcgatgcgcgagtcgacggagctgttccccaagatcttccccgagcagtacaagagcatcgagaccgtggagggcgacggcaagtccgccggcaccgtccgcctcatcaagtacaccgagggggttccgatggtgacgttcgccaaggagaaggtggaggtggcggacgacgagaagaaggtggtgtcgtacagcgtggtggacggcgagctggtgagcttctacaagaacttcagggtgacggcgcaggtgaccgacaagggcgccgacggcgccggcgcggtggtgaactggaccatggacttcgacaaggccagcgacggggtgcccgagccggacgtcatcaaggagaccgccgtcaagacctttcacgacctcgacgactacctcctcaagactagcagcttttagctg

SEQ ID NO: 3300 - DNA, 313 bp, Triticum aestivum
  Clone ID: uC-tsfl9316067g03b1
ggaggaggccgacatcgacaaggacgggcggataagcctgtccgagttccgcaagctcctccgaaccgcgagcatgagcaacctgccgagcccgtccggagttccgaatccccaggctctgtgagaatcggcgaggagcatctataggggccggggagatggtgacgagtacattagagagtttatttcttcttcttttgtgctgttttctgcgctccgtgcgatgtgagggtttctgatttgttagcatccaggttctttgtgcactggtaagggttagagataagtttcagggtaaatattttcgttgaag

SEQ ID NO: 3301 - DNA, 534 bp, Triticum aestivum
  unsure (1)..(534): unsure at all n locations
  Clone ID: uC-tsfl9316067h04b1
gacacatccaggtccaagcaaagcatccccagccgagccgagaccgcgtgcgctccacgcagcatccgccgcagcagccgcccagagaagtcgccgccggagaaggaggaggatgtcgtggcagacgtacgtcgacgaccacctgtgctgcgagatcgacggccagcacctcacctccgccgccatcctcggccacgacggcagcgtctgggcgcagtcccccaacttcccccagttcaagcccgaggagattgctggcatcattaaagactttgaggaacctggacatcttgcaccaactggtcttttccttggaggcacaaagtacatggtcatccaaggtgaacctggggttgtcatccgaggaaagaagggcaccggtggcatcactatcaagaagaccggcatggccctgattcttggtatctacgatgagcccatgactcctggccagtgcaatttggtcgtggagaggctcggcgactacctggtcgagcagggtttctaagcccngcctgatatgatgttattttg

SEQ ID NO: 3302 - DNA, 385 bp, Triticum aestivum
  Clone ID: uC-tsfl9316068a01b1
taaaatttatataaaaaaaaaaaaaaaaaaaagaaaaaaaaaaaaaaaaaaacaaaaaccaacaaaaaacaaaccaaaaaaaaaaaaaaaaaaggggggccccccgcagagggaccccccttccccgcccgcgggcgcggcgcggaaactctcttccagggggccccaaagccagccccccggcccccgctttcccccccccggacccgggaaaccccccgggcccccccctataaagcgcggggggccacccccccctcgcccggggggggaaaatgaagaggggccgcccccgtttggccctccccaaaggtcgcccccccagtggccaaggggaccccccccctaccgcgccctaaacggcgggggggggggggggcccccc

SEQ ID NO: 3303 - DNA, 90 bp, Triticum aestivum
  unsure (1)..(90): unsure at all n locations
  Clone ID: uC-tsfl9316068b03b1
ggggacgcgccccggaacggagcaanaagcgcggcgggggaggaggnaacgcgcagcgggaccgccacacgngccagcgccccagcgccc

SEQ ID NO: 3304 - DNA, 575 bp, Triticum aestivum
  unsure (1)..(575): unsure at all n locations
  Clone ID: uC-tsfl9316068c06b1
ttccacttgtccgcttcccgtgggggatggccgnggtgggcggcaccaacgcctgcctccgccgcgtcgacgccgccgaggtctacgacaccatcgcccgccgcggggtaacgcacctctgcggcgcgcccgtcgtgctcaacatgctggccaacgcgcccgagggcgtgcggaggccgctgccggggaaggtgcagatcctcacggccggcgcgccgccgccggcggcggtgcttggccgcacggaggccatcgggttcgacgtcagccacgggtacgggctgaccgagacggcggggctggtgctgctgtgcgcgtggaagggcgagtggaacaagctgccggcgtcggagcgcgcgcggctcaaggcgaggcagggcgtgcgcacccccggcatggccgaggtggacatcgtggacggcgagaccggcggcagcgtgccccgagacggcgccacgatgggcgagatcgtgctccgcggcgggtgcgtcaccatgggttacttcaaggacgagggacgccacccggcggtgatcccggacgacgggtggntctacacggnggacgtgggcgtg

SEQ ID NO: 3305 - DNA, 573 bp, Triticum aestivum
  Clone ID: uC-tsfl9316068c07b1
tttgcattggaagaattgacgggtgatggactgatcgtggcctgaatttctggtgaccagtaattagtaaacaagcagcttaaaccagctgtcagggcaaagtagttttcagttctatggggaagttgtaggatgcagaagaaaactaaaaattgaagaatggtcgtgaattataacgatgtatgggtttatctattgattgacagggttggtggcaaatctctcggcagagtttgtgtgtgatgttgcagtcatgttcttgtttgaagaacaggtggatatcgagcatagttaaaaaaaatgcgcgcctaggctctaggcagtagcgaaacacctagcacttaatgtgcgcggcataattgcgctcaagtgtgtgcttcagaaaagcgcaaggtggtggcaaaacacacaattaatgcctagcgcttcttttagctttgacattgagctggcatcataactgaatgtttgcagctaatgaaaatggtagagtgctagtcatacatgatatgttcattggtagccgtctacattttatggactgagggtgctagttatgtcaaaatatttact

SEQ ID NO: 3306 - DNA, 554 bp, Triticum aestivum
  unsure (1)..(554): unsure at all n locations
  Clone ID: uC-tsfl9316068d03b1
tggacgtgtgggcagcagcaatggccgcccatgcagttctcgccgccacccgcatccccaccagcgcgcgtctgcacagcaaggccgcctccaggcagagggttgacttcgccgacttctccgggctgaggccggggtcgtgctccgtcagcgccgccgccagggaggcgtccttctccgatgtcctcggcgcgcagctcgtcgccagggcttccggcgagaacgccgtgagggcgccggcggaggcgaagctgaaggtggccatcaacgggttcggccgcatcgggcgcaacttcctccggtgctggcacggccgcgagaactcgccgctcgaggtcatcgtcatcaacgacagcggaggcgtcaggaacgcgtctcacctgctcaagtacgactcgatgctgggcacgttcaaggcggacgtgaagatcgtggacaacgagaccatcagcgtcgacggcaagaacatccaggtcgtctccaacagggancccctcaagctgccatgggccgagctcggcatcgacatcgtcatcgagggtactgggagtgtc

SEQ ID NO: 3307 - DNA, 138 bp, Triticum aestivum
  Clone ID: uC-tsfl9316068d05b1
gaggaggccaagaccaaagaagaacagaaaggccgcgcccgcccgcggggggaacaacagcaccgggacggcagcccgacggggacgaaggaaaaacaggaaccccccgcgggagagccgaaagaggagcaggaacac

SEQ ID NO: 3308 - DNA, 544 bp, Triticum aestivum
  unsure (1)..(544): unsure at all n locations
  Clone ID: uC-tsfl9316068d07b1
ttaagagttgatctaccacgagatcagagaggctaaaccctagaagctagcctatggtatgattgctgttcatcctatggactaaacctctctggttcatatagacaccggagagggctagggttacacagagtcggttacaatgggaggagatctacatatcgtattgccaagcttgccttccacgccaaggaaagtcccattcggacacgggacgaagtcttcaatcttgtatcttcatagtccgggagttcggccaaaggctatagtccggccatccggacaccccctaatccaggactccctgaggcacattatctctttttagtctgtaagccttcgggccttcgttaaatttagaacttgtaatcccttgctcatgtttttcattccgtatgaactgtacctgtacgggattgttntaatgaaaaagggatgttcgccggggttttcattcgtgggtgaaccctatgacaaggagccgaatcctcgtattatttaagaataaatgttttcgcccagcaacaggcctttccgtccccca

SEQ ID NO: 3309 - DNA, 360 bp, Triticum aestivum
  unsure (1)..(360): unsure at all n locations
  Clone ID: uC-tsfl9316068d10b1
cggagcgggagcgcaccangacccagacagattcagngacgctgccggcggaccccgaccaggacgagaccgcacaaccggagcaagcacggccacgccgggccaaaggcaccgccgcggaggaggaccaagaccaaaagaagaaaangaacggcacggcccgctcgcggggggaacaaaacaaccgagacgnaaggccaaccgggacgaaagaagaaaagaaccgccgcgcggagcagcagaaagaggagcgggaggacacgaggccaaagctaggcactgggacgggcgtacaacgacaacgaccgtgaaagaccaaggcgtacccaaaccaaatcgacatggagcagaagcacattc

SEQ ID NO: 3310 - DNA, 521 bp, Triticum aestivum
  Clone ID: uC-tsfl9316068e02b1
tggcgcgtggccctggtgaactacggcaaggactacggccgcctcgtcgtcatcgtcgacgtcgtcgaccagaaccgggcacttgtggatgctcctgatatggtcaggtgccagatgaacttcaagcgtctttcgctgaccgacatcaagattgacatcaagcgtatccctaagaaggcaactttgatcaaggccatggaggaagcagatgtgaaaaccaaatgggagaacagctcatggggtaagaagcttgttgtccagaagagaagagcatcgctgaatgactttgacaggttcaaggtcatgttggctaagattaagaggggtggtgcgatcaggcaagagcttgccaagctcaagaaggaggttgctgcttagattatcttagtggatggcatgttgagttttttgttccaagttggatctgctctatgttccagtgttcttaaagccagaattagtacaactgttttcggagaactacttcatattttgtcatggctgttattgaatacccaagc

SEQ ID NO: 3311 - DNA, 340 bp, Triticum aestivum
  unsure (1)..(340): unsure at all n locations
  Clone ID: uC-tsfl9316068e06b1
acgcacagcgcgaaggcacgaacgccnccgttccgcttcccgataaacgggtagactttcgtcgacccggcgcgcggagcgaccaggatgcaggttgcaccgcggacgctgccggccgacccngacgcaggcgaggccgnacaacgggcgaaagcagggccccgcggggccagnggcccncggaggaggaggccacgacgaaagangaacngaaagcccgccgccgcccgcggggcgaacaacagaaccgagacgccagccggacggggacgaaagaagaacaggcgctccgngnggcagagccgaaagaggagcnagangacacgaggcccaagcncgg

SEQ ID NO: 3312 - DNA, 420 bp, Triticum aestivum
  unsure (1)..(420): unsure at all n locations
  Clone ID: uC-tsfl9316068f02b1
tgctaacaccggccagcgcgccacgcgagatgagaattacacagcgctggcgcgcgagcggacccggaaagganggccggcggcgcggacgcggacggggggcccaggagcggcgnggccacggactacacgaggagcagcaagcgggcgctggagngggcccgccggaacctgctccgacggggctgacaccgtagtcgagctccacgtgcagcgacacaggagctaggaggccaagcacgccatttgggccaagacctgatccacactaatccctctgttcgagctccgcgagcctgaagtgatgaaaaactacggaatgacctgcgacgccgaggtgctcgacatgctcgacaccgccgtgcgccacattgagctgaaagtggtggggaacgtgtactggggccatgccagggaaaa

SEQ ID NO: 3313 - DNA, 493 bp, Triticum aestivum
  Clone ID: uC-tsfl9316068f06b1
ttagtctctcgagacagttccttcccggcccgatcccgtatcctctccgccggcaacgctcgtcgaagaagtgatgggggaggtgctcggcgtgttcttgtacatagtagatgtaggttcagtttccgttctggtgtgttgggcgtgatgcctaggactggcgatatgccgatgaggagcgcgccgcctgcgcgtacgagcagcgcatggtggctagcggcgatgctttggttggtggcggtggcgtggtgctactcgctgctgcgtgattcatcgacggcgcatcctgcaataagctcggttgctgccatgatttggagaaggattcgtccccttcctctgttgctttaagctgacatggaggtggatggagcgatggtgatgctagaggatctggtttttgcaggtgggttcggagcatattagcagcggcagaacaggtggagctacagcgcccgctggcagccggtctttcacaccatggcgttgcccc

SEQ ID NO: 3314 - DNA, 387 bp, Triticum aestivum
  Clone ID: uC-tsfl9316068g09b1
tgcttattcggaggcgaggggctactacaagcatccatctcctcaaagaagcggatgtggtattcattctatgttggcatggcggttgccatcttctggacatactacctcttgaagttaccaaggatccgatgggatgtagtgtggctcccgcttggcccttcgattgcttctgcattgagcctctatgtggaccatatgctaatgaagtcgatgcaagatatcagcaccttgaggggctacatgtacaacttcaagtccctgtgatgctaagcatacttctcgtctgggtcatgcacttgcctgcactgtgtacatgggataccgcatcattcgtgtctacttgcgacctctcgttctcgacttcagaacgtcaagtcaaaattt

SEQ ID NO: 3315 - DNA, 417 bp, Triticum aestivum
  Clone ID: uC-tsfl9316068h08b1
tgctggcaccgaggggcgcggcagtggggctggcaatggtgatcgcggacatggggggggcgccgccggcgacggtgcacgcgggcatatcctgctgcacggtgtacagcacgctgatgccgtgcctgcagtacgtgcaacagggcggctcgccagcccggggctgctgcaccggcatccataacctgatggcggaggccaacaacagccccgaccgccgcaccatatgaggctgcctcaagaacgtcgacaacggcgcctccggcgggccctacataacccgagccgccgcgctgccctccaagtgcaacgtcggcctccgctacaagatcagccccagcgaagactgcaactcgatccactgaacgaactgaagcgccttggcccgtgtgtcgacgtacgtctgccgtgcgagga

SEQ ID NO: 3316 - DNA, 278 bp, Triticum aestivum
  Clone ID: uC-tsfl9316069a05b1
ccgcctcggagattccgcgggccgatcccacagcgtccgtttttccacaggtttaggtgctatgggtgcggctgggggtgtcagggctcacaagggggacatggaagccgtcgactagaacttaaacggccagagcaaagaggccgagaaggtggagacacttgaatcaactgggacacacgaggtggggatgacgcgctggttcacctccgacgcgtgctgctaggacgggttcagccctgtgtacctctcacggctctgcgacagactctgccacg

SEQ ID NO: 3317 - DNA, 356 bp, Triticum aestivum
  Clone ID: uC-tsfl9316069a09b1
gtctcgtcggcgcgctgctcgcgctcctcgtcgacctctccgcctcgtcgcacctcgaagcccacggccaccagcagccgcagcaggaggagggccagccctacgccccaatccccaccaccaagaaggcccccgccttcgagctcaccggcgaaatgagccccaggaaacgcgctttcctggacgagagtgaccgcgacgacccggcgccgcacgccgacaagaatggcggcgagccggaccgggacgacgtggcgctattcggtcccaagaaaggcgcccggctgccccgcagcgatgagcccgtggtccctattgtcgggtgccatggcgctgggcatgaggtggtggaggtc

SEQ ID NO: 3318 - DNA, 510 bp, Triticum aestivum
  unsure (1)..(510): unsure at all n locations
  Clone ID: uC-tsfl9316069b01b1
cctacgcgtccgccaccattttcacagcaacaacaaataccagttattcatccatctgttttgcagcagctaaacccatgcaaggtattcctccagcagcagtgcatccctgtggcaatgcagcgatgtcttgctaggtcacaaatgttgcagcagagcatttgccatgtgatgcagcaacaatgttgccagcagttgcggcaaatccccgagcaatcccgccatgagtcaatccgtgctatcatctactctatcatcctgcagcagcagcagcagcaacaacaacaacaacaacagggtcagagtatcatccaatatcagcaacaacaaccccaacagttgggccaatgtgtctcccaaccccaacagcagttgcagcagcaactcgggcaacaacctcaacaacaacaattggcacatggtacctttntgcagccacaccagatagctcagcttgaggtgatgacttccattgcactccgtaccctgccaacaatgtgcagtgtcaat

SEQ ID NO: 3319 - DNA, 397 bp, Triticum aestivum
  Clone ID: uC-tsfl9316069c09b1
atcggttcaaatgccataaccaaaaataaggcgctgccgtccgtggatcttgtaccgagtatatcactgcatcaagagactttgcagggcacagattctgatgatgagacgataggatctctgcttagtagaggaaagaagaaacggttatcgacatcagatgttacagagaataaacaagaacacctagattcttcgaagaacattggtctgggggttgagactatcggttcaaatatcataaccaaaaataaggagctgccatccgtggatcttgcaccaagtatatctgaacatcaagagacttcgcagggcactgattctgatgatgtgaccataggatctctgcttgtagaggaaagaagacaagctatcaatgtcagattttcagagaata

SEQ ID NO: 3320 - DNA, 547 bp, Triticum aestivum
  Clone ID: uC-tsfl9316069e01b1
ctcacgcgtccgcccacgcgtccgcgccttgttaatcttcagtacctggagctgtacaggaacaacctcaatggcgagattccaaaagagttgggcaagctgaagaatttgatcagcttggatctgtatgccaataagcttaccggaagaatccccaagtcgctttccaagctcggctcactgagattcatgcgtttgaacaacaacaaacttgctggatcaattccacgggagctggccaaactctccaacctgaaagtcattgatttgtctaacaatgacttatgtgggacgatccccgtcgatggtccattctcaagcttccctcttcgaagcttcgagaacaacagcaggctgaacggcccagagctgcaaggattggcttcctatgactttggatgctaggaagcgccgacgcacacgacaatgcacgtggaaggaaggcagaaaaaatatagtagtacaacacatagtatggagcctagcactacaacatgtatggcttgcgatacatgcagcagaagatgaagaaggttgtgagcatagg

SEQ ID NO: 3321 - DNA, 429 bp, Triticum aestivum
  Clone ID: uC-tsfl9316069e05b1
gtccgctgtcatgggtttgtaagggtggctcggtattcagaagtttcaaatcgtaccgagcctttcaaacttcaaaagggcagtggtaggaggcggacagtggagagagatttggatcaactgcaacaatccagattgggggaggccgatggctttgaagtgattcatgtcactgggaagcatccatttctgtggcctgatcattggccagtgaaagactatgccaggatcttcgattgccttgctgtagctcctgagatagaaactgaagatgtcagggtcatattcaagattaaagatgcagggaaaaaagcaagacatgatgctgccgtttctcataatacgaagaggatcgatggtttgaaaaatcttcctgtgcagtacattgctgttcacatgagaatcgagaaagattggatgattcattgc

SEQ ID NO: 3322 - DNA, 518 bp, Triticum aestivum
  Clone ID: uC-tsfl9316070c12b1
tcaatgtcagtcggagcgagaggaggccgaggcgagcaagaggatcgcttgggtgggcagggacgagcccgaaggaagcaacctgtcgcggtccccccagacggtggacaccgcgcgggactgcgacgtgatcatgttcgacaaggccggcgcgaacaagggccacatagacctcaacttccaccccgccagccgcgaggaggagcagcagcatggcggccagccccgggtgagcatggtcagcctcctcgaggtcgcgaaccgccccctggagagctacatgaagcagaacggcctcgtgagcctggcggcggagcaggggagcagcttgggcacggccacagtcccgtctcagcccgctccgatggagagcgaagagcggccctccgacgaggggcgtgccgtggcggtggagcacgagcgagagcccgtggacaacatgttcgtcgacgaggcagcctgtgagaaccagggcaatgctgccagtgccagtgacatcgctgctacctgacctgagc

SEQ ID NO: 3323 - DNA, 515 bp, Triticum aestivum
  unsure (1)..(515): unsure at all n locations
  Clone ID: uC-tsfl9316070f01b1
ttagaaagatctcagcctggtgctctttgggatgtctttcgcaggcaggatgtgccgatgctgaataaatatttagcttctaactgggaggaacttacaaataacagtcaggcgatgctctctgtgaagcatcctatttatgatcaagctgtatatctcagggagcatcataaaagggtattaaaggatcaatatggaattgaacctcggacatttgaacaacatattggcgaggctgtttttattccagctggctgtccctaccaagtaaaaaatctccagtctacggttcagttggctctggattttttgtcgcctgagagtttgcgggagtcggctcgtatgggccaagagatacgctgcctgccaaatcatcataatgcaaaactgaagatgcttgaggttggaaagatagctctatatgcagcaggttccgctgtcaaagaaattcagaanataacccttgatcccaagttaattcggatattagatttgaggatcagaacctaaccccg

SEQ ID NO: 3324 - DNA, 179 bp, Triticum aestivum
  Clone ID: uC-tsfl9316070f04b1
taataaaaaaaaaaaaaaaaaaaaaaaaaaagaaaaaaaaaaaggagaagacgcgaggagacaaaaaaagagaaagagaacgaacaaaaggagaaaaaaaggacaaaaaggggacaaagaaacagaggggaggagagccaaggaaaaagaagaacagggggggggccaccgcaaggggg

SEQ ID NO: 3325 - DNA, 416 bp, Triticum aestivum
  unsure (1)..(416): unsure at all n locations
  Clone ID: uC-tsfl9316070f07b1
ggcccggaacccccgggccgacccacgtttgattaaaagcaaaccagcgcgagggnggaccgagaaaaaaaaaaaaaacgaaagacgcaacaaacgggccgcgcggagagagganccaagcaacacgaccgcgngaaggccacgccagaccanggcaacagggcggcggagaccaagacgaaagaccaacgganagcaccgccccgaccgggaaaacaacaacggaacccaacngaaaggccgagagggacaaaagaagaaccgaggcggcgngaggcagaacagaacgaggaccanggccacaccaagccgaagcgcagcacggaacgccaaaggaacccgcccggcagcgaaaaccaagcgcggccgaagngagagggacgggcagagagaccgctacacgcggcaggggccaa

SEQ ID NO: 3326 - DNA, 408 bp, Triticum aestivum
  Clone ID: uC-tsfl9316070f11b1
tttactcacgaacaagctagggctggagccgatgcccctccggtctgcccgccggagctccgtccgcccctcttctccatcttctccccccacctctactcccccaggcccaactgtggtggatggcatgcccgccggcgctccatactcccctgttctacatctttcccctcgccatctccctcctcactccctgttccgcccccacccctactgctgcaggctcaaccatggtggtcaacacggggatgtgagcgtgaacggacggcgtcggcggacaagagatgcgtagaggacctcaagtgctgcagacgctggcgaggtgagaatgatattgcactgatgatggagcgcatgtagcacatattaatcatgtgcattgcccattattgaatatcagatattcca

SEQ ID NO: 3327 - DNA, 496 bp, Triticum aestivum
  unsure (1)..(496): unsure at all n locations
  Clone ID: uC-tsfl9316070g03b1
tgctgccaaacagcagtggtagtcaaactgtccagatggccagctctctgcttgcggcccgccattctggtgagaggatactgcgctgctggggtgggggcactggctgggctgtggaagatgcaaaagacaagatctccaagctccttgaggagtacaacaccggcggcgacctgaaggaggcctgccagtgcatccgtgaccttgggatgcccttcttcaaccatgaagtggtgaagaaagcgctggtgatggcgatggagaagcagaatgaagctagcatcttggctctgctgcaggagtgctccagcgaggggctgataaccatcaaccagatgaccaacggcttcgcccgtgtcaaggaaggcctcgatgatctgacccttgacatcccgaacgcgcaggagaagttcagaggctatgtggagctcgcgacagagcgcggntggctgctaccttccttcgcctccctgccctgagctctttcccgacagac

SEQ ID NO: 3328 - DNA, 447 bp, Triticum aestivum
  Clone ID: uC-tsfl9316070h02b1
tcctcacgcgtccgcccacgcgtccggctacggcggcggtggtggcggctacggaggcggtggtggcggctacggcggtggcggtggcggctacggtggcggtggctatggaggcggcggtggcggcggccgtgggtgctacaagtgtggcgaggagggccacatctccagggactgcccccagggcggcggtggcggctacggcggtggtggctacggaggaggcggcggcggcggcggcggccgtgagtgctacaagtgcggcgaggagggccacatctccagggactgcccccagggcggcggcggcggcggtggctacggaggcggtggcggccgtggtggtggcggcggcggtggcggctgcttctcctgcggcgagtctggccacttctcccgcgagtgccccaacaaggcccactaagcggcgcagctcgtcagatctga

SEQ ID NO: 3329 - DNA, 547 bp, Triticum aestivum
  Clone ID: uC-tsfl9316070h12b1
tttgctgttaagaatcagaagaaaaacaagaaactagggcgtagcacggtggtgccagatgcttccttaccagatggcttacctgagttcgcttcagcggagagtatgggtgagaaaggctctagtactattgttgctgcacggcctgattttgatctgccagaagaggtggaaaaattggtggaggacgaccagatctgtcctcagattaaaaacaaaaacaaagggaaggcaaaggaaacagatgttgccaggccagaagttaagattcaggaaaagaagaaactacggcgtagtacggtggtgccagatgcttccttacgagatggcttagctgagtccgcttcagcggccagtgtggttggacaaggctctagtactgttattatcaataagatcatatcaagatcaatagagaatatgaatttggtgacatccattgacgcgcaccccactaagccatggattgtgacgggtcatgagagagggaatgtttccatttgggactaccagaagaaggaactgtgatgagtttgcaggtcaatga

SEQ ID NO: 3330 - DNA, 339 bp, Triticum aestivum
  Clone ID: uC-tsfl9316071a03b1
cacccggacgcgagcgagcatgaccaagttagaaccagtgccgctgatgcttgagcctgaccaggacgagtccgtgcacctgcaacaggcatggccatggcccgtcagggccattgtgtgtatgaggacgagaccatgaagaaagaggaactgagtgtccgcctgctgtgggtgcaagaacacctgaaccgcgatgtgaccctgacgaagacaaaagaagaactgccgctgcgagaggtaaaacaggaacaggagcacgctaacactaggcctgagactggcactggccgtacaactacaacactgggaatggcaaaaccctgcccaaatcaaacttaa

SEQ ID NO: 3331 - DNA, 513 bp, Triticum aestivum
  Clone ID: uC-tsfl9316071b01b1
tctctgacttttgggaaagcccagcaatgtcggggcggggcggacgcgggcgcggtccggctactcaggcggaccgactgatgcgcggggccatcgaccacttaggacggatggtctacgccgaggccgacattcgcagcaccgtcgggcaactcatcgaggtctatggtgaggatgcttcgctgttcctgaaggaagatgactaccgggtcgtgcaggacgcactatttgagaagcaggagcaggaagagcagcagcaggagcctaaacaaaaggaagcagcaatgtctgaggcaccaacagcaagtgacatgccaattgtggacatgcacaatgagatgccacctggggctgagttatcagtagagggagtagaccctatgcccatcgacccgactgctcctgaggctacaatggtacatactgcagctacaggaactagtagagcaagggcgtcctgctatggatggattagcgaatctgagagtgattcggaatatgaaaaatacctcg

SEQ ID NO: 3332 - DNA, 141 bp, Triticum aestivum
  Clone ID: uC-tsfl9316071b08b1
tctgtacaggaccctttcttactttcgcgcacctgcgacgcgataggtctgctatagtggcacctaaattcaccgctctaggccgtcgcttgacaatcgtgagtctaggaaaaccctgtggcttcccaactgaactcgcct

SEQ ID NO: 3333 - DNA, 426 bp, Triticum aestivum
  Clone ID: uC-tsfl9316071b10b1
tttctcttttaagaaatgcgtcaagttgcggaagcaacgaatccagacctggcgatatttgtgatggatggcagtattggtcaagctgcgtttgatctggcacaagcatttaaacaaagtgcttctgttggtgctgtcatgattacgaaattggatggtcatgcaaaaggaggcggcgcacttagcgcgtttgcagctacataaagtccagtgatatttattggaactggagaacacatcgatgaatttgagattcttgatgtgaaaccatttgtcagccgtctgctaggtatgggagacctgtctggcttaatggacaaaatgcaggatgttatgcctgctgatcatcatcctgatcttctggcaaagctggctgaaagaacctgcactctcagacttgtgtatgatcaattccagaatcttctg

SEQ ID NO: 3334 - DNA, 342 bp, Triticum aestivum
  Clone ID: uC-tsfl9316071c03b1
tttggttgtggccgaggcggcgcgccgcgggggagcccacgtggccgaagccggttgctacgtggggccggcggtcaacgtcctggttgagctgggcctgtctctgctgctatcttgctgggtcggctacccgaatccgggagcgataccctgggagcccaggctttatcagacgctaggctgggtagctactgggctcttctgggccttcgtcatgctcccgagaaggggcatgaacgtggataggacgctgggctttgggctccttgccatatatacgcgatgcttgagtactactccctgcctttttgctcaatttaaaggctccaacggcttttccct

SEQ ID NO: 3335 - DNA, 369 bp, Triticum aestivum
  Clone ID: uC-tsfl9316071c04b1
ccggagcgcggacggactttccccgttgcccgacacgctgtaagaatactgaacacccagaaacgagagagcaccatgacaaagaaagaaccggtaccgctgatgccggaccctgacgaggttgagttccggcaactgcaataatcatggcccggccggccattgcatatgtgcggatgagacgagccaaagaaaacagaacgccccgcccgctccggggcagcagaacaaccggactcacccgaccgggcgaagaagaacagacttgcggtggagagcagaaagaggagatcgcgacacgaggcctaagctaggcactggacggggctgtacaacacagcgactggaaagacaagaccctacccaacc

SEQ ID NO: 3336 - DNA, 588 bp, Triticum aestivum
  unsure (1)..(588): unsure at all n locations
  Clone ID: uC-tsfl9316071c12b1
ttaaaccccagctgcatccatggcgaagccgcggcttcttctctgcctgctggtcgccgccgccgcgctcctgctcgtcgcctccgcgaagaagtccggcgacgtctcggcgctccagatcggcgtcaagtacaagccagaatcctgcagcatctcggctcacaaaggtgacagagttaaagttcactaccgtggaacacttaccgatggaacagttttcgattctagctttgaaaggggtgacccgattgaatttgaattgggcactggtcaagtgatcaaaggatgggatcagggaattttgggcatgtgcattggtgagaagaggaagctgaagatcccttcaaagctcggctatggggatcagggatcaccacctaccattccaggcggagcaactctcatattcgacacagagcttgtcgctgtcaatggcgagccatctagcacatcagaggaggatgacgctgatctgtaggcagctcggcgcagcacgatcgccccagtatcaaatcgaataggactatgtatgggaanactactcttgagggcagacaccatgaggcaggtacattgtcttaccatgat

SEQ ID NO: 3337 - DNA, 441 bp, Triticum aestivum
  Clone ID: uC-tsfl9316071d02b1
tacacttttcagagacaagggagggaggaggcctctgggtcttgggtgctcctgggtcctgtttctttcttctcggcgagcgaggagcttgtcgagacggggcgcggcaagatcgagatcaagaggatcgagaactcggccaaccggcaggtgaccttcgacaagcgccgggcccggctggtgaagaaggcccgacagatcggcgtgctctgcgacgccacggtaggtgaagataacttctccagcgccggcgagctctacgactttgggacgcccaagaccacgctgccaaggagctcggagaagtaccagaccaactccgggaagatcctgtgggacgagaagcacaagagcatcagcgcggagattgacagggtgaagaaggagaacgacaacatgcagatcgagctcacgcatatgaaatgcgaggatgtgaactcg

SEQ ID NO: 3338 - DNA, 322 bp, Triticum aestivum
  Clone ID: uC-tsfl9316071d12b1
ttggacgatgccgaccggtccgattttccggtttgccacgcgctttacctttttaagcttataggcagccaccagggagacgcatgtgacttctccatctcctcgtgctgcacggtgactgagcgctgtgggtcagttgcacaccacctgtcgtcagggctacggtcacatggccactgtagccgtaggcagaagcgcatgcacagacatgaacgaacacgtgcgctgctttcgtgtgagaaagaactgagacaccacatgtgcagagacagaaggagagacgagctgcgccagtgggcgaacagagtgcgcgtgacccaaa

SEQ ID NO: 3339 - DNA, 406 bp, Triticum aestivum
  Clone ID: uC-tsfl9316071e11b1
tttcaagaaccaatacttgatctgttgtttcctttagctcccggaagacttttcgctgcaccgaccgatctcgatcatggaggatgagaggagcacccagtcgtaccagggaggtgaggccgccgtgcaggtggaggtgacggacaggggcctcctcggcaacctcctcggcatgaagatggcggcggaggacacggagaagaaggaggaggagctggtcaccggcatggagaaggtctccgtggaagagcccgaggtcaagaaagaggagcacgtggatggcgagaagaaggagaccctcttctccaagctgcaccgatccagcttcagctccagctcgtctagtgacgaggaagaagaggaggtgttcgacgacatcagcgaggtgatcaagaggaagaagaag

SEQ ID NO: 3340 - DNA, 416 bp, Triticum aestivum
  Clone ID: uC-tsfl9316071g09b1
ggaggaaggaggccagcgcacagggcgaagggcctaacgccgctgcccgaaaaccggttaaatttccgaccaccagggagccgaggagagagggcaccatagaagcaccgagtaccgcttgatgctggacggctgacgagagaagagttcgtagcaacggcaagaaggcagggtcatggggggccagagccactgtgtggcggaggccaagaccaaagatgaagaggaagcggcgcccgccgcgggggagaacgagcaccgggacggagacggacggggacgaaagaagaagagagactggggcggcaggagggagagaggaacgaggagacagaagagcccaaggccgaaactgggcactggtcgacaacgtacagactgggaaaagggagaagcttgccaacacaaaagccaag

SEQ ID NO: 3341 - DNA, 345 bp, Triticum aestivum
  Clone ID: uC-tsfl9316071h02b1
ctggacgccgacgcagcagcccgaccggattaacggctctgcccgataccctttttagtttttgaccaccggggacccggcgcgggagttccaccatgatcgaagccggaccgtatcgggctgctggctgacactgatgagtgtgtgctgggacagccggtgctgttatggtgctgcgggggcaaccggtatctggggaggagaccatgacagacgaggatctagtagacccgtctgctgtgtatgtacgaacaactgatgccgcatgtcaatgctgaccgaggacgaaagaagaactggagctgcctgtgggatatgtgatccttgccatagatgacacgaggt

SEQ ID NO: 3342 - DNA, 374 bp, Triticum aestivum
  Clone ID: uC-tsfl9316071h03b1
gcacagggctgaggcattaacgcctttgcccgttaccctttatactttgtgaccaccggcgacccggcgcgagagatcaccatgattcaaccagtaccgctgatgccggaggctgaccaggatgagttcgtgcacgtgcaactggcgtggtcatggccctccagggccattgtgtgtctgaggaggagaccatggagaaagaggaagtgcgtgcccgcctgcggtcggagcaagaacaacggaaccgcaatgtcagcctgacgaaaacaaaagaggaactgcggctgcgagtgcgaaaactggaagaggagctcgctaacactaggcctaagcctggccctggccgacgactacaacaccgcgacagcaaaacc

SEQ ID NO: 3343 - DNA, 487 bp, Triticum aestivum
  Clone ID: uC-tsfl9316071h10b1
ttgcgtttttcaaaaccggcaccggcaaagctacgttggcaattggcgatggtgcgaacgatgtaggcatgattcaagaggcggatatcggggtagggaccagcggtgccgaagggatgctggctgtcatggcgagcgatgtttccattgcgcagttccacttccttgagcgcctgctgcttgtccatgggcattggcgttatagcaggatctcatcaatggtatgctacttcttgtataagaacattacattcggtgtgaccctgttcctgtacgagtgcttttcgacattctccggccagactttgtacaacgactggtccatgtctgtctacaatgtgcttttcacgtcactgtctgtgatcgccatgggcgtgttcgaccaagatgtttccgaccggttctgtctcaagtacccgatgctctaccaagagggccctcataacctgctcttgcggtggtgaaggctcctaagctggatgctgca

SEQ ID NO: 3344 - DNA, 500 bp, Triticum aestivum
  Clone ID: uC-tsfl9316072e02b1
tttcataggaagagacggcgacggaaagggggaaccttccattgcttagccgcgctacacttgtccagacattggggcagaaggatcatgtctgcctaaaggagggctcaatcaacatcccaccatatgctcctccccagaaaaagaaaactcaccttgtacccccggagaccccgcggtccatctttgtgtattaacgtggattgtactacgatacggcgaatgaccccgagggtggttactatgcaagaggtgcccgagcgtcggtgtgggagaacttcaagaacaacccactgttcgacatctagacggaccacccggccacctactacgaggacatgcagcgcgccatcttttgccttagccctctaggctgggctcgcgggagcccccgtatcgcggaggcggtggtgttcgggagcattccggtgatcatagcggacgacatcgcgctgcccttcgcggacgccatcccgtgggaccagatcggggagttcgtc

SEQ ID NO: 3345 - DNA, 436 bp, Triticum aestivum
  Clone ID: uC-tsfl9316074g10b1
caggcctgaaccctgtggcaagcgggcacgcagggcgaaggcgttaacgcctttgcccgacgccctttacaacggtttaccaccggcgagccgtcaccagagttcaccaagattcagttagtgctgctggttcacgcttgagtgaccctgaggacggtcaagctcgtacaactgtggtcatcatgggccttcggggccatgggtagtctgccgaggagtacgtgaaaaaggatgaccggcttggctcgctgcgcgagcagcgggaacaacttgaccgccaggccgggacgacagaggcgaaggaacaacttgcgcttcgtgtggcagaggatctaagaggacctaggtcacaccagggctctgctcggcgctggacaacgttctacatcgtcatgactgggagaaacctagcgtaaccgaactgaatcacattgca

SEQ ID NO: 3346 - DNA, 156 bp, Triticum aestivum
  Clone ID: uC-tsfl9316074g11b1
acacccgcgtgccttcaccatgattcaccatgaaaccgtcgatgctgctggatgtgcctgatgagtgtgagaacgtacaactggtgcaatcatcgccattagggaccttggttgctatggggcgtagggcatggcgaccgttgcacgggatgaccg

SEQ ID NO: 3347 - DNA, 367 bp, Triticum aestivum
  Clone ID: uC-tsfl9316074g12b1
agtcctttacgaccgttgatcagagtgcgtacgtgacgaggattcattaggggacagttgattctgttgactgttcttggtgagtgtgggttcgtactattgggacaaaaatggtcttgatggaccttagggtctatgtgatgtatttgcaggcgaacatggagaaagatgcacagcttgagctcgctgctggagctggtgaaccgatatgactgtcttccgggaccgaaggagaagatggttactactggcgttataggtgaaagaggtgaaagaggacctaggtgatacgggtgcgaatgttcggaggttgacaacgtttttcaatgggaaaaccttggagaaacctaacataacctgcttgaat

SEQ ID NO: 3348 - DNA, 476 bp, Triticum aestivum
  Clone ID: uC-tsfl9316075b03b1
ttttcgcgcagttcaaggaatgcctacaaaagtaatggctgctaaaatcgcttgtcttgattttaacctccagaagacaaaaatgcaaatgggcgttcaagttcttgtatctgatacaagagaacttgagaagatccgtcagagagaatctgacataacaaaggagcgaattgagaaaattctcaaggccggtgctaatgttgtattgaccatcaagggaattgatgatatgtcattgaagtactttgttgaggctggagcaattgcggtgaggcgtgtgcgtaaggaggatttgcgtcatgttgccaaggcaactggtgcaacaatggtaaggaccttctcatagctatgatgaagcagtactaagtatttcaatattgtaattcttttaatttcattcatgacttgttgacttcgatctcatgaacttacttgtgattgcaattgtagtaaagttgagcgattctgtgcttaag

SEQ ID NO: 3349 - DNA, 501 bp, Triticum aestivum
  Clone ID: uC-tsfl9316075b04b1
tttacgcgtgtgtcggccaggtctgccaggtcatcggcgccgtcgtcgacgtgcgcttcgacgagggcctcccgcccatcctcaccgcgctcgaggtgctcgacaacagcatccgcctcgttctcgaggtcgcccagcatcttggcgagaacgtcgtgcgcaccatcgccatggacgggaccgaggggctcgttcgcggacagaaagtcctcaacaccggatcccccatcactgttcctgttgggagggccacccttggacgtatcattaatgttattggtgagccgattgaccacaagggtgacatacagacacacgacttgcttcctattcatcgtgaggcccctgcttttgttgagcaagccacagagcagcaaattcttgttactggaattaaggtcgtggatgtgctcgcaccttaccaaaggtgtgggaaaattggtctcttcggtggtgcaggagtgggtaaaactgttttattatggagttgatcaccatgtt

SEQ ID NO: 3350 - DNA, 464 bp, Triticum aestivum
  Clone ID: uC-tsfl9316075b12b1
tcgttcaatcccaacagtcagattgcagatccgaacaccaatttgttctataccaatatgtttgatgctatggttgatgccacatacaactcaatgaaagcaatgaatttcaccgatattcctgtaatggtcacagcttctggttggccatggcatagtgcacgcaaagaaccggctgcggatgttgataatgctctggcctacaatacaaatctcatacgccatgtactaaataactctggtacccctagccagccaaataatcaagtaagcacatacctgtttgagttgttcagcgaggatcttcggtcaggatctgttttgggggaaagttgggggattatgtttaccaatgcaagtgcagtgtactccctgacatttgaagatgtggctacagctagtactgattcaccggctctgcacgggattgtttgtgtggaaattcaagtgcaccccatagtgca

SEQ ID NO: 3351 - DNA, 451 bp, Triticum aestivum
  Clone ID: uC-tsfl9316075c06b1
tcgcggttatgctgttaaaactttattcacgtccagaccgtcgtcaaaggtgccgacaatctccatctggctgtgctctttaattagccagctcagttcctgttgtgccaggaattcgccttcaacaatgatgactttcacaatatcactccggctcaaagcaataacgtagcctgtgaggcgactggggtgcgttggttaggaatgtaaaacgcaatttccgtccccggctccaggcggtggatatgcagcccctcgccatacaataacttcacgcgatgatggacattcagcaggccaattttattgcccggcatttcattcgcttcgacccgctcaatcacctttggatcgatgccgtgcccggtatctcgcaccgcaatgcgtacccgatttccgcactctgcaacgctgatggtgacaacgcctctacctttgcaggctgaatacc

SEQ ID NO: 3352 - DNA, 456 bp, Triticum aestivum
  Clone ID: uC-tsfl9316075c12b1
gtttcgattggaccgtgtcaagaacttgacaggtctggttgagctgtatggcaagaaccctcgcttgcaggaacttgttaaccttgtggttgtctgtggtgaccatggcaatccatcaaaggacaaggaggagcaggctgagttcaagaagatgtttgaccttattgagcagtacaacctgaatggccatgtccgctggatctccgctcagatgaaccgtgtccgtaatgctgagctctaccgttacatctgtgacacaaagggtgcctttgtgcagcctgctttctatgaggctttcgggcttactgtcattgaggccatgacctgcggtcttcctacctttgcaactgcatacggtggtcctgctgagatcatcgtgaatggtgtgtcaggctaccacattgatccctaccagggcgacaaggcctttgctctgctcgttgagttctttgagaa

SEQ ID NO: 3353 - DNA, 449 bp, Triticum aestivum
  Clone ID: uC-tsfl9316075e06b1
ttcacgcgtccgatcgagggcatcaagaagttcgagaccctgtcctacttgccaccgctcagcacggaggcccttcttaagcaggtcgactacctgatccgatccaagtgggtgccttgcctagagttcagcaaggaggggttcatcttccgtgagcacaacgcatcccctgggtactacgatggccggtactggacaatgtggaagctgcctatgttgggatgcaccgacgccacgcacgtgatcaacgaggtggaggaggtcaagaaggagtaccctgacgcctatgtccgcatcattggattcgacaacatgcgtcaggtgcagcgcgtcagcttcatcgtcttcaagccaccgggctgcgaggagttcggcaaggcctaaacagctcactcacgacaggccatatataaagtgccatagcagtgttgcaactctgacattgcttt

SEQ ID NO: 3354 - DNA, 409 bp, Triticum aestivum
  Clone ID: uC-tsfl9316075e12b1
tcgttcctgcacgccgcggcgccgccgtattcgaccccgactccgtccccggcgcccgtcaccatgatcagtctccaagaagaaccgccgcgagatctgcaagtaccttttccaggagggagtctttggcgccaagaaggactacaccctggccaagcacccccaggttgatgccttgaacctcgaggtcatcaagctcatgcagagcttcaagctcacggagtccgtaagggagaccttttctcggcagcactactactggtacctgaccaacgacggcattgagttccttcgcacctttctcaacctgcccgtctgagatcgtgcccaacaccctgaagaagtccagcaagcccccgtcccgccccttcggcttttgcccaccgggtgaccgccccaagggtcctcc

SEQ ID NO: 3355 - DNA, 409 bp, Triticum aestivum
  Clone ID: uC-tsfl9316075g06b1
ccttttcgccgtttacgcgtccgggaacaatcagatccttcttcgatgcgaacatgggcctgtgcgagcagcccccaaagttcgagttttatgatcccaaaactcccttcttcacctggcctcgatgcttgcctccaacaaagtcagacaagtgcaggatcaaagaagcgctcatttcccacggctgcttcttgcgtgaatgcaaaatcgagcacttcatcatgggcgttcgttcacgcctaaacttcggaagcgaactcaagaacgtaatgatgatgggtgctgatacgtcgagaccgaggatgagatctcgtggctgatgtccgagggtaaggttccctttggtgtccgggagaacacaaagatcagctactgcctcattcccatgaacgcgaggattggaagggac

SEQ ID NO: 3356 - DNA, 315 bp, Triticum aestivum
  Clone ID: uC-tsfl9316075h04b1
ttcgctgaccaccttcctgaggtttgactgagccctgaacggggacgggaccgagttccagaccaacctggtgcggtaccctcggatccactatatgctctcgttctacgcgccggtcatctcggcggagaaggcgtaccacgagcagctgttggtgtcggagatcaccaacagggcgttcgagccgtcgtccatgatggccaagtgcgacccgcgccacggcaagtacatggggtgctgactcatgtaccggggtgacgtgctgcccaaggacgtgaacgccttggcggccatcatcaagatcaagagtaccat

SEQ ID NO: 3357 - DNA, 88 bp, Triticum aestivum
  Clone ID: uC-tsfl9316075h06b1
ttctatacgatcggtgtttaccgacgagcgcatgcgatggtttagcatttttaaagtggcacctaatgttaagttaggtggacgctga

SEQ ID NO: 3358 - DNA, 245 bp, Triticum aestivum
  Clone ID: uC-tsfl9316075h12b1
agtctcagtgtcacgtacaacctggctgtaattcatggctccttcggatgccaattgcttctcttgtggaggagtctcattgacgaaagtacgaactgatttgcccgccttccgctcgcttgggtgaaacaacctgaactcgtgatgtcaagtctgaccggtgacgaaaagaagaacttggcgccttccgtgtggcagatgctgtatagaggagctttgatgacacgacggcctaagcttgggca

SEQ ID NO: 3359 - DNA, 396 bp, Triticum aestivum
  Clone ID: uC-tsfl9316076b01b1
gtgaaacacagggcaagaagagaagagagaagcaaagcttgagatggcgcaaaccatggcgtgcatgaccggcctgtcgcagggcgtgcgtatcccaggcccgaccggcaggcgcgccagcaggttcaccgtgagggcgtcgcctgcggaggcggaggcctgcggccgccgtgcggtccttggtctcatggccagcggagtcgtcggcagcgcgttcgctcaagtggtgcacgccggcaccgtcggggacatcaaggatgggccaccgacgacgctctgcggtggactgcccgtgacggacaacttcgacgaggcaagggacttcgacctgcccctgaagaaccggttctacctgcaggcgctgccaccggcggaggcggcggtccgggccaagga

SEQ ID NO: 3360 - DNA, 352 bp, Triticum aestivum
  Clone ID: uC-tsfl9316076b03b1
tttccatcggctatgattgttgatgaggctatgctagaaaaagtgcttgggcctcctagatttgatgacagagaggctgtggatcgggtgtcattcccaggagtgtcagttgggcttgtctggacttcttttggtggggaagttcagtttgtagaggcttcggtcatggcgggtaagggtgacttgcatatgacaggacatcttggtgatgtaattaaggaatcagcacagttagctttgacatgggtgagagcaagaactgctgacctcaatctgggacctacttctgatattaacatattggagagcccgggatattcacatacattcttcctgctggtgctgagccgaa

SEQ ID NO: 3361 - DNA, 512 bp, Triticum aestivum
  Clone ID: uC-tsfl9316076c05b1
ttggcaagtgggtggagaaattgttaaagcagagcaagctgcgagccatccaggaggtggatggcaccaccgtcgccgtcgccgccgccgccgcgagtgtgcgtgaccggcggcggcgggttcatcgccttgtggctcgtcaagctgctcctgtcccggggctacgccgtccacgccacgctccgtgacccgagtgatccgaagaacgcgcatctgatgcagctggacggcgcggcggagagcctgagcttgttcaaggccgacgtgctcgaccgcgccgcgctggtcgccgccgtcgcgggttgccagggcgtcttacatgtcgcctcccctgtgcccgcggagaagatcgtcgatcctgagtcagaagtcatggtgcctgccgtgaagggcaccttacatattcttgaagtctgttcatctctgaaggttccagaaagtgtggtggtgccatacactggtgccgtcattatgatcccaactgggcttagggagagtacaggcttaatgct

SEQ ID NO: 3362 - DNA, 535 bp, Triticum aestivum
  Clone ID: uC-tsfl9316076c10b1
tccacgcgtccgatccacagaaaggaccagtcagtagtggcatgattagggagctacttatatcctttaagaaatcaaccggtgagaagccccagcggataatattctacagggatggcgttagcgagggccagttttaccaagttctgctgtttgaactcaatgcgatccgaaaagcctgtgcttccctggaggcaaactaccagccacaggtgactttcatcgtggttcagaaacgccaccacacgagactatttgcgcacaatcacaatgataagaactcgatggacaggagtggaaacatactcccaggtaccgttgtggacacgaagatctgtcatccgactgagtttgacttctacttgtgcagccatgctggcatcaagggcaccagccgtcccgctcattatcacgtcttgtgggacgaaaacaacttcacagctgatgggttgcagactctcaccaacaacctctgctacacctacgcgaggtgcactcgctcggtgtcgatggttccacctgcatactatgctca

SEQ ID NO: 3363 - DNA, 376 bp, Triticum aestivum
  Clone ID: uC-tsfl9316076c12b1
tcgtttaaaaaattaaaaaaaaaaaaaaaaaaaaaaaaaaaaaaaaaaaaaaaaaaataaaaaaaaaaaaaaaaaaataaagagaaaaagaacaaacaactgaagggggggggggctttagaggaccaaagtttacttgcggggggaatgcaagaccaaagattttctaaagggccacctaaattcaattaatgggccgctgatccaaaaacgtaggactgggaaaaccatgggaaaaccaactaaatgggttggaaaaaaataacattttctcaaggagacgaaaaataaaaaaggccctgaccgatggtctttaacaacagtagtgcaaacagaatggcgaaaggcaaccccattgtatgggagcataaagccc

SEQ ID NO: 3364 - DNA, 465 bp, Triticum aestivum
  Clone ID: uC-tsfl9316076e12b1
tcgtgtgccatgttcctgcttgccgtgcacccccagtggcaggacaaggtcagggaagaggtcctccgggagttccccggcggggacagcgacgatgtggtacccaacgcggatgttctcgccaaactgaagctgctacacatggcattgctcgagacatcgcgtctctaccctccagttgtgtacatacaacggaaagctgcctccgacaccgtcctcggaggcatcaaagtaccccagggaacaatcatatcaatccccattggcatgctacaccgagacaaggaagtttggggccccgacgccaacgagttcaaccccatgaggttcgagcagggcgtcacaaaggctgtcaaagactccaaggcgctcttgactttctctctaggcccgagagtgtgtactggtcagaactttggcatcgtgcaagtgcaggttgtcatggcaatgatcctcagcaagttc

SEQ ID NO: 3365 - DNA, 461 bp, Triticum aestivum
  Clone ID: uC-tsfl9316076f04b1
tttcaattgctttcttggttcgggttaaggatgatttcagcaagagatatgctggcgggaaagctgctactgctgcaccaagcagcctcaacagagagtttggatcaaaactcaaagagcacatgcagtactgtgtggaccaccctgaagagataaacaagcttgctaaagtgcaagcacaagtttcagaagtgaaaaacgtgatgatggaaaacattgagaaggttcttgatcgtggtgagaagattgagctgcttgttgacaaaacagagaatctccgcttacaggcccaagatttcaggcagcaaggaacacaggcgaggagaaagatgtggctacaaaacatgaagaccaagctgatcgttctgggcatcatcgtcgcgctcatcctcatcataattcctgccggtgtgccacggattcaactgcggcaagaagtgaggacaactcgaggtcgtgag

SEQ ID NO: 3366 - DNA, 482 bp, Triticum aestivum
  Clone ID: uC-tsfl9316076f09b1
tttgcgtccttctacccccaggccattttcaaggacccgttcaggaggggcgacaacctccttgttatgtgtgactgctacacaccacaaggtgtgccaatccccaccaacaagaggcacaatgccgccaagatcttcaacacccccaaggttgcagctgaggagacatggtatggaattgagcaggagtacactctcctccagaaggacgtgaactggcctcttggctggcccattggtggttaccctggtcctcagggaccatactactgcgccgccggcgccgacaaggtgttcgggcgtgacatcgtggacgcccactacaaggcgtgcctctacgccgggatcaacatcagcggcatcaacggggaggtcatgcccggccagtgggagttccaagtcgggccgtccgtcgggaacgccggctcagaccagctgtgggtggcgtgctacatcctcgagaggatcacggtaggttgccg

SEQ ID NO: 3367 - DNA, 202 bp, Triticum aestivum
  Clone ID: uC-tsfl9316076f11b1
ttcaagcgtgccttcgtccactggtacgtgggtgagggcatggaggagggagagttctctgaggcccgtgaggatctcgctgccctggagaaggactatgaagaagttggtgctgagttcgacgagggtgaggatggtgatgagggtgatgagaactactgcttctgtgattgcgatctgcagatctgcccgagtggcttta

SEQ ID NO: 3368 - DNA, 502 bp, Triticum aestivum
  Clone ID: uC-tsfl9316076g07b1
tttcgtcacaagacgatgattagttcttcatggggagccccggcagctttcaggacaggttttgatctccagcatgtccaggatggtctctatggaaggcacctgcatgtgtatgactggcctggtggtgagctcaagcagacgctggatctaggcagcacaggtcttcttccgctggaggtgaggtttttacacgacccatcaaaggacaccggctatgttggctgtgctttgacaagcaacatggtgagattcttcaaaactgcagatggatcatggagccatgaggtagctatatccatagaaccattgaaggtgcgcaactggatgctgccagaaatgccaggattgataactgactctgtcatctctctcgatgaccgctatctctacttggtcaactggcttcatggtgatatcaggcagtacaacatttgggaccctgcaagcctgtgttggttggcaagttgttgtaggtgggctttttaaagggcatgatgtt

SEQ ID NO: 3369 - DNA, 447 bp, Triticum aestivum
  Clone ID: uC-tsfl9316076h08b1
tttaagcgcagacagacagagcttgagagagcgcgcgcgagatggcagcctccatgatcacctcgccgattgtggcgccgacgagcgtcccctccctctcccgccggggttcctccttcgccgtcgtctgcagcggtggcaagaagatcaaggtcgacaagccccttggacttggaggcggcttgacagtcgacatcgacgccaacggcaggaaggtgggcaagaagggcgtgtaccagttcgttgacaagtacggcgccaacgtcgacggctacagcccaatctacacgccagaggaatggtctgaatctggtgaccgctacgccggcggaacgaccgggcttcttatctgggccgtcaccctcgccggcctcctcggcggcggcgtcctcctcgtgtacaacaccagcgctctcgccggctaagagagcatctacgtgttacaca

SEQ ID NO: 3370 - DNA, 522 bp, Triticum aestivum
  Clone ID: uC-tsfl9316076h09b1
tttcacgtgctggtattcaagaagttcattttctgccattcaatcctactgacaagagaacggcgctgacatacattgacgctgatggcaaaatgcaccgtgttagtaagggtgcacccgagcagattcttcacctcgctcacaacacattggaaatagagcggagggtccatgctgtgattgacaaatttgcagagcgtggacttcgatcgctggctgtagcgtatcaggaagtaccagatgggaggaaagaaagccctggtggcccatggcactttgctggtctgatgccactttttgatcctcctagacatgacagtgctgaaacaatccggagggcacttaaccttggtgttaatgtcaagatgatcacaggtgatcagctcgccattggaaaggaaacagggcgtcgcctgggaatgggtacaaaacatgtatccttcatttgctctgttggggcagaaaaattcagacgagtccatttctgcttaccagctgatgattcattggaaagctgatggt

SEQ ID NO: 3371 - DNA, 373 bp, Triticum aestivum
  Clone ID: uC-tsfl9316077a09b1
ttgagcggtgccgccgagccgggaagagccaccaccccatcttcctcgcctccgcttccgaagggtcagagatggcggaccgtgctaaccacccgtctgtcatgcataagtttggtggacagttccaccttgcctccagcttctctgagggtgttcgtgctcgcaacatctgcccttctgtgccatcctatgagaggcgcttcaccacaagctgctacatgactcagaaccttggcatcagtgtccccatgatgtcatcttcttcattgtttgccaatgcaccacctgggaagaaaggtgtcaagaactttgcaattgacttgctatggggggagtggccgctgcagtttccaagactgctgcagctcctatt

SEQ ID NO: 3372 - DNA, 504 bp, Triticum aestivum
  Clone ID: uC-tsfl9316077a12b1
gaaagagcaggagcaggagcagcaaggccaagggctcaccggcagacacccgctcgccaacggcaggtctggaatgttgccaatgtcgagccctccagcaaatccgggacagctcaccattttttatggtgggtcagtatgtgtgtatgactcagtgccaccagagaaggctcaagcaatcatgctcattgcagcagcagctgctgcggcctcaaaaagcaatggcaccgctgctgttaagcctccagcgatgtctgcgaccaatgcgatccaagccatgcttacgcggtcgctctcactccagagcacttctgtagcacatggacaacctcaggctgttgcggatccgggctcgatttgcaagcttcaggctgatcttcccatcgccaggagacactccctttagcgcttcctggagaagcgccgtgacagggtggtgagcaaagcttcttacggcgccgggtagccatccgaaggcatgtgagcattttttgggatggaagc

SEQ ID NO: 3373 - DNA, 197 bp, Triticum aestivum
  Clone ID: uC-tsfl9316077b09b1
ttttaaaaattttaaaaaaaaaaaaaaaaagagggtgatcagatataaaagaacgatgattctgttgggtgcatgcgagggctttgttttcgtatagagggttctatcttggatcttctgggcgatggttttttatgtgggggactgcataaccaatgatgtgccgaaagtttatctccttgcggttggtgaacatc

SEQ ID NO: 3374 - DNA, 340 bp, Triticum aestivum
  Clone ID: uC-tsfl9316077c04b1
tagaggaagaggctggcagtttggttggagagaagaaagaagctgacactgttgctccggaagagaagaaagaggctgacactgttgctccggaggagaagaaagaggccgacactgttgctcaagaagagaagaaagaggctgacactgttgctcaagaagagaagaaagatgcccctgtcgttgatgccccagagaagactgaagaagtggaaggcgaggcagctgaatctgaggtagctccccgggaggctgagatgcctgaccctgtaacggagaacaagggaaacgagaagccagctgaatttgaagaagtcccggtggagtttgagatgtctga

SEQ ID NO: 3375 - DNA, 505 bp, Triticum aestivum
  Clone ID: uC-tsfl9316077e05b1
tggaaagcccatgagttcattaaaagttcacaggttcttgagaaccatcctaacagtgaagcttattaccgccataggtcaaaaggttcatggacactttcaacagcggataacgggtggtctgtatcagattgtactgcagaagcacttaaggcattgttgttgttgtcgaagatctctcctaatcttgtggggggtcccatgaaaggagaaaggttgcatgatgcagtcgattgcttactttcttttatgaataaagatggcacattttctacatatgagtgtaagagaactacatctctattagaggttctcaacccttctgaaagttttctgaacattattgtcgattatccatctgtcgaatgtacatcatccgtgctttaggccttaattatgttcaaagagctttacccagggtaccgcaaagaagagataggaaaatgtattaaaaatgcttccaagttcattgaggacaagcaaagaaaggatggctcatggtttg

SEQ ID NO: 3376 - DNA, 460 bp, Triticum aestivum
  Clone ID: uC-tsfl9316077e06b1
ttcggcgctgccggcaaggcggtggcgtcgcgcgcgtccttcgccgtgcgcgccgcggcgcccgagaggcccatctggttccccgggagcaccccatccttcgtggcttgacggcagtcgtttccggagacttcgagtttgacccctggggtgtaggatccgacccggagagcttgcggtggaacgtgcaggcggagctggtgcactgacggtgggcgatgctgggcgcggcgggcattttcatcccggagcttctgaccaagatcggcatccttaacacgccgttgcggtacaccgtcggtgagcatgagtacttaaccgacaccaccacccctttaataggggagcttattcccatcggctgtgccgagggccgccggtgggcaaacattaacaagcccggctgcgtaacaaggaccccatttttccaacacaagcttaccgcaccgacgttggtccc

SEQ ID NO: 3377 - DNA, 493 bp, Triticum aestivum
  Clone ID: uC-tsfl9316077e09b1
tttgtcccctgcgctcgcggcggcggcggcggctttccacgcattttcagtttccttttgctgcggaagttcatacccactagatggggaaggcaaagcgtgcatcgatatttatcaggctcgtttcagcagctggaactggttttttctacgtgaagcgtaagaatcctcggcggattacagagaagcttgagttcaggaagtacgatcctcgtgtaaacaagcatgttctatttacggaagccaagatgaagtgagacagtgcagcctttttttttttttcttgacataagacctgtactgttcattttcgctgaagacactgctacctttattagcctgttccagattcgagagtttcatgtgggcaccaaatcagcatggatcttgctctgcctgcgctgttatttgtattgtaagtttatcactgaaaagagctgcaagcctggaaaagtatgcccatctagtgttgtgacaaaatagagcggttttt

SEQ ID NO: 3378 - DNA, 457 bp, Triticum aestivum
  unsure (1)..(457): unsure at all n locations
  Clone ID: uC-tsfl9316077e11b1
tgacagacgcaggcgcagcgcagggatggacgccttctactcgacctcgtcggcggcggccagcggatggggctacgactccctcaagaacttccgcgagatctcccccgccgtgcagtcccacctcaagctcgtttacctgaccctatgctttgccctggcctcatctgccgtgggtgcttacctgcacattgccctgaacattggcgggatgctgacaatgctcgcgtgtatcggaaccatcgcctggatgttctcggtgccagtctatgaggagaggaagaggttttgggctgctgatgggtgcagccctcctggaaggggcttcagctggacctctgattgagcttgccatagactntgacccaagcatcctcgtgacagggtttgtcggaaccgccatcgccttcgggtgcttctctggcgccgccatcatcgtcaagcgcagggagtacct

SEQ ID NO: 3379 - DNA, 455 bp, Triticum aestivum
  Clone ID: uC-tsfl9316077f07b1
tttgtggaacttgatgctgataaaatatatctctgtgactctggggcacagtacctggatggcactacagacattacaagaactgtacattttggtaaaccctcagagcatcagaaatcgtgctacacagctgtcttgaaaggccacattgccctagatgctgctgtgtttcctaatgggaccacaggtcatgctcttgacatactggcaagaaccccactgtggaaaagtggtcttgactatcggcatggcacaggccatggaatcggatcttatttgaatgtccatgaaggccctcatctaattagcttcagaccttctgctcgcaatgtaccactgcaagcatcaatgactgtaacagatgagcctggttactacgaagatggaaactttggtataaggttggagaatgttcttatagtcaaagaggctgatactaaatttaattttgggga

SEQ ID NO: 3380 - DNA, 400 bp, Triticum aestivum
  Clone ID: uC-tsfl9316077f08b1
tttttaaaaatctctctccgctccccgctccgagtcgcgttgcgtgaggagaaaggaagggaagccagaaagggttctcgccgaggcggaaggaggagatggccgctaagggaggcatgggcctgctcgcggtcaagacgacggccgccaagaccgccgagaaggacaaggggaagaaggcccccatctcccgctcgtcccgcgcggggcttgagttccctgtgggccgtatccatcgtcagctgaagcaaaggactcaggccaatggccgggttggtgctactgcggcggtctactctgctgctttcctggagtacctgacagctgaggttctggagcttgctgggaacgccagcaaggatctcaaggtcaagcgtatcaccccttgttacctccaact

SEQ ID NO: 3381 - DNA, 88 bp, Triticum aestivum
  Clone ID: uC-tsfl9316077g01b1
aggcctgagccctgctgggatgcggacgcatcagcgcgaagtgccttatacgcctttcgcccgcttccttttttaacttttatgacca

SEQ ID NO: 3382 - DNA, 435 bp, Triticum aestivum
  Clone ID: uC-tsfl9316077h02b1
tcttccgttcctctcattatgggaggtctcgttcccgttcacgctccgcctctccccgccctcgtggcggtggccgtgctcggtcaaggtcatactcttctgctccaagacggcgagatgactactctgcttccccacggggaagggagtctcatcgcacgaaatctcctgtgcgtcatccaaaagaacatgaggaggacaaaaggagatcctactctccccctggtagagatggtgaccaacgtgatgctgataacgggaggtcgccaccggccgacagtgatggatccccttcacgcccgagggtggccaggccatcctcaggatcgccccctggatcccgctccaggtcccccgacgcttctcctgcccgcagcgactgagaaattggttacattctctgcgggcgccgcatcttcatttagctacttccat

SEQ ID NO: 3383 - DNA, 579 bp, Triticum aestivum
  unsure (1)..(579): unsure at all n locations
  Clone ID: uC-tsfl9316077h09b1
ttccacgcgtccgtgaagttcaccaaagtccctcctaaaccaacttgccatctcaagctcaaaacaccattaaccaactaatagtgtctttggcgcaaagttaatacgccatgaggacaaccagcatcctcattgtcgttgttgccatggtcatgtatgctaccagcgcatcggccacgcgttgtggagatttgatgggacatcaattgtggcacacgacagtagaggatggatgggagccaatcgtgaacataaatgatgaccacatccaggagctcggtgactgggcagtgttggagttcaacaagcatgtgaactgcacagtcaagttcaacaaggtgttgagcggccgacaaaaacatgtgtctggcatgaactacgagctcattatcgacgtgacacactntggtggngaagacggtaactacaaggcggagctgtacgagcaggagttgacgaaaaaacgccagctcctttcctttaccaaagtgaaataggcggcaccagtgatttaattgcattatttggttcctggaatggtgttagttcgttgttaatccaataataattttcccttgg

SEQ ID NO: 3384 - DNA, 406 bp, Triticum aestivum
  Clone ID: uC-tsfl9316077h10b1
tctttcacgcctgcggccacgcgtccggtgattacgatgcctcatttcacatacggtcggcgtatgctatgttatggatagctcctgtcgcaacaacatgacgagagatcggagcttctgttcccccaaaaatgtgagatggagaaccttactagcgagcggccggtcgggcggctacgttatgtgcctgagcagctgacacctgcaaagagctctctttttagaccagacgacctgtggcgatgctagccgaggccggaaacaacgactacatacttgcatcgctacgagctgagccttgacgttcttgacatcatggaggacagcataaggcccaagatgtgcccgcgcagatgccttgcttgcatgcgcatatcgccaggacctgccctttcaacatgatgat

SEQ ID NO: 3385 - DNA, 224 bp, Triticum aestivum
  Clone ID: uC-tsfl9316078c03b1
attgtttggccaccttcgacactccgcctgtgtcgacgacgatataggtagcgcgatccgtgctcatcgctagggcgcgggctcccgtttcaagtcacacacccaccaccataagggccccggccgtttgatgtcgttcgacttcggccatcgcaacagatacactaagggcgctcctaccgttgttatgcaaacacctgagcctggttcgccgcttgacaagg

SEQ ID NO: 3386 - DNA, 467 bp, Triticum aestivum
  Clone ID: uC-tsfl9316078f03b1
gcctttttatttagcatgccagtaatattatagctctggggataatattcttgcacactttagatgccatttgatagattgggaggacaggtaaatttacatatgacagcagagttctcttcaccaagtatatgtcaatacatgtctcaatggcatggctttgggatcgagatctaccttgctaacgttacagatcaattgtcaatagcttgttgaaaatctccccttgtttgtaatgtaaggatcttatgtaatcttaaggtttgcagctaatagagaaacccaatccaagtaaaagttttcaacccaatccaagtaaaagttttcagtattgcttaattgtgtgagtgattaacactttttggttgtgctgaatttcactcctacatagttttattgacaatttttatattcctttcattcaaatgaggcacaagatagatcacatctatcgcaacgtattggag

SEQ ID NO: 3387 - DNA, 394 bp, Triticum aestivum
  Clone ID: uC-tsfl9316078h02b1
tctttatggcgtcggagaaagacgcggcgctcgccgtcgtgcccaacgacaaccccaccatatttgacaagatcatcaaaaaggagataccttctacagtggtgtatgaggatgagaaggtcctcgctttcagagacataaatcctcaagctccgacccacattgtaatcattcccaaagtcaaggatggattaaccggcctttcaaaggcagaagagaggcatgtagagatacttggctgtctcctctacgctgcaaaagttatcgcaaagcaggaaggacttgaagatggctaccgtattgtcatcaatgatggccctagtggatgtcaatctgtttaccacattcatgttcatcttcttggagggaggcagatgaactggcccccaggcta

SEQ ID NO: 3388 - DNA, 449 bp, Triticum aestivum
  Clone ID: uC-tsfl9316079a10b1
tttagcgacaacaaggaggacatgatcaacgacgggatgcacgagttattagcgcacttgcacgggcccaaagacagaatgtaccagggcggtcagtggaaggtgaggggtgacctcacagaacactgactccttacgaagagcagttccattggcttcaacaaacagatcgatcacctaaatgtggttgagaaagaccggaacggctgtttggatgtgaccaacccgacctggaacccaatgttccgccttgtgaatatttttgaggagttccgggaccagattgttctttactggaaccgctcggactcttacgaacggggaggctgggtaaactcatgatgcgcgacacgaatgcctattgaaaaacagtcaaagaatattgggagagataagcccagcctggacacatattcctcggactaagaagaagatgaggaggatgaaag

SEQ ID NO: 3389 - DNA, 439 bp, Triticum aestivum
  Clone ID: uC-tsfl9316079b10b1
tcgctttccctcaaaaaagaagaaagattatacatattccctcacttttgtaagccatagcgatggagtactcgctgaagctggcagtagtactgctcttagctctcgcgtgcgccatggcggccacggcccagaactcgccgcaggacttcgtggacccccacaacgcggcgcgcgccgacgtcggtgtccggccggtgacctgggacgacaacgtggccgcgtacgcgcagaactacgctgagcagcgccgcggcgactgccagctgatacatactcccgatggccggccgtacggggagaacctcttcggaggcggtgggacccagaggacggcggcggacgccgtagagctcgtgggtgtcggagaagcagtactacgaccacggcagaaatagctgctccgccccggagggcgactcgagcgggcactacacac

SEQ ID NO: 3390 - DNA, 420 bp, Triticum aestivum
  Clone ID: uC-tsfl9316079g08b1
tgtgggatgctggcgcgcagggcggagccgttaccgaatttgcgggttgacctacacattttttgatcaccggtgatctggtgcgataggtcaccatgatgcagccaacaacgctggggcttctgggtcagcaggaaaagaaccagtcacgcgcaagcgggtgtcaacatggcatggcgcagcgcgagcacaatctggaggagaccacatgagctgaggacgactgagatgacgctttgcgctcaacagggtgaagcatttgcagcgagatggacacccgaaagctatgaaagaacagctggttgtccgggtcggactgcacgaagacgagttcgatgacatgatgttctaatactgggcagtggccggtggaccacaagcggttgactggcaaagccctggccggacgaagttaagctc

SEQ ID NO: 3391 - DNA, 422 bp, Triticum aestivum
  Clone ID: uC-tsfl9316079h07b1
tttgtcgcctcccgttcggaaccccaagcttcccccgccgtcggcgaaatggccccgaagcgaggcggcaaggcgccggtgccggctaagaagaaggcggtggacaaggttgcgaacccgctgtttgagaagaggccgaagcagttcggcattggcggggcgctgccgcccaagaaggacctccaccggttcgtcaagtggcccaaggtcgtgcgcatccagcgccagcgccgtatcctcaagcagtgcctcaaggtttcctcggcgcttcaccagtttacccgcaccctcgacaagaacctcgccaccaacctgtttaagatgtcttataagtaccgccccgtggacaaggtggctaagaaggagaggcttttgatgagggcccaggctgtagctgaggggaaaacccgttgaggcccata

SEQ ID NO: 3392 - DNA, 472 bp, Triticum aestivum
  Clone ID: uC-tsfl9316079h11b1
ttttggacgcgtgggctggttctgaggtagagattgctgtgaaggctgccgaagagttgacgaatgaggggaagaccggtcgtgttgtgtcatttgtttgctgggaactcttcgacgagcagtcatatgagtacaaggagagcgtgctccctgaggccgtcaccgcaaggatcatcattgaggctggctctacccttggatggcaaaagtatgtcggatccaagggcaagaccatcggcattgacaagttcggagccagcgctcccgccccgaagatctacaaggagtacggcatcaccgcggagaacgtcatcgccgcagccaagagcctgttagatcagcacactcgttgaggttctgtcatcgttgatgccaaagaacaaacgacaccacacttgaaggtctcgtgcccagaagcttggaataacggagggagaggaggatttgcctgagcgcgagtggtttttttagg

SEQ ID NO: 3393 - DNA, 363 bp, Triticum aestivum
  Clone ID: uC-tsfl9316080a04b1
ctgtctcgtgggggctcagctgtggaagcttccgattatttttgttgtggagaacaacctatgggcaatcgggatgtcgcacctgaggtctacttcagatcccgagatctggaagaagggcccggcattctgaatgcctggggtacacgtcgatgggatggacgtcctgaaggccatggaggtggctaaagaggcaactgacagggcaaggagaggtgaaggaccaactctagtggagtgtgaaacttaccggttcagaggacactctcttgctgatccagatgaactcaggaggcctgatgagaaatctcactacgctgcaagggaccccatcacatccttgaagaagtacattatcgagca

SEQ ID NO: 3394 - DNA, 345 bp, Triticum aestivum
  Clone ID: uC-tsfl9316080b03b1
cctgctgggatgctgccgccccgcggggcggcggcatcgactctgccggccgccccccgaactggtttttcaccaccgacccggcgcgtggggagaccacgatgtatcaagcaccaccgctgctgctggtggcccaccctgaggagttggtgcgccaacaaggggtgtcatgagtggccctgcgccgccagttgcttctgtgtggaggacatcacgacagatgaactgctggtcgccctcctcccgttggtgggacaacaactccaccgtgatggcctgccggcggcgacaaaagaacaactgccgctccgggcggcacagctgaaagaggtggttgacgccacg

SEQ ID NO: 3395 - DNA, 487 bp, Triticum aestivum
  Clone ID: uC-tsfl9316080b06b1
gtcatggagcacaaggagaccggctgccagtctcgtgagggccccatcctttgcgtcaataactgcggcttcttcggcagtgcggcgaccatgaacatgtgctccaagtgccacaaggagatggcgatgaagcaggagcaggccaagctggccgcctcctcttttgacagcatcgtcaacggtggtgatgccgcgaaagaacatcttgctgctggcaacacggcggtggcagttgctcacgtagaggcgaagacgcttattaccgcacagcctgctgatatcgccggtcccagcgaggcggcgatggaaaaccccaaaggcccaagccggtgcagcacctgcagaaagagggtcgggctgaccggattcaactgccggtgcgggaacctctactgcgcgacgcaccgttactcggacaagcatgagtgcaagtttgactaccgcgccgcggccatggacgccatcgtcaatgccaaccccgtggtga

SEQ ID NO: 3396 - DNA, 74 bp, Triticum aestivum
  Clone ID: uC-tsfl9316080b07b1
aaaaccaagctcaaaataaaaaaaaaaatatacctaaaaaaaaaacgaatttttaaaaacaagaaaacacaaga

SEQ ID NO: 3397 - DNA, 164 bp, Triticum aestivum
  Clone ID: uC-tsfl9316080c04b1
tttttcgaggaggagtccaggaaaaacgatgaactgaccgaccgtactcgctcggtggatgaacaactgtaccgagatggcagtctgacggagacgaaagaacaactggcgcttcccgtggcagagctaaacgaggtggttgatgacacgcggcctatgcttgg

SEQ ID NO: 3398 - DNA, 509 bp, Triticum aestivum
  Clone ID: uC-tsfl9316080f08b1
ttctttttacgcgtgggcggacgcgtgggcggacgcgtgggagaattcttaattcaagagttatagggagggacttatgtcaccacaaacagaaactaaagcaggtgttggatttaaagctggtgttaaagattataaattgacttactacaccccagagtatgaaactaaggatactgatatcttggcagcattccgagtaagtcctcagcctggggttccgcccgaagaagcaggggctgcagtagctgccgaatcttctactggtacatggacaactgtttggactgatggacttaccagtcttgatcgttacaaaggacgatgctatcacatcgagcctgttgctggggaagacagccaatggatctgttatgtagcttatccattagacctatttgaagagggttccgtttctaacatgtttacttccattgtatgtaacgtatttggtttcaaagccctacgtgctctacgtttggggatctacgaattccccctacttattc

SEQ ID NO: 3399 - DNA, 326 bp, Triticum aestivum
  Clone ID: uC-tsfl9316080f09b1
acaaacaccgcgaaggcaacaacgccccagaccgacacccgaaaaaccaggtgaccaccgacgagccgacgcgagagaacaccaggagccacacagcaccgccgacgccagcagcaaacccagaagagaacgcgcccgcacaacccggaaaaaaaaaaggccccccggagccaccagcacccgaggaggagcccacgacaaaagaagaaccgaccgcccgcccccgaccaccgggcgaacaacagaaccgcgaaggcagcccgacggggacgaaagaagaacaggcgcgccccgaggcagaactaaaagaggaacgagaagacaca

SEQ ID NO: 3400 - DNA, 409 bp, Triticum aestivum
  Clone ID: uC-tsfl9316080g01b1
tcgtttaggcaggaggaggaggagagcgaggacgaaaatggtgtcgctgaagctgtagaagcgcctggcctcgagcgtgctcaagtgtggcaaggacagggtctagctcgacccctatgaggtcaacgagatctccatggacatctccatggagaacatccggaagctgataaaggatggtttcatgatcaggaagcctcacaagatccactacaggactcacgcaaggagggcacatgaggccaagcataagggccgtcactctggatatggctagcgatatggtaccagggaggctacgatccacaccaagatcctgagcatgctgatgatgctcgtcctgatgctccttctgcggaagttccgtgaggcgcacaagatcgacaagcacatgtaccatgacatgtac

SEQ ID NO: 3401 - DNA, 471 bp, Triticum aestivum
  Clone ID: uC-tsfl9316080g06b1
attaattaaaaaaaatttttttaaaaaaaaaaaaaggaaaaagaaaaagggggggaatataaaagaaaaaataatggacaaaaaataataaattaaatataaaaaaagaaaaagaaaaagaataaaaaaagaagaaaagaaagaagaaaaagaaaaagaaataaagaaaaaaaataagaagaaaaaaaaagaaaaaaaaaaaggtagaagaacaaataaaagagaaaaatgaaaagaaaaacacataaaaaaaaaaaaaaaaaaaaatggagaagaacaaaaaaaaaaaaaagagtaagagaaaaaaaaaaaaaaaaaaaaaaaagaaacaaaaataacaaaaaaaaaaagaaagaaaggtaaaaaaaaaaaagagacaagaaaaaaacgacacgacaagaaaaaaatagaacgaacaaaaacaaaaagaagcaaaaagcatcaaggagaaaaaaaaaaaaaaagaaaaca

SEQ ID NO: 3402 - DNA, 402 bp, Triticum aestivum
  Clone ID: uC-tsfl9316081a09b1
ccggggggagtctggtcgtaagggttaaacttaaaaaaatctgccgaaacccctggggagggacactacagaggacgcctgccaacattttctgcattatgaaggctatacagcacttaaacgtgtttgacaagcctctcgaccaaggaagacctgatggcccttccgagtgtttttgcatgactgttctagccattgtttcaatactaccagacacaatttaacaacatctgcttcctgtgacgacgttaaggaccctggtttgctgtggtccaagatttcttgtactgctttgtttacaagtgattgggtataaacacgctactctactgctggtgattttattattcatccacatcacctttggtaagtcctgtttgaaaggtgggcttgcttcgtttg

SEQ ID NO: 3403 - DNA, 444 bp, Triticum aestivum
  unsure (1)..(444): unsure at all n locations
  Clone ID: uC-tsfl9316081c09b1
acagcgcgaagagcaaaacgccncagcccgaaacacgaaaaactgggttaccaccggcaaaccggcacgagagaaaacgacagaacaaacagaccgaagaagccgatgacagacccagaagagaacgagacaaacaacaggcgaaaccaaggcccaacggagccaaagcacacagggaggagccaagacaaagagaactgatgcccccacgcacgagaggaaaaagaaccggagacaaacgaaagacaaaaaaacagcacaacgcgggacaaaacagaaagagaaacaaagaaaacacgaggacaaaacaaaggaacaggacagaagaaaaacaaacgccaatgaacagggaaaaaccccaggcaacaacccaaaaaaaaaacaccaaagcaagcaacaacacccccacaacgcacaacagggacgcaaaaaacaaaaaaggac

SEQ ID NO: 3404 - DNA, 653 bp, Triticum aestivum
  Clone ID: uC-tsfl9316081c11b1
ttttatttttttttttattttttttttacaatttttttttaccaaaaatcacaattaggtaattttttttttattattttttttttattttttttatatttttttttatttattttttttttttttttttttttttttattttttttttttttttttttttttttttttatttttttttttttttttttcatatttttttttttattttttatttttttttttactttttttatcttatttattctttatcttattatatttaaattattatttatttacatttttaatttattttttattatttatatttttttattatttataattttttactttctttatttatttcatctaaattttttattattataattcttatatatatttattttttattattttttctattatttatgatatattattatcatttattcttatattttttatttatcttttttttattatattttttatatatctttatttcttattatttttattttttaaatttaattttttttctttttatttatctttattttttatttttttatttattttttttttttttttattttttaatttatttttttttttttttttttattattttttatttttatattattattttttttttttcttatta

SEQ ID NO: 3405 - DNA, 409 bp, Triticum aestivum
  Clone ID: uC-tsfl9316082d03b1
aaaaaaaagaaaatgaaaaaaaaaaaaaaaaaaaaaaaaaaagaagaaagggaaaaaaaaaagaaagaaaaaaaaaaaaaaaaaaaggaaaaaaaaaaaaaaacataaacaaaaataaaaaaaaaaaaaaagaaaaaagataaagaaaaaaaaaaaaaaaaagaaaaagaaaaaaaaaaaaaaaaaaaaaaaaaaaaacaaaaaaaacaaaaacaaaaaaaaacaaaaaaagaagaaaaaaaaaaaagagaaaaacaaaaacaaaaaaaataaaaataaaggagaagaaaaaaaagaagaaataaaaaaaaaaacaatataaaagaaaagatagataaaaaagaagaaaaaagggacaaaacaaataaaaaaaaaaagtgaaaaataagagaaaaagaacatatacaag

SEQ ID NO: 3406 - DNA, 383 bp, Triticum aestivum
  Clone ID: uC-tsfl9316083a03b1
cttcaatccagcaccaccgccgccagctccacacctcgagagggacacctcgtcgccggagaagcagcaagaagaagatggccggaaggaagggcggcgacaggaagaaggcggtgacccgctccgtcaaggccgggctgcagttccccgtcggccgcatcgggcgctacctcaagaagggccgctacgcccagcgcgtcggctccggcgcccccgtctacctcgccgacgtcctcgagtacctcgccgccgaggtcctggagcttgccggcaacgcggccaaggacaacaagaagacgcgcatcatcccgcgccacctgctgctggccgtccgcaacgaccaggagctcggtaggctgctcgccggcgtcaccatcgcccac

SEQ ID NO: 3407 - DNA, 68 bp, Triticum aestivum
  Clone ID: uC-tsfl9316083a05b1
cagctatggaggcggacgcacaccccggaggcatcaacgcctgtgtccgcggcgcgataaacgggctg

SEQ ID NO: 3408 - DNA, 465 bp, Triticum aestivum
  Clone ID: uC-tsfl9316083c02b1
acggtgtttgtgcacccggcattctatgagggtgttgaccatacctcaataaaggccattgcatgtggtcgttcaacatgatgaactgcagatcgtgcaacaggtgagatcatggtgcacggggggcacggctactatatggaggacttacacagaatgacgaggaactgagtgtgcttgtggacttgtttggtaagcaacagaaacacgatgtccactggaacaagacctaagaaggagtgcttcttcgcatggaggagaagtacaccgggctgctgtactctaagaggctgattaccacttgtcgtgtctatagaacctggaagcatggatacaacctggacaggcgcaagaaatgtcgctaccttgaaatgctctatgccctgaagtacctgaaaatggataggactgtcccattggctgttgagagcgagaccccagccaaatgagttatgcttaccagag

SEQ ID NO: 3409 - DNA, 411 bp, Triticum aestivum
  Clone ID: uC-tsfl9316083d02b1
acgctacggtgatgccagcgagcaccatcttcgtggtcgcgacacaaattacgtcagtttggcaaagcatctggacgtctgcgaatacaatgttctacttcatatggtggataattggattttactgcatatctgctgggggtgaagaggatatgcgagatacacctcaactgtactgccttggtatagtcttactggcgttagatgtgttctttggtgttttctgctgtcactatggcttgcattattgctattgacgtttgttgctgcctcccttgcattatagcaattatgtctgctgtctctgatcacgaaggagcatctgaagatgacattcgacaaattcccaaatacaaattccgtcagatggatggacctgaaaaggattccgatgatgccactgagtcttct

SEQ ID NO: 3410 - DNA, 326 bp, Triticum aestivum
  Clone ID: uC-tsfl9316083d05b1
atgcaggcgcacacgcagagcgcaggcatgaatgcctctgtccgccgacagaaaggctggctttccaccggccgtcgcgcgagtgagccatgcatgagtcagccacgaccgtgctggctgctggctgaccctagtgagagtgcgtacgaccaactggagcaatgatgggcctgggcagacattgtttgtgtgtggaggaatccatgacgaaagaataactgattggccgccttcgctgggtgagagaacaaccgcaccgggatgtctgactgacagggacgaaagacgaactgctcctgcgagtggcctgatgagagaggtgattg

SEQ ID NO: 3411 - DNA, 55 bp, Triticum aestivum
  Clone ID: uC-tsfl9316083e09b1
atattattaattatttaataaatcattatcttataataaatttataataattaat

SEQ ID NO: 3412 - DNA, 83 bp, Triticum aestivum
  Clone ID: uC-tsfl9316083g06b1
aaatacagaaaatataaaaataaaataatagtataataataaaaaaaataaaaataaaaattataaatataaataatataaaa

SEQ ID NO: 3413 - DNA, 489 bp, Triticum aestivum
  Clone ID: uC-tsfl9316083h02b1
gtacaagggcaacaagggtactacccaacttctctccagcagccaggacaagggcaacaagggcactacccagcttctctgcagcagccaggacaaggacagccaggacaaaggcaacaaccaggacaagggcaacatccagaacaagggaaacaaccaggacaagggcaacaagggtactatccaacttctccacagcagccaggacaagggcaacaactaggacaagggcaacaagggtactacccaacttctccgcagcagccaggacaagggcaacaaccaggacaagggcaacaagggcactgcccaacgtccccgcagcagtcaggacaagcgcaacaaccaggacaaggccaacaaataggacaagtgcaacaaccaggacaagggcaacaagggtactacccaacttctgtgcagcagcctggacaagggcaacaatcaagacaagggcaacagtcaggacaaggacaccaaccaagacaa

SEQ ID NO: 3414 - DNA, 488 bp, Triticum aestivum
  Clone ID: uC-tsfl9316084c07b1
gtttccgcattcttcaccgtagcctccccagtcgccgccgcgcgtccctgcaacaaccttttcatctcctcccactcagccaacgctaaccccagcaacgaccccgaccaccgttcccccctcaccacgacggtcgtcaccgtcttccgcatccgccgcttcggcccccatttcctccgcacccaagggcacgcgcatccccacctcaaccaccatcaccaccacctacactccatccccgccaacatccagatccgccgccccgagctcccagagcttccccactctgcgaccggcgttgccgtgagcatccaggagcgcgtcaaggacatcctggtggtcctcgtcgggatcctcttcggtatcggctgcggcgcgctcaccgctgcctccatgtacctcatttggtccgtaatcgccggccccggcgcgtccttccactacgacgagctctacggcgacgaggcgttcgactccgagagccccaa

SEQ ID NO: 3415 - DNA, 535 bp, Triticum aestivum
  Clone ID: uC-tsfl9316084d08b1
ctccaccttctcagccacacagagaaagagcgtccaagctccagctagctagccaccaatggccgccgcactgagcctccgcgcgcccttctccgtgcgcgccgtggcgccaccggcgccccgcgtggccctggcgcccgcggccctcagcctcgccgccgccaagcaggtgcggggagccaggctccgcgcgcaggcgacgtacaaggtgaagctggtgacgcccgagggcgaggtggagctggaggtccccgacgacgtctacatcctcgaccaggccgaggaggaggggatcgacctgccctactcctgccgcgccggctcctgctcctcctgcgccggcaagttggtgtccggcgagatcgaccagtccgaccagagcttcctcgacgacgaccagatggaggccgggtgggtgctcacctgccacgcctaccccaagtccgacatcgtcatcgagacccacaaggaggaggagctcaccgcataagctgctatacctatctctctttgcacgagatcgagctgatatcat

SEQ ID NO: 3416 - DNA, 217 bp, Triticum aestivum
  Clone ID: uC-tsfl9316085g02b1
ttttccgcttacgcgtgggcggacgcgtgggccaacccattcttctgggagttgtaacagctgtcaaccgtgtaactgtcaactttggtgtgcacattgttgttttgtaacatgtcttacatatattctctctatacatacaaggaaagcgtttccctcctgtaaaaaagaaatagtgagttgaactgtgacgcaaacaagatgatagactgacaag

SEQ ID NO: 3417 - DNA, 71 bp, Triticum aestivum
  Clone ID: uC-tsfl9316086b01b1
aaaaaaagaaaaaagaaaattaataaaaaaaaaataaaaaaagaagggaaataaaaaaatgaaaaaaaata

SEQ ID NO: 3418 - DNA, 720 bp, Triticum aestivum
  unsure (1)..(720): unsure at all n locations
  Clone ID: uC-tsfl9316086b10b1
aaaggggggggggggaggggggcggggggggagaaggggggggggggaggggggaggggaaagggggagggagggagagggaggggatggagggggagaggagagggggggggggagaggaggcggggggggggaggggggcgggagagggggaggagggggggggggggagagagggggggaggggggagcgcagaagggaggagggggggagggagggagaggggggggggggggggggggaaaggggggagaggggggaagggggaagggaagagggggagggaacagaggagggggaggggggggggggaggggggacgggggngggggggggcagggggaggcgaggggggggaggggggggggggaggggaggggaggggggagggaggggggggagggggggggggggagaggatgggggggggaggagggggaggggggggcggggggaggaggggggggtgggggggggaggggagggcggggggaaggggggggagaggggggagatggggcgtgggggagggagggggagggggggggggggggacatgggggggggggagcgggggtgggggaagggggggggggagaggggcggagggggggggggggaagagggggtgggggagggggggaagaaggggcgaggggggggggagggggggagggggaggggggggaggagggggggggagggaggggggggggggg

SEQ ID NO: 3419 - DNA, 443 bp, Triticum aestivum
  Clone ID: uC-tsfl9316086c03b1
tcgagtataacctggagaggatcatggtcggcgtgaacaccagtgtggacggcctcaagcccggcggggtggcgccgcagtccgcctggccggcggcgggaaagcgcgtgcaggtcgccccggccaaggaccggtggtcggggcttctcggcctggggggcgcttttggcgtcacggccgtctgcggcgggtcggccagggcaagcgtcttcgacgagtacctcgagaagagcaagctcaactaggagctgaacgacaagaagagggcggtgacgagcggaggcaacttcttgcgcgcctacaccgttcagctcggcagctgctagttaccctacaacttcaccggatgtcaggacctttgcaagcataagaaagttccgctcatcaccgacgacctggagatcgagtgcgaggggaaggagaagctcaagtgcggatccaac

SEQ ID NO: 3420 - DNA, 337 bp, Triticum aestivum
  Clone ID: uC-tsfl9316086c06b1
tcgattttgccaatcccttatggaatgacgtactggagctccctgtcacaaatgctacaaagtcagtgataacttgatcaagacgatctacccgcatggcacaaactaccttggcggtgagagccacgtatcgtggaagagtggcacggtcctccaggactagattctgaagctgtagaatgtggacagtggctctgtggcgctacatctggaatgggctcacgcccctggtgttaccctgctaggtgcgcccgactgaatggaggtgcaacgctgctcgatgactctgcatgtatcggtccctgtttctggaatcagatgtgttagcaatttgtgg

SEQ ID NO: 3421 - DNA, 142 bp, Triticum aestivum
  Clone ID: uC-tsfl9316086e06b1
tttccgcactatgagaccgcccacgcatccacggggccccggccaaggacatcgaccccggcgaagccaaaccaacagaaacaggaccgcccgcctaagccccagcactcaagggaagcaaaccaaggcaacagcagaagcc

SEQ ID NO: 3422 - DNA, 338 bp, Triticum aestivum
  Clone ID: uC-tsfl9316087a02b1
aaaaaagaattgtacggatctgaagaccaatggaagctgacgcacagggcgaaagcattaacgcatttgcccgtcacccgaaaaactggtgtaccaccttttcaaccggcgcgagagttcaccaggattcagacagtaccgacgatgctggtggctgaccctgaagagttcgtggccggacaactggcatatactcatggatccttggcccccatgggccattctgaggagggggttagtgacccaagacgaaacggagagcccgacgtccggtctctgggcgaagaactgaacaccttgaagcgcagccagacggggtacgaaagaagaacgtgggg

SEQ ID NO: 3423 - DNA, 149 bp, Triticum aestivum
  Clone ID: uC-tsfl9316087a03b1
tttccatggttttggcatatccagtagccggttctgcccgatgagagcgctcatataccctccacaccttcagatctgtggcctgttgtagtctctgcctccttcgtaactacaagtccctgcattcctctccttgatcggatgtacac

SEQ ID NO: 3424 - DNA, 62 bp, Triticum aestivum
  Clone ID: uC-tsfl9316087c11b1
aaaaaattgagagagaggaaaaaaggaaaaaagagaaaaaaaaaagataaaatgtaaggagt

SEQ ID NO: 3425 - DNA, 655 bp, Triticum aestivum
  Clone ID: uC-tsfl9316087d09b1
gaacaataagggaaacaaaaaaaaaagaaaagaaaaaagaataaaaaaaaaggttaaaaaaaggaaaaaaaaaaaagaggaaaaaagaaaaagaaaaaaagaaaaaaaaaaaagaaaaaaaaagaaagaggaggaaaaagaaaagaaaaaagaaaaaagaagaaaagaaagaaaaaaaaaaaaaaagaaaaaaaaaaaagaaagaggaaaaaaaaaaaaaagaaagaagaaaagagaaaaaagaaagaaaaaaaagaaagaaaaagaaaagaagagaaaaaaaaaaagaagagggaaaaaaaagaagaaaagaaaagagaaaaaagaaataaaaaaagaagaaaaagtaaaaaagaaaaaaagaagaggaaaaaagaaaagaagagaaaaagaaaagaaaaaaagaaaggagaaaaaaggaaaaaaaaaataaaaaaaagaagaaataaaagaaaaaaagaaagaaggaagaaaaaaaagaaagaaaagaaaaaaaaaaaggaaaagaaaggaaaaaaaaaaaaaaaaaaagagagaagaaaaaagaagaaaaaaagaaagagaaataaaaaagaaaaaaacagaagataaaaaaaaaaaaaagaagaaaaaaagaaaaaggaaaacaaaaagaaaaaaaaagaaaaaaggggaa

SEQ ID NO: 3426 - DNA, 365 bp, Triticum aestivum
  Clone ID: uC-tsfl9316087f06b1
tttggattttcaacggcgaacggctgagggggttctgcaggatcgagcaagtctcctaacagcggccggactgcccatttaaacagaagctcttccgaaaagccatatcatggactgaatggcgcagagccatctatgtggaagcgtacatgaaaagcgatgaacttgataacaaaattctgatcatgggaaaacaagtgaactgaaagaagagctaagtctccgaaaaattgaagaattgatacaatgctggaaactgaccaagccaggagggtgttaacggtactccacaactaggacctggtcagggagatcaatcttcgcgactggtaaaacaccacccttgcccgagctgaccttgtttg

SEQ ID NO: 3427 - DNA, 369 bp, Triticum aestivum
  Clone ID: uC-tsfl9316087g04b1
tttttcgctttttcaagcgacctatgcggcgcgaattctccaggcacaaccgacgaagattctcgctggccgtggagggagccgagcccgaaccatgaacactaggggcttcctggagcctcagaagtgatttttttgatggcattgagcacagagagatacgatcatcagctgattgtttacatgagatagatgaacatcataatgagcgagctatggatggaatgcaagatctagtccttattctcaagaggataacaggtgatatagatgactcgggggctgatcattacccttggctgtacacaatggggaatgacctggaacatcaagggggttcctatttggaacagtggactcattcaagac

SEQ ID NO: 3428 - DNA, 378 bp, Triticum aestivum
  Clone ID: uC-tsfl9316087h06b1
acattcggtcatcaactctgacacggatgaggaggctaacatcaagctctgaaaggccaggactgtgcaggtcggccagaaggggatcccctacctgaacacctatgattgacggaccattcgctacccagaccctctatgaaggccaacagacactataaagcatacgagctggagaccaacaagattgtggactaactaaagaaccacgatggtaacctgaccatgacgactgacgaactcaacactgggcgtgtagatgtgatcaagaacctggagaaccctagggcaacctttgagaccatccacgttgaggcagcccagggacagcaaaaacccacccgtttgggcaatgaattcaccattggcacaggcacc

SEQ ID NO: 3429 - DNA, 546 bp, Triticum aestivum
  Clone ID: uC-tsfl9316104b08b1
cattcatatagcttgtgaggactcagacccttgtcaagaatgccattgtgcaagttgatgctgcccccttcaagcagaggtacctgactcattatggagtcgaaatcggtaggaagaagaaagctgctgcagctgccaagaaggaacctgctgaggggcaagaggctgaggttgctgctgctgccacagaggaagcaaagaagagcaacaatgtccagaggaagcttgagaagcgccagcagggacgtacactggactcgcacattgaggagcagttcagtggtggaaggctgctggcctgcatttcgtctcgccctggacagtgtggcagagctgatgggtacatcctggagggcaaggagctggagttttacatgaggaagctccagaagaagaagggcaagggtgccacagcttacgctgaagagctgctgcatgttactcgttggattttcttagatgttgcgtccatgtcatgtttgcagacatactgaacaccattttctgtaaacggttcgagttctaggttgaactgagaatgttttg

SEQ ID NO: 3430 - DNA, 451 bp, Triticum aestivum
  Clone ID: uC-tsfl9316104c10b1
ggtaatagcgaaggaacaggataaaagaaaggcttgacatgatgcacacggagaagctggttgattgacgcgaatacttgatgttcagaccaaacacactataaagagggaggaagtttcatgccaaattgttggagtgactgcaggactacttgaattaccagagatgttgctatcattgatgtgaaaacaggtaagaaacgccggaggaagtataaaggaacttgaggagagaagactaagaggaagagccgtaaacaagcagctgaggctcacaaagacaatgatgatgaatatgatgctggtcatgctggttctgaggacacatcaatgggagaacgcgattaggactctgaagtgaacgaagaaaccaagagtgatgaagagcctgaagcgacaccagttaagaaaaagttaacagatgattaacaaggcatgatggaagctggat

SEQ ID NO: 3431 - DNA, 487 bp, Triticum aestivum
  Clone ID: uC-tsfl9316104e09b1
ctttaatagcgcgaagaagccatcctgatatcgtttttggcattcccttctcgtagtttaggatttttatgcaattttattctgactcttttctcccaccaatctctctggcttgctgcttcacgataatcgaccagttctctagtctttctccctctgttcctctctgctctgctctctgactcgaactgcaacaatggctgccccgacctctgcgatcgggtttgagggctacgagaagcgcctcgagatcaccttctccgaggcatcaatctttgccgaccctcatggtcgtggcctgcgcgccctctccagggcccagattgactctgttcttgatcttgcacggtgcaccattgtgtccgagctttccaacaaggacttcgactcctatgtgctatctgagtcgagcctgttcatctactctcagaagattgtgatcaagacctgtgggactaccatgctcctgctcaccattcctaggatt

SEQ ID NO: 3432 - DNA, 424 bp, Triticum aestivum
  Clone ID: uC-tsfl9316104f09b1
gcctttgcccgttgccccacacactcggtgttatccggccaccccccacgcgagctcaccatagttcactcagcaccgaccatgctggtgcctgaccctgatgaggttaccaacggccaactggcctcatcatggaccaacggggccatcgcctttctgatcaagtgtacataacccaagatcaactagatcgtcgacatcgctcgcttcgagaacaacttaaccgagacatcaagctcaccgggaccaaagaagaactgcctctccacgtgcgaaacctgaaacaggacatgaacgacgccacgcctaccttcgacactggcctctctaatacaaccttgaaactcttgacaaacaagtgcctcccaaatcacaatgcgcgcaacacattccccttgattcaattcaacaaagaccgaagagg

SEQ ID NO: 3433 - DNA, 358 bp, Triticum aestivum
  Clone ID: uC-tsfl9316104h05b1
acgatcgaagacttgtgacgcgatccaatggggaatgaagaccgtggcaatatcggagtcagttgggggcatggttgcgaggagcaccaggatgatgcgaggcaacagaagaggcctgtcagtgtctttaggcggtaacgctggagccatgatgcaagcagaccggaagattacaagatagagacacctcgagggacatatctggaggactggtttggaaaggcaagaactgcaatgggctgtggtcgaggatgtacaccaggcactgaggaactggcaatgtgagggcatgaaggtttacatagactccaatggcagtagagagggacagaggctactctgcggacatacatctgat

SEQ ID NO: 3434 - DNA, 553 bp, Triticum aestivum
  Clone ID: uC-tsfl9316104h10b1
ctccctacccctcgtcggagccgcgccgccgccgcccatgtcaaagacgccggggaagacgccgcggacgcccaggcggatcctggagtcctacaccatcaagggatccgacggcgtcatccgccctggggactctgtgctgatgaaggcgcccgacacatcaaagcctccgtatgtggccaagattgaggaaatcgaggcagcaggacctcggggcgcaaatgtcaaggttaaagtgcgctggtactaccgaccggaggagtccattggtgggcgcaggccattccatggcgagaaggaggtgttcctctctgaccaccaagatgtgcagagtgctgataccatagagtgcaagtgcaacgtctacagcttccgggactacaccaagctttctgctgtcaatcctgaggactatttttgccgcttcgagtacaaatcaatcacaggcagctttgtgcctgaccgcatagctgtgttttgtaagtgtgagatgccatacaaccctgacgatcttatgatccagtgtgaggaatgctctgattggtttcaccct

SEQ ID NO: 3435 - DNA, 447 bp, Triticum aestivum
  Clone ID: uC-tsfl9316106a12b1
tatggtttctcattgggaggttttgggatgccaggggcaaaagaacacccctcttccgcttatgcctggaccaaccaaagctgggtttggtgtggttgtccttgacgggaagctcatcgtcattgctggctatgctgctgaccatggcaaggaatgtgtttctgatgaggtttaccagtatgattgtttcctcagcaggtggaccgccctttctaagatgaatgtcactcgttgcgacttcgcgtgtgcagaggtcaacggtgtgatatatgttgctggaggatttggtcccagtggtgatagcttatcaagtgtcgaagtttatgacccagaacacaataaatggacgttgatcgggggccttcgtaagccgagatggggttgttttgggtggagctttgaaggcaagatttacgccatgggtggcccgtcgaagcttacaattgg

SEQ ID NO: 3436 - DNA, 579 bp, Triticum aestivum
  Clone ID: uC-tsfl9316106c06b1
gcgtttattaaaagagaaggaagaaaagagaattaaagaagaagctgaaaaacaagcagctgaggaaaacaaagcacctgatgcctctcaggaagcagattctcaggacactaatgagaaggcacaagaagatgaaagcaaggtagttgaacatcatgatggagatatcacggaccatgacaatcactcaccagaaggcgagacatctgttgaagtgcctgacattaaagctgggactggagatgatgaaccaccggtggagacatctgcagtacctaccgaggagcaggaccctacttctgtcaactctgaaggtttgtcaaaggcggaattgggtcgtctggtagcttctcgctggactggagaaaatgtagatgatgttggtaaaagcgataaaaagggccatgaggatgagctggatattccagaacctgcagaagaagcatttgaagatgagcatgatataccagaacccgtagaagaaaaatatgctggctatcattcagaagttgaggatgataggcacaaatttgaagacgaagagtgtctaatgatcagatgatgatatgttgtgacatg

SEQ ID NO: 3437 - DNA, 357 bp, Triticum aestivum
  Clone ID: uC-tsfl9316106c08b1
gctttccacgagcccggataattaacgcgagcatgctacgtcgtaactgttgttttatttcatcaaattacaacaaactgcccgccgttttacaacaacgtgactgctaaaaccatggtgttgcccaacttaatcatcttgtagcacatcatccttttgtcagctggtgtaatagtaaagaggagggcaccgatcgtcgttcttaacaatagctcagcatgattggtgaatggtacgagccctgcagcggcgcatcaagaagccgcggctgttgtggttacttccagcatgaccgctgcaatagtcagcagcgtagtagccgctgcttttgttgttttcttttccttttttgtcacg

SEQ ID NO: 3438 - DNA, 78 bp, Triticum aestivum
  Clone ID: uC-tsfl9316106c09b1
tgataataaaaaaaaaaaaaaaaaaaaaaaaaaaaaaaaattttaaaaaaaaaaacaggaaaaacggcctagcggttc

SEQ ID NO: 3439 - DNA, 460 bp, Triticum aestivum
  Clone ID: uC-tsfl9316106e11b1
ttttgttagccttgatgaagatgcatcttctgtcaggctgtttgttaagcgtggtctggaagtgtttgctgcacagtcttacagcaagaaccttggtctatatgcagaaaggatcggtgcgataaatgtcatttgctcagcaccggaagttgcagatagggtgaagagccagttgaagcgattggcacggcccatgtactcaaacccacctattcacggtgccaagatcgtcgccaacgttgttggagaccctaccatgttcggtgagtggaaagaagagatggaacaaatggccggtcggatcaagaacgttcggctgaagctttacgatagcttgactgcaaaggatcagtctggcaaggactggtctttcattctgagccagataggcatgttctcgttcacaggcttgaacagaccccagagcgataacatgaccgataaatggcacatatacatg

SEQ ID NO: 3440 - DNA, 561 bp, Triticum aestivum
  unsure (1)..(561): unsure at all n locations
  Clone ID: uC-tsfl9316106f06b1
gtngtcttgcgcagacagacagaacttgagagagcgcacgcgagatggcagcctccatgatcacctcgccgattgtggcgccgacgagcgtgccgtccctctcccgccggggctcctccttcgccgtcgtctgcagcggtggcaagaagatcaaggtcgataagcccctcggactcggaggcggcttgacagtcgacatcgacgccaacggcaggaaggtcggcaagaagggcgtgtaccagtttgttgacaagtacggtgccaacgtcgacggctacagcccaatctacacgccagaggaatggtctgagtctggtgaccgctacgccggcggaacgaccgggcttcttatctgggccgtcaccctcgtcggcctcctcggcggcggcgtcctcctcgtctacaacaccagcgctctcgccggctaagagagcatctacgtgtaacacagggccgggtctttgcttgcatgcacgtctttgtaatctgcgtagctacctnctgtgaatgtatgcaatcaacgatgcaaagtaattgatccgaacagatggtttatgtgta

SEQ ID NO: 3441 - DNA, 227 bp, Triticum aestivum
  Clone ID: uC-tsfl9316106f09b1
gcattaacgcctctgtcctttaccctaaaaacagggagactaccggcgacccggcgcgagagttcaccaggaggcattctgcaccagaagccgcacgctgagctgccacctgatgagtatagaagtccgtacaacatgagcgatatcattggcccctccgagggcacacccgtttactttgtgagaggaagtaccatgacgaaaagatgaaactgattagtcccgcc

SEQ ID NO: 3442 - DNA, 465 bp, Triticum aestivum
  unsure (1)..(465): unsure at all n locations
  Clone ID: uC-tsfl9316106f10b1
tttgttcagtggctgaagtggctgtacacggatgtcacacagaagctggaggctaaggattactcaacgctgccagaggctcatgcctgtactgctgggctcaagtctgtgacaacatctgccacagctgacgccattgaagagtgccgaaagctctgtggcggacatggttacctgaacagcagtgggcttccagaactgttcgcggtctatgttcctgcctgcacctatgaaggagacaatgtcgttttgctcctgcaggttgcaaggtttttgatgaagaccgtctctcaggtggccactgggaagcaacctgtcggcaccatagcttacatgggcaacatacagcacttgatgcaatgcaaaagcgctgtaaatacagctgaagactggctcatcctgctgncataaaggaggtgtttgaagctgggcactgaggatggcggtgaactgtgcgcagaacat

SEQ ID NO: 3443 - DNA, 199 bp, Triticum aestivum
  Clone ID: uC-tsfl9316106f11b1
gaggagccaagaccaaagaagaacaagctcgcccgaccccgaccgctgggggaacaacagaaccgagacgacagaccgacggggacaaaagaagaacaggcccaccacgaagacagagcaaaaagaggagcccagacaacaccagcgccaaagcaaggtactggcacgctggtcaaacaaccgaaagagaccgagaaaa

SEQ ID NO: 3444 - DNA, 288 bp, Triticum aestivum
  Clone ID: uC-tsfl9316106h09b1
ccggcgagccaccgcgtgagtccaccatgatgtaattcagaaccgatgacactggccgccgacccacaacagttcgactgcgaacacccggcggtatcacagctctatcgcgtcgcagcacatccgcggaggaccagatgacgaaagatcaactgagcgcccacctaccgtcgttgcgaacacaagtgcaccgtgaatggagactgacacgcaccaaagaacaactcactctccgcgtggcatatcttaaatacgcgcatgatgacacgagcactaacctgggcacta

SEQ ID NO: 3445 - DNA, 307 bp, Triticum aestivum
  Clone ID: uC-tsfl9316108b10b1
ttcggttcgtacgagaacgaggccttcatccgcgacgtggtcacccgccgctggcagatggagttcgtcaagttctacaactgctggaacgagttcgagagcgcgtacacggcgcaggcgttcgtgttctgcgacaaggcggggccggacgcggagctggtggtggtggcgttccgggggacgccggcgttcgacgcggcgcggtggcgcgccgacctggacccgtcgtggtacaaggtgccgcggctcgggcgcgcgcacgccgcctacacgcacgctctgggcgcgcaacgcaacatggggtggc

SEQ ID NO: 3446 - DNA, 426 bp, Triticum aestivum
  Clone ID: uC-tsfl9316108c01b1
ccgggtatgactacagtcatatggcgatgcatccacagggagctatactgctcaccctcatcctcctgcttgcggctggagacggcagcctcgccgacggcactccatcggggatcatcagaaagacatgcaccgttcttgaccgacccggcgggagcgtggatgacgactactgcgtgggcgtgctctgagccgacccggcgggcgcgtacgccaaggacgcacgaaactagccgcatctccaccaacctcaccggggacaacatcacgttgacggtgctcgtactctaggacctggccaatagcctaagagactgcctccggatatacagggaaatgaacaggcccctggaggccgcgctaggtgacctccgtgccgggcatgtcaaagcggagaacgacaaactgagtcatgttttcggagag

SEQ ID NO: 3447 - DNA, 620 bp, Triticum aestivum
  unsure (1)..(620): unsure at all n locations
  Clone ID: uC-tsfl9316108c11b1
aggcattaacgcctctgcccgccggccgagaccccgcgtttctcctgccccctctctgggcgacggcggcggctgcccagatcggcagatccggcgcttccctggcccacaacggccacggtctcctcctccctggtggccacaggcgccccgcccggtcagctgcacattcttagatccggaggccaatctagtacaggtcgagcccatggtgatgttgccacggtttctcctccccggtgctcctagatccaacactagctcactagaggcagggcggnggttctggaccccctcgcctccttcccttagaaggctggaaagcacccacatgactccttatgagcaaccctctttatggggggaggaagagggacactttttttttgggggggaaaaaaaaaccaaccccggaagggggggttggggtgtttattaaaaccccccccccccccccccccccttttttttttttttaaaaaagagaaaggggtgtttttttttttttttttttttcctcaaacagggaaggggggagcgggggatttttttttttttttctctctctgcgaaaaaaaaaaaaaaaaaaaaaaagggggggggggggcgccccccccccc

SEQ ID NO: 3448 - DNA, 482 bp, Triticum aestivum
  Clone ID: uC-tsfl9316108e10b1
tgacttgccccatcgccgccaagctccactgctccgctcctcccctccgcctccctcccaagcctctcgtctccgacggatcaaggaaggaggccaggagcagcagcaagatcagcagctcgattgggcaggcaaggggcggatggagttcgtgctcatcatatccctgccgctcctcatcctgatcctcatcatcgccgtcgtcctctgcatcgtctgccgctagccacatgccgacgccaaagcgctcgtctctgctcggtctgctgtgactgcggtcgcaccatatgttgtgttaatcaatccaatattacatcatgactcggcatagaaaagaaaagaaaaaaggctcctctccaccaccatttctatttttctgttctggccctgtggtgtgattagctggctatagctctactggctctcctgatggcaacaaaagcatcgatcccgtgcgtcgatgcgcaatgcatatgatatac

SEQ ID NO: 3449 - DNA, 434 bp, Triticum aestivum
  unsure (1)..(434): unsure at all n locations
  Clone ID: uC-tsfl9316108e11b1
ttggattgctcagaaggttatgtatgaaagattcggggaggacttcattgtaaattttgtagcaaaagctcttccagaagctcactgcccaccggagctagctgaacagtactaccaaaagttacagggaaacgacataaaggcattcaggtcattttatcaatcacttatcgagaaaataagacaacagcagaatgggagtcttgtgttcagatagcatcatcctattcattttcaatctgtttgccagaagactcgtcagctgtatgatttgagtatagggtagttgtatcagtgatgtatataaagctaccatttctgagattagaagatgtataatgcgggaacatttttacagacctgccgtggcgaagttgactgttcaccgcatgtcatcngatgcagggaagtataacccaagagtttgtcatgag

SEQ ID NO: 3450 - DNA, 506 bp, Triticum aestivum
  Clone ID: uC-tsfl9316108f10b1
ttggtgaccactacctcgatcttctccaggccgactacactgatggggatgctctggatgccttgggcttggttcgctactgctgccgccgtatgctcatgacccatgttgacctcattgagaagttgctcaactacaacaccctggagaagacggagacaagttgaagttaattgaacccattctgcctcgaaacctttgttcctttgtactttccaagatgctgtttcttgcgtcagtgcttaggaggtgcaaagtgaggcactgaaatgaagttggtttgttcatgaatctccaaggactgttagtgtgaccatgcgtttctactatgtgatcttcaaggctatattaaccaacaagtctatgcattctccagtttcagacttattaagctccaagcgttgaacatgttattcctgtgctttctgttggatgtagttggttgtgggcacccatttaccattgaatcgtcactagtgatatgcattgaaccttcacatgtacct

SEQ ID NO: 3451 - DNA, 153 bp, Triticum aestivum
  unsure (1)..(153): unsure at all n locations
  Clone ID: uC-tsfl9316108g02b1
ccccccgaaagagagagagaacaaacaacgggcccaacgaaggggcccgaaaaacaaaagcacggggcggaggcacacangacgaaagacgaacngaccgcccgccgccgcncggggggagaacaacagaaccaggcagacagacaggcgggg

SEQ ID NO: 3452 - DNA, 318 bp, Triticum aestivum
  Clone ID: uC-tsfl9316108g07b1
ttaatataaaaaaaaaaaaaaaaaaaaaaaaaaaaaaaaaaaaagggggggcggttttgggggtcccaccctgcggtccccgtcctggcaacccaggggtctttcgttggggcagccaaatttaatttcttgggcgggggtcccacacccgtggccgggaaaaccctggccatcccccagtttgagcacctggcaggccttccccttttaaccggttgggaaaaaaccaaaagggccccagcgggcggcctttccaaaaggtcggcacccttgaaggttaaagggacccgcccctgctgggtggcataaggcccgccc

SEQ ID NO: 3453 - DNA, 373 bp, Triticum aestivum
  unsure (1)..(373): unsure at all n locations
  Clone ID: uC-tsfl9316108h06b1
gcggagcggaaaacgcggggggacccacgcgcccggggtaggattcccccccccacccagaccncggcacgcgggagggaccagcaccgaccgagagggcccaccccgagcggggaagaggaaggcaaggcggacgaccaggaccgcagctacgccgggggccacgccggggccaccgacgaccagagccgacagaacgccccccccaagcacggcgacggcaccgacgccaagaacaacacngacagggagacgggcacgacccgcgggcgcggggncggcaccagcgcagagaacaaggcgaagccccaggcgaacgaggccaagaacggccaggaccaggacggccgcaacaggaccgacaacgaggcgc

SEQ ID NO: 3454 - DNA, 344 bp, Triticum aestivum
  Clone ID: uC-tsfl9316108h07b1
gccggcccgtgcgtgcaccaagaatgagtcagtaccgacggtgctggcggctgaccctgccgagtgagtgtccgtacaaccagcgggatcatggacggtcggggccagcgattgtctgtggaggagggcatgactaacgatgaactgactgcccgcctgcgttcgctgggtgaacaaacaaaccgagatggaagtcagactgacacgaacgaaaaactaactgctcctgcgggagacctaacagaaagaggagcttgctcacacgatgactaaggtagggactggccgtcgacaaacaacgtactgacaaaaaaaccgcggacccaaccaaattaaattgcatg

SEQ ID NO: 3455 - DNA, 443 bp, Triticum aestivum
  unsure (1)..(443): unsure at all n locations
  Clone ID: uC-tsfl9316112a06b1
gcttcatgatggcgaccgccgacggccagtcccagcctgcggccaccgaaccctccccatccccggccaagcgtaagacggacaccgactccgagatctctcccctcgacccacccgccaaggccgcccgccccggcgctgacgaggaggccgccgccgaggccaaggcccgggtcgcggacaaggggaagggcaagatggtggtcgatgaggaggaagaaggcgaccaggaaagcgacgaggaggaggatgacgaggaggtcgagggagatggcgacgagagtgacggcttatgcgaggatcccctctccgaggtcgacctcaacaacatcctgtgctctcggacccgtctgtgctgcccagcacagcctggggcgtacctggcgccaccagaggaggcagcngaggatgactaggacgatgaggacgcaaacgtcgacatg

SEQ ID NO: 3456 - DNA, 467 bp, Triticum aestivum
  unsure (1)..(467): unsure at all n locations
  Clone ID: uC-tsfl9316112a12b1
ttctgacacacctgcaagagcgagagcgtgaaccatggcgggcatgatgaagaagcaggtcgtgacggcgctgatgttggcgctggtggtgctggcggcggcgccgggcggggcgcgcgcggcgtgccaggcgtcgcagctggcggtgtgcgcgtcggcgatcctctccggggccaagccgagcggcgagtgctgcggcaacctgcgggcgcagcaggggtgcttctgccagtacgccaaggaccccacctacgggcagtacatccgcagcccccacgcgcgcgacaccctcacctcctgcggcctcgccgtcccgcactgctaggcgccggcaggcccctggcgcatatggctagctagctgccgccgtgagagtgtcagactatagctagccctagctgagtgcgtacgtgttgcgtccatgaacgcatcttcctgctaaactactatgtggnntcgacttgctg

SEQ ID NO: 3457 - DNA, 327 bp, Triticum aestivum
  Clone ID: uC-tsfl9316112b02b1
aaaacgcctgcgcccgcacccaaaaaacggggataccaccggcgacccggcgcgagagcacaccgaggaacataaaacaccggcggcgccgggggcacacccagaagagcacgagcccgcacaacgggcgaaaacagggccccggggcgccagcgaccccccgcggaggagcccaagacaaaagaagaacagagcgcccccccccgcccgcggggagaacaaccgaaccgagaggacagcccgacggggacaaaagaagaacgggcgccccgcggggcagagccgaaagaggagccggaggacacgaggcccaagccgggcacgggc

SEQ ID NO: 3458 - DNA, 241 bp, Triticum aestivum
  Clone ID: uC-tsfl9316112b12b1
acaccgacacgagcgagagggccaacaagggccagcaagaagaagaggcgcggcccgccggccctgaggagggcgcgggcggacaaggggggggagcagggcccggcgcgcccagggcgccaggcgggagaaccgcaggacgaaagaagaacgaaccgcccggcggccaaggcggggagaacaagcaaacggagccggcaggccgaggaggacaacagaagaacgggcgccaagggccgca

SEQ ID NO: 3459 - DNA, 485 bp, Triticum aestivum
  unsure (1)..(485): unsure at all n locations
  Clone ID: uC-tsfl9316112c05b1
gcgctcaccttcgaggctcggccatggcggactaccacttcgtgttcaaggacgtggagggggcgaccacgcagtgggacgacatccagcgcaagctcggcaacctgcccgagaagccgccgcccttcaagccgccggccttcgcccccagggccgacgccgacgagcagcccaggtccaaggagtggctcgacgcgcgcgaccccgacgagctcgaggagctcgaggacgacctcgacgacgaccgcttcctcgagcagtacaggaggatgaggcttgcagagctcaaggaggcagcaaaaactgccagattcggcacagtacagcccatcacaggctctgattttgtgcgtgaggtttcgcaggctccaccggatgtctgggttgtggtcttnctctataaggatgcgataccagaatgtgggctgcttgagactttgctggaggaactggccacataaaatgcataaaccaagtttgttaaa

SEQ ID NO: 3460 - DNA, 491 bp, Triticum aestivum
  Clone ID: uC-tsfl9316112c09b1
attgctcggcgcgggcaagcaagccatctgcacgggcggtgtgcagcgaggccgcacggacggggagcagggaggccgcgcaggcagcgagcctggcggacgcgcgggcaacgaatccatccatccacggccggtgcgggcaagcaggccatccgcgcgggcggagagcagggaggccgcgcgggcagcgagcatggcagacgcgaggacggcgagcatggcgcgcgtgggcggctcactccaccgacgacttcttccatcgggcgcgcggcggcctcttccctcgagcgcgcagcggcctcttccctcgggcgcgcggcggcctcttcctcgagcgcgcggctgtctcttccctcggcggccgagggcggcctcctccctccggcgtcggcccgccaatgctgcaccggtgcacggcggtgcccctctctctctccaggaaccagcgagcacggtcgggcggcggtgccgaaacccagggtcggagagcg

SEQ ID NO: 3461 - DNA, 461 bp, Triticum aestivum
  Clone ID: uC-tsfl9316112c12b1
gataggagcagggcgaaaggaggccgtcggagatgtcggataagaagcgcgcccccggcccgcgcaaggacgaggtggtgacacgcgagtacaccgtcaacctccacaagcgcctccatggatgcaccttcaagaagaaggcaccaaatgccatcaaggagatcaggaagtttgcacagaaggccatgggaaccaacgatgtccgcattgacgtgaagctcaacaagcacatctggagcagtggcatcaggagtgtcccgaggagagtccgtgtcaggattgcccgcaagaggaatgacgaggaggacgctaaggaggagctgtactctctggtcacagttgctgaagttccccaggaaggtcttaaaggtttgggtaccaaggttgtggaggatgaggactaaaccccctgtctgtcgtatcgatcagttagaacttaatacatatctgctgagagcata

SEQ ID NO: 3462 - DNA, 383 bp, Triticum aestivum
  Clone ID: uC-tsfl9316112d06b1
cggtgcttgggctcctcgtgcggctaccccgccgcccgcatccgcaagtacaactggagtgtgaaggccatcaggaggaagaccaccggcaccgggaggatgaggtacatgcgccatgtgcccaggaggttcaagagcaacttcagagagggaactgaggccgcaccaaggagcaagggagcctcttccagcggcaactaggcgtgacagtctccatttgttgccctaagcgaagccctgatcatcaaacttagcttttttgttgttttctactggaactcttatgtttctatgttgagaggcagactatatgatgcctggttatgttatttgcacaattgtcgtggacgttaatccttcagttttgaatgttgaattgtgtc

SEQ ID NO: 3463 - DNA, 483 bp, Triticum aestivum
  unsure (1)..(483): unsure at all n locations
  Clone ID: uC-tsfl9316112d09b1
gaacaaacgccgccggcccgccccaaaaaaaacggtttttccaccggcgaaccggcgcgagagcccaggcaggaataaaacagcaccgccgccgcggccggccgacccagaagagaagcgcgcccgcaacaacgggcgaaaacagggccccgggggggcccaaagcacccccgggggaggagccccacgacgaaagaagaacngaccgcccgcccccgcccgcggggagaacaaccgaaccgagaagacagcccgacggggacgaaagaagaaccggcgccccggggggcagagcaaaaagaggaccccgacgacacgaggccaaagcggggcacgggccgacgcaaacaacgagaagacgggaaaaaccccggggccccccaacaaaagcgccgagaagcacacccccactgcgccagggggcgaaaaaacgaagaggcccgcaccgagcgcccatccaaacagtcgcacaacccaaagggc

SEQ ID NO: 3464 - DNA, 496 bp, Triticum aestivum
  Clone ID: uC-tsfl9316112e05b1
ctactacctccccgcaactcgctgctcctcccacaaccgaagctcagtcccgtggccacgcagaacaaaatgcagcgagcaattcaagctatccgatcacatggcagtgtgctcaaatctgctgtcctgcaacacatcagtgttgtgaagcctgctatgctgcccgctgtgttcccacgcttcatgtcagtatcatctgctcaaatagaggagagtggatttgagagcagcactgttgcagacattttgaagtctaaagggaagagtgccgatggatcatggctctggtgcaccactgatgatagtgtctatgatgctgtcaaatcgatgacacagcacaatgtgggagctttggtggttgttaaacctggggaagataaatcaattgcgggcattgtcacagagagagattatctccggaaaattatagtgcagggtcgatccttcaagtcaaccaaagttggagatatcatgaccgcagagaacaagctgatca

SEQ ID NO: 3465 - DNA, 362 bp, Triticum aestivum
  Clone ID: uC-tsfl9316112e09b1
gtaaaaagaagggctttccacagatacataaacagtagtatgtaccaaggttactcgattgcaatgtgtgaatttatgaaatttctgagaccccccaaaaaaaaaaaaaaaaaaaaaaaaaaaaaaggaaaaaaaaaaaaaaaaaaaaaaaaaaagagacaaaaaaaaaaaaaaaaaaaaaataaaaaaaaaagaaagctaaattaaaactactgaaaaatgcaaacaaaattcaatgcacgggaaaaccactttacaaacccaagactaaaaaaaccaagtcatccccatttcaacagctttcaaaataaaaaacatgtccgcaacaaacgcaatatccaacagacgcacacccatattgc

SEQ ID NO: 3466 - DNA, 444 bp, Triticum aestivum
  Clone ID: uC-tsfl9316112f04b1
ttggatacttcaatgatttctagcggctttacgcctgatgacccaactgacctgagcgggaagatctatgacatgatgagcacagctatggcgggcaagtgggcgtcgcagccccaacctgcccagccaagccagcagcctgctgcacctagtagctctgaacctgagccgcttgaagccgaggtggtggaacccgtcgaggctggccagcagaagtgagaatccgcatcgtgggaaatccatcagggtcgatgtcaagtgcatacgcgggtgctatcccaagctctctgcttgttccttttttattatgccggaatcggcttacacggcatgtatgatgagccgtgcgagtgctagtatacacttatcctagataggggtgtggtgatactaataataggactgaacattttggccttgaacacgctgcctgctactttactt

SEQ ID NO: 3467 - DNA, 287 bp, Triticum aestivum
  Clone ID: uC-tsfl9316112f08b1
accccagacagcgggcgcgaatgaacggggggtttttgaacaccgggcgcggggggcgcgaaggcgcaagggctgacataccgaaagcgccacaatacgcacgaagtgacccagatctccctggacaagaccccacgaggaaggattgagtaccagcccacctagaagcgggagagtaacacaaaacgcccggataccggccagacagatccaaagaaaaacacacccgctgcctacggaaaacaagaaggacagactgtgaaacaacaggacgactgtggaccgtg

SEQ ID NO: 3468 - DNA, 385 bp, Triticum aestivum
  Clone ID: uC-tsfl9316112g08b1
catatctcctcccccctccgcctcgcctaccgcctcgtcggcgccgccctccgtcccaccccctcctcctcgtcccgcagccgtcgtttcctcgcccccacccaaaccgcggcgccgggaaccaccaccagcggcgggttcgcggcgatgagctggctcgggaagctggggctgggcggcgggggaagcccgcgcgcgtcggaggcgtccgcggcgctggcgcaggggcccgacgaggacaagccggcgcccgggagcgagttcgcgcagttcggggccggctgcttctggggcgtggagctggtgttccagcgcgtgcccggggtcacccgcaccgaggtcggctacagccagggcgccttccacgaccccacctacgaggacg

SEQ ID NO: 3469 - DNA, 226 bp, Triticum aestivum
  unsure (1)..(226): unsure at all n locations
  Clone ID: uC-tsfl9316112h07b1
gcgaaggcagaaacgccacngcccgtaacccgaagaaaaaccgggataccaccggcgacccggcgcgagagcaccaggaggaaacagaacagcaccggcgccccgggggcccccccgaagagagaaaggagccccaacaaggcggcggaaacgggggccccgggggggccagcgccaccgcggagggggagcccgacgacaagaagaagaaccgagccgcccgccc

SEQ ID NO: 3470 - DNA, 484 bp, Triticum aestivum
  Clone ID: uC-tsfl9316112h09b1
attcaatgtattccttgcccagaattgtctctcagactatatctacaatgcgcagaggctgccaatgattgtgatttggaaccggttgcttatgagttctttactcaagcattcatcttatatgaagaagaaatagcggattctaaggctcaaattactgcacttcacctaataattggaacccttcagcggatgaatatatttggggtggaaaatagagacaccctcactcataagacaacagggtactcagcaaaacttctaaagaagcctgatcaatgccgggcagtctatgcatgttcgcaccttttctggactgatgaccaagatggaatcactgatggtgaaagggtcctcctttgcttaaagcgtgccttgagaattgcaaatgctgcttcacaaatggccaatgtatcacagggaagcagcggatctgtcattctattcattgaaattttgaacaagtatctgtacttctttgaga

SEQ ID NO: 3471 - DNA, 386 bp, Triticum aestivum
  Clone ID: uC-tsfl9316113a12b1
ggaaggaggttaagtatgattttgaggacaaaatcaatgcagctgtcttcccaggtctgcaaggtggaccccataaccatactattactggccttgccgatgcgcttaagcaggcaactactcaggagtacagagcttatcaagagcaagttatgagtaactctgctagatttgctgagagcttaacttcaaaaggctacgacattgtctctggtgggactgataaccatttagttttggtgaacctcaagaaaaagggaatagatggctcacgagtggagaaggttttagaaaatgtgcatattgcagcaaacaagaacacagttcctggtgatgtttcaactatggtacccggaggcatcatgatgggaacccccgcgcttaca

SEQ ID NO: 3472 - DNA, 334 bp, Triticum aestivum
  Clone ID: uC-tsfl9316113b04b1
cctactcgtccggccacgcgtccggtggactttgggtacctttacgagggcctcggcggggagcgcggcaagcgcaagcgccgggaggaggaggcagatgcctccgattccatggagctcgacgcctacgcgccccggccgtccaagctccgtgcagtggtctgccagtccgacccgtccaagccggaggccttcgggtgcgccacctacgacggggtcatcagcgaacacgtctcgctgcgtacatggaaggtgccacacacgctccggtcctccgcgctgatggtgtcctggaagcccgtccctatggagcagcgcgtgagggacacgtgcc

SEQ ID NO: 3473 - DNA, 113 bp, Triticum aestivum
  Clone ID: uC-tsfl9316113c01b1
ggagaacaacagaaccgagaagagacccagacggggacaaaaaaaaaacgggcccaccacggggcagaccagaaagaggagcaggaagacacaaggcccaagcgggacaccgc

SEQ ID NO: 3474 - DNA, 254 bp, Triticum aestivum
  Clone ID: uC-tsfl9316113c10b1
cacgaccacagggaaggagctaagctatgcaccgtctaacagcccttgctgccgtcccgatggcatgcaccaacatggcgccggccacctccagattcatgctggcggcgggcatccccagctgtaccaacggctgcatgagcaaccatgaactggttgcccccctcaaccgactgggcttgcagctcgtcgcccatgccagggtggcggccactgacgacgaactggcgctaccagtggcagacgtgaaagag

SEQ ID NO: 3475 - DNA, 451 bp, Triticum aestivum
  Clone ID: uC-tsfl9316113e06b1
tgtctctctgtaagcaaacaagagattcatgctgtgttatcgagcaatgttcctcccaagcttgtgatcctccacatgaatatggccctccatgtatatgacgatataatgaggatgacagaaaatttgagcgagaaatacataattgggtacggggcatctagtacagtttataaatgtgttctgaagaactgcaagccagtggcaatcaaaaagctatatgctcactacccgcagagtgtaaaggaatttgagactgagctcgagacaattggaagtatcaaacaccggaatcttgtcagccttcaggcttactcgctatcacctgctgggaatcttctcttctacgagtatatggaaagtggcagcctctgagacgttttacatgcaccttcgtccatgaagacaaaactggactgggaggctagactccagattgctcttggcactg

SEQ ID NO: 3476 - DNA, 122 bp, Triticum aestivum
  Clone ID: uC-tsfl9316115a04b1
gcgcgaaaggacgcgcctgcccggacgcgagaaacagggggatcaccggggagacggggcgggagcgcaccatgagagagacagaaccgctgaagcggtggaggcaccccgaagagagcgag

SEQ ID NO: 3477 - DNA, 349 bp, Triticum aestivum
  Clone ID: uC-tsfl9316115b04b1
gccatgcttaaagcctcttgcaaacgctgctgccgacggcgacggaacaggagacatgccagcaaagatggacccgaagctagaggcgtaggtctacgtgggggtgtccgtaggcgagaccggaggcgatgactggctggcccccaagatcgggcccatgagcctgtccctcaagatgatcggcgaggagatcggcgaggagaccgccaaggactcggaggaggtctggaagagcctcaaggtcaccgtccagaacagcgaggacaaggtctatgtcaaagcttcggtcgtggctctcgtcatcgagctcctcaatgagccccttaaggacacgcagaagggcaagaac

SEQ ID NO: 3478 - DNA, 276 bp, Triticum aestivum
  Clone ID: uC-tsfl9316115b05b1
cagtagctcatggccggagctcaccgcacacggccacacgcacaaggtgaggtgaggcaggctcgctaggaaggaagccatggagatcgggtctctggcgccgcgtgagaggccgcacgccgtgatgatcccgtacccggctcaaggccacatcacgccgatgatgaagctggccaagctgctccacgccaggggcttccacgttatcttcgtcaacaacgagttcaaccaccggcgcctgctgcgctcccagtccggcgacaggctacgtgggct

SEQ ID NO: 3479 - DNA, 473 bp, Triticum aestivum
  Clone ID: uC-tsfl9316115b07b1
tattgatgtccaacaccaatcaaggcctccatccaatcccaagcaacctcgaagatgtcttgctgcggaggaagctgcggctgcggcagcgcctgcaagtgcggcaacggctgcggcggctgcaacatgtacccggaggctgaggccgccggcgccaccctcctcgtctccgccaccgccacccacaaggcgagctccggcgggatggagatggcggcggagaacggcggctgcggctgcacccagtgcaagtgcggcaccagctgcggctgctcctgctgcagctgctagatcatcgatcatcgatcatcgaccatgcatgcacctgccgcgcgcgtgcatcatatctatgatcgatcggtccatctactaccatgtgtaacgccacctggtcgaggggctttgatgtatgtaagcacctgccagcatgagcagagcatgtgcacttccatgcatgtaaaccgacccctaat

SEQ ID NO: 3480 - DNA, 378 bp, Triticum aestivum
  Clone ID: uC-tsfl9316115b09b1
tatatacctcccaagtagactatctccagcagaggaaaaacttcagccgaatcgacacgaagctccgcacccaggtggtcgctccggcggcagcaacacagtcgtcgtcatcggtgttgatgaggagcgtaggcacaaagatgacgccaagattgacagctaggagcagtcgaggagcggcactctagccggtgcatgccaatcaaatgaaggcggaggcgtagaacaacatgaccaagaagtaggcgagatcgaggcgagaaaggacggccgggtagcccgatcggcgcgataggtggagcgcatccggaagatcgaccgcatgtcgtcccggttccagtgttgcgactgattcctgagctgaaaaataaacaaaat

SEQ ID NO: 3481 - DNA, 288 bp, Triticum aestivum
  Clone ID: uC-tsfl9316115b10b1
aattaaaaaaaaaaaaaaaaaaaaaaaaaaaaaaagagagcaaaaaaaaaagaaaggcaggcgaagcaaaaacagggcggccggaaaaaaaggaaacacaagcgccacaaaaagcagccgggggggccggaagagagaacccagggtccacggacaaaaaaggcagggccacagctttacaacggggcaccaggaaaaaatttatcgggcccaagcttaaagacgctggaaaacaaaacccctgggcgcgcccaaccaaaaccgacgggggcccaaccccccctaccc

SEQ ID NO: 3482 - DNA, 390 bp, Triticum aestivum
  Clone ID: uC-tsfl9316115c01b1
actgtatgagtggttgatgcatgcttttgcagctcaatctgaagttcgtagaccagaaataatattgaataaatgatgcaccttgacgagttagattgtcggcagcatctcatcttctcatcttcaagtttgagttgcgccaaccacatataatgtgcctcgtcgtcgagtcaacaagcggctgccggctgcgtcttgtctccaagccctaatcagcaggtggattgattttaatgaaagaagaacgatgcatgttaatgcggtgctaacaagatttgaatctgaatgtgccttatccctattagtattgaacaaactttcaaactccacgggaccacttctgattagcacctaattaactaacttaatgctaaggagggttggtgcgat

SEQ ID NO: 3483 - DNA, 473 bp, Triticum aestivum
  Clone ID: uC-tsfl9316115c06b1
gtcgtatagggagttcacggtggaggtggaggcgatcggccgcgtccgccacaagaacctcgtccggctgctgggctactgcgtcgagggagcgcaccggatcctggtgtacgagtacgtcgacaatggcaacctggagcagtggcttcacggcgacgtcgggcccgtcagcccgctctcctgggacgcccggatggacatcgtgctcgggacagccaaagggatcacgtacctgcacgaggggctggagcccaaggtggtgcacagggacatcaagtccagcaacatactgctggacaagcggtggaactccaaggtctccgacttcggcctcgccaagctccttggctccgacagcaactacgtcaccaccagagtcatgggaacatttggctacgtggcgccggagtacgcgagcaccggcatgctgaacgagaggagcgacgtgtacagcttcggggtgctcatcatgg

SEQ ID NO: 3484 - DNA, 338 bp, Triticum aestivum
  Clone ID: uC-tsfl9316115c09b1
ctacccccaccgccgccgtcgccgcccgcgtccaccatggtgctgccgaaccagaacaccgtcgattaccccagcttcaagctcgtcatcgtcggcgatggcgggactggcaaaaccacatttgtgaagaggcatctcactggagagtttgagaagaaatacgaacccaccattggtgttgaagttcacccgttggatttcaccactaactgtggaaagatccgtttctactgctgggacactgctgggcaagagaagtttggtggccttagggatggatactatatccatggtcagggtgcgattatcatgtctgatgtcacttcaaggctgaccta

SEQ ID NO: 3485 - DNA, 265 bp, Triticum aestivum
  Clone ID: uC-tsfl9316115c11b1
tgcctgaactccaccaaactggttttccacggccaagccggtgcgggtgtatctcatgcagcagacacagctcaatgtacatttggcggcccctgatactggtgggtactgaacaccggcagaatcatggataattgcggtggatgtgaaaatatgtggagcgagtcagagataccagatgaacggtatgggccgcctatgatggctaaaagaaaaccagcacaccacagttgcacagactaaaaggaacgaactactgattgtc

SEQ ID NO: 3486 - DNA, 218 bp, Triticum aestivum
  Clone ID: uC-tsfl9316115e01b1
acgggctttttcccgcgcttgctggccttgaggaatcccaggaacagtttgaaaccctggagctggtgtgtgaccctgatgagtacgccttcgtccagactggagtacaccaggtcctccaagggcggagagggtctggggaggcttgcactaccccagatgggctgactgtcatcctgctgtcgatgggagaccgacttgtgaaccttgtgatccag

SEQ ID NO: 3487 - DNA, 389 bp, Triticum aestivum
  Clone ID: uC-tsfl9316115e07b1
tgtcttcgtgcttgtttgccttgaagaatctcaagaaatggatgaaaccccagaaggttcctgcaaagctcatgaatttcccctcgacggcgaggattacgccagagcccctcggcctcgtgctcgtcatctccgcctggaactaccctctcttgctgtccctggacccggtcatcggtgcgatcgccgccggcaacgccgttgcgctgaagccgtctgagggggcaccagccatgtcgtcgctgctggccgagctgctgccgcggttcgtggacggcacctgcatcaaggtcatcgagggcggcgtcaaggagaccaccgcgctcctaaaccagaagtgggacaaaatcttctacacaggcaacagtagagtcggacgcgtcgtgatg

SEQ ID NO: 3488 - DNA, 338 bp, Triticum aestivum
  Clone ID: uC-tsfl9316115f06b1
ggatagctcgccggcggccggccaggtgctggtggtggctgtggcgatggcggtgctgttgctggcgcagcatgcggggcgcgtcgacgccaagatgatcttgtacgacgtgatgcaggcggacgaggtgccgggccgcaacgggctgacccacgtggaagaccaggccaatcggtacagccgcggctgcgaggcctccaaggagtgcagaggctaagctctaatccagccatgctcaatgaccaatttgtactccttacattcctcagttaccttgttgctacttctgctgttgagaggaagataaaaccccgcgcgattgctatggaatttgtttg

SEQ ID NO: 3489 - DNA, 298 bp, Triticum aestivum
  Clone ID: uC-tsfl9316115f09b1
tttgaacagtgcaaagttagttaggagaagggataagcataacatgagcgtaaacaggggaggttactgtagcaccagtactttatccgctggatctccaacatctagtccaagtgaggaaagggtttcgtcagggatttctctgtcctggcaggatgtctataatattgctgtcaagtggagacagatttctgaaccttgtgatccagttgtttgggtcaataagctaagtgaagagttcaattctggttttggttctcacaccccattgctttttggtcaagcgaaaattggtcgc

SEQ ID NO: 3490 - DNA, 258 bp, Triticum aestivum
  Clone ID: uC-tsfl9316115g02b1
attgtgggacttgctccacctctcggagtccgaggcaatgcccgtattcccttcccccgaggacctcaggggcaagatcatcatatcaaccaaaccggcaaaagagtaccttgaaaccaagagtagcaaggaggaggcccaaaatggtagcgcggaggagagtgtgtggggggacgagattcccgacaacaaggctcacgttgatactgctcgccaggtttcagagaaggacaactaccgttatggggaagaagatga

SEQ ID NO: 3491 - DNA, 380 bp, Triticum aestivum
  Clone ID: uC-tsfl9316115g08b1
gctaagcacattccgcagctgtcaagatggatatgccgtgaaatcatcacttaaagctgaagatggattgctgtatcctcttgaaaaaggctttttctttttgccaaagcccccgacgctcattctgcatgaggagattgagtatgttgaatttgagcgccatggtgctggcggcgctagtatgtcatctcactattttgatctcctggtcaagctaaagaatgaccaagaacatctcttcagaaatatacaaaggaatgaataccataacctcttcaacttcgtcagtggtaagaatttgaaaatcctgaatcttggagaagatggccaagatagaactggtgcccgtgcggctgctcttcagagcactgatgatgacc

SEQ ID NO: 3492 - DNA, 389 bp, Triticum aestivum
  Clone ID: uC-tsfl9316115g11b1
gttgctccagcaatccgaacccacccaaccaccggacgctccgcggatcctcctcgtgccccgctcgcgatctgcctccgcgagcccaaccacccctcgccggagatgcgcgcctggtgatccggaggggaggagagggccgatgaggtgcaagctccacccgtacgcgaacgcgctcggcgtctgcgcgccctgcctccgcgaccgcctcctcgtgctcgccgccgagcgcgaccgggccggggccggggccagcagcggcgccgactgcagcagcagcagcagccggggcagctcgcccgcgcgcgggcgcgccgcgtcgaccttcgccgccgacgtcgtcgtcccggcgcagcaacaccggcgctctgacgcctgcgcctacacgt

SEQ ID NO: 3493 - DNA, 439 bp, Triticum aestivum
  Clone ID: uC-tsfl9316115h01b1
ctatcttatgcttgaagccaaattctgctagaagctacgaggaattacttttgtgcatcgcagaaggagaaaataatgaaccggaggttgttccttcgattacacccccaaacaatggagtactgctgatcgcgaatgcatatcctgttgaatatggtcacattttcttggtcccaaatgcaactaatcagctatcttccttttgggataaaaggatgtttgggctgattacaaagattgcctctgaagtaaacagtgcagcgttccgggttttctttgatgatggtacatctattgtgccaaagcacatgttttttcaagcctgttactttgccaatcctttaccagtggagtcttcctcaacttgtgcattatatgatggggcaaccagatcaggcatttgtgtgtctgaaatgttgaataccctctaaaagcactt

SEQ ID NO: 3494 - DNA, 362 bp, Triticum aestivum
  Clone ID: uC-tsfl9316115h02b1
cttgtagcttcctactaccaccaggtgcagtgcaccactgctgtgggagcagagatcgctcacagcttctcgagcaacgagaacaccatcaccgtcgggacgcagcacgagctggaccccctgacgaccgtgaaggggcgctacaacaacttcggcatcgcaagtgcgctcatccagcacgcgtggaggcccaagtctctcatcaccttctccaccgaggttgacaccaaggccattgagaagagccccaagatcgggctggccctgtcactcaagccctgatgtgggattcgtgggtgcgttaggatgctagcattttggtaccatcagctcttggtccaacgaacaaagcttggacagac

SEQ ID NO: 3495 - DNA, 485 bp, Triticum aestivum
  Clone ID: uC-tsfl9316115h03b1
gcttgttgagatgactcgcaccggaccgatcgcccaggactgggagccggaggtcgtgcgcaagaagctgcccaacgccggcgccaagaaggacgagagggccgtcaacgccgcccgccgcgccggcgtcgacatcgacatcgccaagaagcataatgctgggacaaacaaagctgctcatagcaccacatcgctcaatacaaagaggcttgatgatgatacagagaatcttgctcatgagcgtgtgccgtcagacctgaagaagagcattatgcaggctagaacggacaagaagctcacacaggcacagcttgcacagctgatcaatgagaagccacaagtcatccaggagtacgagtcaggcaaggctatcccaaaccaacagatcatcggcaagctggaaagggctcttggcacaaagctgccaggcaagaagtgaagctgcgtgcatctgacaggagtcgagtctttcagagaggagcttg

SEQ ID NO: 3496 - DNA, 147 bp, Triticum aestivum
  Clone ID: uC-tsfl9316115h07b1
acagccagccagaccccctgcctgcatcgcctcaccgctttgactgcgccccgacccgacccacaccttggtaatacatgtgcaggtgcagaggcggcagggccatggcgaggaggtgctgctgcaactcatggacgtgtccacagc

SEQ ID NO: 3497 - DNA, 259 bp, Triticum aestivum
  Clone ID: uC-tsfl9316115h09b1
taccgttaccgcctctccggtttgtctcacgcattcggaagtccagatgtctcgcaccggaccgatcgcccgggactgtttgccggtggtagtgtgcttgatgccccccaacagcgccggcaagaaggactggggggactatatggccttccgccgcgccggcgtcgacatggacattgccaagaagcattatgctgggacaaacaaagctgtttatagcaccacatcgctaactccaatgtggctctatgatgataca

SEQ ID NO: 3498 - DNA, 447 bp, Triticum aestivum
  Clone ID: uC-tsfl9316115h11b1
tgttactgctctcaccatcctggtcgtgataagctgtacccagatcttcttcccattcggacctgcatcgaatgctgagattggcgggtttggagctctagtcttctcaggcttcatcgtctacgacactgagaacttgataaagcgccacacttacgacgagtacatctgggcgtctgttgagctttacctcgacatcctcaacctcttcctgaccatcctacagatgctcaggcagaatgacaactgatgggtcctgtctgaaccaccaggaccttgtgccaacccaggcatatgtccaacatttatcaagtcttttgaattgctatctacataactcggaagacatggtagtgagtttttgccatcatccagagatgaggccaaagtacaaccatatgtataggtgttctactgcgagtttatgtgcctgagtgttggtaaact

SEQ ID NO: 3499 - DNA, 368 bp, Triticum aestivum
  Clone ID: uC-tsfl9316115h12b1
gtgtagtgagagtgagccacacatcacacacgctacaccggccgggatcatcgaaatggcgaccggcgtcggcaacggcagtggcccatcgacgaacgacgcgctccagtcgatcctcgccgccgcgcgcccgttcctccggggcgacctcgcggccgtcgaccccgagctcccctcgctcgtctccgtcctcgtgtccgccggcgccggcgagtgctaccacaagcacggcaccttcctcgcgcacctgctcgacgtctaccgcatcctccgcctttggggcgcgcccgacgccgtcgcccgttgcggcctcttccactcctactactccaactcctacgtcaaccttgccatcttcgagcccgacg

SEQ ID NO: 3500 - DNA, 300 bp, Triticum aestivum
  Clone ID: uC-tsro9316001b09b2
tttttcatccccgataccaaagctcattttcttgtgcttgatatctttttgtgttcacagatttggaggatgtcttgcaactgtggatccggttgcagctgcggctcagactgcaagtgcgggaagatgtaccctgatctgacggagcagggcagcgccgccgcccaggtcgccgacgtggtcgtcctcggcgtggcgcctgagaacaaggcggggcagttcgaggtggccgccgggcagtccggcgagggctgcagctgcggcgacaactgcaagtgcaacccctgcaactgttaagct

SEQ ID NO: 3501 - DNA, 442 bp, Triticum aestivum
  Clone ID: uC-tsro9316001c09b2
tcttccacgcgtccgcccacgcgtccgcggacgcgtggggccgacgagaggttcgaggtggtcgtaccgaggaactttgctcttgtgtgctttagaatcaaggcaagtggagccatgacggaggaggatgccgatgaggccaaccgtgtgctaatggataatctgaacaagactgggaaggcttatcttgcacacacggtggttggtgacaagttcgttcttcggtttgccgttgggtcgtcactgcaggaggagagacatataagaagtgcctgggacctcatcaaaaagactacgagcagtatcatggattaagtggatggacctattgacacataaagttccaggagctacacaaatccctatatttagggtatgattattcttttaaaattataatttgtttttcttttgctttgattctgattattacttatttgga

SEQ ID NO: 3502 - DNA, 73 bp, Triticum aestivum
  Clone ID: uC-tsro9316001c10b2
tctaccacgcgtccggctatccgatgtaataagcatttggcacttgtgcttgtttttcaaaccatggatcgtg

SEQ ID NO: 3503 - DNA, 350 bp, Triticum aestivum
  Clone ID: uC-tsro9316001f08b2
ttttccgagttcaagaaaaaggtgaggagccttgttcgcaaatctcaggaaatgctctgaaaaaggaggatcatatgggggagtccacaagcgctgcaattctcttgctttcaccaaatggggcacctgatgccagcacttgcacttctcccctgtttattttccgttcagcgtcggtcgaatggtggtgttggtcttgtctctccgagacacttggggtgctgcctattatgaacttctgattgtattgtggcatggagttggtcaatgtcaagaagtattttcgtgtgatgccacttaatcgtagtcattgccgggaacatcatatcaaagaaattggctgttttgtg

SEQ ID NO: 3504 - DNA, 399 bp, Triticum aestivum
  Clone ID: uC-tsro9316002b11b1
tctttcgatcgcctcatggccgtccacatctccggcgagctcgtgcccatcctcaagaaggccggcgccctctggctctgatcggacccttccttcctttccttagtttcctttcatcagaagacggtgccgcggtttaatcctggccgttggatcgaattttacaccgcggccgatttactctaggattttgggtttctttaatggtgtgctaaattttttctcaacaaatatattcatgagaaaaaagaaacagacaggtagcattactgtttttcgtaatttatttcgtctggtcatgagcatgtgaatacggaagaagagcgtgcgcggcattgcagcgtctgtacagtttgtcgtttctatttccgagttaatgagaatcagatgcttcttacg

SEQ ID NO: 3505 - DNA, 71 bp, Triticum aestivum
  Clone ID: uC-tsro9316002c07b1
tctttaaggagcaccgtctttagatggcttgttaccctctcccatcaaggttgaataatatatgctttgtt

SEQ ID NO: 3506 - DNA, 226 bp, Triticum aestivum
  Clone ID: uC-tsro9316002c10b1
tctgccattcttgaatgaaatgcctagagacggtaacttaacaccatatatatttcatctctgctcgacagtacgtttggttacagcggggggcccttccatacatccatgtaagctgtaacgggtatgcaggaagtcaagagctgggatgcttgctgttgttttaagatgtagacattgtgtagtgacgtcggaaatgaggttccacttcttattttttgcttct

SEQ ID NO: 3507 - DNA, 424 bp, Triticum aestivum
  Clone ID: uC-tsro9316002d07b1
tcttctgtacaaaccattcagctcaaccaatttgagcagaattatatggaaatgcgcagtctgatgtctagcactgatggaaggaacgggcctccgagcaatgatcaccagtgcccacttggaacctaccctaattgccaagggatgtcccagaatacccaagaagcagctcaagctgttggaggaaactaaggcaaactgagggattatgagtatggaatgaataccctaagtttatattgcttttacttccacgtacagagtcatgtggcatgagatatgtatcatgtcgtcaatgtctctgcgtagtccggccgtagctccctagatgctacacaccatcaagatctcaggaatgtacttatcctatatgctactggtgtactggttgaatttacggactctcatatctgtgtgatacagt

SEQ ID NO: 3508 - DNA, 255 bp, Triticum aestivum
  Clone ID: uC-tsro9316002g05b1
tgtttgtggagtggtgctactttttattaggtgtggagtgggtgtgctatgcgcggggtcgcgtgacgtgggctaaataaaagtgttgtcggggccagtcgacgcccagtgtcgggtcagcagcgagcgagcgagcgacgcagcgccactcgccggcacccgtgtgcctgcgtctgctcagctggagctttgttgcggtgtgtgtcacagtgtcagttccacctatgatcgatcggtatcctatccggtttgtgt

SEQ ID NO: 3509 - DNA, 53 bp, Triticum aestivum
  Clone ID: uC-tsro9316002h09b1
acctaccacgcgtacgcccacgcgtccgaccacgcgtacggcaactggacctg

SEQ ID NO: 3510 - DNA, 84 bp, Triticum aestivum
  Clone ID: uC-tsro9316003b11b1
tctcgtttgggtgctctggtcctcgtgtaatcatcaattgatatggtaataaaatggtccgtaccgctgccgtggtaccacacc

SEQ ID NO: 3511 - DNA, 58 bp, Triticum aestivum
  Clone ID: uC-tsro9316003c07b1
tttttccggattggattggtttgattcccgcgtgccatcgagtggagacaagaagaag

SEQ ID NO: 3512 - DNA, 58 bp, Triticum aestivum
  Clone ID: uC-tsro9316003c08b1
ttcttccggattggattggtttgattcccgcgtgccatcgagtggagacaagaagaag

SEQ ID NO: 3513 - DNA, 370 bp, Triticum aestivum
  unsure (1)..(370): unsure at all n locations
  Clone ID: uC-tsro9316003c11b1
ttgcttcatcgtcggcgccaacatcctcgccgccgggcccttcagcggcggctccatgaacccggcgcgctccttcggcccggccgtggcggccggcaacttctccggccactgggtgtactgggtcgggccactcatcggcggcggcctcgccgggctcgtctacggcgacgtgttcatcgcctcctaccagccggtcggccaccaggactacccgtgaagcgcacggatccgaacctagcttcctgggctcttggctcgttgctgtttccccttgtgtgaatttcccttttcgattntaatccacctcaaaaatgtaaaaatgtaagacaaccactcgatcttacatgaacggttctggcgtttttcc

SEQ ID NO: 3514 - DNA, 182 bp, Triticum aestivum
  Clone ID: uC-tsro9316003f04b1
tttatttcctttgtgcggattcttcaaatttgtcgcttcaagtagaaactgcacgtggatgattgttattcgatgtttgcttgtggtgtggtgaagtcaataatatctcatcataagaaataagcacacatgtttgctaaattttgatcatcccgtgtctgggttattcttgttccatttgc

SEQ ID NO: 3515 - DNA, 274 bp, Triticum aestivum
  Clone ID: uC-tsro9316003f09b1
ttttgttctccttgaaatctttttgggttcacagatttggaggatgtcttgcaactgtggatccggttgcagctgcggctcagactgcaagtgcgggaagatgtaccctgatctgacggagcagggcagcgccgccgcccaggtcgccgccgtggtcgtcctcggcgtggcgcctgagaacaaggcggggcagttcgaggtggccgccgggcagtccggcgagggctgcagctgcggcgacaactgcaagtgcaacccctgcaactgttaagct

SEQ ID NO: 3516 - DNA, 65 bp, Triticum aestivum
  Clone ID: uC-tsro9316003g04b1
ttttttatccgggtcggggacagtgcatggtttacataagtaatcgagtatactcgcttcgtttg

SEQ ID NO: 3517 - DNA, 222 bp, Triticum aestivum
  Clone ID: uC-tsro9316003g12b1
tttcccacgcgtccgcttctctgtgggttgggttcacaggtcttgtgtctttgatatgtcctcgaatggtgcctgtgtctgtcgtcctggtcgtttctatgtttctaccgtagtgtgatgcatcgttatgttcggttgtttttgagaattgctgctgttgtgaacagctttggtgaacttgataaataagtgagccctgaattgtgtctgcagctgcgagtt

SEQ ID NO: 3518 - DNA, 151 bp, Triticum aestivum
  Clone ID: uC-tsro9316003h12b1
tatcggtgcaatgaaaacattgacggggtgcgttgctaatggagctcctgtttgccgccactaagttgatcaatatggtaactttgttgaaccttgtatttctaatgttaacatgttgaagcactctgtaaataacatgttattgttcgat

SEQ ID NO: 3519 - DNA, 155 bp, Triticum aestivum
  Clone ID: uC-tsro9316004b01b1
tctcacgcgtccgcccacgcgtccggtttgcattggcttgaattggttgctttggaggcttaggttagctgcagactgtacataaggaaattgtttatgttggttcttttctccagttctttacatgagatccatgtcggcaacagtggatacag

SEQ ID NO: 3520 - DNA, 172 bp, Triticum aestivum
  Clone ID: uC-tsro9316004c02b1
tctgtacttacgagactactacgttttctgtaatagggttgtaccaggttttttgccccatagcttgtattcaggtatacaagcagtgggttttcctggtgaacatcgaacccacaacctacctactattttcaataaaaatcatataagaatttgccgtggggcaacttgc

SEQ ID NO: 3521 - DNA, 180 bp, Triticum aestivum
  Clone ID: uC-tsro9316004c11b1
tgcttgtggtgctggagtattacatatcttgtccaaaaaatttgtactatgactccatatatgaggccctcggttgcaggctagctagatggtggcttgtggcgttgtagtattacatatatctgtccaaaaaaatgtactactgagattggagcagtaaccagagatttcatctcatct

SEQ ID NO: 3522 - DNA, 342 bp, Triticum aestivum
  Clone ID: uC-tsro9316004h03b1
ttggtggtttccaaagtcctgtttggagatccgggcgagatgctgtgccaagccatccatgacatgcccatcagctgcctggtcattgggagcaggggccttggcaagctcaagagggtgctcttgggcagcgtcagcgattacgtcgtgaacaacgccgactgcccggtcaccgttgtcaagccagcgagtaaccatgcctgatctcatcgtcgcaaatgtctacatttgtttcagtttgctggagtcctatatatccaggtggccgcaacttattgaaccatccagtgttatttgtaataataattgacaattagcctgtggatgattcccaggttgtgt

SEQ ID NO: 3523 - DNA, 163 bp, Triticum aestivum
  Clone ID: uC-tsro9316004h08b1
ggagagaatggccgcagcggctgggggggaggatttgttgcggggctcgcggcttccaccagcggcgggctcccagtgaggatcaagcccgcttcgacgtcgggtgcagaccttaaataattactagtgataaattgggatgcgctaacaatgtacataagta

SEQ ID NO: 3524 - DNA, 288 bp, Triticum aestivum
  Clone ID: uC-tsro9316006b06b1
gttgttttgtatcgtacaaatcctttgccatgagagctgaagcgtgagttaacctcatctttttgatccagctcagcagtagttttctgtctgtgggcaagttgagaatgcggcctagtgtgttcttgtgaagatgtttctgcctgtcgctggtaattatagaaaaatagtgtgtacagcagtaaatgcttcgtagccgtgttaatcctttctgtagcggacgactctagactctagtgtaaggtgatacttagatgtgtgaacacctgacttaatgttctgtgctcc

SEQ ID NO: 3525 - DNA, 270 bp, Triticum aestivum
  Clone ID: uC-tsro9316006c01b1
tttaggttctcaccaatccaacccacgacgccaaggtcaaggaattgcttgtttcagtatgcaacggcgcagtggagactttggtgaagacctctcaccaagttatctgcaaggccaatagtaagttggataacaatgccaatggcaacagcaatggaagtggcactggcagtagcagagcttgggaagggtgggtggagacagtctctagcacattggcagtgccaagtaacaggaattttgtgcttgatgttactgggagggtgacat

SEQ ID NO: 3526 - DNA, 370 bp, Triticum aestivum
  Clone ID: uC-tsro9316006e11b1
tcggttaggctgattgatggtatcctgctcaccaagtttgacactatcgacgacaaggtcggagccgcgctgtccatggtttacatatctggatctccggtcatgtttgttggatgcggccagtcctacactgacctgaagaagctgaacgtgaaatccattgtgaagaccctactgaagtaaaatggtagtgctagtacatgtcgagctccgatatgtgccacataccaaaagtctgctatatctccaaatatccccagtgacctcgttgttttctcgtttggtgtgaaactgtcgtccctagcaaacttttctggttgctgataacttattctgttatgtggatcgttatgcttggttgcctcatcag

SEQ ID NO: 3527 - DNA, 185 bp, Triticum aestivum
  Clone ID: uC-tsro9316006f07b1
tcggtcaatggaagctcctgattgcactgtgtcttatacttgttcagccctaatgatgctctggaccgaggggctcttcctcagtagcaatgtacccggccctgtattcttatcttctgttgcagtttgtttctctttcttgagagctgttacttggccaaaaaaaaaaaaaaaatacaatagat

SEQ ID NO: 3528 - DNA, 223 bp, Triticum aestivum
  Clone ID: uC-tsro9316006f11b1
ttcgatatatctcaagcaaagatgatctagttttaagggcgacactggactcaattactagaattggataaaattgcaatccggtgatgaaaaggaacatgaaattaccggcaattgcacaaatatcaccttgtccacttattgtttgtaagagaatgcagctgtgccgcttgccgtctataattttgtcaaaaaaaaaaaaaaaaaaaaaaaatattacttt

SEQ ID NO: 3529 - DNA, 100 bp, Triticum aestivum
  Clone ID: uC-tsro9316007f10b1
tcgtctgcaagttgtccttcaccatggtttgtatgtgccaccagtatggcagtatggtttatccaggttattgtgcactaaataaatgtactttaagctt

SEQ ID NO: 3530 - DNA, 253 bp, Triticum aestivum
  Clone ID: uC-tsro9316008b04b1
tttctgttatctacggtatatgatacatcgagggttcaagtgtgtttgccccgcgtgtttgagggctggcttgatttgtgcgtgatgggtcgtgtgaagaatatgcgtgcgtgcacgcatgtgcgtctcaatgtttcgttcggccaatgagccgtggaagtaacaacattgtttctttcaccgtaagtttgtaagtgtataaggcctccccgtgcatggaaatatacgtggaatatacatacctgttattact

SEQ ID NO: 3531 - DNA, 316 bp, Triticum aestivum
  Clone ID: uC-tsro9316008b09b1
tcgcccacgcgtccgcccacgcgtccgcccacgcgtccgtccacgcgtgcgccgacgcgtccgctcctatagtggtatcatcggaatcgccagaagaagagaaaagagaagctgtggcaagacaaaggtagtgtcgccaggccgccatacccagtggcggtggcctggtgcggttgtgtcgcgtctgttttcggtcggtatttggtggtgtttcgagtaagtactatgtgtttgtgtcgagtgctgggtgagtggattataagtgggttctagattggagctgttttcgcgtcttattaagattatattacaacag

SEQ ID NO: 3532 - DNA, 330 bp, Triticum aestivum
  Clone ID: uC-tsro9316008e02b1
ttgtagagtggaagctcgacacactgtgtgacctgtacgagactcttgccatcacccagagtgtcatctttgtgaacacccgccgcaaggtggactggctcaccgacaagatgaggggcagggaccacacagtctccgccactcacggagacatggaccagaacactagggacatcatcatgagggagttcagatcaggttcttcacgtgtgctcatcaccactgacctgcttgctcgtggtattgatgtccagcaagtgtccctggtcatcaactatgacctcccgacccagccagagaactacctgcatcgcatcggtcgtagtggtc

SEQ ID NO: 3533 - DNA, 143 bp, Triticum aestivum
  Clone ID: uC-tsro9316008f11b1
cccacgcgtccgcggacgcgtggggggaaaaataaaaaaaaaaaagggaaaaaaaaaaaaaaaaaaaaaaaaaaaaaaaaaaaaaaaaaaaaaaaaaaaaaaaaaaaaaaaaaaaaaaaaaaaaaaaaaaaaaaaaggggggg

SEQ ID NO: 3534 - DNA, 376 bp, Triticum aestivum
  Clone ID: uC-tsro9316008g09b1
tttcgggtgaacctagccgatgttggggtcgtcggcggcctcagtgatgggttcgacgacaaggctcaaccctcatggaacatgggtgcagggggatctggccaaccctcatggaacatgggtgcaggggggtctggcctaggaatgtctggaattcctccgtctacgcaaggcggtggcatcgagagcttggcaaactacaacaagtatcagtttggtggcttcaaatgagctccataggagaacatttctagcacctggtgtttgttgcttttttgctggactgcgcctttgggctcttattatctttttattggttttgtcatctcgctgttgttgactgtcacattgcttataattgctgcagtattcaagt

SEQ ID NO: 3535 - DNA, 251 bp, Triticum aestivum
  Clone ID: uC-tsro9316010c11b1
aatgtctacaaggagacgcaccactggtcgagactcgtgaccaccgcgtcgctgctacccatggaggacctcctcgctgggagcggcgcgacctgatacacgcggtcgagcgacagccgcgccatgctgctgtcgcgcacgcggcctacttccgaccggatctcgagccctccggtgagaatagacttgacggcgtcggagatggaagcggcgccactcgatgcgcgcggagggcgaccgccgccgtgctt

SEQ ID NO: 3536 - DNA, 113 bp, Triticum aestivum
  Clone ID: uC-tsro9316010d05b1
ttctcacgcgtccgaaaaaaaaaaaaaaaaaaagaaaaaaaaaaaaaaaaaaaaaaaaaaaaaaaaaaaaaaaaaaaaaaaaaaaaaaaaaaaaaaaaaaggggggggcgttt

SEQ ID NO: 3537 - DNA, 393 bp, Triticum aestivum
  Clone ID: uC-tsro9316010e05b1
ttctggatgggaaaatgaaagccattgttgaggggcggttacaacaggcttcgtgaatttttctcttccaaaaatcttgacgttgagttgaccggcgatgctgagaaccctatgatcgtcatcggtcaggctatcagtgttgcggcatacgtcaagaactttgacctcatcttccttgataagtcacatcaggggactccaaaaaaaatcttcaagctcacgcatgaagtatctggcactagagaagaagtgctgggtgtgatgcacgagtcggttcacgtaggccttttccggatccaggaaaaaaagtcaaaactctttcttgcaggctacaatttcaaagaccctgaaaacaggaaaggacgttttccggtcttcgcgcgggagatgagc

SEQ ID NO: 3538 - DNA, 115 bp, Triticum aestivum
  Clone ID: uC-tsro9316010e11b1
atcgtgatcagtttcggttgccaacatagcatagattctgtgaacctgtggaaggtttggctagacttgtttgtcaaatgtgcggaccattttagtatatttctatatcagcact

SEQ ID NO: 3539 - DNA, 61 bp, Triticum aestivum
  Clone ID: uC-tsro9316010g12b1
ttcttaaaaaaaaaaaaaaaaaaaaaaaaaagggggaattttaaaaaaaaaaaccgaaaag

SEQ ID NO: 3540 - DNA, 189 bp, Triticum aestivum
  Clone ID: uC-tsro9316010h04b1
tgagtggcggctccgggtcgtgtggtggaggggcaactttggttgtttgggcgacaggggagtcggctcgttaggtacgtagcctcggggctggtgtgtgtcgatgtatcggttttcggccaattttccttataaattggtcaattctcttcttcttaatgcaaaggcagagctcctgctgttttctcg

SEQ ID NO: 3541 - DNA, 241 bp, Triticum aestivum
  unsure (1)..(241): unsure at all n locations
  Clone ID: uC-tsro9316010h11b1
tgnttgttcatcggctcccttccaggcttctcagggggtttgtttttacgtctggccaaactgctgatctctttgttggcttagcgaaaggcgaagtcgtactcagctccttgctaaatggccatggctgctcgtgcgagcgctttgaattagtacggtgctttgacgatctgtttgaagcatgaatggtactgtattttgctagattgcggtgatgggtgctttggattgaacttgtttt

SEQ ID NO: 3542 - DNA, 268 bp, Triticum aestivum
  Clone ID: uC-tsro9316014a04b1
tgttttcgccgccgccgcagctatgggcgcgtacaagttcgtgtcggagctatgcaggaggaagcagtcggacgtgatgaggttcgtgcagcgcagggctctcggctcccaggccatagcagcttggcaagcctattgaggagaccaaggaagatgtgtacccgaggacccacaagtcgcctgccaagatacgcataattttgaaatctttcaataaccagaagaacaatctgaaggagcttgcgccatacatgcataaggtcgggct

SEQ ID NO: 3543 - DNA, 69 bp, Triticum aestivum
  Clone ID: uC-tsro9316014c12b1
tgtctgctcggtgatcagcaaaaaaaaaaaaaaaaaaaaaaaaaaaaaaaaaaaaaaaatactaatagg

SEQ ID NO: 3544 - DNA, 364 bp, Triticum aestivum
  Clone ID: uC-tsro9316014d02b1
tgtcacgcgtccgcccacgcgtccggagcgcggcgttcttcatcggcgacgacgcgccgttcggcatggcggcgccggagctgggcaggttcggcccgggcttcgacctgtcagcggcggactacgccggcgccatgcagcagccgccgccgcagaagcacgttggacccaactggttctactgaacaaccaaggaggaaccacccatgattagcatgtagctctaggccattagaattcataaggcttccattctcgatcagtccatggcgtcttgcaacctgtaaggatcggtcaaattcaggccatgttgagaacactggaattttttcacaaatcacaccgaaatcgaagttcttctttc

SEQ ID NO: 3545 - DNA, 196 bp, Triticum aestivum
  Clone ID: uC-tsro9316014h10b1
ttttggacgcgtgggaaaatgttgatttctttgattcgatctatgtatgcttccctagaccagttggggacacaaaccttgttcttctttccctatgttccctacgagttctttgtcgaactcataggcaaaggcatcgatcgatggattagttagcttaaaaaaaaagaacaaatacaatagatagaagaacaag

SEQ ID NO: 3546 - DNA, 115 bp, Triticum aestivum
  Clone ID: uC-tsro9316019a08b1
ttggattgcaagttgctttgtactgattttctgagaccctatcggaaggatattgtatacctcttctggtccttgctacctatatatttgctaaataagcaaacatactattctt

SEQ ID NO: 3547 - DNA, 88 bp, Triticum aestivum
  Clone ID: uC-tsro9316019a09b1
taaaataataattattgtaagaatgtaacttggagcaatagatattaaatgttacaatggtgtttctcacggttccttttccaacatt

SEQ ID NO: 3548 - DNA, 301 bp, Triticum aestivum
  Clone ID: uC-tsro9316019d12b1
tttcatcatccctgataccaaagctcatcttcttctccttgaaatctttttgggtccacagatttggaggatgtcttgcaactgcggatcaggctgcagctgcggctcagactgcaagtgcgggaagatgtaccctgatctgacggagcagggcagcgccgccgccgaggtcgccgccgtggtcgtcctcggcgtggcgcctgagaacaaggcgggacagctcgaggtggccgccgggcagtccggcgagggctgcagctgcggcgacaactgcaagtgcaacccctgcaactgttaagct

SEQ ID NO: 3549 - DNA, 99 bp, Triticum aestivum
  Clone ID: uC-tsro9316019e02b1
tatgtgtttttgatcgcgagctcgagtgtcgctctgtccgttgttaattagagctggttacgcgaggaagaaacaacatgtgttatctttcagtcggtc

SEQ ID NO: 3550 - DNA, 327 bp, Triticum aestivum
  Clone ID: uC-tsro9316019e10b1
cagaaatagaaccaccatccaatctttattcatagaaccaacgacacacgagacagaaataatacacgcagcaatgtatgatacaaaagaatattaagcaacggagtaacgcccacgccccactcagacgaacacaacacaacacaacccatcactactcgttactactgctccccctaaactcagaagcgaagtgaccgtcgccgccggacgagcgacgacgcaccgccaccgccgccaccaccaccaccagctcaccgcctactgtgcgacgagcagggacagcacggcggagcaggccacggccagcgccgacgcggcggcccc

SEQ ID NO: 3551 - DNA, 171 bp, Triticum aestivum
  Clone ID: uC-tsro9316019e11b1
tttattctgttgtcctctaacctttgtacgttatgctgtataagatctgattatcaatttatctgttgggaatctacccgcctatgggtttcctaggaatacagacagaccaggtgaatgccatggatctttgtttgcgctgatgcagtttaactggaatagtgggctttc

SEQ ID NO: 3552 - DNA, 322 bp, Triticum aestivum
  Clone ID: uC-tsro9316019f12b1
tccacgcgtccggaacaatttgtggttgcgatgcaagaactatttgagaagtacaagacaaaagctggatatgacaaactcgaattgagggttctatgatggccgttccaacatccagacataggatctttcaaagttgcgtttacagggttcggtagcattcaaactggggtgtgtttatgtcaagccttcgccaggattcagtagctctgaatgtgtaggaaatcccagcagctggaatgacttgctcacctggccttgcagaacacataaaaatgtaaaaattgtgttaataaaaaaaaaaaaacaaaataataaacag

SEQ ID NO: 3553 - DNA, 360 bp, Triticum aestivum
  Clone ID: uC-tsro9316023e09b1
tgtccttcaacatcaccggcaacccagaagtcagggtcaacaagatggggagggcagcaggagtgcttgagaaccatgaggagggcaggcgctacgccgagcacggtctcagagcctatgtgcaggacaagacccccgagatcatgccaggaatcaacaagttcttcaccagcccgaaatgaagcactttagtctctctgtgactcgctattagcaactgttgtggtcaagtgcaaacctatttcaagcattcagtaatgttgtcgcgtccataattcagaggatatcataaagtacctcttattgaaagaaccatgtgatgtttgatggctcgctatatatgtgatggctgatggcttc

SEQ ID NO: 3554 - DNA, 82 bp, Triticum aestivum
  Clone ID: uC-tsro9316023e10b1
ttctcttcggaatatcctccgtgaataaacacctgtagtgattgtgcgtggctgccaataatgtgagttctcttgtccacgc

SEQ ID NO: 3555 - DNA, 78 bp, Triticum aestivum
  Clone ID: uC-tsro9316023g05b1
ttccacgcgtccgcttgtttctccagcagcatagttatgatttattatgaataaatatgagttctattttctctagca

SEQ ID NO: 3556 - DNA, 209 bp, Triticum aestivum
  unsure (1)..(209): unsure at all n locations
  Clone ID: uC-tsro9316024c03b1
cgtcntttagcttgtacgcctgattttgacagtatgatgctctgccccctaccattatattgattcagaaagagatataacctagcagaagtgcaacggaagttgttgtactcggacatcaaaaaggaagatattattgcgttgcgcgtgttgctaaatttgtatcgacgagcgtacaaataatggaacatatcaaagattttttgttt

SEQ ID NO: 3557 - DNA, 122 bp, Triticum aestivum
  Clone ID: uC-tsro9316024c04b1
gcctgattttgacagtatgatgtctgccccctaccattatattgattcagaaagagatataacctagcagaagtgcaacggaagttgttgtactcggacatcaaaaaggaagatattattgc

SEQ ID NO: 3558 - DNA, 244 bp, Triticum aestivum
  Clone ID: uC-tsro9316024c07b1
cttgttcaggaggcctgcgcctctttcgatctgtatccttgttggtgctagccttcttaaggcatactcgtttaacttatgtctgtactcagatattgttgcttccgctgactcgtctatgaccgagcacttgtattcgagccctcgaggcccctggcttgtattatgatgcttgtatgacttatttaaaaaaaaaaaaaaaaataaaaaaaaaaaaacaaaaaaaaataaaaaacaactaatg

SEQ ID NO: 3559 - DNA, 122 bp, Triticum aestivum
  Clone ID: uC-tsro9316024f12b1
tctgctccgacccgcggtccacttgcctgggcccctccacggtcgctctggcaggcctcggcccaggcggtgccctcgtcgacatgaccacctccgaccccacactcgccggcgagatagcc

SEQ ID NO: 3560 - DNA, 401 bp, Triticum aestivum
  Clone ID: uC-tsro9316029e07b1
tttgtaccacgccatcaccatcgtcggctactgcgagggtcctggcgagggaaacaagtactggattgccaagaactcatggagcaacgactggggtgaacaaggatatgtctacctcgcaaaggacgtgccctcgtccacgggcacatgtggcctcgccacctcgcccttctaccccacggcttgaccacaggcagcactatgtgtgatatctaaggaattgcttccgtttcgttgtgataatgctaaattactatttttgttatacttccctttaatttgatcaataatcggtagaccgtgcgtgcgatagcatggcctgagtgtaataaatcgtcgtgtgaattacactttctacaagttaattgtacatttgtgacacatatttaccgatttaacgg

SEQ ID NO: 3561 - DNA, 173 bp, Triticum aestivum
  Clone ID: uC-tsro9316029f11b1
tttacgcgtccgccggcgccggcgcggccaacaacgccgacaccttggtctccacctcctccttcttcacctggctcgcctccaccggcgggccggcggcgggaaccacctccaggtcgagccgcgccgccctgccgctgccgccgccgctcctgctgggcggcgtggcgaag

SEQ ID NO: 3562 - DNA, 88 bp, Triticum aestivum
  Clone ID: uC-tsro9316029g11b1
tttcctcacgcgtccgcgtcagtactgaaataaggaattgccatgtaaactttatacatagtacacatatagttgcttctttagtttc

SEQ ID NO: 3563 - DNA, 189 bp, Triticum aestivum
  Clone ID: uC-tsro9316029h10b1
tttgttgctgcggtggtaagcaactatatgtggaaacataccatgtcttgctcatccagaaggttttctgccttaaacctgttcgtcaactcagccccgctcaaatcagcattttgaagcgcaatctgggtagaacaaggagcaataaaatatcagtgccaaaataaaaaatcaaagaaaaacaatttg

SEQ ID NO: 3564 - DNA, 290 bp, Triticum aestivum
  Clone ID: uC-tsro9316030a09b1
tctgcactcgctatgaacaaacaggagatgactagtttccgaggcgacagttttgcagcgctggaaaccgtagctagggtcgaatgatgttgccgtcccctgttaattcgtttaggttgattgatattcttgtactgctagtcatgttctttgccaccgagaaatttgatcggtggctgtgttggtctcttgacattgtatttcgcaagcaagataggccttttccctcgccttcaatgctgataaataaactggagccccacctttccaaataaaaaaaaaaataatgt

SEQ ID NO: 3565 - DNA, 277 bp, Triticum aestivum
  Clone ID: uC-tsro9316030d01b1
tttcagtgcaggcccctgtcgaaaaccgtgagattcaatgtcctgaaggtcgttccagctggaaccaccggaggcgggaagaaggctttcgtcgctgcctaagcccagactctgattcatgagtagttcatagtcagaactttttcgcacttgaaatctaccaggctgctgtttcgagatttgattccgtgttatctgtcaaaccgaatgtcgtgatctgaacatgttttgtggaatctatctatcattaatagtttcgctttaattgtactgcctt

SEQ ID NO: 3566 - DNA, 107 bp, Triticum aestivum
  Clone ID: uC-tsro9316030d04b1
tcacgcgtccgttttattaatggcgcatcactggtgcgccattagtataggccacggtgcaccattagtataggccactggtgcgccattagtataggccacggtgc

SEQ ID NO: 3567 - DNA, 175 bp, Triticum aestivum
  Clone ID: uC-tsro9316030d11b1
ttcccacgcgtccgccggcgccggcgcggccaacaacgccgacaccttggtctccacctcctccttcttcacctggctcgcctccaccggcgggccggcggcgggaaccacctccaggtcgagccgcgccgccctgccgctgccgccgccgctcctgctgggcggcgtggcgaag

SEQ ID NO: 3568 - DNA, 364 bp, Triticum aestivum
  Clone ID: uC-tsro9316030h11b1
tggacaaaatcaaatggcagacaaggacgaagacttgtccaacatagctgaagaaattcgactcctaggccttcaatgggagaacatccgtcaaactatccctatcaacaatccttcacttgacagatccaataccatcaattcacaacctcctgtattctctttaccaccattctcccaacaacttacccatgacctgtctactgaaaccagcgaccaagaagactccttggccaggaaatccatgaattctgttgcttcctcgagcgcttcgtccacagatgagaaaaattaaacagagtatttttagagggtagcgagagcaaaaagaaataatgttattgaaaaagaaatttaatattac

SEQ ID NO: 3569 - DNA, 304 bp, Triticum aestivum
  Clone ID: uC-tsro9316031g12b1
attggggtgacgaaacgcgtggataaagaaggtgcgatttgtaagctcttgccagttgcaacccaaaagggtatgaacaattacaaaatgcgggaacggaagggacgacggagcagaagcgcgggatacgagaaggaacgaattggcagcccggactgattgttggagtaaacgtacctattgcaagtctgacgcggtggacggcgagccgtccgggagcctggttagacgacgcggttgcgctgtattgtcgatgcgatattgcaacttgtattgtgttgttgtggtgttttgcagagcgctg

SEQ ID NO: 3570 - DNA, 86 bp, Triticum aestivum
  Clone ID: uC-tsro9316031h11b1
aactgatcgaggcggccgccgggcagtccggcgagggctgtttctgcggcgacaactgcaagtgcaacccctgcaactgttaagct

SEQ ID NO: 3571 - DNA, 312 bp, Triticum aestivum
  Clone ID: uC-tsro9316032a09b1
ttctcaattttggcgagcaatatttctagccgaggtagagtaaatttactggttgctatatattatgatcgggtaggatgaggatgagattaggttccagctgaagaatgagaggtggaagactggtaccatttgtatagcttgtgtgataaaaagactaagacattttgggtgtacactcctccgtgttggtgttgccacccgtgaacataaacactgcctgtatgttatatgttacactttgtgttcagaggtttgggttttgtacctggaagaatgcttttgttgaacgaacggtgtatttgtatctgt

SEQ ID NO: 3572 - DNA, 164 bp, Triticum aestivum
  Clone ID: uC-tsro9316032b12b1
ttctattttctctggactattgtctcctgctgtgtgtaataagataattggttaagtatgtaagctgttgaacatctaagtgcgtagttttcgtgcggctgtggtgcatgttgatgtatgcatctttttgtgtccaaatggaagaatatgcgggtacaaggcat

SEQ ID NO: 3573 - DNA, 334 bp, Triticum aestivum
  Clone ID: uC-tsro9316032c01b1
tttgaaccggccccgtgcccacaagtcgtcacgcccttgatggaagcaggcgtgcgatagattatcattcattcatcaaacaatggcagcactccactttttttgctatgtaaagaagatgcaactggtgtccacccctttctcatgaagattgtgttctatatctatctatatgtatattctttgttcttcaagtccatatgtaatcgatttaacgaccacttgcagtatcgtcaggacatagttacagtttgttgtgtatttattctaaactggcagaataatggttgtccagagcttgtgcagttatgcccaattgagatttttttttatc

SEQ ID NO: 3574 - DNA, 144 bp, Triticum aestivum
  Clone ID: uC-tsro9316032d11b1
tttcgttgattccgtcaattatgtataagctacaaatctccttattgattggtatcattttctaatcttcaaatttgtaataatagtgttccccacttgtatgaagtatgagccctttttaatgtcactaaactgagttgcaat

SEQ ID NO: 3575 - DNA, 56 bp, Triticum aestivum
  Clone ID: uC-tsro9316032f03b1
aaaaaaaaaaaaaaaaaaaaaaaaaaaaaaaaaaaaaaaaaaaaaaaaaaaaaaaa

SEQ ID NO: 3576 - DNA, 75 bp, Triticum aestivum
  Clone ID: uC-tsro9316032g12b1
tttctgacgcgtgggcggacgcgtgggtgcgatggtcctcgcggatgctgacgcaatgtgatttccgcccagtac

SEQ ID NO: 3577 - DNA, 183 bp, Triticum aestivum
  Clone ID: uC-tsro9316032h09b1
tgacaagtgctaatcgcactgtatgctaaaatctatgcggtcgtcagtatttttgctctgctctatggttgtcagtcgactctccaatgttgtgtcggtaactatcagatgttgagtgtcttgaaaactttctgataattgcgggatttgctttgtaatggtaatcgtgaaattggtgtggtt

SEQ ID NO: 3578 - DNA, 107 bp, Triticum aestivum
  Clone ID: uC-tsro9316033b02b1
ttctagctctctcctagcaccagagtcatctttgctagttcattgctgcagcatccgtcgaggaagcaaatggcggttactctgaagctcaggatcctcgccgtggc

SEQ ID NO: 3579 - DNA, 245 bp, Triticum aestivum
  Clone ID: uC-tsro9316033c05b1
ttccggcctcttcgtcatcgtgtgtggttggtagcaataagctgcggggccgttcgtgccggccccgtgatccgcgtgcgccgcgccggacgcggagatgtactactagatgagttcgtgctgctggtggtggcgaaataatcgggacctgatttgtactgtgtgccattagtgagagttgtgattagttgcggtggctgttttgtacgttgatgatgtcgatatggcatctccatttgtggtgg

SEQ ID NO: 3580 - DNA, 297 bp, Triticum aestivum
  Clone ID: uC-tsro9316033d06b1
ttttcgtgctcaggaagatccccaggggcaaaggtgccaccaccgccgcacacgggacgacggccaacaacgtgcacgggtggcatcgctcacacgtcaactaaacctgcccagccaacaacatgtcactgctaactaacctgtaataaagtacagtacagagtgagcgagctgcagacagacgtaaatcaaggttcagaacaaggcctgaacgaaccaacatgcagagagcgagcagctctgcagacggatgtcgatttaggttcagaataagacctgaatgtaaggtgtttcgtt

SEQ ID NO: 3581 - DNA, 219 bp, Triticum aestivum
  Clone ID: uC-tsro9316033e05b1
ttatgaggaagaggaggtcctgaacatttctcccgcacattgtagataccaccaccgccgccttgtaggaattaagctggcaccgttccacccttgtgtatttgtttttgattgtatgtgcacttgttggatgtgcagacgtgtatttgctcttgtgagtatgtgactggatgatttctggatttaatcagttaattgagagatttattgatttttttc

SEQ ID NO: 3582 - DNA, 142 bp, Triticum aestivum
  Clone ID: uC-tsro9316033e07b1
ttgtaaaaaaaaaaaaaaaaaaaaaaaaaaaaaaaaaaaaaaaaaaaaaaaaaaaaaaaaaaaaaaaaaaaaaaaaaaaaaaaaaaaaaaaaaaaaaaaaggaaaaaaaaaaaaaaaaaaaaaaagggggcggccgttttaa

SEQ ID NO: 3583 - DNA, 453 bp, Triticum aestivum
  Clone ID: uC-tsro9316033f06b1
tttttcagtcaatgaaccttctcttgataattgctttgtctcatcgagttatgatgccactactcactttgagacgactgtgacagatgttcttaatatgtacacactgattactggaaagactgttgatcttagcgttgatctcagtgctgccagcgctgcagaagagtactagatctcaaacccagaattttcttcaagacatacttcctggaggacgaggaacaccaccggaatcctactgtgtgatggtcacgtgtgacatcagctgcgtactgcgtagggttccaggtccacgcctgctaccagcactatgcgaaattattatctttggaatggtgctgggttccttcgttaacttccatattgatccactgggttgtaaacgttattctatcataacgatggctttgacatgttaatgttccgcttgtcgatgtattctacagttat

SEQ ID NO: 3584 - DNA, 406 bp, Triticum aestivum
  Clone ID: uC-tsro9316033f07b1
tgtcttgcctcaagccgtggctggatgagaacaactcatgcccgatctgccggcacgagctgaggacggacgaccatgcgtatgagagccggaaggagcgggagcgagaggaggaggaagacaggaagggagcggccaatgctgtcaggggtggggaattcatgtacatctgatatctgaaggggaatcactgtttctgctagcgagcaaatcgtaatgtgaccaatcttcttatctgctcggtcgtcatgcctgaaattaagcatgtcttgtgttgttcccagattcaccgcgtccctagtttgtcaccagctttatcaaccccaagtcattagaatttagaaagcttgccatagttcacatcacatatgaaatggatactcttggggagcggcaatgcataact

SEQ ID NO: 3585 - DNA, 321 bp, Triticum aestivum
  Clone ID: uC-tsro9316033g09b1
tgttgatccatgtgaccgtctttttcaacacctctacgttgggtcctggaggaccaatcagtatgaaagtgtcatgtcgtcattcctactggtctattttatgcctaagacatgcaaagttgtggatcgtctgtaagctaccatgtgctatcgtatctcctatgcctatgatatttgctagtaaacctatcgtgcaacgtgctttctatgtccgtacattgttaggtggcttcttattgtgtgcatacaaatgaaccttatttctgaatgattcttcattagtttttttatttttatcatggttgacataagaatgagtgc

SEQ ID NO: 3586 - DNA, 320 bp, Triticum aestivum
  Clone ID: uC-tsro9316033g10b1
tttgatccatgtgaccgtctttttcaacacctctacgttgggtcctggaggaccaatcagtatgaaagtgtcatgtcgtcattcctactggtctattttatgcctaagacatgcaaagttgtggatcgtctgtaagctaccatgtgctatcgtatctcctatgcctatgatatttgctagtaaacctatcgtgcaacgtgctttctatgtccgtacattgttaggtggcttcttattgtgtgcatacaaatgaaccttatttctgaatgattcttcattagtttttttatttttatcatggttgacataagaatgagtgc

SEQ ID NO: 3587 - DNA, 276 bp, Triticum aestivum
  Clone ID: uC-tsro9316033h05b1
ttggggcacgagctcgacgtccctgctttccgctgcggcggagcttggagttggaagcaagagcggcgccaagaagatggaagccgacgctgcgttgtcagtgcactcctgagctgcatctcgccattgtcaagttattataggatttgtgttctgttccgtacaacaattcttttcaacagtcgataccaccatgtcgaagtagccaattcatccttgtaatatgatgctagcttatatataaacaatgaagtgtatctttggcgtcacttcacg

SEQ ID NO: 3588 - DNA, 81 bp, Triticum aestivum
  Clone ID: uC-tsro9316034b03b1
tttaattgtttgtctacatgtgtaaatgtgctgcaaaccaattttctttgatttgggaaaataaagttacatttttgctgt

SEQ ID NO: 3589 - DNA, 333 bp, Triticum aestivum
  Clone ID: uC-tsro9316034e03b1
tgtttcttctgcggcgagccgcaccggtgcctcgaggtgccccacatcgacgaccggcagaactgcatcgccggacgccccgaccagcggcctggcgagcagtgcatcgagttcctccaccggccgccggcacagtgtgctgcgcacgggcaatcgtcgccaccgccgatgtacgcgcctccaccgccgatgtactgatacgtggcagacggcaatactgcaatttgtaactgtttgctgcctttgtgccgtgagaaagggtaaaaatgcacacatttggtatatactgtaatctttatttttcggaaacaaatgaaataacaatggattggt

SEQ ID NO: 3590 - DNA, 331 bp, Triticum aestivum
  Clone ID: uC-tsro9316034e04b1
cttcttctgcggcgagccgcaccggtgcctcgaggtgccccacatcgacgaccggcagaactgcatcgccggacgccccgaccagcggcctggcgagcagtgcatcgagttcctccaccggccgccggcacagtgtgctgcgcacgggcaatcgtcgccaccgccgatgtacgcgcctccaccgccgatgtactgatacgtggcagacggcaatactgcaatttgtaactgtttgctgcctttgtgccgtgagaaagggtaaaaatgcacacatttggtatatactggaatctttatttttcggaaacaaatgaaataacaatggattggt

SEQ ID NO: 3591 - DNA, 369 bp, Triticum aestivum
  Clone ID: uC-tsro9316034f08b1
tctaacagagctggccaggaggaggttgaagaaagtgacagtcaaaataagtggaaaccatgaccaagaagcactcgctgcggagcctttttccgagtttgtgatatagtgtagtttctatctgtgcccgttttcccccttaaggctcacgcgtagcacgctcactcacagatcatcagtttcctgtaaatgtaattatatgtaatttttggcctcttccctaacctatcatttttttttcttgctttacttaattatagagtggggaatctgatgggtgcaaaacagtactgtcggacaattgattcataattatattgtggttgtaagatattatctatagtaataaagttaatagttgtttccctc

SEQ ID NO: 3592 - DNA, 140 bp, Triticum aestivum
  Clone ID: uC-tsro9316034f10b1
tctgtgcttttgatatccctactccgtgctggatatgtcgtattacctaattttgaaacaggggtgttctcttggggtttatttggataataagattacaaagaactagttcttgttaaattcaatttctaactgaatct

SEQ ID NO: 3593 - DNA, 209 bp, Triticum aestivum
  Clone ID: uC-tsro9316034g06b1
tgtggaaatcgcgaagaggttgcccaagccaacggcgtcctgataaataaatagctctcgtgtactatattgagatggagtgacacgcttacaagtctgtaccatgtaatgcatgtaaatgcccgaggttaaactgggcatttgattggaaatcgaggataatgtaaagctagcttatatttcattgtgttaaagtgcaagtattgcgc

SEQ ID NO: 3594 - DNA, 58 bp, Triticum aestivum
  Clone ID: uC-tsro9316039c07b1
tgctgtttgcccacgcgtccgcccacgcgtccgaacggtgcctgcctcaatgttcagc

SEQ ID NO: 3595 - DNA, 204 bp, Triticum aestivum
  Clone ID: uC-tsro9316039f06b1
ttatttcatgtaaaatttcctgtgagtttagaggagctaaccatcttatgcttttgttcacatctgaggagtggaacataatgttattgatgtaaattttctgtaagataattttggcacatacgatccttatctagacaaatctaataataaataagaaaatttgacgatttcagactataaaaaaaaaaaaaaaaaaattag

SEQ ID NO: 3596 - DNA, 96 bp, Triticum aestivum
  Clone ID: uC-tsro9316039f10b1
tgtctgttcgtgccatggtggatgtagtgttcctgatctgatgtcacctccttgctgtcatcagtaactgaaatgaaaatgtttgttatctgttct

SEQ ID NO: 3597 - DNA, 394 bp, Triticum aestivum
  Clone ID: uC-tsro9316041a03b1
tttttggtacaaggagcagccgctgatcgtgcgagggccgggcgcaggcgcggaggtgactgccggaggcgtcttctgcgacatcctgcggctggcgtcctacctcggcgccccctcatagacatctgcgcctgtattggtagattttctggggtagacggacggcaacttgtactcttcttgcacaatattggacttggtagcattttgttctgaatgcttgcgaggaaagcaaataaggtgttttgttttgtttgccagtgtgctgttccttgttagagggtgtagggatcaggtgttttgttttgttttgtttgccacccagtcccaggccatgccacaactgttactaaattatcaatgtaatactaaagaagggaatgcctttttctac

SEQ ID NO: 3598 - DNA, 245 bp, Triticum aestivum
  Clone ID: uC-tsro9316041a07b1
tctgtttataggccaacttagcacaaggcctatttaccactgagtgttttctcagttgcctgcagcagtcgacttgtcaggtgttcaagtggtgccagagaggattcttgaacgcaagatggtgaaacgccacaacaaggtgcaggtccaagtgttgattcagtggtctggtttagcagctgaagcagccacctgggaagactatgatgtcttgaagaacaggtttccggacgcaccagcatggg

SEQ ID NO: 3599 - DNA, 316 bp, Triticum aestivum
  Clone ID: uC-tsro9316041c01b1
tttcttacgcgtccgcatcatcatccctgataccaaagctcatcttcttctccttgaaatctttttgggtccacagatttggaggatgtcttgcaactgcggatcaggctgcagctgcggctcagactgcaagtgcgggaagatgtaccctgatctgacggagcagggcagcgccgccgccgaggtcgccgccgtggtcgtcctcggcgtggcgcctgagaacaaggcgggacagttcgaggtggccgccgggcagtccggcgagggctgcagctgcggcgacaactgcaagtgcaacccctgcaactgttaagct

SEQ ID NO: 3600 - DNA, 346 bp, Triticum aestivum
  Clone ID: uC-tsro9316041d11b1
ttgttctgaaattcaaacagccaaaaaatccaaaatgtgtcccatttgtaccaacaaacggggaaccgccaaaccaaccacggaaaccggaaaactctcgacccccgttccctccgatctgccaaaacccattgttccgagtgaaccggaaaaaaattctcgcggggttcgcgatcccaaggaccaatcgatgagcgtatccggcgagttacgggctcgtggtgcagggagatcctcttaacgatatatttttttttgcgttttcaaggagttcgataaggaactcggttacttcacgtttcaaaacccactatgtatgacacgcaccgtattaaataacacgtcg

SEQ ID NO: 3601 - DNA, 270 bp, Triticum aestivum
  Clone ID: uC-tsro9316041f11b1
tttcgccccctccaccgccaagctcgcctgatccgtcagattcaggaggggttggtggctagagctcgaagggcgctgtgctcgcaaggatcattaatgttgttcttgtatgaacgaaacatctgtttgaattcggcataaagttaactctttctttcttggtcttgttcccctccgccttccctcctttggttcaagtttaagtttgatggaataaggaaccagctgtcttcctatactctgacgagtgaaatggcaagcttgaagttt

SEQ ID NO: 3602 - DNA, 273 bp, Triticum aestivum
  Clone ID: uC-tsro9316041g11b1
tgttttcccacgcgtccggcggcgaaaataaccatcttagttattggtttccatttgatatggttgtgataggaaaggtatgcattgccaccgtcgaacctatgtgccctcagctcagtttcaccaatgtagtggagaaaatgatgaaggtggttgttctgtttttgttttctattgtcacttgggaattgctacgagaggaaccatattactgatatataatttgcttgctaccgaaatttgttttttgatgctacatttggtataccacct

SEQ ID NO: 3603 - DNA, 346 bp, Triticum aestivum
  unsure (1)..(346): unsure at all n locations
  Clone ID: uC-tsro9316043c01b1
ttgtttcaactccagggtgatcagaggaagaacgtctcaaacttccttgtccaggccggcattgtgaagaaggaacacatcaagattcatggtttctgagcaactgccagctccatatcagagtctacatgcaaagcagctatatattggtggtgcagtatatttagttgtgtgctagcgctagcaggcgttaccagcttgcgcgctctgagtatacagaaaatctagcatagcccacctctctgcgtgtatgcttgttaccgntgtgttgaaactttgtaaggagcaccgtctttagatggcttgttaccctctcccatcaaggttgaataatatatgctttgtt

SEQ ID NO: 3604 - DNA, 73 bp, Triticum aestivum
  Clone ID: uC-tsro9316043e06b1
tcggtgcccgctacttcaaagaagcaagcacacggcctccatggactccaagatgttgcgctctccggtcatc

SEQ ID NO: 3605 - DNA, 392 bp, Triticum aestivum
  Clone ID: uC-tsro9316043e08b1
tctgcccacgcgtccgggcaagtacgagaagaaggtgtacgtcctccccaagcacctcgacgagaaggtcgcggccctccacttgggcaagctcggcgccaggcttaccaagctcaccaagtcccagtctgactacattagcatcccagttgagggaccttacaagcctgcggcctaccggtactagtgtgtccagcgcgactagcggctggcctgagcctgagtccgtgcagcggcaccaacgggaactctatcaactatcctgtttcccttctattatcttacatgctgtctcttaggcggaggatttgttattatggttatgttttgagccgtgtgagggttgggagaggcggcgtttgcttttgcccagaaataatggcattattatt

SEQ ID NO: 3606 - DNA, 122 bp, Triticum aestivum
  Clone ID: uC-tsro9316043e11b1
tttttgagcatgccttgccacctcgcccttctaccccacggcttgaccacaggcagcactatgtgtgatatctaaggaattgcttccgtttcgttgtgataatgcaaaattatatttttttc

SEQ ID NO: 3607 - DNA, 208 bp, Triticum aestivum
  Clone ID: uC-tsro9316046a01b1
tttgtcgcgtcatcatcagtaagccagtttagtttcattgcgctatcttgtccttgagaaattcagggtaaacagtgtgtgcgagtcagtcagtcaggaataatctcatccttctcttatcttggtgtatgtatgtacgtcctcaattatgaatgcttctattccatggtcaagattgatgtttgcacagaacaacaaaacactgatg

SEQ ID NO: 3608 - DNA, 336 bp, Triticum aestivum
  Clone ID: uC-tsro9316046a03b1
tttcttacgcgtccggagaaaatatcaccaactttgaggaaaatgatttccagatcctacgtgtccttatgacagtcattgacacatcaaccgacaccactgctcttgcggttgcctgctatgacctctcacagttccttcagtaccacccttctggccgcttagtggtggcagacctcaaggcgaaggaccgagtcatgaaactcatgaaccacgacaatgccgaagttaggaagaactccctgctctgtgtgcagaggctcttcctcggcgccaagtatgctagcttcctgcctgatgtgtaaaaaaaaaaaattatacataaaaaataattat

SEQ ID NO: 3609 - DNA, 159 bp, Triticum aestivum
  Clone ID: uC-tsro9316046b12b1
ttgtcttctttcctttacaagagaacggcactctgttttattttgtcttgtgggttaggaagaagcccactgaacaatctttaatttcctttctaccgaaaaaaacatggataaaaacatgaagagaggtcatggaaagtttttaattcaagtgtttgt

SEQ ID NO: 3610 - DNA, 139 bp, Triticum aestivum
  Clone ID: uC-tsro9316046d11b1
tgttttgtatacatatgcttatatgtagcacaagttgagttttttttactagcaaggcgagataaacttcttatcgttcgagttgacgcccacctgtatatacaacccttgattcaattgcatttattgcttagatggg

SEQ ID NO: 3611 - DNA, 208 bp, Triticum aestivum
  Clone ID: uC-tsro9316046g12b1
tgtttttgaataacgagcgtctgatctgatggagtcgagcaagggtgcgtgtgcgtgtgcgtgtggtttgcttgctcgctctcccatgctctgcccatggtgtccttgtgtgtatgtgtgtgtgcatgtgtccctgtaattgcttcatctatccccactatggatggagtgatgaatatgtaagaatgaaagatttacctaattaact

SEQ ID NO: 3612 - DNA, 298 bp, Triticum aestivum
  Clone ID: uC-tsro9316046h03b1
ttttttatggctcagcccccacctcatggaccagccccgccggtggcttgacgacgccgtctgccaggcctcccacttactcttcaccagctaggcggagcatctggagtcgatcggataggaaatgaatcttcttcttagctgttgttttgtcttatctcccccgctgctcatagagtcaggattcaagaaaagaaagggcactgtcgattggttgaatgatttcaatgtgtgctctcccgctctctgatgtatcccatgggaatgtgtgttaatcgacatacgcttcttaattttc

SEQ ID NO: 3613 - DNA, 107 bp, Triticum aestivum
  Clone ID: uC-tsro9316047a01b1
tttgtttgttataactgaccaccaaaccaaaccaatctcagttatttggagagatactaaatactagcaagtattatactaattagttaatgtgaagaaggtactct

SEQ ID NO: 3614 - DNA, 285 bp, Triticum aestivum
  Clone ID: uC-tsro9316047a03b1
tttctcttcgcgttcgggactatcattggttccataggacaattagattctgggctatggcttctggttgctgattaggtttagattatgtgtagggattattgtgcatcttggttgcccttgctaattaatggttagatctcgttccccccctccgactatcagtcagccttggatgtatcatatcgtgattccttcctttatggtagaactggaatttcttggattcaaaaaaaaaaaaaaaataataattaaaaaataaaataaaaaaaagggcgttctttg

SEQ ID NO: 3615 - DNA, 407 bp, Triticum aestivum
  Clone ID: uC-tsro9316047b01b1
tttcgttccctatgagaaacgtatcactgagcttcttaaggttggaaaggacaagcgcgcactcaaggtcgccaagagaaagcttggtactcacaagagagctaagaagaagagagaggagatgtcaagtgtccttaggaagatgaggtctgctggtggtggtggtgctggtgacaagaagaaatagagcgtggctagtcggtgaattttatcccaaaactctgtcctgtattaccagtccgtacctttagagctatctatggccatagtgttggattttggaattaagcccgtggtttctattttgagaagaccaatctttttaagatatttatgtcagattggtgcctttgttttattgttacttgctttgtttgattacttgatacccagctgtttattcggtt

SEQ ID NO: 3616 - DNA, 260 bp, Triticum aestivum
  Clone ID: uC-tsro9316047b08b1
ttcccaaagtaagatgcttatatatgttgtggattgttgtgtgctcgctctaaggatgcaaaaataaaggagtgccttgtcattttccaaacaaaagtcctgggtagatcatagaatagcaaggcggttatgccttgttaccttttgatacccgtggaactttcttttggaaaaaatagtatgcagatagagtgcttatcatatatgtactgtgtacaatatcatacaccataatatcaagtcatgtatttgttatccga

SEQ ID NO: 3617 - DNA, 396 bp, Triticum aestivum
  Clone ID: uC-tsro9316047c12b1
ttttctctccgcccggccgcccgactttgaccgcctcctcgtctccgctcccacgcccgcgggagagaggcgaccggcggcggcgcgcgaggaggggcctacccacccatcccaccaccccgccggcgaagatgttcggccgcgcccccaagaagagcgacaacaccaagtactacgaggtgctcggggtgcccaagaacgccgcccaggacgacctcaagaaggcctaccgcaaggccgccatcaagaaccaccccgacaagggcggagaccccgagaagttcaaggagctggcacaagcctatgaggttttgagtgaccctgagaagcgtgagatctatgatcagtatggcgaagatgctctcaaggaaggaatgggtggaggaggaggtggtg

SEQ ID NO: 3618 - DNA, 354 bp, Triticum aestivum
  Clone ID: uC-tsro9316047f01b1
ttttcttgattgatctcgggacgggaaacaacaacaagatcaactgggcaatgaaagacaagcaagagtttgttgacattgtggagactgtctacagaggagctcgtaaggggcgtggtctggtgattgctcccaaggattactccacaaaataccgttactgaggtatctgtgcctggctattcatgtgaagtgtgtggcctgctctgttccgtgatatgcgctgtgtgacccttgatgtaatgtctgtcaactttgaaagtgtcgtaactatgtatttgtatcttgaatatcaacatgtcataaacctgtaaccctttaaaacaggacctgctgtctattggtattactgct

SEQ ID NO: 3619 - DNA, 266 bp, Triticum aestivum
  Clone ID: uC-tsro9316047h06b1
tttcgctgacctggctagtaggttcggcgtctctatcggcatggaaaagcctccgacgctgtttaggaaaaccgccttcaagatggggttaaagggtgtaccaggaattcggataagaaaatgaataaccaagctacattttatctcccattctgtaattcgtcttatttctaattttcactacatcaagtctgaaactgatcgatgacttgttgactggctcaaacgaagaacgactctcacatttttcttacggccttacactc

SEQ ID NO: 3620 - DNA, 126 bp, Triticum aestivum
  Clone ID: uC-tsro9316048b07b1
tttttcggcagcttttacatttgaatggaaaaaaaaaaaaaaaaaaaaaaaaaaaaaaaaaaaaaaaaaaaaaaaaaaaaaaaaaaaaaaaaaaaaaaaaaaaaaaaaaaaaaaaaaggggcggcc

SEQ ID NO: 3621 - DNA, 344 bp, Triticum aestivum
  Clone ID: uC-tsro9316048b08b1
tgtcgttcgcccacgcgtccggtgcaacagcgcggtgtggcgcgcgctccgcgacgtgccggccgtgtcgcccccggggccggaggagaaggcctgcaacccgtgggcggactgcgtcgccaagtacccgcccaaggcctacgtctgacgatacattactacgccgccgccgcatgactccacacgaagattacatgattcttttctcctatactttttctgcatttcgtttcccgtaggtggctgtaccttaggttccatgggcgagcagtgccgttgttttcagcttttgtactttaagtgtgaattataaacgacaaatatatacgacgaggtttcattcc

SEQ ID NO: 3622 - DNA, 226 bp, Triticum aestivum
  Clone ID: uC-tsro9316048f06b1
tcttggacgcgtggggtacagcgtagcaggattgttcatgttcatgagggcgatgtggtgcacttctgcactgaagcgccagtgcgcgagtgtgtatgggactatcatcggatttctggatgtaatgtaattttacataaataaacctggcttgctagttactctagcgtgaagcatgaagaggattatgccctgcttgcaagaattgtccgtaatgattcatcat

SEQ ID NO: 3623 - DNA, 170 bp, Triticum aestivum
  Clone ID: uC-tsro9316048f09b1
cccacgcgtccgcccacgcgtccgcccacgcgtccgcccacgcgtgcgaaaaaaaaaaaaaaaaaaaaaaaaaaaaaaaaaaaaaaaaaaaaaaaaaaaaaaaaaaaaaaaaaaaaaaaaaaaaaaaaaaaaaaaaaaaaaaaaaaaaaaaaaaaggggggggccgtttt

SEQ ID NO: 3624 - DNA, 134 bp, Triticum aestivum
  Clone ID: uC-tsro9316056b06b1
ttggtgacgtgaaacgatacgcggcaagtagatacgttaactctttctgtgtataccacgcattgtctctactctgtagtcttcccctaacttgatgtaacaacctatataatcctattctgtaatctttccct

SEQ ID NO: 3625 - DNA, 300 bp, Triticum aestivum
  Clone ID: uC-tsro9316056e02b1
tcgatcatccccgataccaaagctcatcttcttctccttgaaatctttttgggttcacagatttggaggatgtcttgcaactgtggatccggttgcagctgcggctcatactgcaagtgcgggaagatgtaccctgatctgacggagcagggcagcgccgccgcccaggtcgccgtcgtggtcgtcctcggcgtggcgcctgagaacaaggcggggcagttcgaggtggccgccgggcagtccggcgagggctgcagctgcggcgacaactgcaagtgcaacccctgcaactgttaagct

SEQ ID NO: 3626 - DNA, 169 bp, Triticum aestivum
  Clone ID: uC-tsro9316056f09b1
ttgcccacgcgtccgcgtcgatcggtcggtcagtcgagtcagtttgtggtgcgtgcgtggagctgtaaaagcgtggatgatctcgatctgggatgaccgacccagtcaatttgcttctgtaaaactgtgaattcgcccgcccgagtaatttcaagttcagttgagttgg

SEQ ID NO: 3627 - DNA, 216 bp, Triticum aestivum
  Clone ID: uC-tsro9316057b02b1
atcaagattatggcagacatgtcatcggctaaaggagcatgttgatatgacctggtttgcaccctgtatggagctttagtattcgtcagcagaaagaataattaccatacatgtatttccagctcgtaagcattgcttgtgtataatatttattccatcatcatttatattaccatttatatcacaagcaataagccctttgggcattcaagctct

SEQ ID NO: 3628 - DNA, 325 bp, Triticum aestivum
  Clone ID: uC-tsro9316057b03b1
cttcaggcatcagtatcttgtgttctcgtatgctgccaggcgcaggcaaatgctgtcatccttcgctgcaacggtctgatgtttgtgatgaatatctgaattggcagcatgccgtggtcatattagcacaagcttgaaaccctggtctagcgcactgattgtacggccacagaatatgctgtgacaaatgagtaccatgtaaacttaaatcagtatactgtaatatattatttgctttttggggggttggctgccctgcctaatgatggcgatgacactgcgcttgcagaactctcttctatacataatacactagctttactgt

SEQ ID NO: 3629 - DNA, 354 bp, Triticum aestivum
  Clone ID: uC-tsro9316057c04b1
tttttcgcaagccgtgcgcctcgctcttctgccgagcctggtcctcatcctctcgcctctctcccgccacacaggcttagcaatctagcgttagcgcctgcgtccatctcgtagctgcttcgatggcgatcaagaggaccaaggccgagaagaagatcgcgtacgaccagaggctctgccagctgctcgaggagtacaccaaggtgctcattgtcgtcgccgacaatgtcagatccaagcagcttcaggagatccgcaagggtctacgtggcgactccatcgtgctcatgggcaagaacaccctcatccgccgctgcatcaaggtgcactcggagaagaccggcaacaaggact

SEQ ID NO: 3630 - DNA, 253 bp, Triticum aestivum
  Clone ID: uC-tsro9316057e02b1
tcttttaattaaatacaagtaaacaaagaaaacatgcatcaaaccagtacttagtactccagttactagtaagtcgtgtaccaccagcaagtatgtctgtggatcgaggaggagtacgtacgtacgtgctagctcccggccggtcgtgtagaataaacggtggccaaagtgcatatcaatgtattagccaaaaaaatgctgctaaacttcaatatgaaataataaagtccaaggtttaattcctgttttcttt

SEQ ID NO: 3631 - DNA, 160 bp, Triticum aestivum
  Clone ID: uC-tsro9316057e06b1
tttttggttttcatggtcgcgtgagtgctactgtggtggtttgaaaactgtcggatcccggtgtaagtcctactgtgtggggttactgcactatctgttggttgaaaccgttggtgacgcgtccgtatcattataagtaatgaataagtgaacttcagat

SEQ ID NO: 3632 - DNA, 157 bp, Triticum aestivum
  Clone ID: uC-tsro9316057e11b1
tcggttttctcgttcgtgtgagtcctactgtgttggtttgaaaactgtcgaatccccgtgtcagtcctactgcgttggtttagtgaactatctgttggttgaaaccgttgctggcacatcagtatcattataagtaatgaataagtgaacttcagat

SEQ ID NO: 3633 - DNA, 125 bp, Triticum aestivum
  Clone ID: uC-tsro9316057e12b1
atttttatcgtttcttatttgttcgattggcaaggtgtgatgagttggttcttgatctagtagtaaagcttagctgtagcgactcataatcctcgtagctaatatatggaaagagtacattattt

SEQ ID NO: 3634 - DNA, 223 bp, Triticum aestivum
  Clone ID: uC-tsro9316057g09b1
gtgaacttttatctttttaacgttggaaggcaataattattgtagagggtggattttcccaacattcgtttttggtggaggcatcgaactccagaggttgtcgtaggttggcggcagcgttctcaaaacatttactatcatagggttgagtttgagttcgagtatgtgccctgaatcgttaccgggcaattttccttaaatacattgtcctccaatccgactg

SEQ ID NO: 3635 - DNA, 56 bp, Triticum aestivum
  Clone ID: uC-tsro9316061c10b1
ttctttcgcggacgcgtgggcggacgcgtgggcggacgcgtgggcggacgcgtggg

SEQ ID NO: 3636 - DNA, 83 bp, Triticum aestivum
  Clone ID: uC-tsro9316061d05b1
ttttaaaaaaaaaaaaaaaaaaaaaaaaaaaaaaaaaaataaaaaaaaaaagaaagagaggacaagagaacaagaccatgatg

SEQ ID NO: 3637 - DNA, 102 bp, Triticum aestivum
  Clone ID: uC-tsro9316061e11b1
gacttggtttctcttccgaatgaaaataccatagcacgctgttgctggtatccttctgtaacatgttctatttcaccctcattaatgactttgctattttcc

SEQ ID NO: 3638 - DNA, 291 bp, Triticum aestivum
  Clone ID: uC-tsro9316061f03b1
ttgcgcccacgcgtccgtccacgcgtccggccacgcgttcggccacgcgtgcggccacgcgtccgtgcacgcgtccgcaaagccaaaggctacgtacgtggatgggaagaaggaacgtactatggcgaacctgtggctggggagcattgttgcgccacatgttgtgttctaattaaccgcccttctttttgtggggatgtataccgaacctaccgattatgcatgcatgtaaattacctttgtccacgtacaaggggaggaaccatggaataaagaaagagcaacctgagt

SEQ ID NO: 3639 - DNA, 70 bp, Triticum aestivum
  Clone ID: uC-tsro9316061g03b1
tttcccacgcgtccgcccacgcgtccggaatagcctcttttatgtagtcactggtgctccttgctctgcc

SEQ ID NO: 3640 - DNA, 167 bp, Triticum aestivum
  Clone ID: uC-tsro9316061g04b1
ctcggaaatggactctgcttttctcatttggccgatcaaaaaaaaaaaaaaaaaaaaaaaaaaaaaaaaaaaaaaaaaaaaaaaaaaaaacaaaaaaaaaaaaaaaaaaaaaaaaaaaaaaaaaaaaaaaaaaaaaaaaaaaaaaaaagggggggccgttttagagg

SEQ ID NO: 3641 - DNA, 218 bp, Triticum aestivum
  Clone ID: uC-tsro9316072b01b1
gtttatttaaaccaaacaaacaaaaaaaaatgaatatgtatagattaaaaaagtgtttattatgattttaataagttgaataagattaataaattatcccaataacagaacaacttcaggtaattaattctacacaaaaaaaacattaaattaaggaaaaaaaatcaaaataatttaataaaatataaaataagaaggaaaaaaaaaataatcttttg

SEQ ID NO: 3642 - DNA, 154 bp, Triticum aestivum
  Clone ID: uC-tsro9316072b11b1
tttttgacgcgtgggcggacgcgtgggctgatatctgttttctaagccgtttaccttttcggttacagggatttactttagcagtaaaagggtttactcaagaacaaacagtaccaactggtgatgacattaataaatctgccctttgtgtttt

SEQ ID NO: 3643 - DNA, 202 bp, Triticum aestivum
  Clone ID: uC-tsro9316072c07b1
actccacccagcaataaggatttctagtggtcacgtacgtacgtcttttggtctgtagctagcattatactgtattagcgagctgcttggttggggttgcattggtattaagtagagtcagtcgagctaggtttgcttaatttagttggggtattgtatttgatctgattgatgagattactaagtcttccgttgatcctct

SEQ ID NO: 3644 - DNA, 114 bp, Triticum aestivum
  Clone ID: uC-tsro9316072e04b1
cttacgcgtgggcggacgcgtggggacttgctgtgaataaggatttcggcactctcttcagacctgtgatgaccagagaagagtgggcattgtgtgagacgtatttcggcttcc

SEQ ID NO: 3645 - DNA, 103 bp, Triticum aestivum
  Clone ID: uC-tsro9316072e09b1
tgctttgatgcatgcaacgttctaccggagctagaggccattgccaaagattgcactctctaatacttgccaatgaaagcgaaagggcacaaattttcatgtc

SEQ ID NO: 3646 - DNA, 218 bp, Triticum aestivum
  Clone ID: uC-tsro9316072f04b1
ctctcctgacgtcgtcaagcagatcacctcgatcaccattgagcccggcgtcgaggtcgaagtgaccatcagcgaccagtagttatgctaccccatgatatgtgtctttaaatctttctacaagggtggagagacaccagcgtaccaagatatttttgaaactttctgtagtatgagaactgggttttgtatgactaggttctttgcttcgtgattct

SEQ ID NO: 3647 - DNA, 122 bp, Triticum aestivum
  Clone ID: uC-tsro9316072g04b1
cttacgcgtccggcgttgcctttgggccttggcgatccactccggctattcatttgtcgattaaagatgttctcttgtagagaacatgggatgatgcctacagagagagcatgttggacttt

SEQ ID NO: 3648 - DNA, 134 bp, Triticum aestivum
  Clone ID: uC-tsro9316072h05b1
ctgtcactccgctctgctcaagcaagcagatccaagtagcagcagagcagcagcagaggcggccaggatgcacgccaagacggactcggaggtgacgagcctggccccctcgtccccggcgcgctccccgccgc

SEQ ID NO: 3649 - DNA, 78 bp, Triticum aestivum
  Clone ID: uC-tsro9316073b02b1
tacctttctaagactatagttgggcctgtaataatattgttttgtgagacatttatataatcgatctgggtttttttc

SEQ ID NO: 3650 - DNA, 370 bp, Triticum aestivum
  Clone ID: uC-tsro9316073c08b1
gctgtccaccttggagacctgatgcggttatgagtacgaccgggcgtgaacggtactcggtcctccggattttcatgggccgccgggggcgcaccggacaccgcgcgacgtgcggtgctcttccggccactggaccctacctccggctgaaccgtttccagggttggcaggccgttaagcagaaaagataactcttcccgaggcccccgccggcgtctccggacttcctaacgtcgccgtcaaccgccacatcccggctcgggaaatcttaacccgattccctttcgggggatgcgcgtgatcgcgctatctgccggggttaccccgtcccttaagatcggcttacccatgtgcaagtgccgttcacatg

SEQ ID NO: 3651 - DNA, 246 bp, Triticum aestivum
  Clone ID: uC-tsro9316074a07b1
gttgttgagtctgatgaacgcaacatgctgcatggtgtgatggaaggagctaatgtcagatgaaccaagcatatgcaagatttccccttaacatgatggaacaatggagtctcatcgttatccgtttttgttgttagttactactattactgtctagtttggtgaactgcaacattgtatatgcctatttgatggccagtgtatcagatatcacggtgtaaacaccacacttaaattcatttaccc

SEQ ID NO: 3652 - DNA, 190 bp, Triticum aestivum
  Clone ID: uC-tsro9316074a11b1
ttgtctcgtggggatcacctgatcactggtggggggggtggtgctgctgctatgtgtatctgtggagcttaagtttgatgtgtggtgtgggcactgttatgttaattattatggctctgattgaaccggttgtaaagtttgtaagtggattttgaatttcatagtattatcatatcactgccattgatac

SEQ ID NO: 3653 - DNA, 96 bp, Triticum aestivum
  Clone ID: uC-tsro9316074b01b1
gcagttcttggaaccctccctccatgtgttgttgatgtgggtgttattgacgtcgtggggggtataaaaccaaaccgcaaatacttttaccgttgt

SEQ ID NO: 3654 - DNA, 174 bp, Triticum aestivum
  Clone ID: uC-tsro9316074b07b1
tttatgcgtccgcccacgcgtccggcggactgcgggggcatgttaagagcagaacaggggaggctaacgcctaggatgcttcatgcttggaggagtcacaaatcacaattgctatgtgctccatttctgtagtgttcttgcttggatcggtaaataaatttcactagcgggttt

SEQ ID NO: 3655 - DNA, 336 bp, Triticum aestivum
  Clone ID: uC-tsro9316074b09b1
ttagtacttccgtgaaaggcagtttatgcaaaggtgaagatttatttgcatgaaccacacaaccacacaagacagctgcgtatggttcattatgtagttctagatctatgtacagcatcatagctcctctgtaccgtgatagagtgatgtccttatccagaccattgtacagaacggagtgtggataggggtttaggttcttgatccgctctccacttatgttgcttcttttaatcatctgcgctaattctctccttgttcgttatcatcagtgttcttgtaaaaacagagctggaaatgcttattcgtgtatatcactttgtcggtcttcgcatc

SEQ ID NO: 3656 - DNA, 62 bp, Triticum aestivum
  Clone ID: uC-tsro9316074e09b1
ttttttaaaaaaaaaaaaaaaaaaaaaaaaaaagaagagattattaaaaaaaaggggggttt

SEQ ID NO: 3657 - DNA, 373 bp, Triticum aestivum
  Clone ID: uC-tsro9316074f08b1
aaattctggaaatccaatgaagctgaagctgttgagacagcgattgaatggactcgtatgtatgccagtggcgcatgacaagctaacgctgttatggatgtaataacaccgtgtcatagttgggcctaatcgaaaaccatttgcttgataaaaacacacttgaaatgatttgcgatggacgaatgtatccagagcggcatcatttctagttggtggttgtatttgtggtgcgtgttctggcacgcttcataacttgctgcttatagaacacgctctgtttctcgttcatcttcaattgtttctccaattaaaagtatctgttgtgatccgagtatgtaagctctccaaatgataatagtggctctctgtttgt

SEQ ID NO: 3658 - DNA, 250 bp, Triticum aestivum
  Clone ID: uC-tsro9316074g08b1
gggtccacagatttggaggatgtcttgcaagtgcggatcaggctgcagctgcggttcacactgcaagtgcgggaagatgtaccctgatctgacggagcagggcagcgccgccgccgaggtcgccgccgtggtcgtcctcggcgtggcgcctgagaacaaggcgggacagttcgaggtggccgccgggcagtccggcgagggctgcagctgcggcgacaactgcaagtgcaacccctgcaactgttaagct

SEQ ID NO: 3659 - DNA, 74 bp, Triticum aestivum
  Clone ID: uC-tsro9316074h01b1
cttgtttattactcatgtttagatacatttgtatctggaagaatctaatacaaataattcaggacggagttaat

SEQ ID NO: 3660 - DNA, 57 bp, Triticum aestivum
  Clone ID: uC-tsro9316075c09b1
ttcacgcgtccgaaaaaaaaaaaaaaggaaagggaaaatttaaaaaagaatatgatt

SEQ ID NO: 3661 - DNA, 497 bp, Triticum aestivum
  Clone ID: uC-tsro9316075c11b1
tttcggtctagtcgtcgaggcaacaaggtccggagggggacaccaactccaactccatggctgccgcctccgaggtctctgtggactggaggggcaggccttgcaggcctcaaaggcatggaggcatgaaagctgctgtgtttgtcctagggatccaggcgtttgagatcatggcgattgcggcggtggggaacaacctcatcacctacgtgttcaacgagatgcacttcccgctgtccaagtcggccaacatcgtcaccaacttcatcggcaccatgttcctcctctccctgctcggcggcttcctctccgactcctacctgggcagcttctggaccatgctcatcttcggcttcgtcgagctctccgtaagccaccgtaaaaccagcaaaaaaaaggatcatttcttttgtttttctaccaaaactatcaaaggcacgggaaaaaattcatgcagggaaaggctagtgcgtgcgactttaaagttttactgactg

SEQ ID NO: 3662 - DNA, 436 bp, Triticum aestivum
  Clone ID: uC-tsro9316075c12b1
ttctgacgctgctcccggggacgaccccgtggggggatcagcgccgccggcgggggcggccaacgtgagggtgaaggtgctgttcttcgcccgcgcgcgggatctgacgggcgtcgcggagtcctccgtggaggtgccctccgggagcaccgcgggggagtgcctcggccgggtgctggcctcgttccccaagctggacgagatccgccgctccatggtgctcgcgctcaacgaggagtacgcgcccgagtccgcccccgtcgccgacggggacgagctcgccatcatcccgccgatcagcggcggctgaccgaggctgaaaatgaagaaaaagggagaaagaaagaaaggtcttcctctttcttcagtacttgtctttgcttcttgatcaatgggcacgttgaatcatagtaataaagttgcgatgttcgctggc

SEQ ID NO: 3663 - DNA, 314 bp, Triticum aestivum
  Clone ID: uC-tsro9316075d02b1
acgcttatgatggaatgttgcttctatactgagcttggatgagaacatggaccgcgatgtcaagttcttcacagagacagaggagaacaaccagatgcgtggcccaaggactgctgtcccgtattttctctgacttgagttgtacaattttagaagtcgctgttttaatgtgtaagggttaaagatggaccggaggtggttattgatgtagggttcagatgatagtccaatctgatgcgttttatttctggctgttctttttaaccacatgtacaatagatcgctgggagcatcattgctcctgtattccttct

SEQ ID NO: 3664 - DNA, 432 bp, Triticum aestivum
  Clone ID: uC-tsro9316075e03b1
tttttggtttgtttcacacgcttaaaaaacagcgaaggattggagagttgactgtaagtgtatccgatcttggagaagttattgcaagagatcctactgtctcatgaactcgctgccagaaaagggatgccaggctactagatgtttctgtgctgggcgtactgtgttggatacttgacctgtgaccatagccagtactctagatattagaaatgactttataatttctatatatgagtaaactgcacaatccgccggaaaagctttttgggtgtgtcgaatagcaacacaccacattgatccgttgcgtgttcttccacatcgcaagtggagctccgagtgcattcttcctttgtggtgtctctggtgggatgaacttgatcgacggcacatttggcagcttgaacttcgtctgccacacattcttcttct

SEQ ID NO: 3665 - DNA, 231 bp, Triticum aestivum
  Clone ID: uC-tsro9316075e09b1
ttacgttcgctccgattcgtctgcccaccagtcagcagctggaacctacttgcgttcgccgtcgtcgatggcagggtttggcagtctggctcccacgacgactaacgtggaggaggcaggcgggctgactgggatcgcctttggggggtactactacaccatgtgggcagtgggcagtaccgaccagctgcaggtcaccatgaacaagtttgaggacctgatgaagaagga

SEQ ID NO: 3666 - DNA, 304 bp, Triticum aestivum
  Clone ID: uC-tsro9316075g07b1
tcgctttatcatccctgataccaaagctcatcttcttctccttgaaatctttttgggtccacagatttggaggatgtcttgcaactgcggatcaagctgcagctgcggctcagactgcaagtgcgggaagatgtaccctgatctgacggagcagggcagcgccgccgccgaggtcgccgccgtggtcgtcctcggcgtggcgcctgagaacaaggcgggacagttcgaggtggccgccgggcagtccggcgagggctgcagctgcggcgacaactgcaagtgcaacccctgcaactgttaagct

SEQ ID NO: 3667 - DNA, 325 bp, Triticum aestivum
  Clone ID: uC-tsro9316076b02b1
ctttgcttgggcggacgcgtgggcggacgcgtgggccggttccaatgcccatcttgttcttcttgaaatctttttgggttcacagatttggaggatgtcttgcaactgtggatccggttgcagctgcggctcatactgcatgtgcgggaagatgtaccctgatctgacagagcagggcagcgccgacgcccaggtcgtcgtcgtggtcgtgctcggcgtggctcctgagaacaaggcggggcagttcgaggtggccgccgggcagtccggcgagggctgcagctgtggcgacaactgcaagtgcaacccctgcaactgttaagct

SEQ ID NO: 3668 - DNA, 213 bp, Triticum aestivum
  Clone ID: uC-tsro9316076c11b1
tcgccctcgcgtccgcccacgcgtgcgcgcgcgacgggggctgccttcacaccccttgatttctcaggcgggtggtgggattatgcgccacctgctcctgccccggcgccttctcggcatgggtcccctctccgcttacgccgcgaccaaagccctactgctaaaccccgtccgaggccggctcccctactcgctcgcgtgcctctccgcccc

SEQ ID NO: 3669 - DNA, 426 bp, Triticum aestivum
  Clone ID: uC-tsro9316076d02b1
ggttgactttgtgggaaggccaaatatccgagctgaagaagcggagcacggtgaaggatgcagaagagaacctatcctggggagctcagatgcgaagaagaagggccgaacaattgtgacagtgcacctcttacactcttatgtccactagccatccgtagcatctaaactgtcgatatctttgtgtagcaaaagttagaaaggttattcttaagaagcatggttaggatcggagtacagccatggcgctgcttgagtcttgcctggtgtatgctaaaccatactaccatacatggctcacaggaaacatatagttcgactaggtgccaggatgtatgttgaacccaacggcgtcgctcctccttgaatctttacctgatgaaatgtaaatataatgagacagaagtaatcaaatctagttgtact

SEQ ID NO: 3670 - DNA, 262 bp, Triticum aestivum
  Clone ID: uC-tsro9316076d12b1
tcgcctacgcgtccggaggaattgagctgcatctcctgggggttcagcattggcttccttgcgccggttgcctcgagttgaaggcatgcacgggttgcatgcgcaactacacacttgtggattgtaactctagaaacctctttatcctagtatacgttttctgtgtaacactcgtgggtgccgcaacactttgtgttcgattaagaagtttttatcaagagttgaacatcacaataaaatgaaaatctggtgtaatgggaca

SEQ ID NO: 3671 - DNA, 286 bp, Triticum aestivum
  Clone ID: uC-tsro9316076e09b1
ttatttattttcccctgtgctacgtcgtcataggggccacggtcgccttgtaactcctcggatttgtgttctggggagcatattcatttttacagtggaccgatgatatgataatactttactgcccctcttttggttccttgttttgagaatattggttggttaaattgtgttgtagttcctgattacagtgaggaaagaagaaaaagggtggcatccccttgcccccgatgttgtaatgtagaaaaagaatgacttgtcagtaacaatgtgaagtatttttttc

SEQ ID NO: 3672 - DNA, 171 bp, Triticum aestivum
  Clone ID: uC-tsro9316077a02b1
atgtttattttgatgacaccaacgaggatcactaatgaggggctgccttcatgggcaggcagccaccgtctctaataaatatcatatgtgatttggattcctttgtcaaccgcggcaagacatatatggtgtagcaacattatgtttattatcgcttgttggagaagtctc

SEQ ID NO: 3673 - DNA, 171 bp, Triticum aestivum
  Clone ID: uC-tsro9316077a03b1
atgtttatgtcgatgacaccaacgaggatcactaaggagggggtgactttatgggcagccagccaccgtctctaataaatatcatatgtgatttggattcctttgtcaaccgcggcaagacatatatgttgtagcaacattatgtttattatcgcttgttggagaagtctc

SEQ ID NO: 3674 - DNA, 225 bp, Triticum aestivum
  Clone ID: uC-tsro9316077a09b1
tttttttttagtgctagcgaacatggtaattctggactgggtaaggtttgatatcgggggctgaccgcttgagattagagaatggtatttgttcaactctcatgtaaatgagattagctggggacttgtagatatggtcattgatctgaatcggggtgatgaattatttgattctttacagtttgggttatgaataaatcgtgaatgtggattggtcgggtattc

SEQ ID NO: 3675 - DNA, 277 bp, Triticum aestivum
  Clone ID: uC-tsro9316077b05b1
gcatattttcgcttatttgattatcttgtcaccagggctggggttctttcctttgcaccagatgcttgtgtctggagtggattatgctgagctgatgcgatgaattctatgagagagtgtgtccatttttatgctcgttcgtttgaggttttcaagtcttattcacacacgcccatgtaatttcctttgaaaattcatttgtatgttacttgtgctacgagatgcgtaccgcatgtgtacagattgatcgcaattggcagttacaagattcactccc

SEQ ID NO: 3676 - DNA, 99 bp, Triticum aestivum
  Clone ID: uC-tsro9316077f09b1
tctcctctcgtccggctatatctgtgcttattattgcagggatatggtcctctatggttattgctcaagaggcaacttggtttttgaattattggtttc

SEQ ID NO: 3677 - DNA, 275 bp, Triticum aestivum
  Clone ID: uC-tsro9316077g04b1
tgttatttctgaaagaaatctagagaattggtctgtagcgggtggacacttgcgaatggaaaacgggggaagggagatgagtttgcgtgtctttttttatatatagaaaaagagagtgtgtgttttatctgtaagtgaagtgtgtacttgaagtgctttttattggctaagcctaaataattaaaaaaataaaaagaatcttcccaaccaagcaacaaactctattgataaaaatccatggtccaagagaaaaaacttgaaagaggagcttgatg

SEQ ID NO: 3678 - DNA, 244 bp, Triticum aestivum
  Clone ID: uC-tsro9316078a03b1
gtgtagtgatgctttagacctagtctaactaggcgttgcttggtttttgcccggttttccttaataaaccgagcagtccttttttcgttctttttttttagcactcgtctttatgcggtgcattcctcctttgagggtgttcttgtaatacctttttctgatcaacgaatttggcagttctcctgtcaacgttcaaaaaaaaataggacgacaagcggtctgtggcaacggactgggcggtccg

SEQ ID NO: 3679 - DNA, 270 bp, Triticum aestivum
  Clone ID: uC-tsro9316078a04b1
cccttttgtccggaccagctcgccgccaccaccgccccgccgtgttccgcgccgtgatcaaccggcactccctcctcgcctctcgccggcggcctccccgccaccgccatgcaggcccgcgtcgtcgtcttccccatcaggggccgcgcctggtgcttcgcccgcccgcgccccgtcctacccgccacctccgcctccgcctccgccgcgggcagcggcgccctcccgccgccgcccaccctcaaggacctctggctcggggtctccgcc

SEQ ID NO: 3680 - DNA, 446 bp, Triticum aestivum
  Clone ID: uC-tsro9316078a06b1
gattttggtatactccttaattggaggattttgtgggtcacctgtgagttttcacgcgaaagatggttctggctacaagttcttgggtgaagttgtcttacagctcgacaaaataaatcctcaggtggcatcccgcatggtgtcagcgttctctcgatggaggagatatgatgagaccagacaagctcttgctaaggcccagctggagatgatcatctcagccaatggactctctgaaaatgtctatgagatagctttgaaaagtttggcagcttagtttcctgatgcaaagaaacaatttggctctgccagtcggttcgacacttcaccattaccagggcactgaaagtgtacttaactgaatatattgtactactgtatttggcatatgtaaaataacaggctactgtagtggcaatacatttgaattatggcattattgtctt

SEQ ID NO: 3681 - DNA, 319 bp, Triticum aestivum
  Clone ID: uC-tsro9316078a09b1
gccttttatcctgtccaagttctaaccccggtaccaccgtgcccttcgccgcgatctcccgcccgatccgcatggctggaatcaggctgacgcccgaggagcctgagctgccgcagggcactccgccccgcccccagctgccgctccccgtcgccggctccggcgtcacagcgggcggcggcggcagcggtggcctggagatggcttcggacgacgagcggtcagtggcagcggactcgtggtccgtgcggagcgagtacgggagcacgctagacgatgaccagcgctacgccgacgctgccgatgtgctcgccgcggc

SEQ ID NO: 3682 - DNA, 384 bp, Triticum aestivum
  Clone ID: uC-tsro9316078b11b1
ttctcgcgtccgcccacgcgtccgcccacgcgtccgcgatcaatccatcaccacccccagaattcatccagatacgcatacacccgcccggcttctagcttacttgctttagcacttctttgcatatctcgatggagtgcgagaacgggcacgttgccgccaacggcgatggcctgtgcgtggcacagccggcgcgggccgacccgctcaactgggggaaggccgcggaggagctgtccggaagccacttggatgcggtgaagcggatggtcgaggagtaccgtaagccggtggtgaccatggagggcgccagcctgaccattgccatggtcgccgcggtggctgccggcagcgacaccagggtggagctcgacgagtccgctc

SEQ ID NO: 3683 - DNA, 405 bp, Triticum aestivum
  Clone ID: uC-tsro9316078c08b1
gattcatatctgctaagatgacattggcagaagatgtgaaccttgaagagtttgtgatgaccaaagatgagttttctggtgctgatatcaaagccatttgtactgaagctggattgcttgccttaagagagcgcaggatgaaggtgacacatgctgacttcaagaaggccaaagagaaggtaatgttcaagaagaaggaaggtgtaccggaggggctgtacatgtgagactgttcacccctctcgccgccagcattacctcctggttcacatggttgtgtaatactggaggattggagtttgtgttttgtttaaaatggttggagttttactttcctgtacttacggtttattcagcaatccccaacttaaaacagccctccaagcaatgtactgcgaccacttg

SEQ ID NO: 3684 - DNA, 54 bp, Triticum aestivum
  Clone ID: uC-tsro9316078c10b1
aataccattgctatcttctgctgttaaattatatactattgtaccgattgcttc

SEQ ID NO: 3685 - DNA, 67 bp, Triticum aestivum
  Clone ID: uC-tsro9316078d01b1
tgttataatttgaattcttatattctgtactgtttgtcatgactggcaatttaaattagtgtgatcc

SEQ ID NO: 3686 - DNA, 191 bp, Triticum aestivum
  Clone ID: uC-tsro9316078d12b1
tgttatttgaaattgactcaagaagtgaaggaactgaactgtatcctgatgtaaagtataccacagttagcgagtatttggatacactggtttagaatgttggtgatctgtatgttgctcataagtaccaaccttttgtttcaattgacattttgaatgacgatgagagtgatgaatgtgttccaagttct

SEQ ID NO: 3687 - DNA, 51 bp, Triticum aestivum
  Clone ID: uC-tsro9316078f05b1
tcctcgcgtccggcttgaactctgcccgttgtataatatcacaattgtgtt

SEQ ID NO: 3688 - DNA, 200 bp, Triticum aestivum
  Clone ID: uC-tsro9316078g06b1
cgtaatcatatacgccatttgattcagtcctgggtgccaatcatatcacctgggctggaagttttgttgtacttttggtctgtagcatcagtgtcgtaaacaatgcaatgatgcatgttttggctcattgttgatttcagcttaatgcttattgtttgtactacctacacctgtgatttcattctgaattcttagagctt

SEQ ID NO: 3689 - DNA, 186 bp, Triticum aestivum
  Clone ID: uC-tsro9316078h06b1
ttttcgcgtccgcccacgcgtccggctagctttgctttgttttcggtttgccgtgcttgttcaggatataatccagggaccataaacattgataactgggaacttgtatcgttgctggaccaaatatttgtcgcccttttgcgcatttggttgtatggtatgggtcaccaccacatggttctcgtt

SEQ ID NO: 3690 - DNA, 103 bp, Triticum aestivum
  Clone ID: uC-tsro9316079a02b1
gcgtgatgttctcgatctgggacgaccgaccctgtcaatttgcttctgtaaaactgtgaattcgcccgccccgcccgagtaatttcaagttcagttgagtttg

SEQ ID NO: 3691 - DNA, 372 bp, Triticum aestivum
  Clone ID: uC-tsro9316079b04b1
caggttcgttacacggccatctctgagattgctcgaatgtgagcccacagacttgagcttgagcagcctatgaatgcgaaccaggaagagggcaaggtgagcatcatgaataatgatcatggcagagtgaagcagtagtttcaaaactgaagatctatcacagtcgcggacaacaaatatcagaagctgaactttgaagcttttatgtaaactgaaattttctgtatgggagggcaagcaatgcttgccatgatgaaagtttaacttccccgcagtagagcattgtattatgttcgagatcgataagaacgaacgatcgaaagagttgtaaagtgaatcaagtcgtctttattgatagtgatggatccttat

SEQ ID NO: 3692 - DNA, 163 bp, Triticum aestivum
  Clone ID: uC-tsro9316079c07b1
gcctattcctcctcgtcgccctcccccctcccctggcgacctaccaccggcgcccagccaccgccgtgccctagcccggcctcgccgccgccggcctcgctccccatacccctccccgcctccgcctcccacgcgtctccgtcgcctcctacgcctcccacgc

SEQ ID NO: 3693 - DNA, 232 bp, Triticum aestivum
  Clone ID: uC-tsro9316079c11b1
atatgcttgggttcacctggtgctcccactccgtgggggtcagtaattgccctatcgtttgacctgctgctgctgctgctgtaccctgtgtctgactttgatcaagtgatgtctcgtttgtgtgaagtcgtactgtgtctgctgctttaatggaccatcgagtcctgtggtttggtgcaaacagttgcaggtacatctgtaccgttaagtatgaataagtcaactttgaagt

SEQ ID NO: 3694 - DNA, 323 bp, Triticum aestivum
  Clone ID: uC-tsro9316079f05b1
gtcagttttttgtgtggagaggtgcgtgcgcttggatggcttgacagaagcccagatcgacaagaagttggaggagctagccaaggcaggagttgcttaaagctaaaaactgtcaggctagccaagttttcttgcgttaaatcttcacaaataagagaaaagttaacatgggatgttacgttatcttgatttcagtaccatgactactcaagtgttgaatttgtacaactgattgctgagaaagtaactatttttcctatcgttcttcaaggactgttttcagcagataagttcaatttctaaaaaccatactggtcatactt

SEQ ID NO: 3695 - DNA, 229 bp, Triticum aestivum
  Clone ID: uC-tsro9316079f09b1
gccgtgttagcagtagtagtagcttgtggtactcgcccaagtgaaggaaaaggcaagaaaagggtccaataccgaacttggatcgttgtagctagtgctgtcggaaagcaaaagtgtagcggaaaaataatactcctaccactactgctccatgtacgtatgtatatcgtgttattcattgtacttgcttgcaaaggaggatcaatatatatatatatatattattact

SEQ ID NO: 3696 - DNA, 380 bp, Triticum aestivum
  Clone ID: uC-tsro9316079f12b1
tcgtcttcatctacgccgcgctggagaaagccggcaagcccggggttaaggtggtcatatccgagagcgggtggccgtcggacgaaggtttcggggcgacggcgcagaacgcgcggacgtataaccaggggttgatcaaccacgtcggcaacggcacgcccaaacggcccgggccgttggagacgtacattttcgccatgttcaacgagaacctgaaggacggggagaagagcgagaagcattttgggctgttcaatccggacacctcgccggcctattccattactttctgagtgcgacaagcgtcggatatttcgtgttcgaataagctgcctggtaatgcaaactgcatgcatttcagtcaactactcgtgtgtctt

SEQ ID NO: 3697 - DNA, 228 bp, Triticum aestivum
  unsure (1)..(228): unsure at all n locations
  Clone ID: uC-tsro9316079g12b1
gatcacttaacacttccttgaggaagcagaggtggatgaggtgatattgccaattgcttatgttgcattcgaaaaatctgacctcgatgtatctaaataggtagttaccgcaaagaacttctatctccggagtgtaattcattttgagtgttattttcggtggcaggatatttgtgaaaatttatattttataagtctatttatatttaataaatgttttacatgtnt

SEQ ID NO: 3698 - DNA, 55 bp, Triticum aestivum
  Clone ID: uC-tsro9316079h06b1
aaaaaaaaaaaaaaaaaaaaaaaaaaagaagaaaaaaaaaaaaaaaaaaacaagg

SEQ ID NO: 3699 - DNA, 297 bp, Triticum aestivum
  Clone ID: uC-tsro9316079h12b1
gtgtggttcacccgggcgaggcggtgccgatcatgccgcccatgttctactgggggccatggagggtggtgaacggagaggttccccgcttcatccagacgcccgaggaagctaagccggcatagagctccttcgagttcgaaggggtcatgggagtagtttgctcttctcctttttcttgatcggaggcctctcataagtaactcactgtttgctgtgtagctatggcattgctgcatttcttgtaatttacattctggtgattgggcagtgccgtggaatcataatggtcttttt

SEQ ID NO: 3700 - DNA, 320 bp, Triticum aestivum
  Clone ID: uC-tsro9316080c01b1
gcgtatgcccgaaattttttcaggaagttccacgccgcatacgtggatgccgtctcgaaccctttccacgtcccagggaagaagatcgcctcgagaagcttcggcgcgagagtgagcacgatagtgaaatccttcggctcagggactgtcggttaaaaaccacatcggcctgagcaccctccgcaatcaatcgtcatgcgcgctttccaccttaactggcaacctatctttacctccgttgtgtatcactacatgtatgttggacaagaactagtttgatactcgaggaagaatatatatggctgttattgattactaca

SEQ ID NO: 3701 - DNA, 55 bp, Triticum aestivum
  Clone ID: uC-tsro9316086a03b2
gctgttgtcgcacgctctgagaaatcctctgataatatatgtatcccgttctagt

SEQ ID NO: 3702 - DNA, 139 bp, Triticum aestivum
  Clone ID: uC-tsro9316086a09b2
tttcacgcgtccgaaaaaaaaaaaaaaaaaaaaaaaaaaataaaaaaaaaaaaaagaaaaaaaaaaaaaaaaaaaaaaaaaaaaaaaaaaaaaaaaaaaaaaaaaaaaaaaaaaaaaaaaaaaaaggggggggcctttt

SEQ ID NO: 3703 - DNA, 72 bp, Triticum aestivum
  Clone ID: uC-tsro9316086b02b2
ttcacgcttccgcaaaaatgtaaaaatgtaagacaaccactcgatcttacatgaacggttctgcgtttttcc

SEQ ID NO: 3704 - DNA, 308 bp, Triticum aestivum
  Clone ID: uC-tsro9316086b05b2
ttatcaatacccacacaagcaaacaaaccaaagtgacgattcagaggcgtcgctttgacgacgatgactagttggtaagcttgatgtactagcgaatgggtgcagtagcgtctgttgcttgattcaacaaccgtcagaacctgacaaactatttgattggtcttgggttgtatatgatctggatattatttggtggggtttttcattgataactgttggatgcgtcacttctacccctgaaactctctgcgaaacctttgagttgtggtcgatttatcaagttctatcagataatgttagtgctgtag

SEQ ID NO: 3705 - DNA, 57 bp, Triticum aestivum
  Clone ID: uC-tsro9316086b12b2
tttaagttctactctcttaaaaaaaaaaaaggggaaatttaaaaaaaaataggggtt

SEQ ID NO: 3706 - DNA, 96 bp, Triticum aestivum
  Clone ID: uC-tsro9316086d04b2
ttaaccctgccgtctactcaccgcgcctcgacctcgacctcgccggcggcggagccagatggcgtcgacgacgttccggcgcttcggcgtggcggc

SEQ ID NO: 3707 - DNA, 132 bp, Triticum aestivum
  Clone ID: uC-tsro9316086e07b2
tttcgaatgggaggagttaaattttgtttcttttatgtagattattacagtagtttacatcattttcctccctaattactggagtagttttggtgcaacgatgcgaatgcgatgctgtggccttgtcgaggt

SEQ ID NO: 3708 - DNA, 186 bp, Triticum aestivum
  Clone ID: uC-tsro9316086e09b2
tttgtctcgccgacggatggtaatctgtgatcacacattgtgtggcgtatagggaaagcacgggctgttcacggtgtgttgtagagttgtgcctttgtaagattttttctacagtctgtacatgagacagggcagggcagggtcattgatagttttggacatctctactgcgaactgttcacagcc

SEQ ID NO: 3709 - DNA, 107 bp, Triticum aestivum
  Clone ID: uC-tsro9316086g07b2
ttcgtttttgcccccgttgacagcagtatcatgtagacgagacaaaataaagcaaatccatggcttgtgtgtgtgatatactatatcagattctgaaacagattacc

SEQ ID NO: 3710 - DNA, 217 bp, Triticum aestivum
  Clone ID: uC-tsro9316087a07b1
ttcctcgcgtccgaagatttgttcagtttgaacctgaaagagcttttgatcggatttatctctgttgtgtcaagtattcacctgagaagtctggcttgaatgttaattagtctgttgctaagtgtgagcttgtgatgaactggtgcgtgtttgccattttttttctaagcattgctgagaggccaaactgagctgcaaatatgcagttgccatgaac

SEQ ID NO: 3711 - DNA, 357 bp, Triticum aestivum
  Clone ID: uC-tsro9316087a08b1
tatggaggtggctgtcaacgacttcctccaggccgatgatgcccgtgctgccatccagcactccatggatctgtacgcggaatacattatgcacagcctaaggcagtagagtgtgtactattactatttttcctttgcccttcctcctatgatgggatgcaaagaagatcccctcggaacatttggggtctgatgaacaaccaagcgagcctgtatttctacattcttgctttgtattagccatattttcccattactgtggcactatgtatctcaaatttgtattcgagaccttgtggtttggctcgtgtattatcttcagttcttactggacggacaataatataacaatttatc

SEQ ID NO: 3712 - DNA, 72 bp, Triticum aestivum
  Clone ID: uC-tsro9316087b08b1
ccctcgcgtccggtttgaattgcttttgagtttttggtacaatctaagacgcaatgaaatctaccttatatt

SEQ ID NO: 3713 - DNA, 357 bp, Triticum aestivum
  Clone ID: uC-tsro9316087c04b1
ccctcgcgtccgcccacgcgtccgcccacgcgtccggttaatattgggtgcagcaatttcacaactctgggaaaagcttctgctggaggacatcacctgcggcatcacctgcatcgacctctcgctgattaccatcccaaggatgcgcgaccgactggcggagcagggcaccagtgataagttcaccgatttggtcgactcaccgttcccttcctctgtccacgcaatgccgctcgttgttgttaggttgttaattcatcaagccccttattgcgctacatagtttgttcatctcgcatgccttcttaggagaaatcatgtaatgaagataagctattcttgatttacattttattt

SEQ ID NO: 3714 - DNA, 348 bp, Triticum aestivum
  unsure (1)..(348): unsure at all n locations
  Clone ID: uC-tsro9316087c07b1
tgcttcatgtacccggaggtcgaggccgccggcgccaccctcctcgtctccgccactgccacccacaaggcgagctccggcgggatggagatggcggcggagaacggcggctgcggctgcacccagtgcaagtgcggcaccagctgcggctgctcctgctgcagctgctagatcattgatcatgcatgcgccgcgtgcatcatatctatgatctatctaccatctactaccatgtaacgctgcctgatcgagggtctttgtatgtatgtacgcacctgcctgcatgagcagagcgggtgccatgccatgcatgtaaacccctaaataaaatctcccgtggttntgctt

SEQ ID NO: 3715 - DNA, 287 bp, Triticum aestivum
  Clone ID: uC-tsro9316087f02b1
aattcattctccttttgaggccacccgccgacgccggctgcttcacgtggacatcagtccatccacagcatgtgtacacttcgtgggtgtgactccgctgacctagtagccgggatagacgaagctatcaaggatggggttgatgtgctctcactctccctcgcccctgtctgttttttatgttaaattcagtcgagacatgtctgtaactagtagggtttccatgtctgtaaaataattcaagtttggacatgtagcatccattcctctataactctgttactttg

SEQ ID NO: 3716 - DNA, 333 bp, Triticum aestivum
  Clone ID: uC-tsro9316087f03b1
ccttcgtttccgcatgtcaagctggtccaaaaggaagcagctgaacttggttgccaggaccaaaaccatatttttgaacataaacaccttcttcacctctgatggagagttatccttgaagttgcgagagtcgcgctggatgcaataagttaagcctttgctttgcatccattctccgctcttgcgttgggagctcgggagagtttagtcatgtcttgataatctgagagtggacatgtagttcatcctgtatcggctggttaatttttcttccaccttacttgggaaggaagctgtagatactcagatagaataattatcaatattctcggt

SEQ ID NO: 3717 - DNA, 245 bp, Triticum aestivum
  Clone ID: uC-tsro9316087f05b1
cggttcgcgtgggcgaacggcacgagaagtggatggccgagtttggatccgcttaaaccttggttcccattgaagattgctggatcttgtccactcttttttgtttgtttgtgttttattcctggcatttgccttatttccaccttcccgtatattgtttcaacggtggcagtatgtatgtatgttcaactatgtttcctgagccggtagtttatgacaagaggcagaccgtaaactcggaacct

SEQ ID NO: 3718 - DNA, 387 bp, Triticum aestivum
  Clone ID: uC-tsro9316087g02b1
ccctcgcgtccggcctgtacacgcccacagccccagagacacaccaagactgtgacagaaaatgcagcatatgccaggaggagtactctggtggtgaggaggtggggaacatggcgtgtaagcactactaccacatcacctgcatacagcactggctccggcagaagaactggtgccccatctgcaaatccgtcgccgccaagaccgtctagcactagcactagcagcccctgcttgtttagtgtaaacagattctcctgaaatgtctagacacaagatttgtattcttttttctactctctagaatgaaacatttgtttgtgccttcaagacttcttggcttccttcagttcacaaggttcagtgaacaaagaaaaagggaacagg

SEQ ID NO: 3719 - DNA, 371 bp, Triticum aestivum
  Clone ID: uC-tsro9316087h04b1
ggttgcttgagaagcgccagcagggacgtacactggactcgcacattgaggagcagttcagtggtggaaggctgctggcctgcatttcgtctcgccctggacagtgtggcagagctgatgggtacatcctggagggcaaggagctggagttctacatgaggaagctccagaagaagaagggcaagggtgccacagcttaggctgaagagctgctgcatgttactcgttggattttcttagatgttgcgtccatgtcatgtttgcagacatactgaacaccattttctgtaaacggttcgagtcctaggttgaactgagaatgttttgcctgttttggttgtgttgtgatctaaagctatccagattctttt

SEQ ID NO: 3720 - DNA, 218 bp, Triticum aestivum
  Clone ID: uC-tsro9316087h05b1
gcgtggtgcaatggggcatgaagaggcgcattcagcgggagggtgaagtgtcggctgcgttatgatttgtctgtctaccgtagttttcatttggtctggtcgtggagtgtgtgcaatttgatgtctccggcacatttgtgaggtcctgggcagtgcttgctggttcttgccagcggcatttgttgttgcctctgaataaacgcctgcccatattgttc

SEQ ID NO: 3721 - DNA, 429 bp, Triticum aestivum
  Clone ID: uC-tsro9316087h10b1
ttcttaagagacctgggccaagcataaggaggctgagaaggctgcttttgacgcggctgaaaagaagaaggaagaggaggatgcttccaaggctggtgaggacgatgatgacttggatgatgaggatgccgatgatgaggacaaggatgacaaggctgggtctgatgtcgagtctgatgacgagaagcacgatgagctctagatggatggtgaggatgagaggaggccgcctgccttcgcgccggtgccatgatttattagttgtctctcattatgatgttcccctttttgtgatcagaaacttgacaagttactgtgtgtagaagaacaacatcaccgtggggtctttgtagcgcttttgtagtccaatttttaccggaagggaactttatagtcgttaaacgagcaaaaaataaaaaatcttgcact

SEQ ID NO: 3722 - DNA, 181 bp, Triticum aestivum
  unsure (1)..(181): unsure at all n locations
  Clone ID: uC-tsro9316089c08b1
tacttacatccgcccacgcgtccgaacttggggngntgtatcatttggctgggcttctggagattgctctgtcatggcctgtgcctatactgtctgtatcttgaacacaaacattttgtaacgtcttgtgtgggtttgtaatgttctagtatcatatcatattgattctgaactcgggcac

SEQ ID NO: 3723 - DNA, 80 bp, Triticum aestivum
  Clone ID: uC-tsro9316090b11b1
gaaaaccaaggaagggagggttaatctaactttgcgacagaatccaaaacgtatacatatggatcaggtcaggcttgccc

SEQ ID NO: 3724 - DNA, 301 bp, Triticum aestivum
  unsure (1)..(301): unsure at all n locations
  Clone ID: uC-tsro9316090d07b1
gggccgncgggggcgcaccggacaccgcgcgacgtgcggtgctcttccggccactggaccctacctccggctgaaccgtttccagggttggcaggccgttaagcagaaaagataactcttcccgaggcccccgccggcgtatccggacttcctaacgtcgccgtcaaccgccacatcccggctcgggaaatcttaacccgattccctttcgggggatgcgcgtgatcgcgctatctgccggggttaccccgtcccttaagatcggcttacccatgtgcaagtgccgttcacatggaacctt

SEQ ID NO: 3725 - DNA, 61 bp, Triticum aestivum
  Clone ID: uC-tsro9316091a01b1
gccacttgtttttgtcacactggcaaaagtgctccctatcccacttttactagttttaggg

SEQ ID NO: 3726 - DNA, 414 bp, Triticum aestivum
  Clone ID: uC-tsro9316091a08b1
cggtcgcgtgggttcctgcccattctgcaaccatgggagcagcgttgaatgccggattgatctgaagaatctgattggtgaggccaattgtcaaatctgccaggaaagcttcagcaccactgcaaatgcgctcactgaagctattgatgtatacagcgaatggatcgatgagtgcgagcgtgtcaacactgttgaagatgacgatggtgcatgagcaagtgtaactataatactctatgatctcaacgtgttgatgtcatttactgccaccgtcagccatatctgtagtagcattgtaacaatgtactggctgacttaaacgttagtaggcagtttgtcccgtgcttaatacacaaccgatgatattgtgtacctgtatttgtaaaccttggtatagcggctgagattacacct

SEQ ID NO: 3727 - DNA, 198 bp, Triticum aestivum
  Clone ID: uC-tsro9316091a09b1
cccacgcgtccgctccagctgaaaagcatcatccccttcctcctccccaatccccaatccccttccgctcccacccacaaccctagctcccccgaatccatggatccaaccaaatccagcaccccaccgccggcccccgtcctgggcgcgcccgtcggctacccgccgggtgcgtaccctcctccgccgggcgccccc

SEQ ID NO: 3728 - DNA, 263 bp, Triticum aestivum
  Clone ID: uC-tsro9316091d04b1
cctcgacgcctgcttctgatcgacttcatcccatgttgttggacccacactatcaggcgcggcatatagattatagagtatcgtcatattttgcttctttctcgtaacgtggtacatgtgttgagtactgtctcagaacaatatttcttgtgtaatggtgtgcgtttttttcattcgtatgatccagatatatagatagacatgtcagattgatctgatggccttaccgaatgcatattttctcggggttcccttttttggat

SEQ ID NO: 3729 - DNA, 460 bp, Triticum aestivum
  Clone ID: uC-tsro9316091e10b1
cctccactgacctccagcgtaggcagcaccgggaagcaacctctctgctcaggctagcatggggaaggtgtgctgcagcagcgagtcggaggaggaggcggggttcagcttcctggggctcctcgtcgcggccgtcatcgccctggtgttcatgctcctctgcaccccgccgaagcggcgctccgtcaccatctacccgtgctgttgaggctgaggagtctccaaggatctctggttgctgggaggaaggttattcggttgttcatgggagagagcaggccaggcaatggtccctggttttcttcggttcagaaaataatttctactactgaattgtagggctcgtcgaaactgtaagccatgttttatcggtatattattaggctgtccatctccatctgtagcatgaactgatacatctggggaaaatagatatcatcagactctgtatgttgttttc

SEQ ID NO: 3730 - DNA, 370 bp, Triticum aestivum
  Clone ID: uC-tsro9316092a04b1
tcggacgcgtgggtgaaaattcaggggcagagcctacagagagagacacggatgacggaaaacagcctagcaagtcaaagaagagcaaacgtaagcataatgatggtgcacctgccgtagaggtttctgctggcgatcaaatcgtgacaagggaagataagaagagaaggaaggaaccagttgtgctggaagcgagcaaccaaacccaaaacacaaatgaaggtgagaatagagagattaagaagagaggaaaggaaagcagtaaagccagttcagactttagtgagaatgcatctgctgggggagaggaagctggtttaggtgttaataatgataagaagaaaaagaagagcaaggggattggaggagg

SEQ ID NO: 3731 - DNA, 257 bp, Triticum aestivum
  Clone ID: uC-tsro9316092b05b1
cttggatgcgtccatggcggcgacaaggctcaggaggttgctgacggactcacttggtggccatggtgtctaagtaaactaattggtcaagtattaagctcggctggaagatctgcagaagaccaaggggatggctggctgcgtctttgttcttcttaacataaacttaaattgtcacccgcaaaaaaaaaacttaaattgtaccttggtacattgtaatatcatacagtatgcatgcataaacacttttaattttt

SEQ ID NO: 3732 - DNA, 180 bp, Triticum aestivum
  Clone ID: uC-tsro9316092b10b1
gggatatatttgtttatttcttctagcgcctagccgagagaagagtggaggaacagagcagaattggtgtccggttctgtcagtacatatcacacacaggtttcgcttgatttattatacctactaagtattagtgctgtttggctgtgacatgtccacaaatcagcattggtgccatcc

SEQ ID NO: 3733 - DNA, 99 bp, Triticum aestivum
  Clone ID: uC-tsro9316092d04b1
tctgtggtcgaggaggtgaaggaggaggcggcgcctgctgccgagccagaagtggcggccgtcgccgaggaaacaccggctgcagcggaggaggcccca

SEQ ID NO: 3734 - DNA, 247 bp, Triticum aestivum
  Clone ID: uC-tsro9316092e06b1
tcaagccgccacccccgctcgcctctccctcccacctgccaagccgccactctcaagcctcttgctcatccgcgtgcagcatctctctagcttccccctagagagatctcacagccgaataagcagcagcaagaacccctccggccctcctcccagcaccaccaggaaccaagtcaagtcgccaatggccggtctcaggatgaagttcgtcgccgtcgccgccatggccgccgcgctcgtcgcctcc

SEQ ID NO: 3735 - DNA, 373 bp, Triticum aestivum
  Clone ID: uC-tsro9316092f05b1
cttcgaccaggccacctacgacaagctgctcaccgaggtgcccaagtacaagcagatcacgccctccgtcctctccgagcgcctcaggatcaacggctcgctcgctcgcagggccatcaaggacctgatggagagggggctcatcaggatggtgtcaatccactccagccagcagatcttcaccagggccacaaacacctgatttacctcatgtgttggctgcctgttttctagtccagtagactgagatgtcgctgttatattgacgttcattatgttcagcgaggcactttggcacttcgtgccacaagtatgttgaattgcttttgagtttttggtacaatctaagacgcaatgaaatctaccttatatt

SEQ ID NO: 3736 - DNA, 262 bp, Triticum aestivum
  Clone ID: uC-tsro9316092f08b1
tgaaataccacaccttcatctcaaagctgaaagtggaaggctactcaacggaacgacttctgtcgcattcgattgtatggaaggctcattgggtttatggtcccttggatgagaagaccaagtaggaggaaagagctggagatggccatatccacttgactaagtagttggttatgctagtggtaaattttgtgagaaggtgcatgcgaactgctgtgtaaacggagatcaccaaatcatatcaaagttgaaacggacatac

SEQ ID NO: 3737 - DNA, 86 bp, Triticum aestivum
  Clone ID: uC-tsro9316092g09b1
tgtctgaactgctaagtgttatgtagttcctttccggttgaattgttattccctgtcgaggacgaaatgaaaatttggttgcccac

SEQ ID NO: 3738 - DNA, 151 bp, Triticum aestivum
  Clone ID: uC-tsro9316093c02b1
ccataaactcttttttatactgggtttttgctcttatgtagacaatattatgtgacctggaacttatcatctttttgtctgtaatgtaacacctgaagtttagctttgattcagtgtaacatgatgcacacgtacgttattgtgtttttgt

SEQ ID NO: 3739 - DNA, 224 bp, Triticum aestivum
  Clone ID: uC-tsro9316093c07b1
tctgttgatgaagccatgatcttaattgctggtgcgggttcgtcgcgaaataagccgaggtgtgtgccccccgatgtgtgcctgtacgagtgtgtgttcttgtgatgtctcctcgtgttgaatgttcaggcttgtgcttgcgatcctgtctcatcttttactgaaatgagcgttcctatgctctggtttaataataaattgtgcctagatattatctcagcttc

SEQ ID NO: 3740 - DNA, 315 bp, Triticum aestivum
  Clone ID: uC-tsro9316093d02b1
cccacgcgtccggggagctctcaaggtgcctggaactgatcatgggtgacagggtggagggcgccgccatacgggcgagctcggcgacgtggaaggcgaagttgcagcaagcgattgcggccggcggctcgtccggtcgtaatctgaggactttcctggaccaatttgcgaatgatgcttagaagcatttatgtactatgcgtcctcgttttgttctactaaaatagccttgtttccgtatgatattctcccactaaaatgagcaactcagctcctgtaaaaaccttccgtccatggaatagtatattttaggag

SEQ ID NO: 3741 - DNA, 135 bp, Triticum aestivum
  Clone ID: uC-tsro9316093d03b1
cgtgacgcgtgggttcttgtccgagtgactacatcagactatcaaggattgttatttgttatgtaccaatgtggagtcacataggttatttgtgcctgtagagtaagaattatattaatgtgatggactcctgtc

SEQ ID NO: 3742 - DNA, 231 bp, Triticum aestivum
  Clone ID: uC-tsro9316093d10b1
tcgctcagattgggtttgagagtgtgtgttgtgcctgtccgtgcttggcttctgaattttcttctcagctgtaattctccctatgaatgttcttgattgggtttgacgggtttggccatacacctcatgtttggtctgttttttgggggctcgtctagtctctagggcatgtaaaatggttctattttaagaatgtcacgtaggataaatgatgagatgatctcttagcac

SEQ ID NO: 3743 - DNA, 114 bp, Triticum aestivum
  Clone ID: uC-tsro9316093e11b1
tcgcacctttgctcaaatgttttgtatgtggacctggaaagtattcaccatgtaaatgaactaacatttcaattgtgcttcgatgaggcgcaaacttgtgttcaaacatgtctt

SEQ ID NO: 3744 - DNA, 83 bp, Triticum aestivum
  Clone ID: uC-tsro9316093f01b1
cccacgtgtccgcccacgcgtccgcccacgcgtgcgtggcgctcgagcgatctgaaaagatctgctgtcgagccagttcctcc

SEQ ID NO: 3745 - DNA, 418 bp, Triticum aestivum
  Clone ID: uC-tsro9316093f04b1
ctgtcgcgtgggcggacgcgtgggcgggttcggccagacacttccgccgccgccgccgacgacgcgaaaaggagagcgaggccgactccgccgccgcgatgagggccaagtggaagaagaagaggatgaggaggctcaagaggaagcgccgaaagatgaggcagcgatccaagtaggcgccttggagcagcggaagcatcatcctacatccaggctgccaggcaccgagggatgacggcatggtctagtgattcctggcgtgtttgctgctatggctgtggaagctgtttaacctgtgttatgtccaatttagctgtttaattctagtctggttatgttccaagacagagttttatgtaatgtggggattatatgtgtttgtgactgaattttatgcacctattaattttgcggcgtc

SEQ ID NO: 3746 - DNA, 105 bp, Triticum aestivum
  Clone ID: uC-tsro9316093g11b1
tcgcggacgcgtgggcttttccgacttctttggtggcccgccattgtatacattctttcttcgagctcatgtatgattactttcatttgtatgcatagtgtatgt

SEQ ID NO: 3747 - DNA, 317 bp, Triticum aestivum
  Clone ID: uC-tsro9316094a09b2
cttttatctaatattcttgttaatatgctagttaagattggatactgtgctacttggtgctgcccatcacggcatgatcgttgccatcaagaacatcgatggcaagagcttgaataacaacctcgatagtttatatgttctgttgatgtaaaatggattgtactggttcataactctgttgtgtgatatattttgtcaatctatgttgtatgtcatcactttgtagaggattttttaaactgctgtgttgtagatacatacagatggctgtgttaaactttgtaatgtttcacaccttgcaaatattttttgttggg

SEQ ID NO: 3748 - DNA, 185 bp, Triticum aestivum
  Clone ID: uC-tsro9316094c04b2
cttcattctatgaagcttttggccttactgtcattgaggccatgacatgtggtctgccgacaattgcgacatgccacggtggccctgctgaaatcattgtgaatggggtgtctggtctgcacattgatccttaccacagtgacaaggccgcagatatcttggtcaacttctttgagaagtgcagc

SEQ ID NO: 3749 - DNA, 119 bp, Triticum aestivum
  Clone ID: uC-tsro9316094c06b2
atctctgcacactttcatgaatttgatgcaatcgaagtgacttgtgttgatgctaatttgagctttgcgtttggtcttaccatattggttggtttctttaccatccttcgacttactgt

SEQ ID NO: 3750 - DNA, 369 bp, Triticum aestivum
  Clone ID: uC-tsro9316094c09b2
cccacgcgtccgagatgttttcacaatgatctgtcccgtccgtcgtccatgaaagcgcaagctgttggttggtggttgcatttcccccagaaaggacctggtactcggaagaagtaggcctctaaagatgtgagcctgtctgtgtcggtgccgtctgtccgtaatctcggtgatgtgtatgttcttcttcatatttatgtatttgtagtgcagtatgcccgccgccagcggggaaaccccgaaagacgggggatactgttgtgatgcatcaggaacgccccaaagtgagggtggatgatgttgggagtgtatcttgctgtctctgtaccttaccttggtttggaaagttggaaccttgcatttgacttg

SEQ ID NO: 3751 - DNA, 360 bp, Triticum aestivum
  unsure (1)..(360): unsure at all n locations
  Clone ID: uC-tsro9316094e02b2
gagataattgctgagaggcaccagttacctatccaggattttgttgttcgcaacgacatggcttgtgggtcaacaatcgggccaatactggctagcggtgttggtattcgtactgtggatatcggagcgccacaattgtccatgcacagcatcagggagatgtgcgccgttgacgacgtcaactactcatatgaacatctcaaggcatattttgaagaattcactgaattggataacaaagtcaaagtagactgctgaggtgtagtagacgaccatataattgggtcagcagaacctgtacttctacaatcacaactacaatgcataataattagtaatgtcagattatgtatgttngtg

SEQ ID NO: 3752 - DNA, 146 bp, Triticum aestivum
  Clone ID: uC-tsro9316094f05b2
gcttaagaaatgagtccggctacccacagctggctagaaaagtcagcggccggctgtccaaaaaaaagagaagaggctgactgcctgctagctgactggtaaaaaagagagaagtcaagggctgtgtgcccagccagctggctaag

SEQ ID NO: 3753 - DNA, 252 bp, Triticum aestivum
  Clone ID: uC-tsro9316094g05b2
gatgtaaaccaacagaggtgtggtgcacctgcccggggaagctttggagctggtcgagagcgtcatgttatgctgtacttaggcttacctaatggcgtccctctttcagcgggatcctcaacgcgtaattccccatgttgacagtagctcgtactggtcctccatcacctgcaacgtcaaaataatcaacactgtaggtacttgggctttacctaatgacgtttcaatggcaatttcggcgctccgctgctg

SEQ ID NO: 3754 - DNA, 240 bp, Triticum aestivum
  Clone ID: uC-tsro9316095a02b1
gttccatatcagagtctacatgcaaagcagctgtatattggtggtgcagtatatttagttgtgtgctagcgcaagcaggcgttaccagcttgcgcgctctgagtatacggaaaatctagcatagcccacctctctgcgtgtatgcttgttacccttgtgttgaaactttgtaaggagcaccatcgttagatggcttgttaccctctcccatcaaggttgaataataatatatgctttctt

SEQ ID NO: 3755 - DNA, 310 bp, Triticum aestivum
  Clone ID: uC-tsro9316095b11b1
tgcttacgcgtgggcgcgcgcggacgaggagctggctgtgtcagcgtccacggcggcagccgtgtgctcctacgtggcacggcgtgatgctcagtcagccagtggagtggactggagtggagtgctactttttactactaggtgtggggtgctttgcgcggggtccgcgtgacgtgggctaaataaaagtgttgtcgggtcgacgcccagtcccaagtgtcggtcagcagagagcgagagacgcagtgccagtgtgccactctagataatgtatgcttcttttctcgacaagacatgcttcattatttct

SEQ ID NO: 3756 - DNA, 133 bp, Triticum aestivum
  Clone ID: uC-tsro9316095c02b1
ctgatcttttggtgtagccgtttagactccggaattcaacaaccctgtgccgcgggctgcgcttgtttcatgaacctatgcattgccgtgttctcccgtgttccaagcggggaggagacagatcattcgcctt

SEQ ID NO: 3757 - DNA, 133 bp, Triticum aestivum
  Clone ID: uC-tsro9316095c07b1
tttgtaaaaataagaaataaaaattaaaaaaaaaaataaaaaaagaaaaaaatctaaaaaacacacgaagaaaaagaaaagttataaaactaaataataaaaaaataagacaaaagaaaatagaataacggat

SEQ ID NO: 3758 - DNA, 130 bp, Triticum aestivum
  Clone ID: uC-tsro9316095d09b1
ttggttaaaaaaaaaaaaaaaaaaaaaaaaaaagaaaaataaaaaaaaaaaaaaaaaaaaaaaaaaaaaaaaaaaaaaaaaaaaaaaaaaaaaaaaaaaaaaaaaagggggcggccgttttagaggaccc

SEQ ID NO: 3759 - DNA, 441 bp, Triticum aestivum
  Clone ID: uC-tsro9316095e01b1
atcgttttctcctgcccattctgcaaccatgggagcagcgttgagtgccggattgatttgaagaatctgattggtgaggctaactgtcaaatctgccaggaaagcttcagcaccactgcaaatgcgctgactgaacctattgatgtatacagcgaatggatcgatgagtgcgagcgcgtcaacactgttgaagatgatgatggtgcatgagcatgtgtaactataatactcgtatggcctcaatgtgttgatgtcatttactgccaccgtcagccatatctgtagtagcattgtaacaatgtactggccgatcgaaacgttagtaggcagtttgtcccgtgcttaatacacaaccgatgatattgtgtacctgtatttgtaaaccttgatatagcggctgagattacacctaatctcggtacctgcaaaagaattatactt

SEQ ID NO: 3760 - DNA, 93 bp, Triticum aestivum
  Clone ID: uC-tsro9316095e07b1
tctgtaatgctatgtggctcttatgggcctttatctatatgagtttgagttatgttgtgatgccatgttgtacaacacatactatggtaagac

SEQ ID NO: 3761 - DNA, 471 bp, Triticum aestivum
  Clone ID: uC-tsro9316095f02b1
ctcactcgtccgccaaacctatgccacacccagagccagagccttgcaaacctgaaccgatgcccaaacccaaaccaaagcccgaaccaaagcccggacagaagcccgaaccagaacccaagcccaagccgatgccaaaaccaaagcccaacccctgctccaaaccaaagccaggtcctaagcccgagccaatgccgaaacccgaaccaaagccggagcccaagcctaaacctgaaccgaaaccgaagccgcctcctaagtgcaaaccaccgacagctcacagttgatgggatactctatatacgacagttcatggaggagaccccatacgaagccacactatgctatttctagaataagtggtgtaatattccctgtattccagttatttctattgttccatgcatgtgtgatgagtattagtactctgtatttttttttgcttggtggtatatgttcatctactttggt

SEQ ID NO: 3762 - DNA, 228 bp, Triticum aestivum
  Clone ID: uC-tsro9316095g11b1
tttctcacgcgtccgatcagaagaaagaaatcgatggacacgataattctttcgctcgtggcgtccgtgtgcgcgtttcttatgttcatctactggttgtcaaagtagtaggatgttggccgcagcgaaaaggcgtcatagtgttgtaagtttggatcacagtgccggtacagataatgatatgattggtgtttgtacaatattgattcaatgctatattactttttt

SEQ ID NO: 3763 - DNA, 135 bp, Triticum aestivum
  Clone ID: uC-tsro9316095h02b1
cctttgcttccgaaaaaaaaaaaaaaaaaaaaaaaaaagaaaaaaaaaaaaaaaaaaaaaaaaaaaaaaaaaaaaaaaaaaaaaaaaaaaaaaaaaaaaaaaaaaaaaaaaaaggggggggcctttttaaaggat

SEQ ID NO: 3764 - DNA, 133 bp, Triticum aestivum
  Clone ID: uC-tsro9316095h05b1
aatacatttactctatcttttcctccgggcctgtgtgtgatgccctgccgtaaatgttctgaacctatgtattggaaggtcacatataagaatctgtatttgttgtcctaaaacctgcttagtagtttgtgcg

SEQ ID NO: 3765 - DNA, 303 bp, Triticum aestivum
  Clone ID: uC-tsro9316095h10b1
tcgattatcatccctgataccaaagctcatcttcttctccttgaaatctttttgggtccacagatttggaggatgtcttgcaactgcggatcaggctgcagctgcggctcagactgcaagtgcgggaagatgtaccctgatctgacggagcagggcagcgccgccgccgaggtcgccgccgtggtcgtcctcggcgtggcgcctgagaacaaggcgggacagttcgaggtggccgccgggcagtccggcgagggctgcagctgcggcgacaactgcaagtgcaacccctgcaactgttaagct

SEQ ID NO: 3766 - DNA, 248 bp, Triticum aestivum
  Clone ID: uC-tsro9316096b07b1
tcggtctgaacctcgacaatcgcgaggttctgaccgaggcatgtgcacgcgccgaggcctaacggcatgaacgccgcctgcgggttcttgcacgccgtcgacaccccgttcttgaaccggtccgggtcgaaccggtcaaccgtcgggccccaagaagcggcgtcgtggtgcatggaggataccggcacgaagaggtcggtgcccttgggcgcgagcagctggcccagccaaatgtcgcggaaccgcga

SEQ ID NO: 3767 - DNA, 440 bp, Triticum aestivum
  Clone ID: uC-tsro9316096d02b1
ctttgccgctccttccctcgcccctgctgctgctctcccaacctcctcctactgcttcttatcctatccccacgctgctcctattccctttccttgctagtgttcctttactgaagaaaacaacctgctggtgttctttacctgttgctgatcctgtacttctctgaatcccaaactgctgcttctctctctctttttcttgcaaaaatattgtacgatgccttgtaagaattggcgaactgtccagtattaaagcggtttagtaatattctgttgatatgcgagtactagtttagtggctcgcgtaatttcgtttgtgttgtcactcgtgtaacctgaaccttggtgtagtaccttgtgcccatatgtgtggctatgtgtgtactgtagttccaacgtcaactatgctcatgtgaaaatatatatgtttgtgctgcgat

SEQ ID NO: 3768 - DNA, 491 bp, Triticum aestivum
  unsure (1)..(491): unsure at all n locations
  Clone ID: uC-tsro9316096d11b1
ttgctcccccacccccacccgccttccttcctgcgcgacttgcctgcccgccctcagtcagccggccatggcgctcctcaccgatctcctcaacctcgacctcaccgactccacggagaagatcatcgccgagtacatatggatcggcggatctggcatggatctcaggagcaaggccaggaccctccccggcccggtcaccgatcccagcaagctgcccaagtggaactacgacggctccagcaccggccaggcccccggcgaggacagcgaggtcatcctgtacccacaggccatcttcaaggacccgttcaggaagggcaacaacatccttgtcatgtgcgattgctacaccccagctggagtgccaatccccactaacaagagatacaacgctgctaagatctttagcaaccctgatgttgccaaggaggagccatggtacggtattgagcaggagtacaccctnctacagaaggacatcaactggc

SEQ ID NO: 3769 - DNA, 95 bp, Triticum aestivum
  Clone ID: uC-tsro9316096e05b1
gttaaccgattgtggctctggccgtgtgcgtgcatagggatgcaaatttgtagcgttctggggtgcctgtgacccttagttcaactggatgaagt

SEQ ID NO: 3770 - DNA, 152 bp, Triticum aestivum
  Clone ID: uC-tsro9316096e11b1
tcgcgaggtgttgtgaactcaagtttatgtactatgtatcgtctatcagttatagctagtgatagtctacttagcacatgtcacttatgacttgcgatggttaaacttttttcttttttgcgatggttaaactatagtagtgtttaccgctc

SEQ ID NO: 3771 - DNA, 290 bp, Triticum aestivum
  Clone ID: uC-tsro9316096f03b1
ggaagatggcgcacaaggccgagtgcacgcccatggaccggtggctcgacggcgccaacgcgaaccccaaccccaatgccgtcgcaggcgcaggcgacgccgcggtggccgctccggccctgtaaccgccgccgtgtccttgcacccgtttcttttatttttctggccagttctttcctctttttcttccttggtctttttccggacccttctctgtacatggtcgctgcggtaaaggttagccgagtctggttacttgcgaattgcttttagtaagaaaaacttttatt

SEQ ID NO: 3772 - DNA, 318 bp, Triticum aestivum
  Clone ID: uC-tsro9316096f10b1
tcgcccacgcgtccgctcatcatcatccccgataccaaagctcatcttcttctccttgaaatctttttgggttcacagatttggaggatgtcttgcaactgtggatccggttgcagctgcggctcagactgcaagtgcgggaagatgtaccctgatctgacggagcagggcagcgccgccgcccaggtcgccgccgtggtcgtcctcggcgtggcgcctgagaacaaggcggggcagttcgaggtggccgccgggcagtccggcgagggctgcagctgcggcgacaactgcaagtgcaacccctgcaactgttaagct

SEQ ID NO: 3773 - DNA, 491 bp, Triticum aestivum
  Clone ID: uC-tsro9316096f11b1
tttcttacgcgtccggaacgccctcgcctacaaccggaacctgctggtgcggcaggtgggcaacgagggcacgccgctgcgcccccgccagcgcctcgaggactacctctttgcgctcttcaacgaggacatgaagcccggccccacctccgagcgcaactacggcctctaccagcccgacggccggatggtctacaacgtcggcctcgcccagcagcagaccacgtcggcggcctccctctccctcgccgcctcctccgcgccccccgccatggatgttggaaaggacttgacgagcctgtgcctcatctcagctctggccatcctgctcacctcccaggctttcttactgggatagcaaaagcacccaagagtgcggccatatgcatgcaagcaaaatggccttgacttttgtggaccaaaagccttgcagaccaaagggcagagatggtgcaccatttgaagggggcacaaggaaagcatatgcggtg

SEQ ID NO: 3774 - DNA, 95 bp, Triticum aestivum
  Clone ID: uC-tsro9316096f12b1
tttattttttgagctaaaaaaaaaaaaaaaaaaaagggaaaaaataaaaaaaaaaaagggaaaaaaaaaaaaaaaaaaaaaaaaaaaaaaaacag

SEQ ID NO: 3775 - DNA, 124 bp, Triticum aestivum
  Clone ID: uC-tsro9316096g02b1
ccctcgcttccggataaattgagaccaagtttgtaaggctggcaaggttaaggagctgcgctgcccagccaccatgaataatctgaacgtggtgtaacttttcatccaacaatttttctactac

SEQ ID NO: 3776 - DNA, 225 bp, Triticum aestivum
  Clone ID: uC-tsro9316096g05b1
gtttactggcgccgagctcgctctggcggagcaccaggggaagtacttcgccggcatcgctaagaagctcaagtccgtctgaaatctgatttactacaccgtaattcatgcaatgcagtgcaaagatgaactcgtcatatatgtatggagcaggatttacacaattctgtaacacgttcccgttcctttccactcttgtttaataataataataatactccctcc

SEQ ID NO: 3777 - DNA, 158 bp, Triticum aestivum
  Clone ID: uC-tsro9316096g10b1
tctgcctaggttttcggtcgccgccggtgaaactgggtagtagcggctcgcgtctggtctcttctgtgtgttggtgttgatatgctgtgtcgtcttgtcctatgtagcctgatgctggaatgaaatggcaatgaaaggttcagttatcatctggtgct

SEQ ID NO: 3778 - DNA, 462 bp, Triticum aestivum
  Clone ID: uC-tsro9316096g12b1
tttctttatgctggttggtgacgtcccatgggagaggttcaccgagtcttgccggaggatcagggtcatgaaaagttcagatgtgattggacttggagttacaagggcaggggtcaagtccaagaataagaactaagacggtcgctgcccacggtttgaagacgaggtcgcacatatcgtctgtactactgcatggttttcctatcccgcaagtaaaatcacccgttactctactgtttaagatttgcgatatctcctagagacttatgctctatattttgttgtgcccacgttgttgtacgcgtgttatttccatccgtgtaaatggttggtatgcagtgcgagagctactgctgtgtttgatgacccctatgtattttgccactcttgtcctgaaccggtcgttcgtcgtaaatgtgaaggttgcaagactattatttacctgacgaactttgcttgggc

SEQ ID NO: 3779 - DNA, 444 bp, Triticum aestivum
  Clone ID: uC-tsro9316096h09b1
tctcctacgcgtccggtagggtttccagttgcaaggggcgccgccgccgccgccgccatgggacactcgaacgtctggaactcgcaccccaagaactacggccccggatcgagggtttgccgtgtctgcggcaactcgcatggcctgatccgcaagtacgggctgatgtgctgcaggcagtgcttccgcagcaacgccaaggacattggcttcatcaaggtatgcgacgccacactgtccatggatttcctaaatttgatggccgccgagtaatactataccgttaagaatggaaacctcaaaggaagcaaggactaggaaattatcaacgaactgtggtgcttcatcgaggctgatctttatcctataagctatgtaatgaactgctattatgtttgaatcctggtgacaaaaccgtgaaacatagttagtgactgctgtttg

SEQ ID NO: 3780 - DNA, 211 bp, Triticum aestivum
  Clone ID: uC-tsro9316097a11b1
tcggtatcccaggcaggaggcctgcgcctcgttcgatctgtatcccagtttgcgctagtcttcttaaggcacacttgtttagcatatgtctgtactcagatattgttgcttccgctgactcgcctatgatcgagcacttgtattccagccctcgaggcccctggcttgcattatgatgcttgtatgacttattttatttgcaaagtgtgtt

SEQ ID NO: 3781 - DNA, 135 bp, Triticum aestivum
  Clone ID: uC-tsro9316097c10b1
tttcttcatcggacgaatggatggtcgcattctgtatgtagctagctgccagtttgtgttctgaagatgttatctcgtgagaatcaaattgcatcgcctgtcggcctgaagaaatagtaatgttcctttcagtgt

SEQ ID NO: 3782 - DNA, 329 bp, Triticum aestivum
  Clone ID: uC-tsro9316097e03b1
gtttaatccaaggaggaggccatggctgactacatcaccaaggtgaagcagctgctggaggaggctgccgccgcatctgcttgatcccaggccacaaaaccgcaatcgctattgttatcctggtggtgcagccatatgtgccagcaaacacaaataagtttcaagtactagttgttgtcaagcttatcgccgccgtgggtgtaattacgttgaacaagccctgtgatacatgaaagtgcaatctcagtttacaccatgattgattaatactcctacatgtcttctgttgttaagatgttttttttctttggggaatccctgttcctgat

SEQ ID NO: 3783 - DNA, 288 bp, Triticum aestivum
  Clone ID: uC-tsro9316097e11b1
tctctgctgggatcatggaccatgaggaggcaaggcgtaagaatgttggtggcaaggtgctaggctttttctactgaaaatggaaaatggaaaattcgatgaaagtatctgagatgtgttagtaggatatttcccaaggaacacctaagttgtctttttttgtctgactagctgccgctgcttgttgagttattctggaatccgttatgcactttcggattgggtgcctttgtttgaaaactatgagctgtgcctgtcgttaattctgaaaaatccatatgcaatatt

SEQ ID NO: 3784 - DNA, 183 bp, Triticum aestivum
  Clone ID: uC-tsro9316098a02b1
tgcatcagtataggcatctgtgcttgtgagggggcatccattactcccggcactcttatatgaagaatctgcagaggatgcagtagcaggtaggtgtaggcttctgtattttgcagagaatgcagtatatgtggaatctagcttttccaagcatgatgaatttaattttgttttctttattat

SEQ ID NO: 3785 - DNA, 103 bp, Triticum aestivum
  Clone ID: uC-tsro9316098a04b1
tctattcgtccgaaaaaaaaaaaaaaaaaaagggggatttaaaaaaaaaaagaggtgaaaaaaaaaaaaaacaaaaaaaaaaaaaaaaagggggggccgtttt

SEQ ID NO: 3786 - DNA, 354 bp, Triticum aestivum
  Clone ID: uC-tsro9316098b03b1
tgcttttgacaatcgaaccggagattctcgtggtttctgccatgttgatttcgaggacgatgaatcgctcgagaaagctgttgggatgaatcaatctgaactgcggggaagacctgtgaagatagcgtatgctatcatcaacagggcttgaaggctggctagctggtgctcaacatttcgcattattgagctagtgagattcagttgtaaggtcttgcccccttcactgtttccattatgtttctatagaccaaacatgccatatattggccagaagtaatgatcgtgtaacaaatacttttgggctgcatcttatcaatctatcttaaaaatcatgctgctcgttgttctgtc

SEQ ID NO: 3787 - DNA, 486 bp, Triticum aestivum
  Clone ID: uC-tsro9316098c08b1
tgttagaagcacacaggaagctcctagccaacaccaatcaaagcctccatccaatcccaagcaacctcgaagatgtcttgctgcggaggaagctgcggctgcggcagcgcctgcaagtgcggcaacggctgcggcggctgcaacatgtacccggaggtcgaggccgccggcgccaccctcctcgtctccgccactgccacccacaaggcgagctccggcgggatggagatggcggcggagaacggcggctgcggctgcacccagtgcaagtgcggcaccagctgcggctgctcctgctgcagctgctagatcattgatcatgcatgcgccgcgtgcatcatatctatgatctatctaccatctactaccatgtaacgctgcctgatcgagggtctttgtatgtatgtacgcacctgcctgcatgagcagagcgggtgccatgccatgcatgtaaacccctaaataaaatctcccgtggttttgctt

SEQ ID NO: 3788 - DNA, 127 bp, Triticum aestivum
  Clone ID: uC-tsro9316098d07b1
tcgtcggctcaatgcctccttggaactccaccctgtttaacttcttcctcctgattccttccactctaaattaatttagggtctgggtgtgtagtttttatggtgggtgtgacggatcttggggagg

SEQ ID NO: 3789 - DNA, 128 bp, Triticum aestivum
  Clone ID: uC-tsro9316098f03b1
atattaaaaaaaaaaaaaaaaaaaaaaaaaaaaaaaaaaaaaaaaaaaaaaaaaaaaaaaaaaaaaaaaaaaagggaaaaaaaaaaaaaaaaaaaaaaaaaaaaaaaaaaaaggggggggccgtttta

SEQ ID NO: 3790 - DNA, 337 bp, Triticum aestivum
  Clone ID: uC-tsro9316098f11b1
ttttgaataacgaaacctccccagcggctgaatctcggaacctgtcttcggtgaactcagttcagtgttcagtcgcagcaagaaagaagcgaataatagcattccgtagtttagggttgcctcctggccctggacaatgggtggtttgttgtacttctgcatcgggctaggaaatctactaccaattgttatcagactattgtctgtactcctctaagatctgtacatatgctatcttaggaacttcctggtgtgagataagttaaggagcacaatttatcatgtgctgctggtaatgcaagtgtgttctaaaccttaataacaagtggattctctt

SEQ ID NO: 3791 - DNA, 193 bp, Triticum aestivum
  Clone ID: uC-tsro9316098h09b1
gatgaccggcgccccaagcccgagggaggttttgttatgttaacacagtggttacatcgagacggccatgctaaggaaaaaaagtctagtgcaaagaaacatagctgtatcctatatgtgaactctgatcattccgtattgacattgagatatatccttgattcgtcaaagcaagtgattgtaatggattaaa

SEQ ID NO: 3792 - DNA, 85 bp, Triticum aestivum
  Clone ID: uC-tsro9316099a08b1
atcacttgtccggcacacagtgccagtaatctacgagaagtatgaagatcagattgatacctatggcgagaaggggtggattgag

SEQ ID NO: 3793 - DNA, 106 bp, Triticum aestivum
  Clone ID: uC-tsro9316099b04b1
tgtgcttgatcgcaagctatctattttccttcatctaaatcttgatggttggttttgcccttcaaaaaaaaaaaaataaaaagtaaaaaaaacaaacaaaagtaat

SEQ ID NO: 3794 - DNA, 434 bp, Triticum aestivum
  Clone ID: uC-tsro9316099b11b1
tcgtttcaacctccacaagcgcctccatggctgtaccttcaagaagaaggcacctaatgccatcaaagagctcaggaagtttgcacagaaggctatgggcacaacagacgtcaggatcgacgtgaagctcaacaagctcatctggagcagtgggatcagaagcgtgccccgtagggttcgcgtgaggattgcccgcaggaggaacgacgaggaggacgccaaggaggagctctactcactcgtcactgttgccgaggtgcctgctgagggtttgaaggggctgggaaccaaggttgtcgatgacactgagtagaatctttctttatctacatcgttagaatgagctgttattttgcattgcaccagcatgttttttgtatcccatggaagttttggagtatggaatatcgcaagctatctattttccttcatct

SEQ ID NO: 3795 - DNA, 292 bp, Triticum aestivum
  Clone ID: uC-tsro9316099c05b1
tcgttataccaaagctcatcttcttctccttgaaatctttttgggttcacagatttggaggatgtcttgcaactgtggatccggttgcagctgcggctcagactgcaagtgcgggaagatgtaccctgatctgacggagcagggcagcgccgccgcccaggtcgccgccgtggtcgtcctcggcgtggcgcctgagaacaaggcggggcagttcgaggtggccgccgggcagtccggcgagggctgcagctgcggcgacaactgcaagtgcaacccctgcaactgttaagct

SEQ ID NO: 3796 - DNA, 195 bp, Triticum aestivum
  Clone ID: uC-tsro9316099c09b1
ttcgctcccatattactcactcccctcctcccccatcctcccatcgactcgcaagccctcaagctacagcgcaaggtcgtgatggctccacgcgtcggcgtgctgctcctggccgtggccgtcttcttcgcctctgcgtcggcgcaggacttcatggcgcctttctcagcccccgctccggtgcctgacgccggc

SEQ ID NO: 3797 - DNA, 172 bp, Triticum aestivum
  Clone ID: uC-tsro9316099f06b1
gttggtgaaggggagcgagaacccccgcagctactacaagtgcaccttccccaactgccccaccaagaagaaggtggagacctccctggagggccagatcaccgagatcgtctacaagggcacgcacaaccacgccaagccgctcaacacgcgcaggggctccggcggcggc

SEQ ID NO: 3798 - DNA, 287 bp, Triticum aestivum
  Clone ID: uC-tsro9316099g02b1
ctggatcaaggcgctggatgcctcattatctgggaggatcagaagacagaggccatcttccctgctacactagaaaccatttcaaatgtcggaaaggttgtggacagtctttacatgaggtcggataagatcatggcttgaaagttgctaagcatgtgataggctgtttggtatgggttcagccttttcagttcctttgctttctttaagacatgtaatcctgcatattggcacttgattttgcatgttggtcgttatattggatcatagaaaaatacatcttgctc

SEQ ID NO: 3799 - DNA, 431 bp, Triticum aestivum
  Clone ID: uC-tsro9316099h09b1
tcgttcttgtgtttgctaacaagcaagatcttccaaatgccatgaatgctgctgagatcactgataagcttggcctgcactcccttcgccagcgacactggtacatccagagcacttgtgctacaacaggggagggactgtatgaaggcctggactggctgtccagcaacattgccagcaagccctaaattttcgtcaagattttgaaggagctaggagcgctttggatggacgattgaatcaccgggtacctagggattgtgttgggagggatggtgctatgctattcccgtatgtactgtgtattttcctgagatcaacagttactgagccagctccggctgaggtttcactgtcatactattgttttattgtattcgagccctaagatgtttgcgaagcaaacagctaaagagagtcctggtcaattt

SEQ ID NO: 3800 - DNA, 320 bp, Triticum aestivum
  Clone ID: uC-tsro9316100a09b1
tgtggttggtgcgcagagcttagcgaacgccattgatcgccaccgaaaccctccctctctctcgtctcggctcggctcgcctcgcctcgcctcgcccactagcccgcacgtccgtccaggcgacgatgccgccgatggcgaccacgacggcgacggcggctgcggccgactccgcggcgcgccgcttcgcctcggcctgcggcgtgctcagccagtacgtcagggcgtccggcgtctcggcgcccggcgtgctgggggccgccctccaggagcccggctcgccggcggacggggcgcaggagctgaccatcttctacggg

SEQ ID NO: 3801 - DNA, 325 bp, Triticum aestivum
  Clone ID: uC-tsro9316100a10b1
acgagaaggtcggcgacatccgcaacggggccgtggaggcgttcgcgcggctcaagacgcggtgggcgtgcctccagaagcgcacggaggtgaagctccaggacctccccgtggtgctgggcgcctgctgcgtcctgcacaacatctgcgagatgcgccgtgaggagctcgagccggaggtcccgtttgcgcttgtcgacgacgataccacgccggagacccctgttcgctccgagaccgccaagcaggagagggacagcatcgcgcacaaccttcttcaccgaggtttcgccggcaccacatttttctgatcaaatcacctcct

SEQ ID NO: 3802 - DNA, 94 bp, Triticum aestivum
  Clone ID: uC-tsro9316100a12b1
tatcgataagcatgcgtctaaatcatgctgatatatagagttgtaatatgaaagacttggaggtgaaatgcaaatttcattcttgtcttgcctc

SEQ ID NO: 3803 - DNA, 120 bp, Triticum aestivum
  Clone ID: uC-tsro9316100f02b1
ttcacgcgtttgcccacgcgtccgctcctcttcgtcctgcaagcagcgccgccgcctttcaccggtccgagctccagccttcccttcaaccatggctgacgttgatgtcgaccccgaggt

SEQ ID NO: 3804 - DNA, 277 bp, Triticum aestivum
  Clone ID: uC-tsro9316100g08b1
ttcatgacggatctgggcagggactgggacatcgactacgaactcctcgtcaagctcaccatcgacctccccatcatcggcaacttcaccatcccgctcgaaaccgccggcgagttcaagctgcccaccctcagcgacttcttcggcggcgccgccaagaccgaggaggccaccgcctagccataagctcgatctagctcgcagcttgctctgcatccgcatgcctgtactctaccgttgccgcaataatgagagcaaatattttcggatttctttc

SEQ ID NO: 3805 - DNA, 179 bp, Triticum aestivum
  Clone ID: uC-tsro9316100h06b1
ttcacgcgttcgcccacgcgtccggtttgtctgtgctacacatatagtggtggttcatatctgaggtctggcaaatagattggatccgtcaaacatgggctcattgcaccctaaggatatacacaatgtgataatgtatcggatttacttcccctttaatctgcatgctgtttaggatc

SEQ ID NO: 3806 - DNA, 159 bp, Triticum aestivum
  Clone ID: uC-tsro9316101b11b1
tttagcctctctgcgcacctctgcttcacctctacccggtggccttggcttccccggcggctgtcagcgagcccccgacggagcaaaagcgccgccagcttggcttctgagctctgacctcgcttctcacccaccccgcacctacctaccccgtacatt

SEQ ID NO: 3807 - DNA, 408 bp, Triticum aestivum
  Clone ID: uC-tsro9316101c05b1
tgtttccgttgacgcgtgggcgccgagaaatgggggatgctgaggcagaagccgagggcgtgctgcggggcgccgggcgtgggggtgtacaacttcaacctgacgtccaagtgcggggagccgggagcgtacgcgtgcgacgacccgtccaaccactggagctgggacggcatccacctcacggaggcctcctacggccacatcgccaggggctggctctacgggcccttcgccgacccacccatcgtcggcaaccggaacctcgagtagtactgtagcagcagtggtacagggcttgtttttgcgtacatgccacctgcacatgggttttactactgtatgtagagaaagaaaggaaaacaagtcaaagaacacacatgccttgtgcagattaattgattgctaatt

SEQ ID NO: 3808 - DNA, 312 bp, Triticum aestivum
  Clone ID: uC-tsro9316101c12b1
tttcgaatccagtccgcctgctgcgccgccacctccgggatgagtgccaagcggaagaagaagaggatgaggaggctcaagaggaagcgccgaaagatgaggcagcgatccaagtaggtgaacaacgaggagaaagctgaaccttgtatcattgcaccagtatgctgggatgatagggtgttctggttcctgatatgtctgggttgctgtgatatttgggtgatgccaacccttgtaacatgaggataattatatgctttccatcgaggctggatattcagcttaagaaatattatcatctatttttgattt

SEQ ID NO: 3809 - DNA, 117 bp, Triticum aestivum
  Clone ID: uC-tsro9316101d03b1
tttccggtcgcctgatagtaatatccttgtatctcggtgctcctgtagtttgcacgttcagtctcaccagtgttgttaagctacttgtctgtacaattccttcctaaagtttcgctt

SEQ ID NO: 3810 - DNA, 360 bp, Triticum aestivum
  Clone ID: uC-tsro9316101e10b1
ttacgccttcctcttcgccgaccagttcgccttcttcaacggcggcgcctacgagtccctcgacagcctcttcagcgccgacgccgtgcagagcagcgccaccgccaccgccgtgaacgaggcggccctggggctctggaccttcgacgacgactgcctcgtcgacgagtgcagcctgtcgttctagatcttgttccgtgtgcgtccgttcatgtcatgagatgcggtggtgtaaatagagtagcttgccttgtgatgaaatccgttcgtccgtcgtcgcttcttggatcagcaagcgatgatggattctgtgtaagagtttggcatcgtcgtgaaagattttgcctacgccttcgatgc

SEQ ID NO: 3811 - DNA, 52 bp, Triticum aestivum
  Clone ID: uC-tsro9316101g05b1
tttccgttcacgcgtccgcccacgcgtccgcccacgcgttcgcggacgcgtg

SEQ ID NO: 3812 - DNA, 215 bp, Triticum aestivum
  Clone ID: uC-tsro9316102h11b1
ctttgcgtccggcaatatctgtacctgggtgcactgcacacttgttgcacatttactatatattttgtatttcagcatgtaagctcggttctagctagttatgttttccagatgttgccttcataatgagtagcagtggaagactcggtaggcgtctgaaaactgaaactgcgtcgcaggttttgggcaggctgcaaaactctattgtgggagtc

SEQ ID NO: 3813 - DNA, 294 bp, Triticum aestivum
  Clone ID: uC-tsro9316102h12b1
gtctacggacgtaagcttgagcgccgcccagagcaggctcgtccgtggccgtcgagacctccatgagaggatcgctcgcgacccagcgctagcgcggttctttcaactcccggaggtcgaatgaacgcgccccgctacgccgtagccgcggccaagttgctcgccaagcacttgccggtagcgccttccgagccgccggctcgcgagcgtggcttggagacgatagagcgcgccatgcaggcgcgcgcttttcgtcgtcgtcgccgactcctgctcggcggcggaggcttcggt

SEQ ID NO: 3814 - DNA, 203 bp, Triticum aestivum
  Clone ID: uC-tsro9316103a07b1
catagggcgagccgaacaacccagcggcatcagatccctcccaccggcgccgcgctgcgcactgcagacggaaacggccaaaggagagcggcgtggggcggagcggggggcgatggggaagtacatgcgcaagtgcagggcggaggacgtcgcggtgggcggcgtggaggtcacgcaggccgtcggcgtccggacgcggtccc

SEQ ID NO: 3815 - DNA, 271 bp, Triticum aestivum
  Clone ID: uC-tsro9316103b07b1
tgtctaactctcagtctcatcatctcgatcagcatttgggtgatctgcgcatgcctagcctgaggcagtgcagcaccttagagaggcagctgctcggccacctctcagccacgaagatgaagatcgccaaggccccggtgctcctgaagaaggcggtgaccatgtgcaagagcaagaccggcgtgctcgcggccaggctcctcttcctcgcctcgctccggcgcaggatggccaccgtcggcgtgatgtctcacaagatacacgcgctcat

SEQ ID NO: 3816 - DNA, 278 bp, Triticum aestivum
  Clone ID: uC-tsro9316103d01b1
ttcacgcgttcgcccacgcgtccggaaactgggaaggggaagttgagatgtacatttcaggaactgaattcactgatagatactgtagtcaggagcctactgtgtagataatcggagctgttattttttcctggaatgctgtaattgtgtcttggtgtggatgctgcgctgcgttggcgggattattggtggccgaataatattggctgggtgtagggcaggagttcttcctggaattaatatgctgtgattgtgtctcgagtaacattttgctcttt

SEQ ID NO: 3817 - DNA, 388 bp, Triticum aestivum
  Clone ID: uC-tsro9316103e08b1
ttaagagaaggactggagcgagatcttcaccaaggcggttttcagtggctataagattgtcaagaagctgggagctcgagctgtcattgaggtctacccgtaaggttgtgctcccaaagtaaagatgcttacatatgttgtggattgttgtgtgctcgctctaaggatgcataaataaaggagcgccttgtcattttccaaagagaagtcctgggtagatcatagaatagcaaggcggttatgtcttgttaccttatgatgatacctacggaactttcttttggaaaaaatagtatgcatttagagtgcttttcatatgcagctacagcgatttccatatgtgtaccgtgtacaatatcatataccataagataagatcacaccttgt

SEQ ID NO: 3818 - DNA, 408 bp, Triticum aestivum
  Clone ID: uC-tsro9316103g09b1
tttgtccgcttacgcgtgggcggacgcgtgggctgatctctgtagttatctgtactgcatgccatcagcaccaggtgtcgatatctatgtcgccatggaaattaaggagagcatggaccacttggcgtgtcagttgccccttggatacatgaccattattctttcatatcagagtggaccatgcttgcttgcattatcattgaaaattgagtccccatcggtggtcgagggatagccatgtttgaaccagtcttttccttcttggagtgagaaatagccgagttccctatttttagggtggaagcactcatattcatgttctggttacgcttactgtcaatcttatcatattggttaatacatcttgaacaattgatcttctgcaagattggggttgctctttatgac

SEQ ID NO: 3819 - DNA, 146 bp, Triticum aestivum
  Clone ID: uC-tsro9316103g12b1
ataaaaccggcgatcatatcgcttgcatttgcgtgcatgcatgcatgcaagtagtacagtattcttcatctccgtgtatcgattgtatccctacatatgtatatggtgtacatgcatgtaatacgtaatggtgtacattttgcttc

SEQ ID NO: 3820 - DNA, 351 bp, Triticum aestivum
  Clone ID: uC-tsro9316103h11b1
cttaggcatcgccggcatatggctgaaaatgcaccacatcgacgcaaagcgcgccatggctctgcccggcaagtgcggtctcaccatgcccaacaactgctcgtgatgattggttcagatgtactacccatgagcatctaggagtcggttgctctacatctgcatcaacacttatatatggctaaataagtggagaagcacttgaaaaagcattgtcctactcggtcttattgttattgtgtaatttgaaagtgtgattatctcattaagctcttgataaaatagtatatgcatgttaagtgtaaggatggcaaacgcgtcttgcatgttgtcccatgaaattaatatctt

SEQ ID NO: 3821 - DNA, 84 bp, Triticum aestivum
  Clone ID: uC-tsro9316104b10b1
cccacgcgtccggctgcgtctgccacaatgagcatactgtttggggaaaagttgtctcaacttataaataagcattttttttct

SEQ ID NO: 3822 - DNA, 308 bp, Triticum aestivum
  Clone ID: uC-tsro9316104d06b1
gtttgaagcttaccgtcgccaaggcgccgtcgaaggcgccggccgccgtggaggccccggagccgtccgcggtcgtcgacgacgcgacaacctcgtccccggcggtgaccaccgtcgcgcgcgtgtgccaggtcaggatccgagtcaagatctggaagtggaccttctagtgacgactcaaactcccagggggcacattgtgaaagcgaaccaaagccactttacttttcacctgggacgcgtcggtagtagagatcacaaccgactgttgctgtaaaaaaatatcccatttgaattttacgaaattt

SEQ ID NO: 3823 - DNA, 144 bp, Triticum aestivum
  Clone ID: uC-tsro9316104d08b1
tcggttaaacatagacctggggtaggtgttttaatctttatctgtttgaatgttaagattgttcgttggcaagagtatggcactgaaattgttctctggctccctcccctcacgcaacgcgcccgcgcgcgccggggggtgggg

SEQ ID NO: 3824 - DNA, 140 bp, Triticum aestivum
  Clone ID: uC-tsro9316104g11b1
tttccggccgtccctctggaagctctctgcacactgcgagccggcatggatactcttcttcagaagctgtaataaacttaaaaaatggtactgtactagaaggaataatcggcacaacgatataaatgtgggtgtttact

SEQ ID NO: 3825 - DNA, 201 bp, Triticum aestivum
  Clone ID: uC-tsro9316104g12b1
tttcgtgtttcggctgtgatgatagctaagctgactatctgtatctggtctgtaatattgtgtgagcaaacccatggcaaggagctggtgtttgtgtgacgttgtcgagtctggtttgcataatgtgtgacctaaggcattgttgccagtatttcaacagtgaagatacgctctttggttgtatatatattgaagttgatc

SEQ ID NO: 3826 - DNA, 101 bp, Triticum aestivum
  Clone ID: uC-tsro9316104h08b1
gtccgaaaaaaaaaaaaaaatgaataaaaaaaaaaaaaaaaaagataaaaaatgaaaataaaaaaaaaaaaaaaaaaacaaaagaaaaaaaaatgaaaaat

SEQ ID NO: 3827 - DNA, 273 bp, Triticum aestivum
  Clone ID: uC-tsro9316105b05b1
ctttgttgggctcgcggcacagtgagatggtaagactatgggtccttgatatgcatgtgtggatgtgatcacacataaataaataatcttgggaagtactttatgaccaaataaatggatgaccagaccttccacgtgtgtaatggtacatttacgtcgatgaacggagaggaatcacctttattaaaaaaaaagttatagtagtttatgctgaaaaaaaaaaaaaaaaaaatgaaactacataagtaaaaaaaaaaaaaaagaaataaaagg

SEQ ID NO: 3828 - DNA, 304 bp, Triticum aestivum
  Clone ID: uC-tsro9316105d06b1
gtttttgtgcatgtgccagtacgcgcgcgaccccaacctgaagcagtacgtcgactcccccaacggcaagaaggtcatggccgcctgcaaggtgcccgtgccatcatgctagatcgacgcatatatgatcgatccacacgagagagcccagcgcgcacgcgctcctctctggcctctcgctgcatgtttcatgtgtgttgatgtgtcagtgtttgcttgtttcccaacactgtctagctaccctgacgatgtacgtggaccgatgtgtatctgaatttacgcaataatgacgaagtttccagct

SEQ ID NO: 3829 - DNA, 92 bp, Triticum aestivum
  Clone ID: uC-tsro9316105d08b1
ttttaaaaaaaaaaaaaaaaaaaaaaaaaaaaaaaaaaaaataaaaaaaaaaaaaaaaaaaaaaaaaaaaaaaaaaaaaaaaaaaaggggcg

SEQ ID NO: 3830 - DNA, 79 bp, Triticum aestivum
  Clone ID: uC-tsro9316105e02b1
acagtttgtatggatgttatccaaaaaaaaaaaaaaaaaaaaataaaaaaaaaaaaaaaaaaaaaaaactgaacaaaaa

SEQ ID NO: 3831 - DNA, 132 bp, Triticum aestivum
  Clone ID: uC-tsro9316105g07b1
tccacgcgtccgaagaaatccaaggacatggaggagattccagcagctgtcaccgacgctagtgagaacaagaaaaagaagaagagcaaggagaccgaggagacccctgcagccaacaccgacggcgagaag

SEQ ID NO: 3832 - DNA, 226 bp, Triticum aestivum
  Clone ID: uC-tsro9316106e01b1
cttggttcaaatcccacaccttgttcgtttttgatttgctctcttctttagattttgtttctagatctctgggggcctccaagtcgtccgcccgcgagggggaagcgaggggaagatgggcgccatggggttcgtcgagggcggtatcgactgcatggtcgcctgctgctccacccacccgctcgacctcatcaaggcccggatgcagctgccgggggagtcctcc

SEQ ID NO: 3833 - DNA, 94 bp, Triticum aestivum
  Clone ID: uC-tsro9316109b01b1
ctcatcgcgtgcgaaattattattatatgcatgacaagcattcatcaggatgatacgctactattttctatataccccacacaagttcatatct

SEQ ID NO: 3834 - DNA, 328 bp, Triticum aestivum
  Clone ID: uC-tsro9316109h09b1
tttttcattgacgcagttgctgctgagctcaaatcaagactgtgaaagacctctccctcttcaatgcttgaatagtcattactcatcgattcaagtcattttggttatgtcgccattatctgtcatgctttcatcctgaacagaacgagcttttactgcacaatcgcatattattgtcaaaaatgcaatcgattctgtagatgctgatgttatctaagtggggctcacaataaaggacatatagaaccgttattcccatctgatgattgtgtcatgtctaaccagcagcttttacatttgaatggagatgcttatagtttgctcgttt

SEQ ID NO: 3835 - DNA, 167 bp, Triticum aestivum
  Clone ID: uC-tsro9316110c11b1
tataatgacagtgccaagattactctaggggtcagggaatgaattgtccatgcaaaatgcacattgtgtttgttgattaatttgctcccgtcaatcgatcgtcctaaatctcgcaagatggtcatctgatgctcacataaatcaagtgttcgacattatttaaggat

SEQ ID NO: 3836 - DNA, 317 bp, Triticum aestivum
  Clone ID: uC-tsro9316110d11b1
cattgaggcaaaagatgttttgctggggaaaactaaaggaggtggttcagccttttgatcatatatcatgcaaaatgtgctcacccaatgaagatactattatttttgcacctccagtctctgcacctagaactagaaggcagacaaaagccttggtgtatcactgaaatttctggagaaagaacattagatgtcttagacgtagcaggttctttgactgtttgacacttccaagaccaaagttgtgctggttaaggaataaatgatgtactacatgaggttggcctgtgttgagttttgcataacatttgttcatc

SEQ ID NO: 3837 - DNA, 196 bp, Triticum aestivum
  Clone ID: uC-tsro9316110e10b1
atacgcgtccggcgatgaaggacttcaagcgtttctacaccaccgtgaggatcatgaagccacaggtctaggatgagctgctgcggcctggcctcaatcccggaagagttagtcatcttgtttaggctcaccctcccgttgcaatgtacattcaagtgtacagtcagtttctgttaactgtaggttccttgtgtcg

SEQ ID NO: 3838 - DNA, 393 bp, Triticum aestivum
  Clone ID: uC-tsro9316113a05b1
acgggttctctcactcccaccgctgccatccccgcgaaccggagagcgaggccgacaccgccgccgcgatgagggccaagtggaagaagaagaggatgaggaggctcaagaggaagcgccgaaagatgaggcaacgatccaagtaggcgccttggaaggaggggaagcatcatcttgcatccaggctgccaggcaccgagggatgacggcatggtctagtgattcctggcgtgtttgctgcgatggctgtggaagctgtttaacctgtgttctgtccaatttagctgtttaatgcctagtctggttatattccaagactgagttttatgtaatgtgaggattatatgtgtttgtgactgaattttatgcagctattaattttgcagtactctg

SEQ ID NO: 3839 - DNA, 150 bp, Triticum aestivum
  Clone ID: uC-tsro9316113e10b1
ctttttaacttgaaaataaattcttgtggtgacaatggatctattccgatactatgttgttatatttactaattgctccttttctacttgatgaaccatgtgaaactcttgtcttgcggtggtgcttgagtgagcgtgtttttatgcatt

SEQ ID NO: 3840 - DNA, 252 bp, Triticum aestivum
  Clone ID: uC-tsro9316113g10b1
gtcacagcaaccaacaagctttattcacaaggcacataatatggacatacaatacatcatagaaaaagaatgccgaacaaacaaaagaggccagagccagcaacgcccatcaaaccaccgcctatttctcaaaggaaaaactctctgccctcagccatccaatcagaagcagcagcgatccatctactgcatcatcgccgccgcgagaagggacaccagtgccgaggagaccagggccaaagcggacacgct

SEQ ID NO: 3841 - DNA, 449 bp, Triticum aestivum
  Clone ID: uC-tsro9316113h05b1
gcgattgtgatgctagaggatctggtttttgcaggtgggttcggagcatatcagcagcggcagatcaggtggagctacagcgcccgctggcagccggtcttccacaccatggcgttgccccttctggccgaatggcggccgtgtatttcctcccagcctaagagcgataggggaggcagatgcatcttctatctggagttcgaagcggttccaagctgctgcgatggtctcgtcgccccaagtggtgcgtccccggcgacggcgagtctacatccaggaagaagatgttctggacccgattgcaattttcagatccagtttagggtccttcttgtcaaaatcaagggcttaggtgttattttccttttatgtgagtccttgtgtgggctttgtgttgtaaccgctgaagttttaatgaagatctaggcccttcatggcctttcctgttc

SEQ ID NO: 3842 - DNA, 381 bp, Triticum aestivum
  Clone ID: uC-tsro9316114a01b1
cacaacacaactctacaaataaaataagtcatacaagcatcatattacaagccaggggcctcgagggctcgaatacaagagctcgatcatagacgagtcagcggaagcaacaatatctgagtacagacataagttaaacaagtttgccttaagaaggctagcacaaactgggacacagatcgaaagaggcgcaggcctcctgcctgggatcctcctaaactactcctggtcgtcgtcagcgggcagcacgtagtagtaggcacctccggtgtagtaggagtcgtcgtcgacggtggcgtctggatcctgggctccatcatcggaccctgtaggtgtgcaatagtgtgcgcgaggaggagtcggggaggcgccggagctcga

SEQ ID NO: 3843 - DNA, 89 bp, Triticum aestivum
  Clone ID: uC-tsro9316114a10b1
gttgtttccctcataatgccctttcttccagagtctaaagagccatgtgtaattctattgccctattgttcccaaattgtcattcttct

SEQ ID NO: 3844 - DNA, 354 bp, Triticum aestivum
  Clone ID: uC-tsro9316114b03b1
agattattatgaccatcattgatgacctcgtctctgtcgacactcttattgaagaccatctctgcgttgaaccagccaacgagtacatccagagctgtgacattgttgccttcaacaaaatctaaatcttcctgaggcaggtgatggcggtgggcgcacaatatatctacagttttctgttgccgtgatggtgtcgtagctaaagcaagcataacatatctgccctgtgaggtttttggaccttagatcgagttgattcgtagtattactactgagtgttatttgcttcgtatgaaatgagacaatgtggttggattcctgttgctattctcttctgtctgccgtcttcatcgg

SEQ ID NO: 3845 - DNA, 433 bp, Triticum aestivum
  Clone ID: uC-tsro9316114c07b1
ccgtctacgacgaacgaagaccgacgcgcgaccgacctagggtttcgcgcattcccccgccccgctcccccgtcggcatcgaggtctgctgaatcttgagcaatggagcggtcttttcagttgaatccgcatgccactcctttcgtgcctgccttcaagtctccgtttgcggaaagcttgagaggaaagaaggaccctgagaagcaagtagatgagactgaaaagaatgagactgctgacaagtctgccgggtatcaactcccagagtccctttcttttgatgactatgctgaaagcctaggaaagatcaacatctctactgagtcatcatcaaaaggagaaggtgctgaggcaagtcacgcgggtaaccatctcgccgtggtggaatctctctcgctgatgttcccagatgtgtctgctgacttcattcttg

SEQ ID NO: 3846 - DNA, 417 bp, Triticum aestivum
  Clone ID: uC-tsro9316114e03b1
ccgtgttttaaggtatggattaggcgctgggcttgctgtgggtgcagttgctgggggcgttggggcacttgcgattgatgaaggtgtgaagtataaggaggaaaaggcggcagagagggtgggagagaaggtggctcctgccgcaagggacgattacagcgagtatcgtcgagagtattgatgggagttcatgtgggtgaggatgcgctgtgagtcggttcttctcaactcctgttaatgtgggaataagttgcagtgtgattttgtggtttgctctgtatatgtatatatttgcttgagagacatgaattactatggtgcttgtgcttatggcctgcgcatatttacatatttggtctgtaccataaacgttttgtgattacctttgaagctgtacccgcaacttgatgtctgcat

SEQ ID NO: 3847 - DNA, 415 bp, Triticum aestivum
  Clone ID: uC-tsro9316114e06b1
gaccgttctgctgctgccatgaaagccattgcgggaattatctcttcgcagcaaactatgaatgtcccctgccagaaggaacttggcagaaatggcgaagacagtgaactcccggagcaatcagaccttttggtaaaagagtgaaagggtagcaatcctgcatgagaagatccctggtatttttgcccgcaaacatcttcatgagtgccagcgaagttattcactgtttgccatgaaggacacagttacgcaggggggacaatcctttgatatgtatcgttcatgttatctgtagctttctaatggattaggtagagcgtggttggcatctacatcaaaacttgtcttttgtttacctcaagttctagttggatttcacaccctgttttatacatagataaataccatttggttc

SEQ ID NO: 3848 - DNA, 294 bp, Triticum aestivum
  Clone ID: uC-tsro9316114f03b1
atcctttataccaaagcccatcttcttgtgcttgaaatctttttgggttcacagatttggaggatgtcttgcaactgtggatccgggtgcagctgcgggtcagactgcaagtgcgggaagatgtaccctgatctgacagagcagggcagagccgccgtccaggtcgccgccgtggtcgtgctctgggtggatactgagaacaaggcggggcagttcgaggtggccgccgggcagtccggcgagggctgcagctgcggcgacaactgcaagtgcaacccctgcaactgttaagct

SEQ ID NO: 3849 - DNA, 435 bp, Triticum aestivum
  Clone ID: uC-tsro9316114g05b1
ctcgctttcgtccggcagcccgaggctgctcaagagcggcagcggcagcgagtggagcgtggtggcgcagaggaacgtcaagtcctcgctgctgctcctgctggccatctccacggtcgtcgccttctccatcctctactcgtcccggagcttgaccgtggccaggacggccggcgaggcgctgacgcagagccctctgctcgccgccctcgacctgagcagcaggatgccagaggatgacgacgatcaaagcgatgagccagcgttccctgcggacgacagcgtgacgcctgagcagagcacacctgcggaggtcgtctccttgccagctgctgctccgagcaccggtgaggcggccatgcagctcgaggagaaatgcgacatttccagggggaaatgggtgcgggagccgaatggcccggtgtacaccaacct

SEQ ID NO: 3850 - DNA, 205 bp, Triticum aestivum
  Clone ID: uC-tsro9316114g08b1
cccactcgtccggttaaaagggcagcgtgtgtgttaacttttcatgataaatttactgcctccattttttgggatcaactggtcctcgtgacgatagtccaagaaccaacgattggaatttcttatggtgtgtgtacggcgattcagaaagtaaaactcatgcctaggtggtcaccggtcagtaataagttctttgaattctctg

SEQ ID NO: 3851 - DNA, 437 bp, Triticum aestivum
  Clone ID: uC-tsro9316114g10b1
ctgttctctccctctctttctctctcgtccgcggcgatacgatccgagatggcgatgagggcgtggaggcggagcgcggcggcgagggccccggcgcacctgtgcctgtggctggcgctcgtcgccgccaccctggtgctcgcccagggcaagaaatccaacctttctgaggtgacgcacaaggtctacttcgacatcgagatcgacggcaagcccgcaggtcgggttgtcatgggacttttcggcaaggctgttcctaaaaccgcagagaacttcagagcactctgcacaggagagaaaggtatgggcaacagcggcaaacctctccactacaaggggagttcgttccacagaattatccccagcttcatgatccaaggaggcgacttcactcttggtgatggaaggggtggtgaatcaatctacggcacaaagtt

SEQ ID NO: 3852 - DNA, 408 bp, Triticum aestivum
  Clone ID: uC-tsro9316114h08b1
catcttcccctggcaggagctcgacgtcctccgccagctccacgacgccgacatgcggcggcgaaagtggcgtcggaagcgcgcggagcagaaagtgtacatggagctgagcgacgccatggacatcctgcggcacatctgcacggacggctgcacggaggtcggacccgtggggcaggcgccggccaactcgccgtgcccggcgtacgcgacgtgccggggcctgcagctgctcatccgccacttctcccggtgccaaagccgggccacctgcccccggtgccagcgcatgtggcagctgctccgcctacacgccgcgctctgccgcgttcccgacggccactgcaacacccctctctgcacgcagttcaagctcaaggagcagcagaaggaggcggtgtcggcttc

SEQ ID NO: 3853 - DNA, 66 bp, Triticum aestivum
  Clone ID: uC-tsro9316114h12b1
gtctgtttgtaataaaattgtgaagatgtgaaaatatcaaggactactattctgattgttctcttt

SEQ ID NO: 3854 - DNA, 228 bp, Triticum aestivum
  Clone ID: uC-tsro9316115b01b1
atttttttcctccacagcctctgaaaaccccagatgatgagaagagaagagaaaaaggaaaaaaatccatggaagctctaggtaggaaccaaataagcaccctccatttccacccatccttttgtttgtgtgccctgtatttttggagtcgccggccggccaatctttcggaaatgcatataggctgagctctgtgatgagatgagatgaggggagctgttcatcatc

SEQ ID NO: 3855 - DNA, 106 bp, Triticum aestivum
  Clone ID: uC-tsro9316115b09b1
ctattctagccaccaccttgagcagctaccaaatcctcagccaagcaagcatggccagcgtgaattggagccgtgcagcggcggcgctcttgctggtagcagcgct

SEQ ID NO: 3856 - DNA, 106 bp, Triticum aestivum
  Clone ID: uC-tsro9316115b10b1
cggacgcgtgggcagaactattctttctgcctgtgaatgtaaaacataagattgcctatgtgtcacgactcaaatggtattgtcatctactcatctctattatggc

SEQ ID NO: 3857 - DNA, 448 bp, Triticum aestivum
  Clone ID: uC-tsro9316115b12b1
atgactcgtgggcggacgcgtggggcagcgcagcgtggaccctgtgttcgaggagttgttatattgatatgctgatatcgtatataacttcggtggaagctggacaaggtggacagggtcttcagattgtatccccatacaaaatcccgtccccaattctacaagccacctgaccagggaagcctactctctggtctcgcggctgcgaataattttgagctcggaacactctgtttgtggcttgccgcctttctttctttggctgtgtggaccttttacagcttctgatttttctcgcatctccagggagccggaacaagcacctgtttgtaccgatccctttttcatcttttcctgatgaacggcttgtattccgaataaatccatctcgcgtgatgatggaaggaacctgatttccagaaataataattcagagtgtttgagacgt

SEQ ID NO: 3858 - DNA, 93 bp, Triticum aestivum
  Clone ID: uC-tsro9316115c11b1
cccattcgtccgcccacgcgtccgggcttgtaccttttacttttatttacagctagtaataataacgaaagaatccagcgttttctttgttct

SEQ ID NO: 3859 - DNA, 300 bp, Triticum aestivum
  Clone ID: uC-tsro9316115d02b1
tgcctttgtagccggtggtgacgttcacttcgctgaccagggccaaggcggagtgacctatagcagagcagtactgtcctactatagtgcagccggtgccaagtggcggcagcgctgccccaatccacaataattgctagtgctactggccggatgtctgttgcatctctggtcaaatctgcatgatttggcttttagtttggaattgcatgtgatgtgcgtgtgttggcgattatgtaaagttctttgggggtgtgatcgtttgaactgtctaccaataaaaaagctctatttacattc

SEQ ID NO: 3860 - DNA, 110 bp, Triticum aestivum
  Clone ID: uC-tsro9316115e12b1
atttttggcccagttgaaatgctttgcaaggacatgattttctggtgggacggtggtatgtgcaccatgaatttactgcaaataatagcaaactggtaatttgtttgtgc

SEQ ID NO: 3861 - DNA, 64 bp, Triticum aestivum
  Clone ID: uC-tsro9316116a05b1
ctcttttctgtgctcgtgtccctgccctcgatcggcaatatacaatacatgctggatttgttgc

SEQ ID NO: 3862 - DNA, 449 bp, Triticum aestivum
  Clone ID: uC-tsro9316116c04b1
atcttgttatcagctgatcatggaaacgcagaggatatggttaagaggaacaaagctggccagccgatgctcgacaagagcggcagcatccagattcttacatcgcacacgcttcagccagtccctgttgctatcggaggccctggtctccacccaggagtgagattccgctccgacatccagacacccgggctcgccaacgtcgccgccaccgtgatgaacctccatggcttccaggctcctgctgattacgagacgaccctcatcgaagtcattgacaagtaaaaaaaaaaacactgcgccctctgaagccaaaattgctgcagccgattttgtcgctatagttttggggtgggtcaaggaatgatcgcatcattgaataatttgagatttgccagcacgcttgctcgaactcatatgtaacattgagaaaggtggattttacttgc

SEQ ID NO: 3863 - DNA, 214 bp, Triticum aestivum
  Clone ID: uC-tsro9316116d02b1
ggataggggcctaccatggtggtgacgggtgacggagaattagggttcgacgccggggcgctggtggagcagccgtttgccggggggcgtggcagcagacgcatacaaaagcaaatataagatagagccaaaaggtataaaaaagagaataaaatacacaaaaaaaaaaaagaagaaagccgtaaaagaaaaaggaataccacagaacggtgat

SEQ ID NO: 3864 - DNA, 438 bp, Triticum aestivum
  Clone ID: uC-tsro9316116d04b1
cccatttttccgcccacgcgtccgcccacgcgtccgcccacgcgtccgtgacgacgacgatgatgatggtggcgatgatgataatgatgatggtggcgacgatgatgacgacaatggccgatcccactcggaccacgactgtgactcgggctctgactgtgatggtgatgacgctaactcaaagggcaggaagaagaagccctcagctccagagaagaagggagtcctgggaggtaaccggtaagaagaacgacaagctgcctaaagtgacaatatatatgggcgtgcgagcttccatcgcccttcaagtcattacttgcttcaagatcatgagagcgagcttatctttaaacatgtattagccataaaactctgtacgcgcatgcactttaaagttatgtatctggctatagcctacagacaatgaagtccgcatac

SEQ ID NO: 3865 - DNA, 402 bp, Triticum aestivum
  Clone ID: uC-tsro9316116f05b1
cccacgcgtccgcccacgcgtccggccgctagggtgttcgtccacacactcccgccgccgccatccccgcgaaccggagagcgaggccgacaccgccgccgcgatgagggccaagtggaagaagaagaggatgaggaggctcaagaggaagcgccgaaagatgaggcagcgatccaagtaggtgccttggagggaggggaagcatcatcttacatccaggcagcggaactctgagggatgatggcattgtccgagtgattcctgatttgttttgcggttgtggctgtggaagttgctttacctgtgtttagctgtttaatactagtctggctatgttccaggactgagttttatgtaatgtaaggattatatgtgtttgtgactgaattttatgcacctatt

SEQ ID NO: 3866 - DNA, 441 bp, Triticum aestivum
  Clone ID: uC-tsro9316116f11b1
gttgttgacgacgatgacgactgccctgctgaccccagtggctttgggacaggtggcggcaccggatctggatccagcgaggcgaataatgatggtgatgcctcctacacaaatgcaaatgcttctggtaatggtggcggcgagggcggaggtaaaaatggtggaaccggcggtggtacatgcagtggaaactgatacggtgacgcaaacccttgaagcctattcgtgcaatcaaaacagagcaagagcccaagctattggcgttcgcttatttctatgtgcatttgttttgctcttacgtttccatgtattagggacaactaataaagggcttcattacataggtgtgtgctatgtaatgcggagactatgtattatctaaatgttgctccaacctttcattccatacttactgtgtcgatgagataacacttaactatc

SEQ ID NO: 3867 - DNA, 200 bp, Triticum aestivum
  Clone ID: uC-tsro9316116g07b1
atgataactaatatagcaaaaagcatactctcacttcattgtataacttcaaatatgtcttattctgtattatatttggacatgtataaaatactaatgctaaaatctataaaggggtagtagtgaagcaataaactaccctcatgttttaaacaacaaatctgttgagagcaccgtttggctattgagcttcttttttt

SEQ ID NO: 3868 - DNA, 93 bp, Triticum aestivum
  Clone ID: uC-tsro9316116h10b1
gcggtgtttggtaatggcaggtcctaattaaacatgatcatgagatagttacgaagaaacaacaccaccagtaaatattttctgagttctttt

SEQ ID NO: 3869 - DNA, 353 bp, Triticum aestivum
  Clone ID: uC-tsro9316117d02b1
ccttgtatttttccatacggaacgggtcgaacgcgcggggatacttcgtgtggtcgttcctggacgtcttcgagttcctcttcggctaccggctgaggtttggcctgtgcggcgtcgacatgggcgacgcggcgaggaggaggtacaagaggagctcggctcgctggtactccggcttcctcgcgggcggcgagctccggccggctgcttggccccagaagtcctacgtccaatgagaaaacaagagacgctcacatgtggctctccggtctccacgtctttgttttcctcaagctgctctgcaggacgaaaatacctgtaccgggttcacgtgcgcgcgcgcgcacacacac

SEQ ID NO: 3870 - DNA, 202 bp, Triticum aestivum
  Clone ID: uC-tsro9316117d10b1
ggcaccgataaggtggcctccgacgacctggacccggcggcgcgggagagcctggccagcctgtggcgcgtcatgtgcccgaccaccaccggggaggacgacccgctcatcaacccgttcgtggacggtgcgccggggctggacgccctggcgtgccggcgtgtgctggtgtgcatcggcgagggcgacgtgctccgcgacc

SEQ ID NO: 3871 - DNA, 238 bp, Triticum aestivum
  Clone ID: uC-tsro9316117e10b1
atttttgccatcatcacaaatccggatccatacaacccacttgtggagagcattgcacgtctgtacctgactgatagagctaagcatgatgaaatagctgctgaatggacattgaggtttgcaagatagggagtcctttgtgtaactaaataagaaaaattgactctgtaaatgaataatcttgtatgtatcctgagatataagttggaaaatgaccaatacattaatctgagttgtg

SEQ ID NO: 3872 - DNA, 168 bp, Triticum aestivum
  Clone ID: uC-tsro9316117h10b1
cgttttcttgggtccgccgtcgcccgagcactccgtctcctggccgaagcgccgtcgttccaccggcgcagtcgccatgggtaaggtgcacggatcgctggcccgagccgggaaggtgcggtgccagacgcccaaggtggcgaagcaagacaagaagaagcagccgct

SEQ ID NO: 3873 - DNA, 115 bp, Triticum aestivum
  Clone ID: uC-tsro9316118b01b1
tctatgcgtccgcccacgcgtccgcccacgcgtgcgcccacgcgttcgcggacgcgtggcggccgcgtcctgcccgcccggacgcttccgggccgtgtcgccgtctacggcggcc

SEQ ID NO: 3874 - DNA, 138 bp, Triticum aestivum
  Clone ID: uC-tsro9316118b02b1
ttttccaccagcccactacacacacatgcccgcgatggggatcttgaccggctggacggcgagcggcgcggatggcgactggcgccagggagctctgtggcggagcgcggctgggcgccggcacggcgagcagggcat

SEQ ID NO: 3875 - DNA, 161 bp, Triticum aestivum
  Clone ID: uC-tsro9316118c10b1
ttttgctcttgaaatgtattttccaacatacaccttattttctagttttggaagcttttcggtcacgctttccggtgcaaatttgcaaaacccggtaaaagtagatgtaaaatgtgtgtggattgcagagggctctatgcccatacaaggaataattcctg

SEQ ID NO: 3876 - DNA, 205 bp, Triticum aestivum
  Clone ID: uC-tsro9316118d07b1
ttccacgcgtccgcgcaaattctgcacttcccaccgggattaggattcgattgctctttctaaattgtaacttgtcaattgtcatgttatccaccactgctaccaattcttctttgtatgcttattagtccatgtcctagtactattcaagagctctcttatcatctctaatggacagagtaacatgatgtttgttttttcggcg

SEQ ID NO: 3877 - DNA, 91 bp, Triticum aestivum
  Clone ID: uC-tsro9316118e04b1
gtttgcgtctgcttagctggagccttgttacggtgtgtgtcacagtgtcagttccacctatgatcgatcggtatcctaaccggtttgcgtt

SEQ ID NO: 3878 - DNA, 301 bp, Triticum aestivum
  Clone ID: uC-tsro9316118h02b1
gtgatgatcttgcctgatggagtcaacgcgaagctgctcggatgccatggccgcctggcgaaccgtgcccctggacaagctttcctgtctgccgcataatctagcagaagtctatccgttctatcgcaacttattttaccgtgtggaacttagattccaagtgcctgtggtgctatgttattttgtctgaatgttgtgtcgaaccttgttatggaagatattatctattttgtgatgatggtactaatatgaatggcctgttgaatcaaaaaaaaaaaaaaaacaaaaaaaatatcccatt

SEQ ID NO: 3879 - DNA, 68 bp, Triticum aestivum
  Clone ID: uC-tsro9316118h05b1
tttatgcgtccggcgatgctctgctatgtgctttggatgactagatgtttgttaaattgcccagttat

SEQ ID NO: 3880 - DNA, 350 bp, Triticum aestivum
  Clone ID: uC-tsro9316118h10b1
tgtctacgcgtccgctctgaacgaccatttcgtcaagctcgtctcgtggtacgacaacgagtggggttacagcaaccgcgttgtcgatctgatccgtcacatggccaagactcagtagagcgttctgatttcctttggtcagaggtgtccctgctttgtctatgcgaagaataaatgtggatggtgtcgccagacgacgcctggttcatgttagttggacatgagttaccttctgttttccgcatcaactagtacttctgtaatggagttgctaatcaagtactcttttttggttgtggtttgtgaagattatataaatcgttcagtccagtacttgtgtttgcctgaat

SEQ ID NO: 3881 - DNA, 307 bp, Triticum aestivum
  Clone ID: uC-tsro9316120a02b1
atttgttctcccaaatggatcaaaaggctgctcccgtcaaattcgcaaaagtcacaaaagtcctcggacgtaccggttcccgcggtaacgtcacccaagtccgtgttaccttcatggacgacgatacccgttccatcatgcgaaacgtaaagggccccgtccgcgaaggcgacattctgcccctccttgagtctgagcgtgaggcccgccgtctgcgataaactgcgcatgtggggtagaacatggtctgcgacgatgagcacattgagaaccagttagagcaaaataaaatcgacctttccatgtt

SEQ ID NO: 3882 - DNA, 229 bp, Triticum aestivum
  Clone ID: uC-tsro9316120b04b1
ttttgcaggtgctcttgtccctccaggccttcacactcagggtccagaagaaggattgaagcagcgcatgaacgtgttattattttgcaattcttatttggtgttttgtgctgcgagtgttgtataatatgccttatttgatgacatttttacttcacattcaggtaatgtgttgtcagcagactgaaatctgtaataaatctgctgctctactgtttgtggagtgttt

SEQ ID NO: 3883 - DNA, 332 bp, Triticum aestivum
  Clone ID: uC-tsro9316120c09b1
tcgtttgaagacggccacgccgccgacacgatggtgcagagatagtcctcaactctgaaccgaaagaaaaaaaaaggttgccgattgcttctgtttcatgtttttatgtatttatagaagaaaagaaagggaacacgacgatttgtagaacagaattggtgttgtacataggagcagagcaacatctgctatattagttacaggggagagatgtccactgtgattctgaatcgagcatttggaacctaggtgatgaattgctttgttggtactagcaaacaatgtgtttgatgatttttgattcatttaattcaatttggcctggtctttac

SEQ ID NO: 3884 - DNA, 221 bp, Triticum aestivum
  Clone ID: uC-tsro9316120f01b1
ttctagcgagccaacacgcatacggaacggggctcgtctccccctccgttccctccccccgccttatcctctccggaccggagcgagcgagcgccccaccgctccctgctccccccttcctcccgatggcgtccctcaccaccaccaccgcctcctcgccggccgccctgcccgcggcggcctccgccgccccggccacggcctcgtccgtctcgcccacc

SEQ ID NO: 3885 - DNA, 238 bp, Triticum aestivum
  Clone ID: uC-tsro9316120f03b1
tatcttacacgaggagagctacgccgcgctagcatgctaatgctacaagtcaagtggccatctaacagaccgagagatggcaaaggccttctctcgtattcttttttcccctttttttgaccatgtgtaaatttgctgcctctttttcatgtatttttgagcgatgaaagggcaattgaacccaaaaatatggtggacaagtgattaatgaatcaaggagattcatcatttttttgtc

SEQ ID NO: 3886 - DNA, 128 bp, Triticum aestivum
  Clone ID: uC-tsro9316120h12b1
tgtatattttgttaggatcatgtacaccaatctgattgataaagattcggttagatctctctctttcttgattcccaaatatgtaaacctaccaaccttgtattcttggcctacatggctttgcccct

SEQ ID NO: 3887 - DNA, 469 bp, Triticum aestivum
  Clone ID: uC-tsro9316079d09b1
cccactcgtccgaatccgcccatccatccccggcggctccaggagggacatcgcagccgccggcaccggcagcggcatgccattcacatcgccctcgcgcaccatcggcggccccctcaggtcctatcccaacttgcggccgtcgaccgcggcggccaggccaggcctctccttccaccggtcccgagaccaggggacaccaaccccgtcgtccagcgctgggtgcctcagatcggcatgcctcctcccgatgcagaactgttctgggaatactactgctaatgaatgtgtccaatcaagttcatccatgtcaaactctatcaactagaaatagagttgtgtcaaagagaaggaggagtgcgtgcagggggagtggcgggtcaaggtgctctcatcggagccgctactgaccggcagatccaggcgcaccctccccgtgcgcgcaggggggtgacaggacaacgtgcgc

SEQ ID NO: 3888 - DNA, 397 bp, Triticum aestivum
  Clone ID: uC-tsro9316079d11b1
cgtacgctttttttgttcgatccatgacagggagggctttcgcggggcccagtagagccttatttctgccggaaagctgttgatgaatggccagacccttgctgactacaacattcagaaggagtccaccctccacctggtgctcagcctcaagggtggtatgcagatcttggtgaagaccctcaccggcaagaccatcacgctggaggtggagcaatatgacaccatatacaatgaaacggcgaagatccaggccaaggagggcatactaccggaccagcagcgactgatcttatgctgtgaagcaggtcgaggatggccgcactctggcggactacaacatccagaaggagtccacccttcacttggtgctccgcctacgtggtggccagtaagt

SEQ ID NO: 3889 - DNA, 338 bp, Triticum aestivum
  Clone ID: uC-tsro9316079d12b1
attgttttgtgccttggtaggcgatttgctgaaaaagggaattttttataaaaaaaaaaaagagagagtaaaaaaaaaaaagaaaaaaaaaattggggggtcgtttttgaggatccatgtttgggtccgcgttcatgggaccctatttgctcttttatggggttacctaagttcaattcttctggccgttgttttggggtggtttttttgggaaaccctttgtgttcccccggttgatcgccttgttgtcctttttttttgtggcccgttggtgtattagcggggtggccctttccgatcgtttttccgaacagttgcgcggtttgcctggttttttg

SEQ ID NO: 3890 - DNA, 366 bp, Triticum aestivum
  Clone ID: uC-tsro9316079e01b1
agaggggctggagcgccaccgcgaatcccatcccatccccgcaccgccgccgatcccgcccgcccgcccctccgcagatctccccgacattgcccgctccccggccggattcgcccagatccaccgacgccgcgcgcggtgctcccggcggcgtggcccgggccgtctgatcggggaggctcgatctttttggttggtgctgttgtctggagggtggtggcagcggagatgggcgtcggaggggagaagttccagctggggacggtgggggcgctgggcctctccgtggtgtcctccgtgtccattgtcatctgcaacaaggccctcatgagctccctcggctttacctttgctaccaccttgacg

SEQ ID NO: 3891 - DNA, 80 bp, Triticum aestivum
  Clone ID: uC-tsro9316079e02b1
aaaaatttttaaaaaaaaaaaaaaaaaaaaaaaaaaaagaaaaaaaaaaaaaaaaaaaaaaaaaaaaaaaaaaaaaaaaa

SEQ ID NO: 3892 - DNA, 359 bp, Triticum aestivum
  Clone ID: uC-tsro9316079e03b1
cggacgtttgggcggacgcgtgggcggacgcgtggggcctcacactctctgatcagatcagccacagagtcacagtagcactagcttgagctagccaccttctgccactccgggcattttcttgcatccacgaaggcaatggccactgctgatgtccagaacccggcggtcgcgctgacggaggaggcgcccgcggtggagacacccctggtcgccgaggaggtcgcgaagacggaggaggcccccacgccggcggtggccgaagtcgaagcgcctgctgcccccgtcgaggttgaggagactaaggaggaggcgccggccgccgctgagaccgaggagaccaaggagcccgagcccgc

SEQ ID NO: 3893 - DNA, 383 bp, Triticum aestivum
  unsure (1)..(383): unsure at all n locations
  Clone ID: uC-tsro9316079e04b1
gaaatttggtagaacatggatcagaacttcctccaatgcgatccatcgccgcggtaaatcgagccagacacaacgcgcaagacccccgactactttttgtaatcgtggagttgacttttttttaactgttgtgctgctggtgctcctatcatgcgcagcactgcctggctggatctgtagatctctgtccttagaaaatgggatatcttgagctgagttgtgtacccccctctcattcttttgtttggagatattggatgccgctttttatgacctcataggacatgttaaaaggacattgcatgggtctgttntttgaatcttcattctgcattatgttcgagacagagaagggaagctggaatagaatcgtctcgtgacat

SEQ ID NO: 3894 - DNA, 346 bp, Triticum aestivum
  Clone ID: uC-tsro9316079e06b1
cggcaagaaccaccaccacaagtgagtgaacgtctgatcatggaatggcagcgagagatggcaatgaggccgctcgttgtcctggctctggccgtggcgctggccggggtggctctgctagggggctccgcggagggggccggccagtgcggcaggtcctcccccgaccggatggccctgcacatggccccgtgcatctcggcggcggacgagccggactcggcgccctccagcagctgctgctcggcggtgcacaccctagggaagagccccagctggctgtgcgccgtcatgctgtccggcaccgccaagatggccgggatcaagcccgaggtggtcatcacca

SEQ ID NO: 3895 - DNA, 392 bp, Triticum aestivum
  Clone ID: uC-tsro9316079e07b1
attcccaatttttaccatcttcagaccagaacactatactgacaattaacatacaccttcccttcgcccccctcacattactacgaatttacaagcaagcatggatcactccttcttgggtttgttgctgtcaggggcggcggtcgcttcggattgaggtggtgcgccggcgacgtcgccggtcatcatcttcttgaactcgtcgaagccgacgcagccgtcgccgtcgacgtcgacggaggcgatcatcttctcgcagtcctcggtgctgcacccctcgccgatgcgggcgaggaccttgctgagctcggcgacggagatgcggccgtcgccgttgatgtcgtagatgtcgaaggcgtcgcgcagctcggcgtccagctcgcgcttccccg

SEQ ID NO: 3896 - DNA, 442 bp, Triticum aestivum
  Clone ID: uC-tsro9316079e09b1
gtactactcttttctctcccatcctgtgcgcccttcgcgtttcgcgcccagagtgctctttgttcacgttcacgttcacgttcacgtccgttgccttgcacccacccacccctcgacaggaaacaagaaagagaaggcagaaaaaaagctcgtctgccggacatggagagctcctcctcgtctctgttgctgagttcgtataccggcggcaacaagagggccagggaggccgaccttgacgtggcctcatccgccgaggcggaggccgccaagaggatacggcccgaggacctgctggacctgctcgacgatgacgccgacgccgcggcggccggcgacctggcctccgtcatgcgaagcctggaggaggagatatgcgccggcgacctggccgcgccgcagccggagctgggcttcctgctcgaggcctcggacgacgagc

SEQ ID NO: 3897 - DNA, 467 bp, Triticum aestivum
  Clone ID: uC-tsro9316079e10b1
ttttctgtgggcggacgcgtgggcaaaccactgcttcgggtacgatcactaagattataccctattataggctagtggtagctccagtgtctgttacaactaagacgacctcccaattgcttggccaagcacctcaaatcacattaagtgaaaatgcggagctctctaatcaggcgaccacctatgatgatgttcagtcatcgggtgctagttcttttatacctatgtataatcgaactttttgtagattgaatcggttgttctatacgaacaatcctggagatgctttggtctcacgtgctcctgatattgcaaaatttcaactggaaatagatagttcatctggcaactttggtgcaacatcttctctccatagatgtgcatctgatgacttccatttctcggtttggttaggagttcccacgatgggatggttacaaacttaaagtccaagtgactataaaaga

SEQ ID NO: 3898 - DNA, 523 bp, Triticum aestivum
  Clone ID: uC-tsro9316079e11b1
cttatttttttgttacacatcacaacgaactaaacatggatctctacatgagaattgctcctgaactccatctgaagcagttggttgtgggtggcttggaccgtgtttatgagattggaaagcaattcaggaatgaagggtttgatttaactcacagtcctgaatttacaggatgtgaattctatatggcttatgcagactacaatgacctgatggagcttactgaaaccattttgtcgggtatggtgatggagctgactggtagtactaagataaaataccatgcgaatggagctgataaccctcccatagagatcgatttcacacctccttacagaaggatagatatgatgcaggcactgaaatctatcgctgggcttgacattccatcagatttgtcaagcgacgaggctaacaaatacctcgcgacaacgtgtgagaagtatggaatcagatgctcgccgactcaaacaacagcacggttgcttgacaagattactgggcatttgctggaggccacatg

SEQ ID NO: 3899 - DNA, 269 bp, Triticum aestivum
  Clone ID: uC-tsro9316079e12b1
attatttttctttttctcgtccgggacctcgatgtcatgtattctttccccctactgccgatgtaacaaagccacccatgattctgtaagtagatgagaagtgtttcgaccgttctcccctgagctcatgtgctatgcaagtaaggatgcaccctatgtaccgccaatatttggtccagtatttgttcatggatcgaggctataattcatttgtactcatcaaaaaaaaaaggagcaaaaaaaaaaaaaaaaaaaaaaggagctagatg

SEQ ID NO: 3900 - DNA, 217 bp, Triticum aestivum
  Clone ID: uC-tsro9316079f01b1
atcatcttcttataccaaagcccatcttcttctccttgaaatctttttgggttcacagatttggaggatgtcttgcaactgtggatccggttgcagctgcggctcatactgcaagtgcgggaagatgtaccctgatctgacagagcagggcagcgccgccgcccaggtcgccgccgtggtcgtgctcggcgtggctcctgagaacaaggcggggcag

SEQ ID NO: 3901 - DNA, 216 bp, Triticum aestivum
  Clone ID: uC-tsro9316079f02b1
cccactttgtttgcgccaaactttgggttcggaaagaaggcacaggtgtgaagacaagaacgagcaccacccgcacatgttagaggaggtgtgtcaacatgggtcaatgttttgggttggttgtgttttacgcatgaataaagcaaaatgctgtgattctgtgtacggacgagccgcggatgcgccttgcggggaggagcagaaagggatacagaa

SEQ ID NO: 3902 - DNA, 387 bp, Triticum aestivum
  Clone ID: uC-tsro9316079f04b1
gcgctttattgataatggagaaggaagggatcggcggtctgtacaaggggcttgggcccagctgcatcaagctcatgcccgcggcggggatctcgttcatgtgctacgaggcctgcaagaagattctggtcgaagccgaggagtagagcgaagtgcgccaccggtgtcgggtccttaaagaagaggcggcaggaggattaagcctcgtcttcctttctatcaagaaaagaaaaattggatgatcaactactcagcagaagcttaggtcaaaggtatttgagacacgtctgttagatgatgaagttttggcctctaaattagttctgtgtccgagttgaaatccataaacaatattctgactggcggaagcagttctgtcatgctact

SEQ ID NO: 3903 - DNA, 209 bp, Triticum aestivum
  Clone ID: uC-tsro9316079f07b1
aagttgttgttgccctcctggtaaatgttttggctgtttaggtgggtatacatggtcatggacctgcagttgtatcctgctgccataaccctctctgtctgcatatgtgagagtcaacagtccatgtacctgcagaagatttcctagctgtcagtcgcgttgaattctattccttaccatcgtcgtaaatgaagttttgacacccgccc

SEQ ID NO: 3904 - DNA, 393 bp, Triticum aestivum
  Clone ID: uC-tsro9316079f08b1
gtcagtttggaggccagcatcaccgcctgccccacccacgagcgccacctaccacccaccctccaccgccaccggccagagaaagcagatcgacggccggaggcgagctcggtaggtagcgtaggtagcggccatggaggccgccgcggccatccggagcacggccgcgccgcggatgcgcctcgcggggaggagcagcaggggatccggcgccgcggcggcgcgcgcgaccccggccagccacagcgactggcagacggcctgcgccatcctctccagcaccaacgacaccccctccccgccggcgccgaaggtgaacggccagaacaacaacaacaagctggccgcgccggccatccccggctccgaggacgccgtcttcgcctggatctg

SEQ ID NO: 3905 - DNA, 388 bp, Triticum aestivum
  Clone ID: uC-tsro9316079f10b1
gcgccttcgtgttcgcccacgcgtccgcccacgcgttcgattgaaaagatgaacagatcgacaagaagttggaagaagaagacaaggaaagaaaaagattaaagataaaaactgacaagatagcaaagttttttgcggttaatatttacaaataaaaaaaaaaataaggggggggccttttttggggttccaggtttccctccgcgtgcttgggagttttttttttttttttgggggcccttaatttaatttctttggccgtggttttccaccggggggttggggaaaccctgggggttccccaatttattggcttgggggcacttcccctttttcccggttgggttattaccgaaggggcccgacctttttgcctttcccaaaattt

SEQ ID NO: 3906 - DNA, 341 bp, Triticum aestivum
  Clone ID: uC-tsro9316079f11b1
gatattatatatgcctgtgtcttgtgagcctgctggcacggtgctgcctagttgtgcaatttgcatcgtgtcttatttaagcattgaaactatcttcatttgatttctctgtgctaaacaaaattttttgagataaatctttacaaataaaagaaaagttaacatgggaaagaaacaaaatcttgatttcagaaccatgactactcaagtgttgaattgggccacctgtttggtggaacaagaaactattcctcctatcggccatcaaagactgtttttatcgggtaacttaaattcaattaactgcccactggttatacttgaagaaactgggaaaaccc

SEQ ID NO: 3907 - DNA, 333 bp, Triticum aestivum
  Clone ID: uC-tsro9316079g02b1
cggacgtgtgggatttgttgcccctctcctccagcatgcccttccctaccatggcgccttctctctctccttcccctcccatggtgcccatccctccattcccatgacacccctccccctcccttcttcatatggcgcctcattaccctctattctggtgtctgtgagtctgtccctctctcttcttgaaccctagaacacaagcagatctcaaatcctaactctctctgttattggataggttcatccgggttcagttttgcagatctgtagcaatcaagtcctaatccctttctgctgcttcagattgccagtgttgcacgagcatggaat

SEQ ID NO: 3908 - DNA, 224 bp, Triticum aestivum
  Clone ID: uC-tsro9316079g04b1
cccacgctcctgaggcgctgggcgccgtcgtgagggacagggcggaggtcgtctatgtttccaggcaaggagaaggatcgacgaccatcgtggtgaagacaggtaccggcgacgagtttcaatgtggcaagaggaatattacagtggctgcgaagactagcaagttgcgcaaggaacacaccggcgcccacctgacggtggaagcactgaacaaacttattttt

SEQ ID NO: 3909 - DNA, 256 bp, Triticum aestivum
  Clone ID: uC-tsro9316079g07b1
cccactcgtacgcccacgcgtccggctcttttctaccagcaattaaagttgattaattagctgtaagctgtaactatggtgaagaaaactggttgctatgcttgatatgtataggggggaagatatatgcggaaatattcggtccatttactacataatatgatgatactgtaattgttggctccaataattgatccataataaataattaaacaacctttgagcttaaaaaaaaaaaaaacaatccaatattaag

SEQ ID NO: 3910 - DNA, 367 bp, Triticum aestivum
  Clone ID: uC-tsro9316079g08b1
acttcttagtactactggcggaaggactataggcctgaaaaacatacggcaattggatgacaggccattcctggcggcatgcctgaagaagctgcctgacaaagaagctagagaaaaagctaaagaagtacaccgtgtttggcacgggcatatacagaacccagagcggaatcccttcaagactgtcacagttgaaggtataccagaggagattattgatgtcaatgatgacaagctgcatggcctatgtgctgcatggtgtgaaggggtgcacaaggctgtggacaagtgtttggtagaaattcaagaaagtggtaagctgagagatagaaacattgagcccgacgtctggaattacaagtgcaag

SEQ ID NO: 3911 - DNA, 323 bp, Triticum aestivum
  Clone ID: uC-tsro9316079g09b1
gattgttgtggagaactctcccttccttgagaagctgaagaagaagggctatgaggtcatctacatggttgacgccattgatgagtatgccattggtcagctcaaggagtttgagggcaagaagcttgtctctgccaccaaggagggtctgaagctcgatgagagcgaggacgagaagaagaagcaggaggagctcaaggagaagttcgaggggctgggcaaggtcatcaaggaggtgctgggcgacaaggtggagaaggtcatcgtctctgaccgtgttgtggactccccttgctgtctggtgactggcgagtatgggtgga

SEQ ID NO: 3912 - DNA, 495 bp, Triticum aestivum
  Clone ID: uC-tsro9316079g10b1
gcgtgtattgaccgaaggcggcgcagcaggtatgcattaggagcgggcgcctctttttaccacgggaatcaaatgctgctggcccctgatctggatgaccagacctgcagccaactcttgatatggaagcatgaatagtgcaggagctagcaaagctgccgctcgccgtatggaacaccagtaccaccgtgggaaggtggaagcacaaatagaagctgctctttcttcctggccgagtatggatcaagcgtctcggtcattagcttggcagctatgcaacatgccgtctcgccagcacaacttcaacccatctgcacaggttcagcgacgccccccttcccatgtcctctcgatggcaggattacctcgatctctggtgcagccgtggcgttctggttcttttttctcgcttgcagaagataagctttctaagcacaagactcttcagcttactgaaaactttcttacccacaaaactttttgctgatatctaaa

SEQ ID NO: 3913 - DNA, 266 bp, Triticum aestivum
  Clone ID: uC-tsro9316079h03b1
gagcatgtttggcatcaagatcacctgctcccaggagacagagccaatgggaaccgccggaccgctggccctcgcccgcgacaagctcgacgacggatccggcgagcctttcttcgtcctcaacagcgacgtgatcagcgagtacccgttcgcagagctcatcgagttccacaagtcccatggcggcgaggccacgatcatggtcaccaaggtggacgagccttccaagtacggcgtggtggtgacggaggaggagaccgggaagg

SEQ ID NO: 3914 - DNA, 251 bp, Triticum aestivum
  unsure (1)..(251): unsure at all n locations
  Clone ID: uC-tsro9316079h04b1
ctccaattgagtctggtctgtgtctgtcgttgcctgaactgtctttgtttctataccgtactgtgatgcagtgttatcgtttgcatgtttaaacttctgctggtgtgcagcagctttgatgaacttcagaataagtgagccctgcnaaaaaaaaaaaaaaaaaaaaaaaaaaaaaaaaaaaaaaaaaaaaaaaaaaaaaaaaaaaaaaaaaaaaaaaaaaaaaaaaaaaaaaaaaaaaaaaaaaataaaaa

SEQ ID NO: 3915 - DNA, 527 bp, Triticum aestivum
  Clone ID: uC-tsro9316079h07b1
cgcctgcaggcaccgagcgcctatgtccggggccggcacaagtgggcggcttattgggatggaaggcaggagattaccactgtgccatccagttacaggaggggactggtggatcctgaaatgattcaacagatgcaacgtatctagatcttttggtggttgaaatgctatgaagtctcttcagtgtcaataagataatctgaatgttcttcatccaacttccagctttcttttttgtgtacaattccaaagtagcctgtggtttctctggagcagcactggagttgaaatctccatcgtgatttaaaggaggcggagaatttttctctatctttaggggctttatgtacattcataatcagtcgctttacattacaccatttttttgccctattataggaggctgatttgaaactgcacaaatagtattgtgtcaattttgagttgcctcgtgccatattgcagcactttacccgtatggtgtgtaatacttcctccgttcactattataagacgctttgattttt

SEQ ID NO: 3916 - DNA, 548 bp, Triticum aestivum
  Clone ID: uC-tsro9316080a01b1
agataaagcatcgtctcgtctcgtctcgtcgaggaatcaacagccatgggcggcggcaacgcgcagaagtccaagatggcgagggagaggaacctcgagaagctgaagggcggcaaggggagccagctcgaggccaacaagaaggccatgaacatccagtgcaagatatgcatgcagactttcatctgcaccacctctgaagcaaagtgcaaggagcatgccgaggcaaagcatccgaagagcgagctcgtccagtgcttccctcacctcaagcagtgatatctgcccaatcagacagagagagagataaaagagagagagagagagaagctgtcataatccacctactattatcatgttccgcaatgactgattgttgacctaagcttggggtctgaactcggtgtgctgctgtcccggctgctttggttgtgtgcccatctactatgtaatcgtcctctatcagcctgttgtgctacattatcttaatcctctgtggatttgctcctcgtgcttagtcagtatgctgtcgcaaaatcatttttttt

SEQ ID NO: 3917 - DNA, 219 bp, Triticum aestivum
  Clone ID: uC-tsro9316080a02b1
atacgaacccacagcgcgaaggcactaacgcttgtgaagcgaccggacaaactgggcgtctatgggtgagccggagcgggcgcgcaccatgatgaacagagtgccgctgatgcagctggatgaccagggggagtagagcggcgaacaaatgacgtaagactggtcttgcagcctcaaccgcaatggaaggaggatgccatgactactgatgaactgact

SEQ ID NO: 3918 - DNA, 560 bp, Triticum aestivum
  Clone ID: uC-tsro9316080a03b1
ggtcgactttataggatccaagctcccaaatggagaaacattgccttccgctcattgccgagagcggtatttttgtcgacatgggggggaattttatcgtgctggatcgcggttgaatatttaatgtatcccaggattgaccgtggggagatagttgctaaatacaacacaaaatcctagtctagttaaagaacgaatggtaggattatcagaagatatgccatcccagagagctattttttgaccctcttctttaagatcggcgatgaggaaaaatattaggtcacaggccgaagcacgaagatgctatattcttatggtttcctagcgagaattgaacatatttagttctcgagacggaatattgcaagcttcacttaaaagaacacgggggcatcataattgaattgccccatgttgctcactttaataaattgacatgaacttgtaacaatgcttctaaacagataaagtgactccgtcactcttgggtcgccgaagctaaccaggtctggcctacgggagaatagggagtgacactatactgaggaacgatgcct

SEQ ID NO: 3919 - DNA, 295 bp, Triticum aestivum
  Clone ID: uC-tsro9316080a04b1
aggattcttgaagttgggataaagtaatagacaattttgctaccgtcatttttgggaacagggagtttatggcattagccgctattggctcaaggaacaggagagacatctgagcgactccttgcatgtacggaattacaccagggacattaccttgcaggggtctcccttgccggaattcttgcgggaggaatatgaactatgggcagaccaggaatgtttgggtcattatgtgttgcatttgggaatttaccattcaccccaactccctgtcgatccccgggtaccgagctcg

SEQ ID NO: 3920 - DNA, 219 bp, Triticum aestivum
  Clone ID: uC-tsro9316080a06b1
tagacgtcccatagactagaagacgaacatgatcaccagcctacgctcgtgggagaacaacagaaccaccatgacacgctgacacagacgaaagaggaactggaacttctggacggacacattaaagaggagtatgatgacccgaggtctaacaatgccactggccgtctatatacactactaaggctggtaaaacaatgtggttactgaacataaatt

SEQ ID NO: 3921 - DNA, 459 bp, Triticum aestivum
  Clone ID: uC-tsro9316080a07b1
tttttgcgtccgaagttggtttgtgaaataccaccaagggcgcatactgtgatcattatttttttacactgaggctgattaaagcaaagggtcaataactcgaaaccaatggcaggagtgcacgttgggagttataagagcttgatctactgggcaggtgctacaggatagctgacggtgtagaacatacagctcggatagttatatgaggttgttgacaaggaacttagttgagatttcgagatcctaaatatatttgttgttcacatattagagcaattgagtgtatcatctcttactgatgatcatactctagaagtcaactatatatgctgatgcatgctgagagaatgatctgacagatgcgttatttgagatcatcctatgtttcacttcatggtcactgatgacacgtatgggtagatggactccgagaaaggaccattagtttcgacttta

SEQ ID NO: 3922 - DNA, 180 bp, Triticum aestivum
  Clone ID: uC-tsro9316080a08b1
tccctgcaggtcgtctttagaggatcacccggggaggaccagattcatatacattggacccgatacagcgtcagttatttctgtagaggcaaacaccggttggcatggtggaaagactaagccatatcactcgggctaaccctggaacagttgtcgtcgattgggatggccagttaccgt

SEQ ID NO: 3923 - DNA, 54 bp, Triticum aestivum
  Clone ID: uC-tsro9316080a12b1
tccacgcgtccgactagttctagatcgcaatcatcattatttactgtcattttc

SEQ ID NO: 3924 - DNA, 455 bp, Triticum aestivum
  Clone ID: uC-tsro9316080b04b1
aactacagctcaacacatcatttgcaccggtcgttcttgatcatcacagcaatggcctccaccgacagctggacccacgagatcgaatcgccggtggccagagcgcgcctcttccgcgccggcgtcatggactggcacacactggaccctaagctcgcaccgcacatcgtcgccagcgcccaccctgttgagggcgaaggcggcatcagcagcgtcaggcagttcaacttcacctcagccatgcccttcagcctcatgaaagagaggctcgagttcatcgacgccgacaagtgcgagtgcaagtccaccctcatcgagggcgtgcgaatcggtaccgccatagagacgaccacctcgcacatcaaggtggagccggcggacaacggtgggagcgtcgttaaggtggagtcgacctacaagctgctgccggtcgtggaggtaaacgatgagatcac

SEQ ID NO: 3925 - DNA, 433 bp, Triticum aestivum
  Clone ID: uC-tsro9316080b05b1
tatagggacgcacagctgcgagggattaacgcgtctgcgcggaacccggaaaactgggggtttattgggcatcgggtgcgtgagtggaacaggatacagtcagaatctaagatgctgctggttgacccatgatgagtatcgtgtagcaacaactggatgtgatcatggcacgttctgagccattgcgttctatgtggaggagtctaagacaatagataaactgattgccgccagtcaggtagctgggtgaacaacatgaaccatgatgttagcctgacggagactaaagaagagctcgggctccgcatcaaagtgcttaaagaggtgcttgatcactcgaggtctacggttgccaatgacgcgagttacacaacgtagagactggaaacatcctgttattacaaaatttaatccgttaacagggcatacatgt

SEQ ID NO: 3926 - DNA, 466 bp, Triticum aestivum
  Clone ID: uC-tsro9316080b07b1
tttttgcgtggggcgccgagcaacacaatcaagatgtcaactctgtcggcctcatcttctccaggaagaccgacgcggccattgacatactcaagctcatgtcctccacattcatgttcgccttgagccaagccatcgacctccgccatcttgaggagactgtcagggatgccgtcaagagctgcgcgatgatgacgggcaggaagacattgaccaccaccaacaatgggcacctgcacaatgcgcgattctgcgagaaagacctgctgctcacgattgaccgtgaggcggtgtttgcgtatgcagatgacccttgcagtgccaactacctattgatgcagaagatgcgtgcggttctcgtggagcacgcctaggccaatggtgaggccgaacgcgacgtggagacatccgtctttgccaagcttgccgcgttcgagcaggagctccgtgcagtgctaccaaagga

SEQ ID NO: 3927 - DNA, 428 bp, Triticum aestivum
  Clone ID: uC-tsro9316080b09b1
tgtttttatacatatatactcctaaggtgatgcacgcatgatcagtaccagtgtgagatatcgattcatgtatccgtgttcggtgccatattcatgcacctcgtcgtgtgtaattattcggtgtgtacgagaccgacgatatatacttacaagtactgtctactgtgattgaggtaaatagctggagcgctatcgataaagcttcttacctacctggcgacgggcaagaaactatcggactccgactggagcctaactgaacaaaggggcggcccatttaaaggacccggatttccttccccttccacgccacggcatatatttattttagtgccccctaattgcaaatatttggcggtttgttttcaactttgagacggggaaacccctgtgttgacccaaattaatagggtggctgccaatccctt

SEQ ID NO: 3928 - DNA, 282 bp, Triticum aestivum
  Clone ID: uC-tsro9316080b10b1
gcgtttttatcggcgcggcgctggcggtcatctaccacgtggtggtgatcagggccatccccttcaagagccgcgactagtcaatccagcacctgcgaatggaatcttatcggtgctcatcgccggtcgatcgatcatgtggtggcggtgggggccgctggcgcgcgccgtcgtggatcatctgctccccgcccgcgctgtcagaatgcctgcatccgacgggctaggcctctcctctgtctgcgtgcctgcccgcagggcaaactgatgaaggttgcgagc

SEQ ID NO: 3929 - DNA, 382 bp, Triticum aestivum
  Clone ID: uC-tsro9316080c03b1
gccctagctccttagaaggataaatgaggaacaacgacataatttgcaaaacctaggattacccgtaccgagatttttgggctatggaatcgttgcccgcccaattgcccgggttgcctgtgtgttaaaggccacgcttccatggctatgatggccaaggaacccatattattaattccccagcggatttaccagattgacgttaagttaacaccggtagttggatgaaacgccagttttgtcccctacgaaagggaattgggcgttatcggttttcgcaatgtcaggggagaaatggaagtttacccagtggtggacttccaaacaaattgaccagctttgtcgttgggtggaggcccctgttcccattgattttaacatt

SEQ ID NO: 3930 - DNA, 594 bp, Triticum aestivum
  Clone ID: uC-tsro9316080c05b1
gtgttgttcatccgtcagaggcctaattgttggagaggcagggcggacgcaggctcctcgcgaggctgtgccggcgggtggcagccacggcgaggctgggcggccgtccccggcgtccggcggagcccttcgccggcgccggcgaagcagaggcgaggcagccggcgacgcggcggcgacagcggcggcaccggcagatgggggcgcgcgtcatggcgtggtggcgggcaagggtggtcgcgcccatgcgccgcgcctgcaggctcgccgtcgccgccgaccgcgcccgcgtccgcaagggcgagtgcggggtcctgaaccttcaccaggacgtgcagacgtgcggctaccacgacgtgcaggtgatgtgggacatgctcagctccgacaaggaggccgctgccgccgcctcggcgccggcgaagcagcagcagcggcggtggaagaggccgttctggaggctgactacgtcgatctggcccgcccggtcgccgtgcgccgctgcagcgcagtgaggcgaacggccttcgagctgtgcctgggcatgtgacagaagcattatcatgcaccctgccgtgcatgctgtgctgcatg

SEQ ID NO: 3931 - DNA, 557 bp, Triticum aestivum
  Clone ID: uC-tsro9316080c06b1
cccttgcgtccgcccacgcgtccgtagcatcaccagccctgcttcagtagttctattgtctctgtgaaatcgaccgcggcgtcgaccatgagctacccgccaccgggcaccgcgtacccgccgccgggccaggaggcctacccgcctccagggtacggcgcgccgccgcctgtcgccgctaactaccagcagcaagccccgccgcaggactcgcaggaccgcggaggcgacggcttctggaaaggatgttgtgctgctatttgctgctgctgcctgctcgacatgtgcttctgatcacaagttcctactgccaacaccaggaaatcccacgatgatctactcactcagagctgctcatagttgatcatggttatttctattgtagtatttgtgctgtccgggtggagatttgtatgggctcgttgtgctagttaattttgcatctggattttggcttcattctgtatcacggtattgttattggcagagtcttagtctcttcagtttgttggtgatgaataacacgtagcagtagcatgcgagattcttgacgacac

SEQ ID NO: 3932 - DNA, 487 bp, Triticum aestivum
  Clone ID: uC-tsro9316080c07b1
ttcttgcgtccgcccacgcgtgcgcggacgcgggggaacctatttgcgctgagtggaagggcctgcgacaacctgctgcagaacaagactgctgtcaccaccaaagagaactacggccaaggggagagggaagcacaatgctctaccgaacagagaacactcgatggccttcaatcaccggagccgcacttccacacactggtcaaccacacgagcacctaccgagagctctctgagatcgctgagcaagcagagagaggagctgatattgcaggggtcagggagctcaacacactcaagggccacaacgaatccatggtgaagatcatgggcctagacatctacaccatcaaccagaactacaccgtgtgaggagattggacattgaaccaacagacatgacatacgtgtcgtagctagattggaacggagctcccggttaatatttcttcggtgaatgaatgaaacatacatggctgatctgacc

SEQ ID NO: 3933 - DNA, 367 bp, Triticum aestivum
  Clone ID: uC-tsro9316080c11b1
gtgtggtttatgcgcaagcggcctaatcgttggaggggcaggttgaacgcatgatccgcgctaggctatgccaccggtgggcaaccatgagctgagctggagggcgcacccggtatccggcggcggcctacgacggctaccgggaaccagaggataggcagtcggcgactcgtcgctgtcagtaccagcaccaagagacggcggagcacgacatggaccgctgacgcgaaaggttgtgcaaaggaatgcgcgctgcttgtaggctctgctgcctcggcgacatgtgcttcggatcaaagggcgctactggcgacctgaacaattaccacgacgagcaactgagcgagtgccgctaatagcagatcat

SEQ ID NO: 3934 - DNA, 488 bp, Triticum aestivum
  unsure (1)..(488): unsure at all n locations
  Clone ID: uC-tsro9316080d02b1
cggtcttgtatttgccggggttggagcatatgcagtttacaaataccggctacggagttacatggattcggagatccgcgccatcatggctcagtacatgcctttggacagccaagaaggcgcaaaccagcaacagcatgtagcgcatgctggtgatatctgagaccagatggcactgcttttgctgagcaacacagaagcgtgcagggcagcgtatgtattatcatcggtggcgtcggctttacagcgcaaagatacggtttgtacgcgaggagatttgatgtatgattctaggaagttacactgttgagaaccttcattttgcgagacacgatgaacagcataggcggatattgacacggtttaccctaccacctttgacggctctagtgtcgttgcatactactgtactacgcacgtgtcaacatcctgtgaatacttggtgttcagactacttgcccctgttatatctgaataatgncgagcct

SEQ ID NO: 3935 - DNA, 550 bp, Triticum aestivum
  Clone ID: uC-tsro9316080d05b1
ggcttatctagagtttgggatttaaagtcatctgaagctgtggctaatctgccaagagaacaaggagaaatatttggcttctgccgattttctactaagtctgacaatagtcagattctctttgttacagcaatgcaaggtgattacggcaaaataatatcttggaatacaacctcatggacaagaattggatcaaagaaagtaacccgtgatgcgatttcagctttttcagtctcgcctgatggtacacttctagcaattggaactattgagggaagcatcagtgttctaggtccaagagacatgcgagtggttctaacagttaaaaaggcgcatcttggcattgttactacattagcgttttctcaagattcaagggccttgctgtcgacttcctttgactcaactacaagggtgacatcgactgaatcacccaagagcgatggtataagcctctggtccatggtactagctattatactcggaattttggtatattactatatgcagcacagagaagatctcttagcaatgttgccacaatgaaatt

SEQ ID NO: 3936 - DNA, 502 bp, Triticum aestivum
  Clone ID: uC-tsro9316080d08b1
tccttgcgtccgcccacgcgtccgttttttttttttttttgaggcaatcatgctgaatccatttacccagtcaaccatgtacatacaacaatagtctcttctagtatgaagtgagtactaacccccgccttattacattagaatcaaagaatgaatgaatggaagtaaattaagtacataaagaatggtattccgaaaagagtcgaatgcttgcaaaatggtgcaaccacacctaaaattttgcttgcaaattaacatatgggtatcagtctatcctgcccggcccgatacaccactctgttagcgctacttcctacagtttgagtacagttcctccagcaatggcaagttaagaagaacctgagaacttctgcaattgtatgatcaaaacactgatgtcatcggtagaccccctggaacccgcggtttcgacaagccttctgcaggcggtcatgcgagataccttgtcattgccgatgcagagaggcctggcgatgtctat

SEQ ID NO: 3937 - DNA, 545 bp, Triticum aestivum
  Clone ID: uC-tsro9316080d10b1
ttcacgcgtccgcattgacactggatccatcaaaactttggagtcgtgaattgatccagcaggagcttgatcatgtagttgaagaacttgaaaagattgcagttgttcatctcctacagcacagatcaatcatttccctgatagggaacgtgcagagatcgtctctgattcttgagaaggcgttcaacgttctacgcagaaatggtgttaatgttcagatgatttcgcaaggggcgtccaaggtgaacatctccttggtggtgaatgacagcgaggcgaagcagtgcgtgcaagccctccactcggcattctttgagaacggtttcttgtcagaagtagaggaagcggaccttgcacagaacatggctccagtcctagtaagctcgaatggtgccatcaatggaaactagtcgacgtcgcttttttctatttccagcaatggatgcgccggtcttaggttaagagggtgattcgaccttggattatttaggccacctgagctgattcattggtgttgcacgagcggtattagagctatcaatttt

SEQ ID NO: 3938 - DNA, 71 bp, Triticum aestivum
  Clone ID: uC-tsro9316080d11b1
tgtgacaggccaatgagacgcgacctgtgacggtacattaagtgcggtgggtgcaggggacacgcgcaggg

SEQ ID NO: 3939 - DNA, 317 bp, Triticum aestivum
  Clone ID: uC-tsro9316080d12b1
ttattgcccgcaatggcggcgaggcggtgtcaccacctgatgctacggcggacggtatggaggtggaggcataggaggaggcgtgcgaggaggggaacgagggggaggatgtcatgcagaggaggctgatatacgactcgcatctgcactacatttactcgcagaacaaggtcacgccatgagtgtcgcatgcgctagttcttacttcgaggtcataatgatgatgctgggcattaagttgactcaaggaattatatggcgacgattattgttatcttaatcatatattattgatgtaccttctgttgttttgactg

SEQ ID NO: 3940 - DNA, 153 bp, Triticum aestivum
  Clone ID: uC-tsro9316080e01b1
tgacgcggacagagtgaatcagagttttttcatgggtaaacacagggacgaaggctaggaggacaacgactatgaacttgggagaactgaccggagccatgacgtccaaagggattaagactgtgcatctaacagcagatgctacataatgag

SEQ ID NO: 3941 - DNA, 254 bp, Triticum aestivum
  Clone ID: uC-tsro9316080e03b1
ccctcttgtacgcccacgcgtccgcccacgcgtccgcccacgcgtacgcccacgcgttcggctccaggctcagatctgggagaacaaccacaactaagtgaaatgttggctaattacacggcggaccagtgagcaaattaaggacatgtttgagttagtagatatgcatcctaatctataaaataaatggatcatatgtcatcccattgatgtgtgtgtaatgagtgaatgtatttataccttctgaatagttg

SEQ ID NO: 3942 - DNA, 120 bp, Triticum aestivum
  Clone ID: uC-tsro9316080e07b1
gacttcataccttctgtatagggtgccctaaacccaagtcactggccggccgcttacacccacgtgactggctagaccctggcctagcccaactgaaaagtctggccgcacagaaacctt

SEQ ID NO: 3943 - DNA, 417 bp, Triticum aestivum
  Clone ID: uC-tsro9316080e08b1
aggggaaccccccggggagggcccggccctgatggcaggggcgacccacccgtccttgtttgccggcgggggggctgaagacggcataccagcttatgacatcacgagcagtggtaggcacggggcgagggtgcgacgaagcgtgacagtgacagctcggtgcctgtgctgcacagatatgcttaatggattagggggctgggggaccaacatattgtgcaggtctatatgaatggcggtaggaacacaatgatcccactacggtcccggtttgagacatatccaccagtgcataagtgtgctatggaaacaatgcgatctgccgctagcgctgtgcactgaagggttggttgggacaagacggactgagctcacaggcatgcatctgcgaggaggtccgatcagtcgtgcgtttac

SEQ ID NO: 3944 - DNA, 350 bp, Triticum aestivum
  Clone ID: uC-tsro9316080e09b1
gaaaccccgggctaggccctggcctttgcacaaatagcgccccacactaggtagtggttcagactggcgcaggcgtaattgttcggtggtgtttatggtgactagcttcatctattagttgatcttttattccacggctgaggtgcgctgaaaaggagaaatgtacaagctattcacatctcccaaaaatggttgtgggtacgatactcgatttaggccacggtccagcccctaaagtccaatttactaatagccgaatcatccataccttccatgggtgaatgcccatacggcagttaacgataccgatggggaaccatgactactgttcacccagtcccaaaccatac

SEQ ID NO: 3945 - DNA, 505 bp, Triticum aestivum
  Clone ID: uC-tsro9316080e10b1
tagaggaacaccgccaacggaagggggtaagggggacatgggcatccataacagcgggttgttcaacggcaattcagcacaaaagggggaaatgattctgtaactgacagtttagatttttgtgatccgttatgcgagataaaccgatctaagcttaatattttaggggattgccatgcgtgtggcgctgttatttggtgcatgatctgagaagcatgaagtgtccatcaaatctggctaggtgatcaactaagcattgatcagagactatcaccaaaccaaatataacgtgagctctttgtatattcaaaaaaatggcgtttgggtggagccagacgctaatcaacaagcttggcaccagggagatccctggggggatcagaccgttacggccggacaactgtggcagtttgccccagatgcggctctaatggaggtgtggaataccatattggacggccccaaacgtgaatatcgaacagtgcacgggctatatagttagatg

SEQ ID NO: 3946 - DNA, 454 bp, Triticum aestivum
  Clone ID: uC-tsro9316080f02b1
gtcgactttataggaaccgcctacgccgaactgtccttcactaccaaaatgttcgcgtggcgaagcctttttgatgcttgactgcatgaatcttcaggccctggacttgtaggcttttcggccgcaactgtgactttgtgagcaaacgcgcacgatgctcttcgtagaaacagcatccattacactcttgccagaaggttgcggggagaccatcatttgatacagggactgcaaaagcgccattcttgcccatggactcgcatgggatagaagaccagcacgtcagcaaaatcgagaatcctgctgccccactacatcttttgagtgcccacgagatcacggctaatgccatggcgactgacgtagaatagctgagactattaatgggtgagagtagctgctgttgcgctagactatcatctgagcgtgcaggtggagttttattacaaatcat

SEQ ID NO: 3947 - DNA, 457 bp, Triticum aestivum
  Clone ID: uC-tsro9316080f06b1
ctcttaccagagtgttcacttgtaagctccggacactaaaagatctctttgtatgttgtaaacatatttgatcaattacaatacatcaaattggtaggtttgatcaaattagtcatggttggccatggaccaaattagacacctgtatatgatactgatgtatcttgttcatatgcaaatcccttgcttgggttgttgagaccaaaaaaaaaaaataaatcagaagaagaaaataaagatacaactgtaagacattagtgagtttggtacaaaaactataaatgaatgataaataaaagaaaagagggggggggccgttttagaggaccaaagtttacgaccccgggattgggaggtaaattattttttttagggtcccctaaattgaattaactggccgcatgttagcaaaaatttgacggggaaaaccttgtggttacccaattaaataatcttg

SEQ ID NO: 3948 - DNA, 162 bp, Triticum aestivum
  Clone ID: uC-tsro9316080f08b1
ttttgttcttgttgtgtttattcgtatatagaagaagatatgattcaattggtgcaaaaaaaaaaaaaaaaaaaaaaagacaaacaaaaaaaaaaaaaaaaaaaaaaaaaaaacaaacaaaaaaaaaaaaaaatctaataataccacaccaaaataaaagaa

SEQ ID NO: 3949 - DNA, 202 bp, Triticum aestivum
  Clone ID: uC-tsro9316080f11b1
ctatattagagtgttcacttgcaagctccggacactcaaagatctctttgtatgttgtaaacatatttgatcaattacaatacatcaaattggtaggtttgatcaaattagacatggttggccatggaccaaattagacacctggatatgatactgatgtatcttgttcatatgcaaataccttgcttgggttgttgagacc

SEQ ID NO: 3950 - DNA, 420 bp, Triticum aestivum
  Clone ID: uC-tsro9316080f12b1
tttttatcttgcaatcacaacaccgcacacgagagaatactatctctcactagtgcaaccgctagctctagccatggcttccagggcgagcatgttggccacgatcatggcgtgcgcgctcctcctcgccggaagcacgtgcgacgctgcccgcaacctggccgacacgacccccacggctgccgctccggctgctaacgtagtacctggcctgccggccgagcccacggacacggtcaccctgatgccaccaatgccgtcggtcaccctgcccaccgtgccacaggtgacgctgccgaccatgccggccatcgtcgtgcccaaggaggtactgccacccatgcccaaggtgaccctacccaccgtgccgtacgtcaccatggcgcccatgcccgccattgtcgagcccaaggtgacgct

SEQ ID NO: 3951 - DNA, 220 bp, Triticum aestivum
  Clone ID: uC-tsro9316080g01b1
tgcttttttcctagcatcctgctgatgttttcactggaggcagcgctcctcgtcgccggtcgcacctccgccgtcgacgaagtgggcgccattctcctgccgagccaaggccaagaggaagcagccatggcggcggccaagaagaggccgtggaagtgctgtgaccaggcggtgtgcaccaagttcatcccgccgatctgcagctgcatggaccaaggtc

SEQ ID NO: 3952 - DNA, 297 bp, Triticum aestivum
  unsure (1)..(297): unsure at all n locations
  Clone ID: uC-tsro9316080g02b1
gcatcttggtggtgctatacaagtcagttataaatgatgggcttcagctggacatgaaacatgcccgagctcttgaaaaggaaagagctgtcaactattacaatggcatgacaaaggagcaatttgcaaatatgcagaagtttatacaaggccggagttctaaagcaccatcgaagttgtagatgcggtgctctgtgtgtatgtgcctttttattatatggctccttttattataaagcttgtggaaatgtcaaattgctactcctattactggaagacccacgttgttntactttg

SEQ ID NO: 3953 - DNA, 137 bp, Triticum aestivum
  Clone ID: uC-tsro9316080g07b1
aggtcttccgccgtcgcacgcaaccgaggttttttagccgctagccggctcactagtggatcatgggttacagatgcgcaattgtcatgccggacctcttcgataggatcgagctggtgcaactgacagtgccatga

SEQ ID NO: 3954 - DNA, 385 bp, Triticum aestivum
  Clone ID: uC-tsro9316080g10b1
tttttgaaaaaactaaaaacattgccaagcacaacgagaacaactcagaatctagggctaggaaatgaatctcccgcagcggcgaatacacctatacctacgttggtcttccgactccttcttctcgccgcagttccggcaacccctgtcccactaccgtaggccatccccttggtcgatgggcgctcaattttctacccactgcccgggtcgctagtgaacacccctacggcgataccgtgacactccgggcccaagccctatgctttcctgatactttttctgccggatgccttctgtccattgctttcatactgacagtgaagctcctcatactccgaatttgttagcttgatacgtatacccaactctgtcattgctgact

SEQ ID NO: 3955 - DNA, 63 bp, Triticum aestivum
  Clone ID: uC-tsro9316080g11b1
cgggtgcggccagaccagaagatccaggtttacatgatccaacctgcgacgcgcttgcatgcg

SEQ ID NO: 3956 - DNA, 152 bp, Triticum aestivum
  Clone ID: uC-tsro9316080h09b1
cggaggcattgacgcctctggccgctacacgaaaaacgggtagtctaccggcaatccgacccgggagtacacgatgaataaagccgcaccgttgacgctgctacatgacccctgggagtacctgctcgcgcaactgctgtgatcatgcgacc

SEQ ID NO: 3957 - DNA, 459 bp, Triticum aestivum
  Clone ID: uC-tsro9316080h10b1
gcgttgatgcttgcgtacgtagcccttgattatgagcaggagctggagactgtcaagaacagatcctcggttgagaagagctacaagcttcctgatggtcaggtgatcaccattggcgcagagaggttcatgtgccctgaggtcctcttccagccattcatgattggcatggagtcttctggaatccatgagacgacctacaactccatcatgaagtgtgacgtggatatcatgaaggacttgtatggcaacattgtgctcaggggtggcgcaaccatgttcccaggtatcgctgaccgtatgagcaaggagatcaccgtccttgccccgagcagcatgaagatcaaggtcgtcgctccacctgagaggaagtgtagtgtgtggatcggagggaacattctagcctgactgagcactttacaacagatgtggatattcaaggacgagtatgacgaggct

SEQ ID NO: 3958 - DNA, 400 bp, Triticum aestivum
  Clone ID: uC-tsro9316080h12b1
catcaaactgtccaccatggtgcggaaaaagcgcgtgagtactcgccgaacggcccgcgagaaaaccaagggccagttatataccggggaccacacgataaacgcccgtgcagaccgcaaaggcattacaacaggcataaggagcacgccggtgctgccaccgtttctctggggaggcgtccgtgactgagggtaaacaccttgattccccacgatttgatggcagagcaaccgaacaatgaggccatggcgacgggtactaaacaagacgcgtagttccgtgggccagaggtgaaaagaggagctggttgatacgaggcctattgtattcactgcccttcaatgtacaacttcatggctagcgaaacccaatgcatagcccgacttaaatgcgcttgga

SEQ ID NO: 3959 - DNA, 214 bp, Triticum aestivum
  Clone ID: uC-tsro9316084a02b1
ggtatgtttaccaaggttgcggaggatgaggactaaacccactgtctgtcgtatcgatcagttataactcaatacatatctgctgagagcatattgggaagtcttgctttagcttattgctatctactgttcatgatgttccatgacttcttgatagacgatttgagacgctggatattttgttcaagcgcttgaagttttgacttgttgtttg

SEQ ID NO: 3960 - DNA, 75 bp, Triticum aestivum
  Clone ID: uC-tsro9316084a04b1
acccggcgactacttggtatccggagcgggtgctgaccatgagtgagttattaccgctgatactgctgcctgacc

SEQ ID NO: 3961 - DNA, 273 bp, Triticum aestivum
  Clone ID: uC-tsro9316084a05b1
cgcactcctttgacacaacgtctgcgaaaagggctcgttcgctctacagggtagccgcccccttctgcccgccccgatatgaggctgcttcagatgcactttctgggtgtgctgtagaacgtcaatgagcacccgatggtcagacatgaaactgctgaggcccttggttcaattgcagatcatggaaagcattgcgcttttggaggaattctccaaggaccccgatcccatccatgcccaaagctgtgaaggagccctcagcatgctcgagta

SEQ ID NO: 3962 - DNA, 304 bp, Triticum aestivum
  Clone ID: uC-tsro9316084a07b1
ttcttacatgcggtccttcctggtgagcctagcctggggttgtaacctctgggtcctctttaagcatccacatagtgatgatctgtggccaggagacccccgagcgacaaactgccgttcaattgcttaatgtagtgtgcgcccactgccgatgatagcagaagaagactgccaccaacccgtgggacctcataactatccgagatgtgcgcctgcctgatcctgaagaagagattttcgtcagtgtgcacgatctcaaagatgcgctaggtcacccgaaggatcatgttgacagtgtcctacg

SEQ ID NO: 3963 - DNA, 150 bp, Triticum aestivum
  Clone ID: uC-tsro9316084a09b1
gctaatagtggggagccgcctctttagatgacgctggtttacttagcaccgattgcgctgttatctctccttgatgaggtcacctcagaacaatacagcaggaccacggtcttcaacgtccattgtgtgctatccgaggagttccctaac

SEQ ID NO: 3964 - DNA, 197 bp, Triticum aestivum
  Clone ID: uC-tsro9316084a10b1
gctacgtgtacggtcgaccttattttagtgctgaggagagatctataagagaagattctgctgaaggcccaccacaaagtgagcaagaaaaaaaaacacggcttggcgttgctctgctccccctttgcccccctgcggatgcttcgcttcctttttgtgatcttgggtcggggtctcctctctctggccctgctcct

SEQ ID NO: 3965 - DNA, 446 bp, Triticum aestivum
  Clone ID: uC-tsro9316084a11b1
ttgttattgaggctctaggtgtgaaaagtgctcttctgcgccacgaggtcgcttatgtattaggtcagctgcaaaataaggctgcttcagatgcactttctggtgtgctgaagaacgtcaatgagcacccgatggtcagacatgaagctgctgaggcccttggttcaattgcagatcaagaaagcattgcgcttctggaggaattctccaaggaccccgagcccatcgtctcccaaagctgtgaagtagccctcagcatgctcgagtacgagagatcagggaagtcgttcgagtttctgttcctccagactcctcaggtgcagcaggagtcctgagcccagcttcggatacatactttgatggacctgtcagagtcgacggttcggtgtggtagtggacatgatgtctgaatgaagtgtcgtcgcccttttccggttctttttcgg

SEQ ID NO: 3966 - DNA, 173 bp, Triticum aestivum
  Clone ID: uC-tsro9316084b04b1
gtgactccttggggccagacgcgggagtagacgacggggaattattgagcgaagacgcagctggcggcccacgctgaggaggggaacatcccacaaccggagtatagaccgccaggaggggacgatgattctcggtggagcacaccacgacaaaggaggaactgatcgcccgc

SEQ ID NO: 3967 - DNA, 323 bp, Triticum aestivum
  Clone ID: uC-tsro9316084c01b1
cccttgtttccgcccacgcgtccgcccacgcgtccgaccacgcgtccgcccacgcgtccgctttataaaaataaaaggggccaaagaagcccataaaaaaaagaggccaaagaagccgaccaaataaaaaaataaaaaataatgagaaaaaatagagaagggacaatgctactatctcttttccacacttgtgcttcaaaatagcaccatgaccttcatgatagagagtctcctatgttgtcactttcatatactagtgggaattttccttaaatacattgtcctcgaatccgactgttcaaaaaaatataacaaccatactg

SEQ ID NO: 3968 - DNA, 359 bp, Triticum aestivum
  Clone ID: uC-tsro9316084c02b1
acactcgggatcttagacatgcgaacgggagtaaccacgagtgagtcaaaaacgattttgctgctgcctacccctggagagaagaggtgcgtgcaacgggttttagcatggacgtaaagggccattgtactgctcagggcgagaccatgagaaaagacgaactgatgaggcagatccattgcctgacctaacatctaaaccgggaagtcagactgactgggactaaagaagaacaggcactcccctgggcaaatctcaaatatgagctgtgacgacaccatgcctaagatagacactggccgactctcaacaagaatgtgagtgtaaaaacacttacgcaacataactcaatgatcttg

SEQ ID NO: 3969 - DNA, 354 bp, Triticum aestivum
  Clone ID: uC-tsro9316084c03b1
gcggacacgcgacgggacacgcctacgcttgatcatggccggatccacccccaggttgcctcggactggtacaagtccgaacacctcgtagggatcggcacctccggctcgctggactacactgtaagagcacacacagcaaaagatgaaccgagtgtacccgccctggtcactggaggaacacatgatccccgatgataggcctgacctctatcaaagaataaacggcgctcggtgtgctactggcttaaaagaatctggtggactctaggcacctctatgaaactgagggtacgtatgacagcactaagactgatagaacgcaaatctcgaacaaataatgcagattactaa

SEQ ID NO: 3970 - DNA, 311 bp, Triticum aestivum
  Clone ID: uC-tsro9316084c06b1
gtggtcatttccgactcccgtcgggagatccgcaggtgcgaataggtcacggagctgctcctgccgatcccctctgactagaggactgttccggacaaggcgctaaggtcgactcgcgccatccatttcttgaggcgggcgggtcaatgacagaagtactgctgagccctcctacactccttgctagctcaacagtactaaccagatctgcatctagtaggcaccagaggatcatatagactccaggacggtgatctgcgagatgagtaacttgactagaggacgcacaatcgcaccagttcaccggaggc

SEQ ID NO: 3971 - DNA, 235 bp, Triticum aestivum
  Clone ID: uC-tsro9316084d03b1
cttcttattgggagcgcgcatcgggacagggctaagccggattatggctcgaagcaacggcttgctgaccgctatgggtgccaatgcgagcaacgcgtttgactcggaggcactgagaactcgatgtctaacagttgagaaacacacatctaaggaagcactgagtgtcctgctgtgctggctgggggaacaagcgtgcccggaccacatactagcgctgacaaaaaaataaacg

SEQ ID NO: 3972 - DNA, 390 bp, Triticum aestivum
  Clone ID: uC-tsro9316084d06b1
gtcactcatccggcgcggcggctgcggacgatccaggggatcttatgtgagcatcccacgccatccacctcctatagggtgacttgagccacatacactgaccgcagtgtcacaccggtgacaatggcaagactgtgagctcccccaagttaaccgccttgcaggacttgcaccttatgccagttggcgcacttgggataaggtccaatacgcccgccctgtacaacatttcgcaacacctgaatggcctgtgtggcgagtgctgcgcgggctcattaagcgcaataagtgcggcggttgcgctcagtacgaccagtgcgtctcgctaccatcgtaaaggccatatcgttaagtgacttcgctttctttcctgccattatcgcccagttt

SEQ ID NO: 3973 - DNA, 316 bp, Triticum aestivum
  Clone ID: uC-tsro9316084d07b1
ggtactcgtgggcggacgcgtgggatcaacccctagggtttgttatcaacagaggagttaatcccccacgtctagtggggctgttatttatttcgggaagtggattggagtgttatgaacgtggtttctggacgagagacagcttgctgaaggattatttgagagccggagtgatccggtcagcgttacatctgtaaggcacttgcaattgtactgaaaaggctgagtatgtgtgatctcatagaggaaaagctgaaagaggagcttgatgacacgaggcctaatatttgaactggggggcgtccgatctagagga

SEQ ID NO: 3974 - DNA, 321 bp, Triticum aestivum
  Clone ID: uC-tsro9316084d10b1
gtgattcctgcctaccggggcgcggcatccgaccagggtcagcctgcactgcgagccgtcgacccggcccacacctgtgacggtgcaccacgagtcggccttcgagcgcgcaccctgggtcatcgttctcaaatactggcacccaggattaaagaaggccatgcactcctgcccctacctgcagcacaacggcgtgaagaggggcgctggccccggggacacaccagaacatccgccatttggggcacttgatgtaaaagagtacaccgtcaacacgaggtttattcttgacccaacgcgtggagctaccaggagctgacg

SEQ ID NO: 3975 - DNA, 457 bp, Triticum aestivum
  Clone ID: uC-tsro9316084e01b1
ctctcttttccggtgaccgtattggctatgtccaggtcccacaacggatcgagggcattgatccatcacatcgctacgccaaccacaacactgccttctttgatgtcaacatgcgtgcattgtacggtcttatgggaccagtctatgtcggcactggcatgtctgttccgccgtgttgcactctattgatatgaccctccacgctccacagaacacggtggctgctgaagctgttgcttcccgaataagcgcacgatcaagagcactggttgctaaggtacatatgatgagacacgggctctgctcatggcagactttaatgatgaggccatgaacatgccaacatttaccaagaggttcggtaactcaaacttgctcattaactctatcccgattgccgagttacaaaggcgccctgttgctgatcaccctggcgtcaagaatggccgcccttctg

SEQ ID NO: 3976 - DNA, 413 bp, Triticum aestivum
  Clone ID: uC-tsro9316084e03b1
atgtcgttcactgtgctactacatgtcagcccactgctatgaacgtttcattgatatttgagttcatataactgaagaggaaagataaaaaagagacccctaaaatatatcgaacctatccgagataatactcacgtaaaagaaaagaagaagcaaaaatggggcggtggaatatatggagccaaggttgctacctcgtggtttctagataacaagttttctttaaagacaactaaattatattcattcgcgcagatggttacacgttgtaaactggaaaaacactggaattgccgaacataatcgcatagtaagattgaaccattagcctcaaccgggggcttaagaaataggccccaacctatggcctcttcgcaacagaaggaggatcgaaactgtgaatgggactcgcc

SEQ ID NO: 3977 - DNA, 503 bp, Triticum aestivum
  Clone ID: uC-tsro9316084e09b1
attggtttacagctacacggacacttcagggaaccctcgtgggttcctcaggatcaggctttgagtggctcatatggcatccacgtggtaatttgataattgcaggatcagaagactgtaacgtatggatgtggaatgctgaccacaatgcctttctgaatacgtttgctggtcacagtagcacagtgacatgtggtgattttacccctgatggtaagcttatatgtagcggatctgatgatgcaacattgaggatatgggaacccaaaagcgcacaatgcatacatgttgttcggggtcatggctatcatactcaaggattgacatgcttagccattactccggactcccaatcaattgttagtggctcggaggataattctgtgcacattgtgagcataatctcaagccaggttgttgggtcattagatggccacaccaattccatccggtgcattggcatctaatcggggtacaactgtgtggctacagggagctttgtt

SEQ ID NO: 3978 - DNA, 266 bp, Triticum aestivum
  Clone ID: uC-tsro9316084e11b1
tggtactaccgcggaaacgcaacgggtagatcacgaggattaaatcagcaccggtgctgctggccgccccccctgaggagcctcatccaccgacaagcggtaatcataagggggcgcgcgcatattaggtcccatgaggaggcctccatgacggatgattaaaagtgtgcttcttcggggatcgatggtaaaacaactgcacccgtgtttaacaaccgagggcgaggaaaaaacatggggtgccccaagtaaaagaccttaaaaga

SEQ ID NO: 3979 - DNA, 302 bp, Triticum aestivum
  Clone ID: uC-tsro9316084f02b1
cgcgagcgggcgctttagaggaccctggctcacttagacgcgcatgcgccggaatatgaccatgatagggtcacgtaaatgcaactcgctggcccttggaccacagcgtccagactgaaacaagcctggcgtgcctgatcatagatgaactgcaggacatgctgctttcagcagcgggacaaatagccaagagagccaggccgaccgtcattgccaacagaagtgcagccttatttgccagagctacacgactatgtttataacactaagcgcagagagtgggatgtggttacgctcataca

SEQ ID NO: 3980 - DNA, 51 bp, Triticum aestivum
  Clone ID: uC-tsro9316084f05b1
gttatatttaaagatacagaagcgtgagaaaacaaggaagcatttaaaacc

SEQ ID NO: 3981 - DNA, 391 bp, Triticum aestivum
  Clone ID: uC-tsro9316084f08b1
ttcttgcgtgcggatctgtctcgtgggcctactacgattcagtgggtagaagccatgctgttggctgccacggatgaggacccggtgatccaaaaggtcaaagtacgggctgttcgaggccacaatcttgtgatggggaactcactgacacagaccaactagccctaccgtctcctctggttgggttaacagaaggagaagactatcattcagaagaaaaatgacaaagaattatggaatgatgtattggagcttactgagacaaatcctacacaggcagtgaaactttgaggctgtgatgaggattacactacagcggctgacaacacgggagtggatgcaacaaaataacttggatctaaagacgcgcaaagccggatgtaaagcatgc

SEQ ID NO: 3982 - DNA, 94 bp, Triticum aestivum
  Clone ID: uC-tsro9316084f09b1
gctactcccacggacccggagcgggagaacagggagaattaaatagaagcgggcgtgctgcaggctgcccctgatgaatcacgaagccgatcaa

SEQ ID NO: 3983 - DNA, 346 bp, Triticum aestivum
  Clone ID: uC-tsro9316084g01b1
gtgttttttggagagccgtcgcgctaggtcatgctggagtagttacgagcggtgccgctgttacacttcccatatgggggggaatcgatgcaactctgttggcaggggatccaaagacccacactgattcttgcctggagctgatgaccaaagacgcactgagtgctatccttgttttgatgtttgaacaaatggagcagagaatcatcctgacagcacctaaagaagatgtgcaactccgattacgaaagatgaaagaggagtttcgtgacaaaaagcccaagctcagagctgactgagcctatacactgcgttgactaagaaaactctggagacaacccacata

SEQ ID NO: 3984 - DNA, 297 bp, Triticum aestivum
  Clone ID: uC-tsro9316084g03b1
actcggtgttctttgcggatccagagcgtgagcggaccatgtagaagttacaagcgtacatgctcgtgcatgccactgaagagttcttgtatggacaaatgtaagaaaaatggaccggccgggccattagaacgtctgtgagtgagaaaatgacgaaagacgaacacgatagcccgcctcagctcactgggtgaacaacagaaccgggaagacagactgaaggcgaccaaagaagaactgccaccacgtgtgcaagatctataagaagagctacacgacacgaggcctaacattgag

SEQ ID NO: 3985 - DNA, 114 bp, Triticum aestivum
  Clone ID: uC-tsro9316084g04b1
gatctatttgtgttttaacacaacagtgatgtagttgcgcgttgaaattgaagtgtacattcgatcgaaaaaaaaaaaaaaaaaaaaagaaaaaaaagccaaaaaaaaaaacat

SEQ ID NO: 3986 - DNA, 372 bp, Triticum aestivum
  Clone ID: uC-tsro9316084g06b1
tcggctatctttgcggacacgcgtccggagttcaccatgatgaatccagctccgatctggctgttgattgacccagttgagctcccgggcgcacaactggcgcaaggatcgccgaggaggaggactagagctctccggtggattccgttacgaaggatgaactcgagtggacgtctacagtcgttgggtgaacaaatggaccagcatatcggcctgactgtgacgaaagaataactgaccctcctggtggcagtgctgaagaaggaacttgacgacaccaggcctacgactggaaatgtccgctatattacaacctaaagactgttaaatagccgtcgtttcacaacttaatgactgttgaaaaccatgccg

SEQ ID NO: 3987 - DNA, 93 bp, Triticum aestivum
  Clone ID: uC-tsro9316084g12b1
gctactcctgcggatacggctcgtgagagcacgatgtttcagttagtaccgttgatgctggtggctgcccctgaagagttcgagtgcagtcaa

SEQ ID NO: 3988 - DNA, 253 bp, Triticum aestivum
  Clone ID: uC-tsro9316084h04b1
cgataatgcttgcgacttccttttgccaccatagcgacagataaatagatcaaatttggcaacgtcatacacactgattgactggtaaagagctgaggacacccaacgtagtagctttcaaggctaccccatttgggtcagcatgggcaacacccaactggcctgcgctgatctggccaagcaccagttctcccagttgtagggcttatggaacgacttctacaacagaggactaagttccaacctggcggtg

SEQ ID NO: 3989 - DNA, 339 bp, Triticum aestivum
  Clone ID: uC-tsro9316084h05b1
cctatgctttcggggctaacgcggggggccacggtggagaggaaccaagcttagacccgcgagaatgccacccaagagctcaacaatagactcatgtaaaaaacaggaacagcacgcaaccctacaacgatgtatctgattgatccatgagggaacccaacaaaatcggcctactgcacaaacaatgagctgctgctaacaaaaatctagcccaagcctgaacaaaacatcaacgctaacaattgaggaggcacttttgcaaaagatacgcgcccaaccgccatatattaattgcggctaatacagtcaaaactctcaccgttgacgatacaattacca

SEQ ID NO: 3990 - DNA, 272 bp, Triticum aestivum
  Clone ID: uC-tsro9316084h06b1
agtgctccggggagggcgtcgatcaggatacagtaacatgggatgacgctattggatgcccctgctatggtgttgacctggcgaatggcgttaatgataacaagaggcacgcgggggtactcgtataagatctcaagaggaaagatgaatggattgaagagactacgaacaacgggtaaagaattggacacggatagtaagattgatgaagacaaaaaaaaaactggcgccgctctagacaatgcaaacataggagcgcgtggatacgaggt

SEQ ID NO: 3991 - DNA, 313 bp, Triticum aestivum
  Clone ID: uC-tsro9316084h07b1
gatactaccgagcttgaacagcttgacatggcacagcatctttggggaccggtgccggggttcggttttcatgaggcgtgcaaccttaattgaatgtgggagtgaaccgtcgaagaggcccttaactgcattatcctggcaagcagacctgaagagaagctgattgcctgcgacatgttgcagagaaacacctctacctaaggagaaagactgcttgcgagcacaaacgtttcttgacatgctgggcaggtattcgagatggcttatggagaaatatgatcctatcaaggagcaaggggggaatgaactgtgc

SEQ ID NO: 3992 - DNA, 335 bp, Triticum aestivum
  Clone ID: uC-tsro9316084h09b1
gctactcgtgcggacccggtctagatgaccagggggctttatacagcagcgacgctgacgttcgcggccatggcacgagacagctctgctccactgtcaatgaaatacacctcagtgacccttgtcttacaacgacttggctcacagaccgctgatctcacggaactcaattgcccttatgttcatgcccagttaaccagcttgccacatttcgaggacgcacgagccaatcggccttaccgtcaggagcccatcatttatgccgaattggacgcgccgcctaatttcgcagccagcgctctctgtgcgttgaatacactcatcgtgaccggtac

SEQ ID NO: 3993 - DNA, 441 bp, Triticum aestivum
  Clone ID: uC-tsro9316085a06b1
cggtcttttgggggaatgagtacagtgtaaatccctaaacaaggatccatgggagggcaagtgtggtgccagcaggcgaggaaattccagctacaatcgcgcatatgtaagttattgcacatacaaagcttgtggttggaccttgggccggggaggacggtccggctcacggcgagcaccgacgtactcgacccttcggccggcgatagcgctgctagccttaattggacgggtcgtgtttccggcatcgatactttgaagaaattatagtgatcaaagcaagccattggtctgtatacattaacatgggataacatcataggattccggccctattgcgctggccttagggatcggagtaatgattaatatggacagtcggcggcatttgtatttcatagtcagaggagaattttttccatatatgtaagacgaacaact

SEQ ID NO: 3994 - DNA, 308 bp, Triticum aestivum
  Clone ID: uC-tsro9316085a07b1
tttattcgtgcggaaccggggcgagagtggaccctgattcaggcaccagtgacggcgaaggtgtctgaccgtgatgaggccctctcctttcaactagggtgatgatggagaatagcgcccattgcaagattgcggaggagtccatgaccaaagacgacttgattgactcccgtacgctcgctggtgaacaacatgaaccgtgatgatagctctgactgtgactaaagaacaactggcgcttcctgtggaagagctacgagaagagctagatgacacgaggcctaaactggatatgtggacattcaaaa

SEQ ID NO: 3995 - DNA, 289 bp, Triticum aestivum
  Clone ID: uC-tsro9316085a08b1
tttattctttctggaatgggtatatagtacaacatgaagcagttgcttttgttgcctaagataaaataaacatatgatgcactctaactttaaaaaaaggagaggatggtgaatagcacccattgcaagaatgcggaggagtccatggacaaagacgaatatgagtaccccctcatggtcggatgtgtgaaaaaatgaaacgttaagtcactctgagcattgactaaagaacaactggaacttccggcggaagatcaaagagaagagctagataacacgaggcctaatg

SEQ ID NO: 3996 - DNA, 436 bp, Triticum aestivum
  Clone ID: uC-tsro9316085a09b1
cgtgcggaaccggggctagagtggaccaagattcaggcacctgtgactatgaaggtgtctctcctttatgatgcactctaatttacaaccaaggtgatgatggtgaatagcacccattgtaataaatcggtggagttcatgaacaaagacgactagggttgcccctcgtactgtcgatggggaacaatcgtaacgtggtgtcattctgactttgactaaagaataaatggctcttccgttggaagagcaacgggaagatgtagataacatgagtcctaatctagatacgtggaaaaaaagaacaacgtcgttattgggaaaactctgaagttacccaactctattagtcttgcacaacattctccattcgccacctggcgtaatacataagatgctcatagcgaaagttcctcctaacagttgcttatgatgttta

SEQ ID NO: 3997 - DNA, 289 bp, Triticum aestivum
  Clone ID: uC-tsro9316085a10b1
tgttattcgtgcggagccggcgcgagagtggacccagattcaggcgccagcgattgcgatggtgtatcaccttgatgatgcaatctcatttcaactgaggtgaggatggtgaatagcgcccagtgtgtgaaatgcggcggagttcatgaacaaagacgactatggttacacccgtactgtcgatgtgggaacaatacgaaccgtggtgtcagttctgagctgtgactaaagaataactggatcttccggtggaagagctacgcgaagatgctagatcacacgaggccta

SEQ ID NO: 3998 - DNA, 203 bp, Triticum aestivum
  Clone ID: uC-tsro9316085a11b1
tttatcgatgctgagcgggcgatcaagggaataacgaatgacgatcgatcacgaggaaaggtaacaaactccgatgataacgctgaagctcatgtaaagaaacagtgaaaccattgaccttgtctttaattactcccgcgtggatgaattgatccaattaaataactatgctcccctcgccagagtgaaacaattagaaagac

SEQ ID NO: 3999 - DNA, 279 bp, Triticum aestivum
  Clone ID: uC-tsro9316085a12b1
tttttctgtccggcgccggcggtggagctgatcccggttcacgtacgatagcaagggcaggaagctgaccatgatggtgacgacgacggtcaactggccagaccactgcgcaccagactacgtgtcatactacattggcgttaacgacgtgaggaagccttagtcctagccgttcatcaccgggttaagcattgaataggaggtggactcgtactactgctccaaatactactgccgctcctgctgcaagtgctactgctgctgctaggtgagatcaaa

SEQ ID NO: 4000 - DNA, 379 bp, Triticum aestivum
  Clone ID: uC-tsro9316085b03b1
gctttgttttccgcctcggcgccagagaagaccacgggggattcaacagcgatgacgccgccggccgcctcagatgagtacgcgttcgcacaatttgtggatgtcaggactattcccgccatagttcactaagtgatggagtcctttgaccaaagatgaacttgatgtccccctccgattgtctggagaacaatagatctgagttgtaagccctgattgcgactaaagaagaactggcacctacgattggcagagcttatagaagatgtttgatgacatgaggccgaaacttggcactggccgctccatcaaccatcgcctgactgtggaacaacactcgagctccccaactttaattgtcttgcagaacattattttt

SEQ ID NO: 4001 - DNA, 142 bp, Triticum aestivum
  Clone ID: uC-tsro9316085b12b1
atccggagccggcgctgtagatgaaccagaatcaggtacgcttgagtgtgaaggtatatgtcctatatgatgtcacctaatttcaatttaatggacgatgatgaataacgatatgtgtgtgaatactgcggcgttaacgaat

SEQ ID NO: 4002 - DNA, 529 bp, Triticum aestivum
  Clone ID: uC-tsro9316085c01b1
gtgctttcgtacgtgagccctagcgggttcgaggaggcagcgccggcggcggagatgtcgacgccgtcgagaaagcgcctgatgcgggacttcaagcggctgcagcatgacccaccggccgggatcagcggcgcgccgcacgacaacaacatcatgctctggaacgccgtcatcttcgggccggatgatacgccatgggacggaggcacgttcaagcttaccttgcagtttacagaagattaccccaacaagccgccaactgttcgttttgtctctaggatgtttcacccaaatatttatgcagatgggagcatctgcttggatattctacagaatcagtggagccctatatatgacgttgctgccatattgacttctattcagtccttgctgtgtgatccaaaccccaactctccagcaaattcggaagctgccagaatgttcagcgagaacaagcgagagtacaaccgcaaagtccgcgagatcgtggagcagagctggactgctgactaaggcagggcgaggccgg

SEQ ID NO: 4003 - DNA, 85 bp, Triticum aestivum
  Clone ID: uC-tsro9316085c04b1
gtgtcttttgcggatccggcgcgtgagaagagcgtgagacatttagcagcgttggtgctgccggctgacccacatgagtcagagt

SEQ ID NO: 4004 - DNA, 152 bp, Triticum aestivum
  Clone ID: uC-tsro9316085c12b1
ttctcatgtcccgagccggcggtatagacgacccagattcaggcacgcttgattgcgaaggtgtccctcctatatggtgccacctcatcacaactggctggacggtgttgaccaggctctagtgtgtgaatgcggacggcgttcatgaacta

SEQ ID NO: 4005 - DNA, 138 bp, Triticum aestivum
  Clone ID: uC-tsro9316085d01b1
gcgactagttcggaaacagcgcgagagaccaccgagaggcactttgtagcgattatgctggtggctgtctctgaggagttcaagtatatacaacaggtgtgctgatggtgtattcattgccattagtggcatctgtag

SEQ ID NO: 4006 - DNA, 90 bp, Triticum aestivum
  Clone ID: uC-tsro9316085d05b1
gtgataattggcgaaccggcgcgggagtacaccaggaagtagtcagcaccgatgttgctgatggctgaccgagatgagttcatgtaagaa

SEQ ID NO: 4007 - DNA, 127 bp, Triticum aestivum
  Clone ID: uC-tsro9316085d11b1
ttcttttaccgctgatccggcgcgatagttgaccaagatttattcacccccgctgacgctgctggctgtccctgatgaggtcatgtccgaacaactggctgtaccatggttccatatcgtcctttgt

SEQ ID NO: 4008 - DNA, 128 bp, Triticum aestivum
  Clone ID: uC-tsro9316085d12b1
ttctctcgtgcggagccggctccggagatgaccctgatacagtcagcattgatgacgcaggcgtctcaccttgatgaggccacgtcaatacaactggctgtgaccatgctatattatgggcccagttg

SEQ ID NO: 4009 - DNA, 84 bp, Triticum aestivum
  Clone ID: uC-tsro9316085e02b1
tgacgtcatatcacctatatagggccacctaaaatcaatactcggttcgacgtgatactacgtccaatcgtgtatataccgagg

SEQ ID NO: 4010 - DNA, 237 bp, Triticum aestivum
  Clone ID: uC-tsro9316085e04b1
gcgttttatgccgaaccggcgcgagagtacaccaggagtcagttaccagcgacgtcgccgatggctcaccctgatgagaccgtgtacgatcaactggcgtaataaaggacgttacacacattcgttttatatctgaggaggacacgaccaaagaagaatttgtttgctctcctccgctcgctggttgcacaacaagtacagtgatgaccagcttgacggcgctcaaagaagaactac

SEQ ID NO: 4011 - DNA, 81 bp, Triticum aestivum
  Clone ID: uC-tsro9316085e11b1
tgaataccaccgccgctacggcgcaggagaccaccatgattcagacaccaccgatgatgctgattgccgacccagaggagt

SEQ ID NO: 4012 - DNA, 70 bp, Triticum aestivum
  Clone ID: uC-tsro9316085e12b1
tgtttccccccgacccggctccagagaacagccggattcagtcagcctagagggagcagatgacgctcct

SEQ ID NO: 4013 - DNA, 525 bp, Triticum aestivum
  Clone ID: uC-tsro9316085f03b1
cactccgcggcagccgctgcgatcgtccggcctccggtgatggcgatgcaggtgcgccactacgccataaagggcaggtcccgcgcgccgaccacgcccaccatcttcaaagtcaagaaattcaagatgaaggccccctcgaagctccatgaagttccgcttcagaacgatgaaggacggacagatccgcaggtggagggccgtcaagcgccacaacgcacaccaaaagtccaaggaagcaaagagaagactccggaagcctgctttagtgcatttagcttatgccaaagttataaagaagctcaacttctgcggttaggaaattgatggatggaggatggtgattggcacatgaatctgatcaatgaatactgattgccaacttatcttggtacatttgttcttttgatgcattgccatcagatttttgtgctcccatctcttcaccgatgccgatgattattttattgtactaccattcacttgttttctaaacaatcagttgataaaggcttccctgtgttt

SEQ ID NO: 4014 - DNA, 354 bp, Triticum aestivum
  Clone ID: uC-tsro9316085f04b1
gtttcttttgccgatccggctcttgagtgcaccaagagacattaagaaccgatgtcgctgctggtttaccgatatgagtacgcgtacttccaactggtggtagtaaggccctatctggacatagtgtttttatggaggaggccctgactaaagtatgattctgtttgccctcctccgttctctgggtgaactaacagaatagtgatgtcagtctgacagtgactaaagaagaaccgtgtcttcgtgtggaatagcttatagaggagtttgatgacacgaggcctaaacttggcactggtctgctttaattaaacatttttactgtaaaaactctgttgttaccccacttaatcg

SEQ ID NO: 4015 - DNA, 90 bp, Triticum aestivum
  Clone ID: uC-tsro9316085f07b1
ttgtctttttgaactcagagcttaagttcgaggaatattgatctgcgtatggtgaacatgcaatataatacaagagaagtcaaatcaaaa

SEQ ID NO: 4016 - DNA, 66 bp, Triticum aestivum
  Clone ID: uC-tsro9316085f12b1
accagcgagcgaggagatagctatcctatagggggacctcactctaaaacactggacgaggtggta

SEQ ID NO: 4017 - DNA, 301 bp, Triticum aestivum
  Clone ID: uC-tsro9316085g10b1
tttttcaccggcgatacggctcgagagtacaccaggattcagtcagcatcgacggtgccgatggctgaccttgatgagtccgtgtcctcacaactggcgaaatctatggtccttcggtgccattgttcgtactgtggaggagtacaagaccataagatgaatagtatagccctcctccagatcgttggtgtgaacaacatgaaccgttgacgtattcctttgactgtgtactaaatgaacaactggatgctctctggtggctagagtctataagaggagctttgatcgacatctagggcta

SEQ ID NO: 4018 - DNA, 102 bp, Triticum aestivum
  Clone ID: uC-tsro9316085h01b1
gtgatcttttgggcgccggcgcgggagcaaaccatgattcactcacatgcgacgatgcagctggctgaccgtgaagagttcgcgtacgtacaactgcggtga

SEQ ID NO: 4019 - DNA, 85 bp, Triticum aestivum
  Clone ID: uC-tsro9316085h03b1
gctttcatctcggacccggctctagaggatgaccaggagggagtaactatcgatgatgctgcagattgaccaatgatgagtttat

SEQ ID NO: 4020 - DNA, 346 bp, Triticum aestivum
  Clone ID: uC-tsro9316085h08b1
ttcatgtgcgcggactaggggggggggggacgcacgagagaatcaaagctgacgtcgccgcgggttccacgtgatgagtctcctatcgtgcaaccgaaggacaatatggtcgctcggcgctctacagatttttgacgtggaaaacatgagtagtgacccaactgaaagcccctcgtacgacagctgcgtgatacaacaggagccgttataacacatcaggcgcggaccgaagaacactctgcaactatttgctgagacagattcgagaaggggacgatcacaggagcggtgaactaagcactgcgcgtgtgttggcaacgctcagactgacaaaaccacgtggcaa

SEQ ID NO: 4021 - DNA, 59 bp, Triticum aestivum
  Clone ID: uC-tsro9316085h10b1
tttttaactgcggacccggcgcgagagatcaccaggaattagtcagaaccgttgacgct

SEQ ID NO: 4022 - DNA, 365 bp, Triticum aestivum
  Clone ID: uC-tsro9316085h11b1
tttttaccgccgacccggcactagaggataccaggaattattcaccagcgttgatgcagctggctgacccataggagtacgtgtatgatacaactggggaaatcaatggacctacgtggaatttgttaatatgtggaggagacccagtcgaaaggatgaactgattgtcccgctttggtcgcttggtgaacaacatgaaccgtgatgttaccttggctgtgaccaaagaataactcggtcttctggtggaagatctgatagatgagctatgatcacacgaggcctcaagtttggtctggacgtatttaaacaaccgttattactggtaaaactcttacgcttacccactattgccttgtagctat

SEQ ID NO: 4023 - DNA, 114 bp, Triticum aestivum
  Clone ID: uC-tsro9316086a06b2
tttgttgttcacacagaaatgaattcaattccggcacagaataaaatataccgggggactccaagggcaaaagacagaaacaaggaagccgacggcgacgggcggaaacaaact

SEQ ID NO: 4024 - DNA, 452 bp, Triticum aestivum
  Clone ID: uC-tsro9316086a08b2
tttaatggtgccaaacatgttggtttagttccgtcaggaaatgatgtttcatcgaacaaatccagtggtcgaaaaggaattcgaggtggaagtccaaatattggcaggcgagtcacggttggtaatgatccaactcctccttcagcatctgctctgcaggcaatagtgtggctgcgcctccaatttatcatcaggctgcttcaagtaatcctggcagataggggcatgaggcatacacttgctcctgcgatactaagcctgcttgcggcacgcataatctatgaagatgcagattcgccccttcctcctgccagtttgattgcctcgagacgggaagtggactctttgctggaacctcccatggatgtcctgcttgatcgcccaagcgagagtcttttcgagaggctttatgtgttttcatgcgctgcttggcattgcaaaccaagtggatg

SEQ ID NO: 4025 - DNA, 368 bp, Triticum aestivum
  Clone ID: uC-tsro9316086a10b2
ttcacgcgtccggtccccgaagaggaagaagtggaatacgacggcactggagcatctagcagcagcagcagcagcagtgtaccaaagaagcaagaagtgatgagggtggatccactgggtaggcgcactcagttcattgacaacctcaagacgctgtttgaagatcttctgatggagttcaacgtgaagggcgctgacactaggaagttcctggaagacaaggtgaagaagaacctgcccgcagcctgaagactgcggtaggagataatttgcctggtaatgggggtgatagctgcaggctccgtaactagaaataggtaacaaggtggtggtagtagtttgctttcctaagtgcagggaaagttttg

SEQ ID NO: 4026 - DNA, 414 bp, Triticum aestivum
  Clone ID: uC-tsro9316086a12b2
tttggcgggtgagctcgcgcataacggatcgatcccagctctagaggggagcagccatggcgggggacggcgacgaggagccgccggcgacgggcggcgacaagctgatcctgcggggcctgcagttccacgggttccacggcgtgaagcaggaggagaagaagctgggccagaagttcgtggtcgacgtggacgcctggatggacctcgccgccgtcggggactcggacgacatcgcccacaccgtcagctacaccgacatctacaggatagccaagggcgtggtggaaggcccgtcgcgcaacctcttggagtcggtggctcagtcgatcgccgggtccacgctgctcgagttcccccagatctccgtcgtccgggtgaaggtcgggaagccccacgtcgcggtgcaaggca

SEQ ID NO: 4027 - DNA, 237 bp, Triticum aestivum
  Clone ID: uC-tsro9316086b03b2
tggaatttggggatgcaaggactgtgggaaggtgaaggctggcggtgcttacaccatgaacactgccagtgcggtcactgtcaggagcactatccgtcgcttgagggagcagactgaagcataagttgctactagtgttttgtcctagtgaatcatctgggattttgcagtttagacgatactttggattcagttctgttggctgtttagtcaaggattatctttgtacttggtgcg

SEQ ID NO: 4028 - DNA, 540 bp, Triticum aestivum
  Clone ID: uC-tsro9316086b08b2
ttcaccccgaacccccagcccccctccccggcgccgccgcagcagcaagatggtgaagggacgcaccggccagcgcgtgaggctctacgtccgcggcaccatcctcggatacaagaggtccaagtcgaaccagtacgagacagcgtcgctggtgcagatcgagggggtgaacaccagggaggacgtggcctggtacggcggcaagaggatggcctacgtctacaaggccaagaccaagagcaacggcacccactaccgctgcatctggggcaaggtctcccgcccccacggcaacaccggcgtcgtccgcgccaagttcacctccaacctgcccgccgaggccatggggaaaaaggtcaggatcttcatgtacccgagcagcatctaaaaggttattttgaagtctggagggtttcgctcgtcccttaggtttcatttcgagtcatgtaagatggattcaggccgggataagcatgtgaactgctgttccctgtgaagactgtagtctcatgtattctgatgtgtggtcgcatatatatg

SEQ ID NO: 4029 - DNA, 431 bp, Triticum aestivum
  Clone ID: uC-tsro9316086b09b2
ttcccacttctcctccggcatctgctgcgaccgcgcggttgcctacatcgtctgcggcgagctcccctgccccgccaagcaaggatgactacttcaaggcgtcttgctgacaggaagagtgcgaagtttcagaagaacatcacaaagaggggctcagtgcctgaaactactgtgaagaaggggaatgactatcctgttggacctatcgtgcttggattcttcatctttgtggtcataggatcatccttgtttcagattatcaggacagctactagtggtgggatggcttaatatcgagctaaaaacaagactatcattatcagagatttattatccatgtgattgggaggcaatatcatatctgtaccctgtatcaaacttcgaccctgatgatgttatgtagagatttaaatcttgttcagtcatgttta

SEQ ID NO: 4030 - DNA, 530 bp, Triticum aestivum
  Clone ID: uC-tsro9316086c01b2
gttggtatcagaaagtagaggtctctctgctgatacacttgcttccttaccttcagtaacttacaagacaaaagatatgcaagatggcaacacagaacaatgtgtaatttgtcgtgtggaatttgaggaaggtgaatctttggttgcacttccctgcaatcattcataccatcctgactgcattaatcagtggcttcaaataaataaggtatgccctatgtgtagcgcagaagtttctacctcagcaagcaagcaggcatgaccaacagtcgttggtaaaccaacttcatcttcagaaaagaaaagaaaaggaaaaaaccagttgttggcacttggtaggagtatgtagtggcatcattctagtatccctgatgtttaaaccaaaagcaaggcagcagaaacttctacagtacaaacttgcgaggggaccagggacatggagcattttttttatgccttgccgctgatgctctgcgttctcttactcttgtacactaactgtgttattaccgtcgatcaattttttcttt

SEQ ID NO: 4031 - DNA, 516 bp, Triticum aestivum
  Clone ID: uC-tsro9316086c03b2
gtcaactgtcgcgccggccgcactctccgccgccccggccttctctccgaatctcaccccgcagctcggcggcctccccggcgtacatcagcaagtctgcgatgaccctcgtcgggattttcctcgcagccctcatctggtgcgccgcctacgtcgccgccgccatctcctcggtcttctagtcctctctttctccggcaacccaacccccacaagccctctccctaaacctaccccgaccccccattcccaatctttcggtagcccgacgctgaccatgggtttcgcgcagctcgtcatcggccccgccggcagcggcaagtcgacctactgctctggtctgtatcaacattgcgagacggtgggaaggaggattcatatggtcaacctggatccagctgcagagcacttcagctatcctgtatctaccgacattagagagctcatatcactggacgatgtcatggaggagctcgggatgggaccaaatggcggcctcatctattgcatggagca

SEQ ID NO: 4032 - DNA, 492 bp, Triticum aestivum
  Clone ID: uC-tsro9316086c05b2
gtcagtctagccggccgtcgtcgttgtcgaggagactacggtggcggtggaggttgtcgagccggccatcgtcacggtcgaggagactacggtggcagcggtggcgattgtcgagccggccgtcgacacagttgaggtggcaacggctgaggctgtggagccggccgttgtcgccgccgaggaggccgcgaaggaggaagctgttgcaccggccgtgaccgagctggcgaaagaaccggaggcagctccagcggagaccaaggaggccgagacagaggccaaagagaccgagcccgaggctgtccaaccggcggcagccgccgaggaggcgcctgctgtgccggcagtgactgagaccaaagagccggtagctgcccctgccgagggaacagagacaaaagtgtggagcgtgaggcagcatccgctgaggtcgagaccaaggaatcagagcaggaagctgcttcagctgagactgagaccaaagaggcagag

SEQ ID NO: 4033 - DNA, 443 bp, Triticum aestivum
  Clone ID: uC-tsro9316086d01b2
ttccattcgactcactgcttcctccgccctccctccctcccgccccgatcccccgccatggtgtgcgtggcgtgcctgatcccgctcttcctcatccccttcgtcaacgcgctcccctacctcttcgacctcctcctcagcaaggtttatcgcatgcttggatgggaatacaggaggcccgagagagtcccagctgcctgcccgttcaagcctgcagcaaacaagactgaaggtgtggcgggtgaatcaaaaccagtagcaaatcctcatgttgcaagtgcaaatcctctggtggaaccccagagtgctaccacagaaatgaagaaagatgattagaacatgtaacgctcgcccgatttgacttatgtgaacaactctcactatttgtatttgtgactgcgtcgtaaccgagaaataattaatgtaagattgtatatctgggc

SEQ ID NO: 4034 - DNA, 548 bp, Triticum aestivum
  Clone ID: uC-tsro9316086d02b2
ttcgttttcaaatatggtacaaggtacggtgccagtctgcgtaagcagatcaagaagatggaggtctcccagcactccaagtacttctgtgagttctgtggcaagtttgccgtgaagaggaaagcagtcggaatctggggatgcaaggactgcgggaaggttaaggccggtggtgcctataccatgaacaccgccagtgcggtcactgtcaggagcacgatccgtcgcctgagggagcagactgaagcttgatcgcggtcaatctgacaaaggagcctctggattttgtagttcagacgagactcattcgacgcaatatagcctaaattgacaacatacaatgttatttatcggcttgttggggttctgaatgtatccagctacgttacaatgtgtatctcgtttatcgtgcttagttgattgtctaagggtattcgttgtgtgtgtcgttggttcttgaatcttaaagctattgtcatctgttcttagaagaactagcggggccgcctgtgcatttgtgcttctatttgcattgactttagctgttc

SEQ ID NO: 4035 - DNA, 381 bp, Triticum aestivum
  Clone ID: uC-tsro9316086d06b2
tgttgccacgctatatatgatgatctctctctctctctatatatatatatatgtatgtatggatttgcttattgttatctcttctcaccaacggtgctgcctgcctgtgtaactcgaatccatccatcagtaacagaggctttatgatcttaccatcttcaaaaaaaaaaaaaaaaaaaaaaaaaaaaaaaaaaaaaaaaaaaaaaaaaaaaaaaaaaaaaaaaaaaaaaaaaaaaaaaaaaaaaaaaaaaaaaaaaaaaaaaaaaaaaaaacaaaataaaaataaaaaaaaagaaataaagaataaaacaaaattaggggggggcccttttaaaagaacccaggtttacctccccgagtgctacataatatttttttttt

SEQ ID NO: 4036 - DNA, 505 bp, Triticum aestivum
  unsure (1)..(505): unsure at all n locations
  Clone ID: uC-tsro9316086d07b2
tacaccaactttccccgtctgtctttcttctcggcggaggcgaacgacgaaccctagccgcgcgaggaacgccaagatccccaaggccggcgacgatggcggcggttcggtgcgcggcgaggaggctcggcggctctctgctccagcgaacgcaggcggcggtcgcggaggagggacgcctgctcgcgccaagcaggctcatgcgctcccgccagctctccaccaaggtctccggcgagcgatcgcaggtggcggagcgacacctcctcgagccaggcagcctcatgcgctcccgccagctctccggcgagcatgctcgcaacatccagaagaaagaggatgactgctgggcggngttcaatgagacgctaaagaggttggacgagcttcaaaaaaagatgaaaccaagtgtctttcagcagcgcatgatatccatcgaccgtgcgttgaagagtttggtctatggatctttcaggtgacagttgtgtatgtggctgctgctact

SEQ ID NO: 4037 - DNA, 381 bp, Triticum aestivum
  Clone ID: uC-tsro9316086d11b2
tccacgcgtccgtggactcgtgggcggacgcgtgggatttaattcaaatttccctattgtataaaaaaaaaaaaaaaaaaaaaaaaaaagaagaaaaatgacaaaaaaaaaaaaaaaaaaaaaaaaaaaacaaaaaaaaaaataaaaaaaaaaaaaaaaaagggggggccgttctaaaaaaaccaaaattaactccccggggttgccaagtaaaaatttttttattggggaaaccaaaataaaatcaatggcccgtggtttaaaaaggtgggaatggaaaaaccccggtgttacccaaattaaaatgcctaggaaaaaaaatccccttatccccaagtggggaaaaataaaaaaggcccgaaaaaaatcgcttttcaaaaa

SEQ ID NO: 4038 - DNA, 302 bp, Triticum aestivum
  Clone ID: uC-tsro9316086e01b2
acgtttacgtatccgatgacacgtgggcagacgcgtgggctttatttccagcatcacataccaccacttgaattgaacctcaagcgcacagaggaggagcggtgcaacactgccacccttgcaacagctccagcaacaaggagaagaggcctcctctcaagaggggccagatcaaggtgcaaatagccaagaccctgggcagcctcgtggtgccgatcgccaggaacagttttagaagatgagatggctgatggccaaccaagctagaagtgtggtgtggtgcttgatatgcatagggattg

SEQ ID NO: 4039 - DNA, 414 bp, Triticum aestivum
  Clone ID: uC-tsro9316086e02b2
tttcggtttcgcgtagaacaggagaaggagcaggcggcggcggtgcccgaagaggagaagcacggcgacctagcccgagctcgcaaccatggctaggggtttgaagaagcatctgaagaggctcaatgccccgtctcactggatgcttgacaagcttggtggagcttttgcccccaagccatcatctggtcctcacaaggccagggagtgcctgcctctgatcctcatcctgaggaacagactgaaatatgctctcacctaccgtgaagtgcaatctatccttatgcaacgtcatatcatggttgatggaaaggtccgcactgacaagacctaccctgctgggttcatggacatcatttccattcccaagactggtgagaactacaggcttctttatgacaccaagggtcgctt

SEQ ID NO: 4040 - DNA, 80 bp, Triticum aestivum
  Clone ID: uC-tsro9316086e03b2
tacctattcccacttttttcgtctaacccacacaagcttggaatagtgtgagcacacattgcgcggcgtctagggaaagc

SEQ ID NO: 4041 - DNA, 484 bp, Triticum aestivum
  Clone ID: uC-tsro9316086e11b2
ttcgaccacagagcggcggcggcggcggcggcggcagcgggggagagaggagagagctccagccatggtgcacgtcaacttctaccgcaactatggtaagacattcaagaaaccaaggcgtccttatgagaaggagcgtcttgatgcagaactgaagctggttggtgagtatggattgaggtgcaagcgtgagctctggagggttcagtatgcattgagcaggatccgtaatgctgcaagacacttgctcacactggatgagaagaatccccgccgtatctttgagggtgcggctcttctccgtcgcatgaaccgctatggtctccttgctgagggccaggataagcttgattacgtccttgccctgactgctgagaacttccttgcaaggcgccttcagactcttgtcttcagggctgcatggcaaaatccatccaccatgcccgtgtcttgatcaggcaacgccacatcagggttggcaggc

SEQ ID NO: 4042 - DNA, 228 bp, Triticum aestivum
  Clone ID: uC-tsro9316086f03b2
gacgctgaggcccagggcgttaacgtctatgcctgtgaccggaaaaactggatgagcttcagcacagcggagcgtgagttcagcatgattaaatcaacaccgctgatgctgttgggtgaccttgcccagttgaggtccggacaactcaagtgatgatggcatggccgtgccatggcatttctgctgtggagtggatgacaaaagataagatgaacggaccgctccgct

SEQ ID NO: 4043 - DNA, 322 bp, Triticum aestivum
  Clone ID: uC-tsro9316086f06b2
tatctgtgttccagtccaagggggcgagaggggcggcacacccatccaaggtcatactgtgtcaccacttctcttcgcccctagcaatccatatgtgttgtgttgccacttctctttttttcacatattcgtgaccaacattatcatactgtgcatcgctcttcttctatccttgtccctggcgaggctatcctggaccaatgcttgtaattccacaaacttgtaatgatggtcggtgccagccttgtctcatctacaacacccatgtttcgaggaaaaaaaatgatgggttgattgagaaaaaaaaaattaaaaacataag

SEQ ID NO: 4044 - DNA, 304 bp, Triticum aestivum
  Clone ID: uC-tsro9316086f07b2
ttcaaagccaattgattgagttgaagcaaagttacagagcgtgcccgcaagaaagcatcggccaccggagcatccccgtctccaaccaatcaagcatggacaaggtgttagccttctccatcctgagcgcgtcgccggccgacatcgcggccggcgccggcgccggggccagctgggctcggttctcctggcaggggaggaagctgcaggacgacggccaggccagagcagggcaagaggggaagcagggcggtccaccgtcggaggcggagcagcagccggacaaggggagatcgccgacgtt

SEQ ID NO: 4045 - DNA, 480 bp, Triticum aestivum
  unsure (1)..(480): unsure at all n locations
  Clone ID: uC-tsro9316086f09b2
ttgaggatggttttattcatgtcagaaatgcggtgaaccctgccaccctcgagcaaatatttggtttctcatctttggctggtgcaccaaatctgttggtattggagcaatttgataatgtattgtccagaaaagtaaatgaagttgtgaatgaaataaggcgacagagatgctcctacctaagactgagactatgccaaaagggcgacccatctggagatttcttccgttccctgttggttgaggacaaagcacccggtggcctttcttatgtagagttccttgtacatgttcacaggcaaatccagagcaagatgacctgacatgacctgcttcattgttgtgatgttttggttggtagacatcatgacggactcgatttctgcatgtggatatacaaaaagggaacaacgtttttctttgtaaacacagctatagcagatttgtaggattctagtcnttgatttacaagtcagtttg

SEQ ID NO: 4046 - DNA, 459 bp, Triticum aestivum
  Clone ID: uC-tsro9316086g06b2
gctaggcttgaagcgaaagaggaggaaaatgtgcccgctgagggtgatactcatcttcctctccgccaccgtcgccggattcttcctcctccggggcctcaacgccgaccccgactgtttccaagacggcgacgacggctcggaatctcccagggccgccgttcccctccattccaaggttggttcagctgtgaaaaccgggttctggacaacggtagacatggcgagcgggcggtacctttggcggacccttgttgcgccaccagcgaattctgaatccgacaaggcctggtgacgacgaacttcatgttgtctgtttgacatttgtgtaatgcgggagacaagggatgtgatgtgcgatacggcggtgattgtaaatatgggttttctttgtttaagcaaatgtgcaaattgttcatgcttgagccccgtgttatatgccaggactggattattttg

SEQ ID NO: 4047 - DNA, 446 bp, Triticum aestivum
  Clone ID: uC-tsro9316086g09b2
cccacgcgtccgcaacgacgtcgactacggcttcggcgagcccacctacgtcttcacattgaacgacgacgtcaacattgtgccgtcggtggtgtacctcaagccgcccaagccgaagcagggcatccggctcgtgctccagtgcgtcgaggagccgcacgccgccgtcttcacccaggagctggagaagctcgcctaagagggcttgcgttcgtcatggttacctccatactttacagaattattacaggtgggatttggagttgctgttgttgttgtattcttcatcttgttgtgtgttgtagttgttgtattccacaccaggttttgcttccaacaaacaaataaatcactgaggggttcttctttctttgtgtctgtatacttacattgtacatgtatttgacattgtgaatcagcagaataatgtcatgtgttcccaggtg

SEQ ID NO: 4048 - DNA, 392 bp, Triticum aestivum
  Clone ID: uC-tsro9316086h03b2
cccacgcttacggtccgttcatcggcgcggcgctggcggccaggtaccacatgggggcgatcagggccatccccttcaagagccgcgactagtccaccaatcaaccagctgcatgcggatggaatcttattgctgatcatcgccggtcgatcgatcatgtggtggtggtggctgctcgcgcgcgcgtaggacgtggatcatgtctcggccgcgcacgctgcgatcatctatatctaccgcgctgttcctcctctcctcggtgtgtgtgcctgtcggcagcgtcacctgttcaagtctgcgaagtggaacctgccagaaggacattccactgctgtggcatcgcacgcgggctaacggagcgtgcatatgtatgtaaattactattatgaagg

SEQ ID NO: 4049 - DNA, 527 bp, Triticum aestivum
  Clone ID: uC-tsro9316086h04b2
cccacgcttccgggccggagcggttcctggccggcggggaggcgccggatgtgtccgtgctcggcgccgacggccggctcgtgccgttcgggtccggccggaggagctgccccggcaagtccctggccatgaccacggtgaccgcgtggatggccaccctgctgcacgagttcgagtgggcgccggcggcgtcctccggcgtcgacctgtcggaggtgctccgcctgtcgtgcgagatggcagcgccgctccaggtccgggtgcgcccgaggaggtgctccgcctgatgtggctctggccacaggtttgatcggcctcgccgtgtgctgctagtagtttctcgtagtcccgtgacgtgaccccgtgcttcacgaaagtgaataattaagctgccggtgtaaaatgtacgtgcgccgggcccagctcagctcagtggttggttcagagtttctttctaacttgtgtgatgtgatgtgtatgctatgtaacgtaccatcaggtgtgagtgtgaggttccacatggtgta

SEQ ID NO: 4050 - DNA, 329 bp, Triticum aestivum
  Clone ID: uC-tsro9316086h05b2
gttgcatttcacaggattgaagatttgaaccatgcttgagagtccttgttcctgatctttgcatttccctgcatttctttcacgtttttttttctttctcaatggttcctttcgttaaaatggaccaacatggactgaaataataaaatttatttccaagtttcaaaaaaaaaaaaaaaaaaaaaaaaaaaaaaaccacagaaaaaaaaaaaaaaaaaaaaaaaaaaaaaaaaaaaaaaaaaaaaaaaaaaaaaaaaaaaaaaaaggggtgccaaaaataaaaaatccccatttctttcaactcaacaaatattggggggccccctttt

SEQ ID NO: 4051 - DNA, 535 bp, Triticum aestivum
  unsure (1)..(535): unsure at all n locations
  Clone ID: uC-tsro9316086h07b2
ttcaggcattgagaaatcgagcgtcaatctgctgatcactcgcatttgcgttgagcagatcacttgctgtgtagattgcaggtacaggttcctgagcttgcatgcgcatggccaaggcttgcctactccgcggtgtggggctggtggtgtgcgcactcctgcttctctcgccctctttcatggcggctgaggcaactggccggaaatgggatcacgggagagaggccacggtggccgtgatgccgatggcgggagggcgttttgcgaggaaggtgttgcgggaggagatggtccaggcagacggcgacgtcgacattgccggctctaagaggaaaagccccggtggcccagaccctcagcatcattaactgatgtcgaggtctcctcgcatgcatatttctctacaaaggcagcatatacatgggacctgaattccaagatagattgaccgatcaagctngtgttcttgtcttgatatcgtagtgaaagagatggttttgtttcataagcataggtatatacatgtattacatac

SEQ ID NO: 4052 - DNA, 438 bp, Triticum aestivum
  Clone ID: uC-tsro9316086h09b2
ttcacgcgtccgcccacgcgtccgatgggtcgtcaagggattccatccgatccttggggcagctctggaatttcagcctctctgatcttacagctgatttgacaagtttaggagatttggaggctcttgagaactacgaaggtacccctttcctgccctcggactcggacctcttacttgattccccagaccataatgatgacatagttgagtacttcgccgacgccatcaacgggactcaatcagatgaagagaagtcatagagaagatgaaagactcaggtagtctcattcagagtgggacctggccagagtgtcatctcatgtagtgtaatcttgtagctgcgcgcaaatcagactgggaattcacccagaggtgcggtgattggcgcgcgcccctgaagattttgtagcgttcgatgctaattatttggaataa

SEQ ID NO: 4053 - DNA, 325 bp, Triticum aestivum
  Clone ID: uC-tsro9316087a06b1
gtcttaccagctcaggccgtcatgctcaagcttgttctacacttctggagcgacgaggattgcatcaagatcctcgctcaatgcaagaaggccataccttcccgagaaatgggaggaaaagtgatcatcatagacatagtgcttggatcttctctagagacaataactgaaaccgaactgctgatggacatgctgatgttcatatgtaccagaggacggcaacgggatgaaaaggagtggagcacgatctttacgaaagcagggtttagcaactataagattgtcaagaaactttgccatcgaggtgtcatcgaggtctatccat

SEQ ID NO: 4054 - DNA, 452 bp, Triticum aestivum
  Clone ID: uC-tsro9316087a10b1
tgttaatggaattatctattgattgtagtattaagtttgcttgtgttttcagctaaaagaaaggaaaaaaaggaacaacatacatttctgcattgcttcatccttgcggctgagagaggcatgcgttctcctgtgaagagtgcataaattgtttttattcgcttgatatttatttatgccagctaatttgcaggtcttacaattaatactaatctttaggcacaggaccaggaccacatggattgcatcatctggtttatgaaatactgaataatgttgttggtgaagctcaagcaggctatgctactgagattaatgcagcccttcatgatgacaattcagttagtgtaactgacaacggccgtggtgtatgcagtttctaaaacctatgaaagacttcctgaatgttcaatgcttctacaaatattgtggaaaaagaattggtatgtgtt

SEQ ID NO: 4055 - DNA, 198 bp, Triticum aestivum
  Clone ID: uC-tsro9316087a11b1
tcctcgcgtacgcccacgcgtccgcccacgcgtccgcccacgcgtacggcgacgactccgctcggttccttctccttactccgagctgcagccatgggcaaggagaagactcacatcaacatcgtggtcattggccatgtcgactctggcaagtcgaccaccactggccatctgatctacaagcttggaggtattgac

SEQ ID NO: 4056 - DNA, 185 bp, Triticum aestivum
  Clone ID: uC-tsro9316087a12b1
gtctctctagctcaggccgtcatgctcaagcttgttttacatttctggagcgacgaggattgcttcatgatcctcgctcaatgcatgaaggccataccttcccgagaaatgggaggaaaagtgctcattatagacatagtgcttggatcttttttgagacaataacttaaaccgaactgctgatg

SEQ ID NO: 4057 - DNA, 272 bp, Triticum aestivum
  Clone ID: uC-tsro9316087b01b1
ccctcgcttgcggccgctactcccctgcctaccccagagctcgttagggttttctcttttttcgggggagaaatctcaagaggcggcaccatgctcgtgtaccaggacaagctttccggcgacgagcttctgtcggattcgttcccttacagggagctggagaacggcgtgctctgggaagtcgatggccattgggtcgttcaaggagcagttgatgtggacattggagccaatccctctgctgagggtggtggtgatgatgagggtgttga

SEQ ID NO: 4058 - DNA, 191 bp, Triticum aestivum
  Clone ID: uC-tsro9316087b04b1
gacccccctgtagcggcgccattaaccccggcggggtgggggtttcccccagggggcccttatatattgcggcgcctttaggcccccttttttggttttttccattttttaaagcacaggggggtttttttccaaaaaataaaaaaaagggggggcgcttcttgtgtccttttattccccccccccccccc

SEQ ID NO: 4059 - DNA, 533 bp, Triticum aestivum
  unsure (1)..(533): unsure at all n locations
  Clone ID: uC-tsro9316087b09b1
cactaccaaacacaatccaagccaatcccaccggagagaagagaagatgtcgggccgcggcaagggaggcaaggggctgggcaagggcggcgccaagcgccaccggaaggtgctgcgcgacaacatccagggcatcaccaagccggcgatccgccgtcttgcgcggcgtggcggcgtgaagcgcatctcggggctcatctacgaggagacccgcggcgtgctcaagatcttcctcgagaacgtcatccgcgacgccgtcacctacaccgagcacgcccgccgcaagaccgtcaccgccatggacgtcgtctacgcgctcaagcgccagggccgcaccctctacggattcggcggctaggccgagggcccagccagctcgcgacgccgccgtccggcagagtagtggtatctatctagttgctgtctagggttcgtggttctcctttgatgtcgctggtgtttgtctgctcccgtcttgtgagctgatgttgtactggaagaaatttgaatggaaatngcagtagctacccccg

SEQ ID NO: 4060 - DNA, 311 bp, Triticum aestivum
  Clone ID: uC-tsro9316087b10b1
ttctttggagcagcgggcgaggacatctcctcgtcgagctcctctttccgtgggcgaggacatcccctgtatctcactgcaccatgacgaacagggggaggcgcttagcgcaccggcggcgagtttctagagctgcaaattgcaagtgagctttccaatccaccttttagttgatcctcttcccgtgagcagttgcaggtctatgcatggcgagactgcttatatatgagcacgccgcggtcgtgtactgctaggacggtgaccgttcaggactagagcgacccgtggccggggaattacataccataggc

SEQ ID NO: 4061 - DNA, 150 bp, Triticum aestivum
  Clone ID: uC-tsro9316087b11b1
tgtcttctctctccttctcctccggcggcggcaaggcattttggcatctgagcccaacagctagcagatggcaggcggcagagttgcacatgcgaccctcaaggggccgagcgtggtgaaggagatcttcattggactcacccttggcct

SEQ ID NO: 4062 - DNA, 171 bp, Triticum aestivum
  Clone ID: uC-tsro9316087b12b1
tctgtcgcgtgggtgtttattcaagtgtttggaacaaactgcattcgccattggtgcatctacctgctccggtgaattcttttggtggaattgaagtgtaatttgattggatccatgtaggcgttgatgatctcatctgttgattgtaactgtgattaaagaagaaactag

SEQ ID NO: 4063 - DNA, 405 bp, Triticum aestivum
  Clone ID: uC-tsro9316087c08b1
ttttgtcttctcctccccttccggttcgggttctggttcggttcgggttcggttcgagagagaggccgagtagctagcctagtctagggtttcggtagagaggaagggagatccatggcggagacggagtaccgctgcttcgtgggcggactcgcctgggccaccgacgacaacaaccttcagcaggccttcagccagtacggcgagatcctcgacgccaagatcatcaacgaccgcgagacggggaggtcccgtgggttcggcttcgtcacgttcggcagcgaggagtcgatgcgccaggccatcgaggagatgaacggcaaggagctcgacgggcgcaacatcaccgtcaacgaggcccagtcccgtcgctcccgcggttggggcggcggcagctgctacggc

SEQ ID NO: 4064 - DNA, 153 bp, Triticum aestivum
  Clone ID: uC-tsro9316087c09b1
tctctaggtgctcaccaacggcaggtacaagagcgtcgagcaccgggcggtgaccaacggcgagcaggaccgcctgtccatcgtgacgttctacgcgccagcctacgatgtcgagctcggcccgctgccggagctagtcgccgacggggagcc

SEQ ID NO: 4065 - DNA, 65 bp, Triticum aestivum
  Clone ID: uC-tsro9316087c10b1
ttcttcgcgtccgcccacgcgtccgcccacgcgtccgcccacgcgtccgactagttctagatcgc

SEQ ID NO: 4066 - DNA, 369 bp, Triticum aestivum
  Clone ID: uC-tsro9316087c11b1
ttccacgcgtccgcttctcccctgcttctctcggccgaaacccccagcggagcgagcggcggcggcggcggcgatatgcagttcctccgaggcgtcggcggcgggggtggcggaggagcgggaggggcggggtcaatggcgtgggaggtgttgaggaggcatttctcgcggaagcgggcggtggacatacggcggatcaaccccaaggtgcccaaggacggaggacgaagtcattttcggtcggctacttcatgatactggagaccgctgaccggtggaccgagccagcacctggaaccactcctaggacgctgcgatcgacagaccgatcaggatgaccaacatgaagatcctgctgaagatgctgtt

SEQ ID NO: 4067 - DNA, 215 bp, Triticum aestivum
  Clone ID: uC-tsro9316087c12b1
ttcttttaccaaagctcatcttcttctccttgaaatctttttgggttcacagatttggaggatgtcttgcaactgtggatccggttgcagctgcggctcagactgcaagtgcgggaagatgtaccctgatctgacggagcagggcagcgccgccgcccaggtcgccgccgtggtcgtcctcggcgtggcgcctgagaacaaggcggggcagttcg

SEQ ID NO: 4068 - DNA, 383 bp, Triticum aestivum
  Clone ID: uC-tsro9316087d01b1
ccttcgtgtccgcagatcttggcggactcgaatccaatccaatccaatccaaggcggaggtcgagatcaaagccaccggagatgaagttcttctcggcgttcgacccgtggccggtgttcttccgccgggagtggggccgcacctggcccttcctcgccggcttcgccgtcacggggaccctcatcaccaagatgaccgccggcttcaccgaggaggacctcaagaactccaagttcgtccaggcgcacaagaacaagtagtcgccgtccgcccggcccgttcgccgccaggtcacaggggcagcagctgagttaccggcatgtgtccttgatgcggcgagccaattcccaccctcactattgtgattgaactttctgttttt

SEQ ID NO: 4069 - DNA, 329 bp, Triticum aestivum
  Clone ID: uC-tsro9316087d03b1
ctcactcgtccgatccacctcaatgtgcctgtggacatcatgatcctcctcaaccactgcggcaagacgtgcccgtctgagttcacttgcccatcccattgacggatgcgtactgctgcacgggcgccgaataagatttgctttcagattctaaaaaaataaaaattatttgctttcaagccgtacgtcgttgttattttcgtgtccacatttgaatccttgtaaccagcactacttttttcgtttttagcaaacaacctaatagtcgttttttttgtgacaaacatgtactcttcgtattaatatatatcatcaataaatttttgtca

SEQ ID NO: 4070 - DNA, 482 bp, Triticum aestivum
  unsure (1)..(482): unsure at all n locations
  Clone ID: uC-tsro9316087d04b1
tgagtcntagtgggagggaaagaagagggagatcaggagatggggaagggagggaaaggcttggccgctgctgcagtgtccttcgaggtggtgaacatggcgttgtttctagtgttcatcaacaccctcttgatcatgccttttaagcttccgcccctttgttcttattatgttcgagttctgttgaaggctctgtttatttgctcgtagctaccttcttttccttaaggatatttacatttttctttttttgttttatgagctcatggttttctttctccatttctctttccttctctaccatttttctacctttttttcatctttccccttgcacctacttttttctttattctcttttcatttctttttcttttgtcttttaggtcttttttcttttcttttcttttttttcactttatcttcttctctattattcttttttttctttcttaattaatttctcgcccttcttttctttt

SEQ ID NO: 4071 - DNA, 363 bp, Triticum aestivum
  Clone ID: uC-tsro9316087d05b1
gtttctgcatatgaggtttatatgataacttctgcagctgttgtacagtatagaattgtatatatatggtataaagtcaagtgaatagttgataacgagtgtctgtagagtaggactaatatttatctggctgatagctgtgaggcgtctggtgttctcgtgtgaccatagtaggagatggtataaagatcggtctccttcggtccttcccggaagaaatggatctggcattctggctggaaaacttgctagtgagttcctgtcttgtcttcgggtggatgcactgaacagtccccccccccccccccttgaccgttttaaaaatgaggagcaaccaacataggggaataccgcatatatttt

SEQ ID NO: 4072 - DNA, 473 bp, Triticum aestivum
  unsure (1)..(473): unsure at all n locations
  Clone ID: uC-tsro9316087d06b1
cattatccaattgcccaaccagcacttccgcaaggactggcaaatccgtgtcaagacttggtttgaccaagccggacgcaagtcccgccgacgtgctaaccgtgtgaccaaggcattgcgcattgcaccccgccccattgatggcctcattcgccccgctgtcaggtgccccaccatcaagtacaacaccaagctccgtgctggccgtggtttcaccctcgaggaactgaaggctgctggtgtccgtcgcaaggaggccatctccattggtgtatctgtcgacttcagacgtcgcaaccgttctgaagagtctctccaattgaacgttaaccgtctcaaggcctacaaagctaaactcattgtgttcccccgcaaggctggaaaggtcaagaagggtgacactgagatctctttcgncgactttgccaagcaagcgcatatcaaggtcgccaacgtcttcccggttgagcaac

SEQ ID NO: 4073 - DNA, 199 bp, Triticum aestivum
  Clone ID: uC-tsro9316087d08b1
ctgacgcgtggggttctgggataaggttaagagcgctgagaaggacgaggttacgttgcctgatcagccggaggatgaggagtcggtgatggatgaactctgatgtatcaataggagtgaagggttgatgtattcttaggcgtttgggatatggcattggcaaggcatcgaagctgcaataattttatagtatttaccg

SEQ ID NO: 4074 - DNA, 226 bp, Triticum aestivum
  unsure (1)..(226): unsure at all n locations
  Clone ID: uC-tsro9316087d09b1
tcgatcnatccgccggcgggcgctatatcggatgcgggctttctttcgggtgcatgcttcgttacgcctgtttgatagggtctcctataatctatatgcactgcccgaagttatacaacggtccgactgggaacaccctggggattccgaacaataatgacttgcccaactttcccctcttgctagatggcgcactttcgaccggtgccgtactagtcgatatgtc

SEQ ID NO: 4075 - DNA, 310 bp, Triticum aestivum
  Clone ID: uC-tsro9316087d10b1
tctccttggagcagcgggcgaggacatctcctggccgggctcctctttccgcgggcgaggtcatcccctgtatctcactgcaccatgacgaacagggggaggcgcttagcgcaccggcggccagtttctatagctgcagattgccagtgagctttccaatccagcttttagttgatcctctctccgtgagcagtctgcaagtctatgcatggcgagactgcttatatatgagcacgcctgggacgtgtgctgctaggacggtgaccgctcatgactagagcgacccgtggccggcgattcacataccata

SEQ ID NO: 4076 - DNA, 489 bp, Triticum aestivum
  Clone ID: uC-tsro9316087d11b1
tgtgttggtaaaaccatcgaagctgaagctgcccatggcacagttacccgccatttccgtgttcaccagaaaggtggtgaaaccagcacaaacagcattgcttcaatctttgcttggacaagaggacttgcacacagggcaaagctagacgagaatgctagacttcttgaatttgcacagaaacttgaggaagcgtgcgtcggaactgtggagtctgggaagatgaccaaggaccttgcactccttgttcatggatcctcaaaagttacaagaggcgattacctgaacactgaagagttcattgacgcagttgctgctgagctcaaatcaagactgtgaaagacctctccctcttcaatgcttgaatagtcattactcatcgattcaagtcattttggttatgtcggcattattctgtcatgctttcatcctgaacagaacgagcttttactgcacattcgcttattattgtcaaaaatgcaatcgatt

SEQ ID NO: 4077 - DNA, 435 bp, Triticum aestivum
  unsure (1)..(435): unsure at all n locations
  Clone ID: uC-tsro9316087e02b1
ccctttccctcgcgcgctcctccccacccccagagccccgtcgcctagctagggtttttgcctccccgccgccaccgccgcgcgcgcgcgagagagagaccacagcgaccaacccagccatgtcggtgcgtccgagcgagcgggccgacgcgcggcggaaccgctacaaggtgacggtggacgccgatgaggggcggcggcggcgcgaggacaacatggtggagatccgcaagaaccgccgcgaggagagcctnctcaagaagcgccgcgaggggctccaggcccaggctcctatccctgccgccggcgtcgagaagaagcttgaaagcttacctgctatggttggtggggtttattccgaggataacaacctgcagcttgaggcaacgacacaattccgcaagttgctttctatagaaaggagccccccaatcg

SEQ ID NO: 4078 - DNA, 62 bp, Triticum aestivum
  Clone ID: uC-tsro9316087e03b1
ccttcgtgtccgcccacgcgtccgcccacgcgtccgcccacgcgtccggttctagatcgcga

SEQ ID NO: 4079 - DNA, 92 bp, Triticum aestivum
  Clone ID: uC-tsro9316087e04b1
ccttcgcgtccggcaacagctgataataatacaatgattgaagatttgttctacgctgggaatctacttgacacaaggaacatatttttacc

SEQ ID NO: 4080 - DNA, 455 bp, Triticum aestivum
  unsure (1)..(455): unsure at all n locations
  Clone ID: uC-tsro9316087e05b1
gcttcgtattcttgagggattctgatcagtctcggcctctcagggaaagaagagactgcctactgaactcgctggtttcgtgtgatctagagctcgggagttactctagttagagcatctccaacagccgcgctaaactagcgccgcgccgcaaattagaccgtcttagcgcgcgcgcaacgcggcgggtcgcttcagcgggcgcgcaaaaccgacgcgcgcgttataacgggttgagcgcgcggttgaaaatacttacccgcgcggtgtattttgggcgccagctacagcgcgcggcacactcgatcgctcgcgccgcactctcttctctcctcgtnctacgccccgcgcgcgccggcgccggcgccctgccacccacccatggacgcgcacaccggcaccccgctcaccccgctgtaccgncgncgncgnncgcggaaaccctagcgcgggaa

SEQ ID NO: 4081 - DNA, 318 bp, Triticum aestivum
  Clone ID: uC-tsro9316087e09b1
gctgacgcccctgccggtgccgttcccgactttgcgggttgccccacgcactctgtttccacgacctgtgccaagcgtgaggaggctgtgatggatgctgcagccgcggttgtgatgactaacgatgaggaggatgcttccaagcatgtggaggactaatgggacttggatgacgaggatgctgtggatgaggacacaggtcacaagactaactgtgaggccgactctgatgactagaagaacaactagacctagatggatggctaggatgaacggaagacgaactgcttctccccggtgccatgattgaagaggagc

SEQ ID NO: 4082 - DNA, 485 bp, Triticum aestivum
  Clone ID: uC-tsro9316087e11b1
ttcatgaagcacacaggaagctcctagccaacaccaatcaaagcctccatccaatcccaagcaacctcgaagatgtcttgctgcggaggaagctgcggctgcggcagcgcctgcaagtgcggcaacggctgcggcggctgcaacatgtacccggaggtcgaggccgccggcgccaccctcctcgtctccgccactgccacccacaaggcgagctccggcgggatggagatggcggcggagaacggcggctgcggctgcacccagtgcaagtgcggcaccagctgcggctgctcctgctgcagctgctagatcattgatcatgcatgcgccgcgtgcatcatatctatgatctatctaccatctactaccatgtaacgctgcctgatcgagggtctttgtatgtatgtacgcacctgcctgcatgagcagagcgggtgccatgccatgcatgtaaacccctaaataaaatcttccgtggtttgctt

SEQ ID NO: 4083 - DNA, 198 bp, Triticum aestivum
  Clone ID: uC-tsro9316087f08b1
tcttttatcgcgtgcgaaaagtggatatgctatcctgtactttctgtatattatgaaagatctaattgcctatccaagaaaagaacgagttcgaacaactggagaaaaaatggaccttagaagacaatagaatggtggggcggactacaggaccaaagattacctggctggcctgctacgatcgatgggtgaacaagt

SEQ ID NO: 4084 - DNA, 418 bp, Triticum aestivum
  unsure (1)..(418): unsure at all n locations
  Clone ID: uC-tsro9316087f09b1
gtttatttggatgtattttcagtagttgttctagtacttggcgctgctttggcatgttatggtgcattattgttctcgaagatgagcaaagtacgttctgaaaccgtgtcaactgagaagtggaaggttgccagtttagctgctgtctcacttatctgtttctcgtcttctgctatactagcacttgttactaatattccagtgcttttgtattggtactccactgaggcggagatcataaaaaatgctgntatattatttttatattatttaataggctcatcggtaccatcaggatttgttttatgggtcatgagagatatgcctcaacgaccaacggtggaaaggcccacccaatcgagagtggttaccttgttcagggacagaccattccctacacaggatccacagtggagag

SEQ ID NO: 4085 - DNA, 439 bp, Triticum aestivum
  Clone ID: uC-tsro9316087f10b1
ttacttcacagagcatcagccggagcacttcttcctcccctccgttcttctccggctccggtgctctcgtacgcgcgttcgtccgagaccaccacctcgaccaagaagagatggagatgaagaagatcgcctgcgccgtccttgtcgccgcctccgccaccgtggccctcgccgccgaagccccggccatggccccggcccccggcgccgccgtcgccggctccgccgccgcagccgtcccggccgtcggcgccgtgctcggggccaccgtgctctccttcttcgcctactacctgcagtaagcgcgccccggcccgagtcagttcgctgcgaggaggaggaaggcaggaagaagaagatcactaattcgctatgtatggctttacgctacgctgattcgaggcacgcgcgtgcgctttgatcgatgcatgcgcgtgct

SEQ ID NO: 4086 - DNA, 336 bp, Triticum aestivum
  Clone ID: uC-tsro9316087f12b1
tcgctgacccctgtcgggtgtactcaacttccaccactagctaagctccatctgcatccatccatccatcctcccatggcgtccgtgaagctcgccgccgccgcgctggccgtcgtgctcgcgtgtgctgcgctcgccgcgacgccggcggcgacgtatgcggagtaccggccggagcccgagccctgcaagacgcaggccatgtacttcaagaactgcctccgcctcggccactgcgagaagtgctgcttcggggtggtggccaacccggcgtgctacttgcaggtggagcgggaggcgctgatcgagtgcgcgcctggccaccactgcagtcgc

SEQ ID NO: 4087 - DNA, 439 bp, Triticum aestivum
  Clone ID: uC-tsro9316087g06b1
gcttcacacaaccctctgcacccccagcaatccaccccttacccctccccggcggatgccctcccctgccgagctcgagaatggcaaacgcatcatgcggagctggtatccatgatgactgcaagctgaggtgtgtggagctcaagtacaagaggatgcaccgctgcataacctacaggctggagaaccagacggaggtcattgtggaccaaactggggagcgcgaggccacctatgatgacttcaccaagaccctccctgagaatgactgacgatacgcggagttcgactacgacttcaccacccaggaggatgtgccaaagagcacgatcttctatatcttctggaacccggacaccgcacaggtgaggagcaagatgacgtacgctagcaccaacgagaagttcaagaggaccctggacggcatccacatcgagat

SEQ ID NO: 4088 - DNA, 195 bp, Triticum aestivum
  Clone ID: uC-tsro9316087g08b1
tcttccacgcgtgcgaaaagtggatatgctatcctgaacttcctgtatattatgaaatatctaattgcctatcccagaagagaaaatgaacaaacaacaggcgtaaacatggacctaaggagccaatgatacggtggggcggagtacaggaccaaagatgagctggctgcccggctacgatcgatgtgtgaacaa

SEQ ID NO: 4089 - DNA, 372 bp, Triticum aestivum
  unsure (1)..(372): unsure at all n locations
  Clone ID: uC-tsro9316087h01b1
tgatgaccctaaccggcgtgtatgggttctggaagtacgtctccaacctcgagaggcgcgagacccggcgctacctcgagatgctgtacgccctcaagtaccgcaccatggccagcaccgttccactagctgttgagggagactccgcgagcaagtaatctggccacctcctggccgaaagaagggtgacttggatttctgaaagattgagatttgagaatgatttggtttacgtcctaggcgctgcccctttcaagatttaaggttgagtaattggtgtgctagttttgtttagtagttggagtgagtcgagacagaggaaaatgtggtgtgtgacaatcggttggttggtgcttatcngttttcttggat

SEQ ID NO: 4090 - DNA, 102 bp, Triticum aestivum
  Clone ID: uC-tsro9316087h03b1
aaatttatttaaaaaaaaaaaaaaaaaaaaaaaaaaaaaaaaaaacaaaaacaaaaacaaaaaaaaaaaaaaaaaaaaaaaaaaaaaaaaaaactaaataat

SEQ ID NO: 4091 - DNA, 549 bp, Triticum aestivum
  unsure (1)..(549): unsure at all n locations
  Clone ID: uC-tsro9316087h11b1
tttattatcctcgacaccaaagctcatcttcttctccttgaaatctttttgggttcatcagatttggaggatgtcttgcaactgtggatccggttgcagctgcggctcagactgcaagtgcgggaaggtgtaccctgatctgacggagcagggcagtgccgccgcccaggtcgccgccgtggtcgtcctcggcgtggcgcctgagaacaaggcaggtcagttcgaggtggccgccggccagtccggcgagggctgcagctgcggcgacaactgcaagtgcaacccctgcaactgttaagctgcatgcactcgtaccgtcgtacgtacgtgtgatggtgtgagagtatacgtgaataacgagcgtctgatctgatggagtcgagcaagggtgcgtgtgcatgtgcgtgtggtttacttcgctcgctctccgcctatgctctgaccttggtgtacttgcttgtatgtgtgtgcatgtgtccctgtaattgcttcatctatctncaatatggatggagtgatgaatttgtagaatgaatgattacctaatta

SEQ ID NO: 4092 - DNA, 230 bp, Triticum aestivum
  Clone ID: uC-tsro9316088a01b1
taacagttgttttgttttctcctgttagcctctctgatgaagaaggtagtctcgagtccagacagtaaccccgagtagttcagccagggttcctccctggacgtggcgctgtgcctcttgcttagatttgggtttagtattgagatttctcaatgttgaaatatgaatgtgcttttgctggaacaacatggtctttctgaaaaaaaaccagctcagaactgcaaatactc

SEQ ID NO: 4093 - DNA, 254 bp, Triticum aestivum
  Clone ID: uC-tsro9316088a05b1
cccgggggggggtttatggagatgagggtgttgtttctcccccgcaaaatggtctgctggggctctacttcaaagtcgtggccgtggacaatttgggatttattaagccatgttttgggaatttttgtaactgctaggctgtggttctatgtgctgaggagggaggcgctgctgctcatgttgctgctgctggagtcctcactttatttgttcagactatgtaatgaccgaatgatgttatttgtctgtgtcat

SEQ ID NO: 4094 - DNA, 409 bp, Triticum aestivum
  Clone ID: uC-tsro9316088a08b1
cgtccgcgagagggggggtttttttttaccatgactgctctgagtccacggagtccagcgtgagcgctcggcgcggcaagtcggccaccatggccgcggcggctctcaccctcctcctgctggtcctcctcccggcgggccgtgctctcgccacggcggccggcgacgcgcacccgggctacgcgggcgcggaggccgacacctgcgagccggcgcccggcggcgctcccccctacggaggaggcgcggcaggccggcgccacggcccggcgctggaggagtacgggggcgggcacatcgtggacattacgcacgcgtaccgccccagcatgccggcgttcgcgcccggcgcgaccgtcggccccctcgtgcggctcaaggcggccattgaggacgggtcggagtacac

SEQ ID NO: 4095 - DNA, 189 bp, Triticum aestivum
  Clone ID: uC-tsro9316088a11b1
aaaaaaaaaaaaaagaataaacttccctagctagggacaaaaaaaaaacaatgttatttgtgtgtcaataaaatcctgtccggaacaaatgttgatagcctgttgggggccagtactcagaggaccaccctcttaataccggcggacggtgatcccaatttctatatatggcttaaataactaaaaatc

SEQ ID NO: 4096 - DNA, 229 bp, Triticum aestivum
  Clone ID: uC-tsro9316088b01b1
ctcagaggccaggctgccgcctctgctgccaaggctgacaaggccacttagagttatcattgctgtttatctatgtttgctagctctagattacccgtcagtgacatgtattgcagtaaggatgtcgtttttgatcagtactttggtaacctggtgatatttgttatcagttttcgctgtcgtggtctggattcttcagtccacataaagaagattattatgcttggat

SEQ ID NO: 4097 - DNA, 297 bp, Triticum aestivum
  Clone ID: uC-tsro9316088b02b1
tccccggccacatcaccatactcaccgggatcttctactgggcggcccagctgctcggctctaccgccgcctgcttcctcctcaagtttgtcacccacggaaaggccatcccgacgcacggtgtggcggcgggcatgaacgagtcctagggcagggggatggaaaaacaaattacccttcccgctggtgtacacggggtaccctacggccgcagacccgaataaggggtcccttggcaccatcgcgcccatcgggatcgggttaatcgtgggcgccaacatacttgccgccggcccc

SEQ ID NO: 4098 - DNA, 255 bp, Triticum aestivum
  Clone ID: uC-tsro9316088b11b1
aatcgtactgtttgttattacccatgcggacgtcagtatttttgctctgctctatggttgtcagtcgactctccaatgttgtgtcggtaactatcagatgttgagtgtcttgaaaactttctgataattgtgggatttgctttgtaatggtaatcgtgaaattggtgtggttaaaaaaaaaaaaaaaaaaataattatcaaagtaaaaaaaataaaaaaaaaaaaaaaaaaaaaaaaaaaaaaaaaaaaaaacaa

SEQ ID NO: 4099 - DNA, 321 bp, Triticum aestivum
  Clone ID: uC-tsro9316088c02b1
ctctagtctcccgggtgaaaaccacaacactgttgggcggcggcggcgcccttggcagcggcgatgctcgagggcgccgttcccctccttggaggcgaacctggccgtgtggacggcagatgaactggaggacgggtggcatggtgcagcgggagatcggcagcgccagatctggccgcccctgcctcccctgtgtggcgagctcctacccggccggatccggtctgctcctctgcgggccgacaggtctcgcgccgttggggtaagggtggcggggattccaagaccgggagaaatcctaggccggtctcgccgggcttg

SEQ ID NO: 4100 - DNA, 247 bp, Triticum aestivum
  Clone ID: uC-tsro9316088c11b1
caacacaaacttggaccttaatttggctgtgaatttgtatgcgcaagaggaccatcctgatggccatactctgggactatatctggtactaggactgctcccgcgcacacgcagaggtactggtcgaggttcggcacggcacagggaaccgtacatcgattcttattcccaccagttgacaatccacaagacgatgtgccacctggactgacacctaatatgacactttggataccagctattgcac

SEQ ID NO: 4101 - DNA, 349 bp, Triticum aestivum
  Clone ID: uC-tsro9316088d07b1
caggagctcagccggctgctcggcggcgtcaccatcgccgccggcggcgtcctgcccaacatccactccgtgctcctccccaagaaggtcggcaagggcgccggcaccggcgggtccgcctcccagtcccaggagttctagagcgtcagagatctgatgagtggtgtcgcgtggtggtgtggtgcttttaggttggcagattagctcgtcttggccaatgttcttgttggtgcgtgtatcgagggtggatctggttggaatggaatgcttgcaatcttgttcttgtctgctgcctgtgatttgttcatgggagtaatcttgatgaaacggatttttgtttggttctgac

SEQ ID NO: 4102 - DNA, 429 bp, Triticum aestivum
  Clone ID: uC-tsro9316088d10b1
gtggcgcaatcgtcaacatcggctccggtgctgcctctgttgtgccgtccgatccactctactccgtctacgccgccacgaaagcgtacgttgaccagttctcaagatgcctctatgttgagtacaagggcaagggcattgatgtgcaatgccaggtgcccttgtacgtggcgacaaagatggcatcaatcaggaggtcttccttccttgtgccatccgcggacacctatgctcgtgctgctattcgccacattggctatgagccgaggtgcacaccgtactggccacactctgttctgtgggtcttgatctcccttctcccagagtcacttgtggatagtacacgcctcagcatgtgcatcaagatccgcaagaaggggcaggctaaggatgccaagaagaaagcgcagtgatgattccgctgctagt

SEQ ID NO: 4103 - DNA, 430 bp, Triticum aestivum
  Clone ID: uC-tsro9316088d12b1
cgctttaatggaaaaggatccaaacaaggcagttctattgttctgggcagctattaatagcggtgaacgaattgaggctgcattgaaggatatggctactgtactgaaacaagcaaatcgggctgaagaagccgtcgaagcgataagatctttccgtgaccgttgtccaaatgaagctcaggagtctcttgacaatattcttcttgacctatacaaggaaacacatggacatgaagctgcggtggcgatgaagacgatattaacatgaggttgcggcggcgatgacatcgacatcgacacgaagctgcggcggcggtgacgacatcgacatcgacacgaagctgcggcggcggtgatgacgacgacatcatcacggtgctgtggcggcgacgatgacgacatcgtcacagtgctgtcgtggcggcggcga

SEQ ID NO: 4104 - DNA, 194 bp, Triticum aestivum
  Clone ID: uC-tsro9316088e08b1
caactaccgctactaccagggtgatgaggaccagggcaactgagtgccccattctacaccctcagcgtggatggaaggatatggaccctattgaacgcaggtgccgaattgctacccccgaggaagaggcgcgccctcatacggaacgggtacagcccgtacgtgcctgatgaagaccagaagggtttgatcaa

SEQ ID NO: 4105 - DNA, 258 bp, Triticum aestivum
  Clone ID: uC-tsro9316088e09b1
ccatggaggggagctccagttcccaatccaggcaacaaggttctagttcggccagcttctcctgcaaggtgaacacggtttatgaggacaaaaacatgggcatcctcctgtacactgatgacaatggtgacttggagggcgagggcttggatgaaggcccaagactaacactgcgagatatggagatattggccaaagatagagactcgaagaacacgacagacgattggcgggagagagcgctgtggatcgtgggcg

SEQ ID NO: 4106 - DNA, 329 bp, Triticum aestivum
  Clone ID: uC-tsro9316088e11b1
aaccacctgaaacatcctataggtgccgaatgggagtgtattgtgctcgtgccatgaactcatgatcatgacatgctggcgctttttggggggccatcaagagatcgatgatccatctcctaggtcataattaggctatccgctgaattggtttgccccacctgtgaccctgtagtggcactgtatctttctttttgaactgaccacctgtagtattttctaatttggccagaagttcatttcagcctcacctttacaacagccttccagtgtccgctttagatagtgtggaatctgatcctgccaccgatcattaactcgccgaatga

SEQ ID NO: 4107 - DNA, 377 bp, Triticum aestivum
  Clone ID: uC-tsro9316088f01b1
ggggggtccgccctctctccctcccttgtccgcgctgcccaggtgttagctgatcactacttcactaggagcgaaaaggagctaccatgggtatttcatccaagtggatcaaatcacttgttgggataaaaaagcattggaaaagctcaaaatggcgaaagcagcagagaaaggagctctgctgctcagctgctacacaaacggaaacattctgtggatactgaaggctcccttgcagttgcagaacacacagtgcaaattgaaccattggctagtgacaccaatacacagacaatttcatctgagactgagctaaatacaaaggagcatcaggctgcaacagttattcaatcagcctttcgagctttcttggctag

SEQ ID NO: 4108 - DNA, 341 bp, Triticum aestivum
  Clone ID: uC-tsro9316088f03b1
aaaaacgcgagcactatagtaccagtaccgttcgttatgaataatatgtgcatcaagtcgaaccaagtcctactacagggtgggagggggtctataaacaaaacatgaccgacacacttgagctccaagcctaccaaccaagtctacgaccaccgggagtgaaaaacaaaaggcgataagttaaattaaaatcctcgcgaaaaggaacaaaacatacgaagcccaccaaggaatagcacgatttgcaaggtgatggggtcttcttaacatgggcctagtcccacaagaggttgatcatcgagttggccagcccggcctccttgaaggtctgctcgctcgag

SEQ ID NO: 4109 - DNA, 480 bp, Triticum aestivum
  Clone ID: uC-tsro9316088f05b1
gaggagcgagaacgagggtttctttgacgtgggcaccaactcctcccaggggggctcgtccctgtccctgccgcctctagctgccggtccagccgtgtgcgtcctccggtccgccggggacttcgccggcggcgccttcgtcggatctatctttggatatggacaaggtttgctatctaagaagggtttgaagggctcactcggcaatgcagggtcttctgccaaaagttttgcagttctttctggcgtccagagtttggttttgtgcttgttgaggaagctgcgtgggaaagatgatatcatcaattccggcattgctggttgttgcacaggtcttgctttgagttttccagggacaccacaagcgctgctttagaactgcgccaccttcgcagcattctcatgcatcatggaagggctcaacaagcagcagaccgcgatggcgcacaccctcactgggaaacgcctgacctttgcaca

SEQ ID NO: 4110 - DNA, 465 bp, Triticum aestivum
  Clone ID: uC-tsro9316088f06b1
gctcccaccgcagggggcactttctgtcgacccccgccccttttccggtgcgcgcctgttgctgcagacgagaagcggctgaggcgaagaggaatcgaccatggcgacccgtatccagtttgagaacaactgtgaagttggtgttttctccaagctcacaaatgcctactgtctggttgcaattggaggatcagagaatttctacagtacatttgagtctgagcttgcagatgtcattcctgtggtcaagacctctatcggtggcactagaataattggtcgcctctgcgttggaaacaagaatggacttctcttgccacacacaaccactgatcaagagcttcagcatctgaggaactgcatacctgatcaagtggttgttcagcgcatcgatgagaggctgtctgcccttggaattgcatatactgcaatgaccatgttgcgctcacacacccttgacctgac

SEQ ID NO: 4111 - DNA, 377 bp, Triticum aestivum
  Clone ID: uC-tsro9316088f07b1
ctgaacagggctgtttttacccgaaaaaacttgcctttgcaggctgccttctcggcatttccgccaccactttcttatgtcacgttaagattctatgacattgtatatagtactctcttttacaaacaaacgctgttagggtagccaagaagctatttagtcggtggccagaggtcagaggtcagttgagttgttgattagtcgtcattgcgcaattctgctacaggttggcgaaaaatgtgtgaactctacagactctagtccatgtgtcatgtgcgagttgctgcaaacagaacaagacactcgtggctttgcatggacacgacttggcattcaaaactttgctagaagggttgagcgctctttgctgagctctg

SEQ ID NO: 4112 - DNA, 337 bp, Triticum aestivum
  Clone ID: uC-tsro9316088f09b1
gagcagacggagcccaggccggaggaggccccggaccccgatttctgctcccaatcgtctcggcgagagaggcaacggagccactatgcctggagcagatgagacgtttccggcagagtcgagggcgacggtgttctttggggctgtgacatctaaatcggagccgctgacctttgaagagtccctcagatttgtcaagaaagtgaaggctcgcaactacatgctgtacctgtcgctgtttgacatcctgggcaggacagagctgtcccagctggaggcctaccaaacactgcagctgctgttccgcgaccacccggacctgcacgaagggctggag

SEQ ID NO: 4113 - DNA, 279 bp, Triticum aestivum
  Clone ID: uC-tsro9316088f10b1
cgtccccggcgacggcgagtctacatccaggaagaagatgttctggacccgattgcaattttcagatccagtttagggtccttcttgtcaaaatcaagggcttaggtgttattttccttttatgtgagtccttgtgtgggctttgtgttgtaaccgctgaagttttaatgaagatctaggcccttcatggcctttcctggtcaaaaaaaaagagagagagctggactcacagctggaaaggtttcatacgagaattgtttggaaacaaaaaggaccgag

SEQ ID NO: 4114 - DNA, 481 bp, Triticum aestivum
  Clone ID: uC-tsro9316088f12b1
ctgtccgcaggaacggggggttattcgggagcttttctgctttgctctacagaagatcggcagcaccaaggctgaataccgaagagttcaaactttggagctggcggactgcatattgaaatcctgggtcggcgacgatgtctcgagcgcatcaaaggttttgaagaagcatatggctctgctgtgcgagctgatgcaggaaatcctcacaaagatgcccgaaaacaagtcgcgtcgccaggaggtgcgtagattctgcacgcgggctctgcaaaccgtgacgaggctcaatctgaaagagaagtttcagaagaagctaagcccggaagcctacaccctgtgtgatgcacagctgggagctgcatttgttcccttccgacagtgatgcgtgtgaatccatttctgaagacggtgaattgcaccagaaatgactttgggctgaattaactctgcttgtaatatcagctccttaggttcgatt

SEQ ID NO: 4115 - DNA, 262 bp, Triticum aestivum
  Clone ID: uC-tsro9316088g01b1
cgccgccgcatctcccccgcgccgccgccttgacgctccgatttgtccgtccgacggtcagcagcagcagcagcagcagcctagtcgtcatcgtcgccgatggcagggttcggcagcctggcgtccaagactaataatgtggtggtggcgggcgggctgacggagttcgtctctggggtgtactactacaccatgtgggcggtgggcagcaccgacgagctgcaggtcactatcgacaagtttgaggacctgaagaagaagg

SEQ ID NO: 4116 - DNA, 416 bp, Triticum aestivum
  unsure (1)..(416): unsure at all n locations
  Clone ID: uC-tsro9316088g02b1
cgaacatgcgttgttttttccgccgccaccaaagcagatccagcacgaagttctcctggcggaacaaagtgcctctccagcaaagcaggcagagcccgagccgcgcctcgaggaggaacagagcgttttttctccaatctctcgcgtcccgcactggttcagccgccgcacggatgcctccgagctcatggggttcgcggcgcgcggcctgctcgggaatggcaggtccatgcaggaggggtaccggcagttccaggagccgtcggtgttcaacgcctggtgggaggctcacacgagcagcgcgatgatgcccaggtggagcaccgcttgacctgggccggcctaaaggggtgcatgccttcccttttgacagttatncacaaggacgccgacacgatttaaatagaatgcctctg

SEQ ID NO: 4117 - DNA, 283 bp, Triticum aestivum
  Clone ID: uC-tsro9316088g08b1
gtgcttgatgaaggggactttcttaggatgcagagtgtggtttttgcaatcaaggaaggccggaataacggcggtgctgatctctcttctcttcactcccgtggagaagaggtttttgtttttggatgaagaagaaaatgtacccctaatcagcatgcgcgcggttgttgtagaaggagaagatgtaagttgatgcagatgtaatcaatggaagttggttaaatttcgtagtaaatgaaagaagacctagaagacacaaggactaaatttggaaactgatcgt

SEQ ID NO: 4118 - DNA, 419 bp, Triticum aestivum
  Clone ID: uC-tsro9316088g11b1
ccggctcgaggggatatttttatacgaggagcagcgattgcctccactcgagcccgatggcggttcctcgcgctgcccctggcgctgctcctcgcgatcggctcgtcgcgcggcctcgacgcggcgcccaagccccccgtccccaaggccatctccgacctgagggaggcgatcgtgaaggggctggggctccagtcggaggagctcaaggtgtccgggttcgacgtgagggacgcgctggtggggcacgcggtggcgtacgagttcgacatggaggtcgggaggaaggccgtgccggtgcggctgctcgaggacgtcaaccgctgggacttcgtcgacctgcccatcttccggtcccaggccgacgccgacgacacggcgctcgccgagattgggcggaggagctttgaccccacgct

SEQ ID NO: 4119 - DNA, 295 bp, Triticum aestivum
  Clone ID: uC-tsro9316088g12b1
aaaaaaaaattccatttttcccccaaaaaaaaaaaaaaaaaaaaaaactaactactcaaaaatcaaaaaaataaaaaaaaataaaaaaaaaaaacaaaacgggggggggcctttaaagggaccaccgctcccctcccgggcatggcaaaaacaattcctttataagggtcccccaaaaaaaaataaaagccgcgttttttaacacccctcttatgggaaaaaacctgggtacacccaacccaacgcccttgaaaaaaaaccccattttcccgtgggggaaaaacaaagaaagggc

SEQ ID NO: 4120 - DNA, 151 bp, Triticum aestivum
  Clone ID: uC-tsro9316088h03b1
catcatcctctacatctaatgagattatagttcaaatcatacattcagaattatccaatgtggaacttatatgcattgaggttacatttaaaaaaaaaaatacaatcgatgggaaaaaaacaaaacaaaaaattaaaatttaaaaggatga

SEQ ID NO: 4121 - DNA, 426 bp, Triticum aestivum
  Clone ID: uC-tsro9316088h04b1
ctcgcgccgccgcggggggcgttttagtacacgcggcgttgatgctcacccacaagaccttccggatcaagcagaagctggccaagaagcagcgccagaaccgccccatcccctactggatccgcatgaggaccgacaacaccatcaggtacaacgccaagcgcaggcactggcgccgcaccaagctcggattctaatccggggatgacggcgatgacacccgttgctgccgacgggagaagggtctagggtacctagggcttatgatgtctcgctgcttttgcatgctagcaagtgactccgggatgccagttttaagattccgcttgtgctgaaagatattattattattactgcttgtagcctaccttgggataccgcatattctgctgattatggaaccccttttatcctgcttaaaaaaca

SEQ ID NO: 4122 - DNA, 381 bp, Triticum aestivum
  Clone ID: uC-tsro9316088h07b1
gaaaatctacagggctaagcaggatggcgctgtgctcttgggtatgcgtcatccttgggatggccatgatgatcacgcgcatggtcatggacatgcacacgagcatgaggcttcgacgtcgtcatcgccgtcccattgagctcgacgctgaaagcggctgacagagaccctgacgcgttgcatgtttcgacgcaagtctctgctaataaaaaacaatcacaactatcattatttacccctgttgtttgcaagaatttttttttagcacacaaactggccttgttgtgtatttcggtttggagctgtggcgtccgtgggaatgcttccgcgtgcatgtgttgttgcttattgtgatcgctgcagctgttgtcgcacgctctg

SEQ ID NO: 4123 - DNA, 253 bp, Triticum aestivum
  Clone ID: uC-tsro9316088h12b1
aaggatggctggaaggagtttttttcggtcggatgtctatttcttcacctatattattctctcctgtctttcttgaagagtttttttttttcgcttagcttttttgataggtttcactgaggagaccactagagaatgtaatacgctggtaacactagaagaaatatgaatgctattttttgctagttttatgttactggtgaatgaatgcagtattttagtggcaaaaaaaactaactaaagctgaaagatt

SEQ ID NO: 4124 - DNA, 523 bp, Triticum aestivum
  unsure (1)..(523): unsure at all n locations
  Clone ID: uC-tsro9316089a01b1
cccctgcttcggttttgttcagtatgagcaggacgaatcagtacagtatgctatcaatgaactcaatgggatgcttttgaatgacaaaaaggtttatgttgggccttttgttcgtaaacaggaaagggaaaatgtttttggcagtcccaagttcaataatgtctatgtaaagaatctatcagaatctaccactgaagataatctgagagaattgtttggtaattttggacctataactagtgttattgtagtgcgaggcgatgatggtaaatccagatgctttggattcgtgaactttgaaaatccggatgatgctgcatgtgctgttgaggatttgaatggcaagaaatttgatgataaggaattgtatgttggtagagcccaaaagaagtctgaaagggagatgncattgaaggaaaattttgagaaaagcaataaagagacagctgacaggaaccaaggcactaacttgtatttgaaaactttgatggagtgttgatgacgatagaagtaaaaagaactt

SEQ ID NO: 4125 - DNA, 420 bp, Triticum aestivum
  Clone ID: uC-tsro9316089a03b1
ctttgctttttgagccagagaggaacgatctgggggagtacttcggtgagcagctctgtggtttcacattcactgccaatggctgggtgcaatcttatggatccaggtgcgtcaagccaccgattatctatggtgacgtgagccgccccaaccccatgactgtgttctggtccaagatggcacagagcatgactgctcgcccaatgaagggaatgttgacaggccctgtcacaatccttaactggtcttttgtcagaaatgaccaaccgaggtttgagacttgctaccagattgctcttgcaatcaagaaggaagttgaggatcttgaggcaggcggtattcatgtcatccaaattgacgaggctgctttgagagagggtctgccactccgcaagtctgagcacgctttctacttggact

SEQ ID NO: 4126 - DNA, 483 bp, Triticum aestivum
  unsure (1)..(483): unsure at all n locations
  Clone ID: uC-tsro9316089a04b1
cttttcctaggtagcctncatcaactctagaagcggggggcttctttgaagtggtttgatcttatcataccgggaagttctcaatgaagcacaggtttttgatctctctgaagagtcccctgacaaggtgctgcacaggttgtatgccaacttccaaaggctcaagtccaacggtgaccttcttgctattcaaatagagaagagcctgagactaattgttgctggtggtgatggcacggcaagttggctgcttggagtagttagtgatcttaagcttacacactcaccccctgtcgctactgtgcctctgggaaccggaaacaaccttcctttttcatttggatggggaaagaagaacccagctactgaccaagaggcagtgaaatccttccttgggctagtgaaagaagcangagaaatgagcattgatagttggcatatcatcatgaggatgcgagttccacaggaaggtccatgtgatcc

SEQ ID NO: 4127 - DNA, 495 bp, Triticum aestivum
  Clone ID: uC-tsro9316089a05b1
cccctggctagacagtgctgagaccatccgcaagggacttgttcttggtgtcaacgtcaagattatcacaggtgaccaacttgctattggaaaggagactggtaggaggcttgggatgggcacaaacatgtatccttcttctgcattgcttggccaaagcaaggacggttcacttgagtcacttcctgttgatgagctgattgagaaggctgatggatttgccggagtcttccctgagcacaagtatgagattgtgaagaggctgcaagagaagaagcacattgttggtatgactggcgatggtgtcaatgatgctcctgctcttaagaaggccgacattggtattgctgtcgatgatgctacagatgctgctcgaagtgcttcagacattgtgcttaccgagccaggtctcagtgtcattatcagtgctgtcctgaccagcaggtgcatttttcagaggatgaagaactacacgatctatgcagtttccatcac

SEQ ID NO: 4128 - DNA, 482 bp, Triticum aestivum
  Clone ID: uC-tsro9316089a06b1
ctatacctggcaggcagccgcaacccgagcctggactacggtttttagggcacggagatcgtcatggcttcctactgctctgagctccagtaccttgccaacccggtgaccaaccatgtccagagtgctgagcagcacaaccaggacgtgaactctctgggccttgtctcggccaggaagaccgccgaggccgtggacatcctcaagctcatgtcctccacatacatggtggcgctgtgccaggccatcgacctccgccacctggaggagaacatcaagacctccgtgaagaactgcgtgacgcaggtgtcgaagaaggtgctgaccatgaaccccaccggcgacctctccagcgcgcgcttcagcgagaagagcctcatcaccgccatcgaccgcgaggccgtgttcagctacgccgacgacgcctgcagcgccaactacccactgatgcagaagctgcgcgccgtgctggtcgaccacgc

SEQ ID NO: 4129 - DNA, 264 bp, Triticum aestivum
  Clone ID: uC-tsro9316089a07b1
ccaatacccccggaggcacgaccgcacacaaggggggggctcaataaaaaaagcggggcgaacaacaccgccaccggcacgaacaagaaaccaaccaccgccaaccaagcccccagaaacaaccaaaggggcgcccacagcacggaagacgaaaaaaccgagacgcacaacccccaaaaaaggagcggggcaaccaggagccaccacacggacacgaccccaacggacaccaagaagaagcccaagaccacgcggcgaaaaccc

SEQ ID NO: 4130 - DNA, 490 bp, Triticum aestivum
  unsure (1)..(490): unsure at all n locations
  Clone ID: uC-tsro9316089a08b1
ttccatgcgtccgcggacgcgtgggtgattatggaaggttagttacctggtgttggatccagcatggaagcacgggaaagattttacacttgattaccttttaccttccactttggggtgccattctctacaatgggtttacgtactatcaagtaaaccgcatgctgaacaatgcgacacggatggctgttggcatgagtgatcgatcaagtcaatctgacgtgagggcggacaagaaggcatttaaccggtggggttattaccctctgattttaatcggttcatgggctttcgcgacaatcaatcgcctgcatgactttgctaatcctggtcacaagatattttggctgtccatccttgatattggatttgctggacttatgggcctttctaattcgattgcttatggtctcaactcttcagtgcgcagagcatttgcagaaagattngacatgtatctacccgagagaatcaanagggagcctcctac

SEQ ID NO: 4131 - DNA, 458 bp, Triticum aestivum
  Clone ID: uC-tsro9316089a09b1
taaatgcacggcagcaaatgtacagtcattggctggggtgaacacgcttggcgtgtccatggcacgcatcgactacgcgccgggaggccagaacccgccgcacacccacccgcgtgccaccgagatcatcttcgtcaccgaaggagtcctcgaggtgggcttgatcaccaccgccaacaagctcttcactaagactgtcaccgtcggagacgtgttcgtttttccgcgtggcctcgtgcacttccagcagaacagggggcgtggccctgcatccgtcatcgccggcttcaacagccagctccagggcacacaagtcatcaccaccacgctcttcgctgccgagccgccagtgcctagcgacgtgctggccaaggccttccgggtcagtaacgaggacatcgacgccgtcaaggccaagttcaagtagtgtgggtgcctccgcagttggcaactctcca

SEQ ID NO: 4132 - DNA, 359 bp, Triticum aestivum
  Clone ID: uC-tsro9316089a10b1
tgcgtaccaggagcaagagacacacattggctggggtgaatacacctggcgagggcatcccacgcaccgactacgccccaggagggcagaacgcggcacacacccacccgcgagccgccgagatcatgttcgccaccgacggagcactggagggggactctaacagcaccgaccacaagctcttgactaagactgtcaccgacggagacgtgagcggtgttccgcgtggcctcgtgcacttccagcagaacagggggcgaggacctgcatccgacatcgccggctacaacagccagctgcagggcacacaagacatcaccaccacgctcttcgctggcgagccggcagtgcctagcgac

SEQ ID NO: 4133 - DNA, 385 bp, Triticum aestivum
  unsure (1)..(385): unsure at all n locations
  Clone ID: uC-tsro9316089a11b1
cctacatgcttccgctctganggaagggcgccgggagctattcttaaagatggttctgttgttgaagctgatacagatattgttggtataggagcaaaaccatctgtcagccccttcgaagctgtgggagttaacatcgaagttggtggaatagaggttgattccatgtttagaacaagtatacctagcatctttgctattggagatgtggcagcttttccgctcaagatgtatgatagaatagctcgagtggagcatgtggatcatgccagaaagtctgcacaacattgtatagaaacactgttaacatcccaggcagaagcgtatgactaccttccgtatttctattctcgagtttttgagtatgaaagaagcttcaggaaaa

SEQ ID NO: 4134 - DNA, 267 bp, Triticum aestivum
  Clone ID: uC-tsro9316089a12b1
ccgtcgatgcccccgcacccacggcaggaggccaccagggatacttaaagacggcagaggcggcgaaccggccacaggcgagtgcaggcacaggcacaaaaccaaatgacagcccctcggaagcagagggagtcaagggaggaagccacgacaaaagaggaaccgacagcccgccaccgcacgccgcccgaacaacagaaccgtgagggcagccggacgcggacgaaagaagaaccgccgcccacggaggcagaacccaaagaggag

SEQ ID NO: 4135 - DNA, 439 bp, Triticum aestivum
  Clone ID: uC-tsro9316089b01b1
ctctgcctatctagctcgctcggattacggccgtgggcggctgcgcttccagaggtgagcggtatgtcgggggcgggggcggaggaggcggtggtgggcgagagcttcgagttcgcctttgacaaggaggccttctccgacaagaagctgcgggtcgaggtcgtcggcagcgacgacgccgccacccgcaagcgccgccgcgaggacgacaaaagtgatgaaggagaatgtgtcgattcttcttctatagtgatggctgcaccaattttacgagttactaccatgaatatcaattcggcgattcttgctgtaaaaagtcctttctttttcaagcttttctcaaacggcatgaaagagtctgacagggacaggcaacactttcgatcgctgattcagaggaaaatgccctcatggagcttttgtactttatgtatagtgg

SEQ ID NO: 4136 - DNA, 476 bp, Triticum aestivum
  Clone ID: uC-tsro9316089b02b1
gtcttcgataactcctggtggctggccaacaaccgggagcttttggttaagccgggggagttttagccggagaggttcttgggcgaggagagcaacgtggacgccacggtcggcggcaaggtggacttccggttcctcccgttcggcgtggggcggcgcagctgccccggtatcatcctcgcgctgcccatcctggcgctcatcgtcgggaagctggtgaggagcttcgagatggtgccgccgccaggcgtggacaagctcgacgtgagcgagaaaggcgggcagttcagcctgcacattgccaaccattccgtcgtcgcattccaccccatctcaccctgagcaattgcatcttcaacccaatagcctgatccacaagcacaatttttcttcagattacaaatacagtagattacacgaaagtatgtcagttgatttatggggattacattttttttctttattaaaaggacgat

SEQ ID NO: 4137 - DNA, 460 bp, Triticum aestivum
  Clone ID: uC-tsro9316089b03b1
atcttaattattgtgcttgctaacatgtaccaggggcctgttatgattacccctggagttgatgcccaaggtgtggctattgcaccagagaagatgcaggagcactttgaggacttctatgaggatatctatgaggagctgagcaagtttggtgaggttgagaccctgaatgtgtgcgacaaccttgctgaccacatgattgggaatgtctatgtccagttcagggaggaagagcaggcagtggctgctcacaatgccctccaaggccgcttctactctggtcgcccgatcattgtggagtactcccctgtgacagacttccgggaggcgacctgcaggcagtttgaggagaacagctgcaaccgtggcggctactgcaacttcatgcacgtgaagcagattggtagggagctcaggaggaagctatatggtgggcgttccaggaggagccacgggagga

SEQ ID NO: 4138 - DNA, 498 bp, Triticum aestivum
  Clone ID: uC-tsro9316089b04b1
gtatagctgcgcaaggcgcacgcgctgctctcggacgcgaggttccgcgccgccgtcgccgttagcacagcgcgcaagctcgacggggggctcgtgccgctcctcgacggcatcgctgccggcgcctcggtcgtcgacctgcaggacgtgttcatgcgcctgacgttcgacctcacggcgatgttcatattcggtacggatcccggctgcctggccgctgacttcccgcgagtgccattcgccgcggccatggacgaggccgaggcggtgctgttctacaggcacgtgacgcccactgcctggcggaggctccagacctacctaaacatcggccatcacaagaagatgaccaaggctcagcaggtgctcgacgcgtctatcgccgagttcgtctcgctacggcgagagcgcgcggccagtgccgacgccaacgccgatggaagcgacgacgccgctgatcttctcacgttgtacatggcatgccaagacgagctaggc

SEQ ID NO: 4139 - DNA, 195 bp, Triticum aestivum
  Clone ID: uC-tsro9316089b05b1
ggcctggatacagctgctctagaccgaaaagaacggggggggttaaaaagacaaagccgggagtaacacacggcgccagacggagaacgaaaaggaaacaggaacagaaggcaaacggggagaggacaaggtcacgagacacggagaccatcatgcacacgaaaggacggaacactacaagccatggaaggatag

SEQ ID NO: 4140 - DNA, 500 bp, Triticum aestivum
  Clone ID: uC-tsro9316089b06b1
ccgatctctcttggccgccgcgaagaaaaggagcttatcatgtcttcaaaacgtatcctgaatgaactcaaggacttgcagaaagatcctccgacatcatgcagtgcaggtccttctggcgaggatatgttccattggcaggcaaccattatgggtcctcctgatagtccctatgctggaggtgttttcttagtgaatatccatttccccccggactaccccttcaagcctccgaaggtatcgttcaagacaaaggtcttccatccgaacatcaatagcaatggaagcatatgcctcgacattctgaaggagcaatggagtcctgctttgacaatctctaaggttctgctttcaatctgctcactgcttaccgaccctaacccggacgaccctctcgtccctgagattgcccacatgtacaagacggatcggtccaagtacgagacgacagcccgcagctggacgcataagtatgccatgggatgatcccgagcccatgc

SEQ ID NO: 4141 - DNA, 525 bp, Triticum aestivum
  unsure (1)..(525): unsure at all n locations
  Clone ID: uC-tsro9316089b07b1
ttccgtgattccctcctcatagatccggcaggcgcgcatgctacggccccgagctgcgtcagaaggcgccatggggctctgggactcgctcctcaactggctccgaagcctgttctttaagcaggagatggagctctccctggttggcctacagaatgctgggaagacatctctagtcaattcaattgctaccggtggctacagcgaggacatgattccaactgtaggctttaatatgcggaaagtcaccaagggaaatgtcacaattaaactttgggatcttggagggcaacgtagattccggactatgtgggagcgctactgtcgtggagttactgctattttatacgttgtcgatgctgctgaccgggatagcgttccgattgccaaaagtgaattgcatgacctgctgacanaacagtctttatctgggatccccttacttatccttggcaaacaaatngacaagtcagaggcactttctaagccngcattagttgatcaactaggcctggaatctataaa

SEQ ID NO: 4142 - DNA, 493 bp, Triticum aestivum
  Clone ID: uC-tsro9316089b08b1
tcgcttcgccgccgccgccgccgccgctcccgagcggtctggttgctcgccgccggccatttcgcgccgcaactccgccatgaagttgaacatcgcgaaccccaccacggggtgccagaagaaggtcgagatcgatgacgaccagaagctgcggaacctttatgacaagaggatctcccaggaggtagttggtgatcttctgggtgaggaattcaagggttatatcttcaagatcatgggtggatgtgataagcagggcttcccgatgaagcaaggagtgctaacttctgggcgtgtccgccttctgcttcacaggggcacgccttgcttccgtggttttggcaggcgtaatggtgagcgcaggaggaaatccgtccgtggttgcattgtcagccaagacctatctgttatcaacttggtgattgtcaagaagggtgagaatgatctgccaggccttactgacactgagaagcccaggatgaggggacccaag

SEQ ID NO: 4143 - DNA, 357 bp, Triticum aestivum
  Clone ID: uC-tsro9316089b09b1
ccctggcatattgctgatgctgagacgacaataaagctgaaactagattgggagaagggttatttcaggaaaggatgtgtttcggaggccatggagcagtatgaggaggcaatatctgcttttcaaatagctttgcagcacaatccacaaaatacagaagtcgcgagaaagatcaagaggcttactcagttagcaagggaacagaagcgagctgttgatgtggagaacctgcgttccaatattgacatcaggaagaacttgcagtcattgaaaaaggagctggctacaaagtatggagatgcagaaatgggacaaaatatattctcatttgttatcagtgtgattgaaacagcgatt

SEQ ID NO: 4144 - DNA, 452 bp, Triticum aestivum
  unsure (1)..(452): unsure at all n locations
  Clone ID: uC-tsro9316089b10b1
taactaaccacaccatttcgcaatctcgcaagcgacgcttccgtctccaccaccaggaaccagaccgcgcactcctccttagctcgagcccagaccggagccctgttccgccgtggatcgctggaggagagggccaccggccggatcccgacgggccagatggtgggcgacccccgcggcgggggcgagtagcacggctgcgatcggcggcggacggatcggcggcgccgcaaggcggcgggggccaccatgtctgccgtagtgtgcggcaagaggtcctccatcttcgccgacgagctcatcccttgctctccgccttcccctccccaccaccacccttncaagcgggcccgctgctccccgacccgcgccttcgacgacgccgccgcggcccaccggcgggaggcgctgctccaccaccttcgctccctcttncctcacatggatcccca

SEQ ID NO: 4145 - DNA, 320 bp, Triticum aestivum
  unsure (1)..(320): unsure at all n locations
  Clone ID: uC-tsro9316089b11b1
ttacttacccacgccaangcaacatgacgcgaggggggttgtatcaaccacacccgggcatcaacccaaacacgcaacgacaaatcgagcaccaagcgggggcaggacacgccgaggagggcgaggcgagaggggcgacgaccacaaacgaacgggcgagaaggagagcaaacaagccggccagggccagtggcaaggcggggaccggcaggggactaatctaggacgccgcatggcaggaggagagaccatgtcatggataaggaggtggaagatgatcgacaggtcattccatgaactaagacgttgcacatcatcta

SEQ ID NO: 4146 - DNA, 405 bp, Triticum aestivum
  unsure (1)..(405): unsure at all n locations
  Clone ID: uC-tsro9316089b12b1
tctacgcgcctgaatcattcggccagaactaaagagnggggccatggttccatccgaaggccattccatttaggacaatctctctgatgttttccgcggggtcaaatgtcaaaaacccggcaagaagatggaaacatccaaatgttccaaagctggtcctcaagccgttaaatctacagcgagcaattcacctcctgaggcaaagtcctgcaaatcatcagatatggtaaatgttgcttcagacataaagacatcaaagtcccttccttcaacaccacccctagtatccagagcagatccttcatcctctaggtgccattctcttcatgtggactcattctcaatgaggaaagcacgtcgatcacctggacatcaactatgtaggcagatctcggacagcaagat

SEQ ID NO: 4147 - DNA, 342 bp, Triticum aestivum
  unsure (1)..(342): unsure at all n locations
  Clone ID: uC-tsro9316089c01b1
gcgtaagttacacccggcgaggagcagccnaagagggaccgtaagaagcacagggccaccaaagaggaccgcgccaagagcaagaacaggaaatacctgaggaagccgaagaaggtgaagaagagcaacggccagatgcacgccaccaacgagatcaaggagaagaacccaaccacgaacaagaacgagggcaagaggctgcgacaccagagcaggacaggctaccacaacatgtacaaggagtaccgtgacaccacactaaatggagccgtggagcaaaggtacacagagatggccactcgccaccgtgagagaaccccctgcaagcagagcaacaagacc

SEQ ID NO: 4148 - DNA, 423 bp, Triticum aestivum
  Clone ID: uC-tsro9316089c02b1
ctgttctttcattgacatccgtctgccaatgttggggtatgtttcctgagaaaagcgcccagtctatgaccacaacaagaaggctggtgcgatgaatgctctagtccgttcatctgctgtcatgtcaaatggacctttcatcctcaacctggactgtgatcattatgtctacaactcccaagctttccgtgaaggcatgtgcttcatgatggaccgtggtggtgaccgtattgcctatgtccagttcccccaacggtttgagggcattgatccatcagatcgctacgccaaccacaacacagtcttctttgatgtcaacatgcgtgcattggatggtctcatgggaccagtctatgtcggcactggctgtcttgtcccgcctgttgcactctatggatctgaccctgcgcgctccacagaaca

SEQ ID NO: 4149 - DNA, 377 bp, Triticum aestivum
  unsure (1)..(377): unsure at all n locations
  Clone ID: uC-tsro9316089c03b1
acatttgtagctgctgggcaagctccggcacgagagcgtggtggatgtcgtcgcgtgctaccactccaaagaggagaagctcgccgtctacgaacacgtgcccgggcgcagcctcttcgagctcctgcacgagaacagaggcgagggcagaatgccgctgccgtggccggcgaggctgtcgatagcgaagggcatggcgcgcgggctggcgtacctgcaccagtcggtgccgtttttccaccggccgccgcacggcaacctcaagtcgtccaacgtgatcatcctgtcgacgcccaacggcaagcaccagcatccgcacgtggtgccgaagctcacggactacggcttncacccgcttgttccgcaccacgcgcaca

SEQ ID NO: 4150 - DNA, 483 bp, Triticum aestivum
  Clone ID: uC-tsro9316089c04b1
cctttgtttcctcggcgttcagcccactgatgatgatcgtgttggccgtgatgggctccttcatcctctccgagaagatatacctggggggcgtcctcggctccgtcctcatcgtcatcgggctctactccgtgctctggggaaagcacaaggagacccaggcggagtccgcggccctgcgggaggcgctgcctatggccatggcctcctacacctccaaggtgaccggagacgccgcgtcggccggacgatccggagtgcgagaaagccaacggagcagccaagccatcctccaacggacacggagctagtgcagtctgatcaatcgattccaactgcttccaagtgctaactggcaatgtctcgtcactgacgttgcatgcactagggccgtgtgcgctgcatgccagggagagtggaataattatgcggcgtgccattatttttggcctctgatgatttcacaaccacgacttagtactc

SEQ ID NO: 4151 - DNA, 510 bp, Triticum aestivum
  Clone ID: uC-tsro9316089c05b1
ccctcgatcgccacgcgtccgtccttctccacctgcggccgttgccacggtcaggccggcgtggtggtgcgcctcccgcctcatcacccatctccatccaccacaacaccatcaccctgcaccaccagcgccaccagcacccccaccatcattccgcgccatccatccaccatctccagccaccgccgcatctggcgcgacccaccagacccaccagactgcccgtctggtgtccggcgcgagcacgccatccaccacttccacccctccctctctgttgttgctgctcctccctcttgcttcgtcctgctgcttctcttcttcccctcgccttcctcaactgctgctgctcccttcttaccccaaactctactgctgcatcttcctttcttctccttgtccctactactgctgctgaaccgctcctcctcttgctgtgtctctgctactcgctgctcccctactgctgatcctttcctcaactctctctgctggctctctcatgccact

SEQ ID NO: 4152 - DNA, 264 bp, Triticum aestivum
  unsure (1)..(264): unsure at all n locations
  Clone ID: uC-tsro9316089c07b1
cgccttggttaccagcccaccggcagccaacccanggggagggttgataaaaaaagggggtcctaacccccccccgcnangacggccacccacaccaccccgccacgcaccacagacacggcaaagccggccgcaacccccccccacaacccccaaacacacccccacaaccccaccccccacccaaaccgagaaggcaggagccacaagaaggaccgcggagcagaccgaaaagccaaagcccagcacccccaacggcaccag

SEQ ID NO: 4153 - DNA, 458 bp, Triticum aestivum
  unsure (1)..(458): unsure at all n locations
  Clone ID: uC-tsro9316089c09b1
tacttccttaagcgctcgctcgaggaggacggcgccgcgcacttcaccggcgaattccgcaagcttttggtgcctcttgtaagcgcataccgctacgatggcccggaggtgaacacatcgttggcacactctgaagccaaaatactcaatggaaagatcaacgagaaggcctacagtgatgatgagatcatcaggattctcactacaaggagcaaagctcagctacttgcaacattcaacagctacaatgatcagttcagtcaccccatcactaaggacctcaaggaagaccccaagaacgagttcctctcaaccctgagggcgatcataaggtgtttcacttgccctgacagatactttgagaagaatcatccgttggcccttggaggcgtcggcacagacgagaacacncttacgagggtcataaccactcgcgccgaggtggaccctgaggtgat

SEQ ID NO: 4154 - DNA, 337 bp, Triticum aestivum
  Clone ID: uC-tsro9316089c10b1
tacgtagcctctcggtctgggagacatcggctgaaagattgctggagaaatggatacgagcgtgatcgtcgtgtccgtcgtggtgggattctttggggtcggaagcgccgtgctggggctcatcgccgagggcaccaagctcgagccgaatgacatctcgatgtccaggaccgagtgcgtgtaccccgccaacccggcgttcgcgctggggctggtcgcggcgctcctgctgctggcggcccagatcaccgtctcggccgccggccgctgctgcggctgctgcaagccccggggcgccgccttctccgcgtccaggcgcaacatcggcgtcgtcttc

SEQ ID NO: 4155 - DNA, 413 bp, Triticum aestivum
  unsure (1)..(413): unsure at all n locations
  Clone ID: uC-tsro9316089c11b1
cccttcatatcaggccaccgcccatgacgggaaggggngcttcagtgcgcctcgcgttcggtttctgtccagaattcttggacatgataaagtttgggtcttagatggaggtttccctcagtggcaagcttctggattcaatattggaagcagctgccttgatgatgcagttctgaaatccagagctgctaatagtgctgttgaaacagcttataatggtgaattggcaaatgctgccacatttcagacagagtttcgacatcagctattgtggacactagaaaaggtcaaacacaatgtagctgctaaggctcaccacagagttgatgcccgagtaaagggcagatttgatggtgtaatgccagaaccaagggaaggagtaagaagtgggcatataccctgaactaaatgtg

SEQ ID NO: 4156 - DNA, 475 bp, Triticum aestivum
  unsure (1)..(475): unsure at all n locations
  Clone ID: uC-tsro9316089c12b1
tggttcgcttcggaccatcgaaggccaaagcgngggtttggtcatgactggactgagcttgctcaacgctggtctgaccacccagatgctgctgagcctgttccgggtgaagggcatcgtccactggggcatcgctggcaacgccaacgaggacctccagatcggcgacgtcaccatccccgaatactgggcccacgtctccctctggaactggcagcggttcggcgacggcaaggataacgagctgtcactggaggccgccggcgactacacccgggagtacggcttcctcaacttctccgactacaccgtggggcagagcaacccggcgctatcagccaaccagctcaacagcatctggtaccagccggaggagatcttccccaagtccggcgagccggaggagcggcagcacgcgttcttggtgcccgccagcaagcggtactacgagcttgcgaagaagctgagggcatgg

SEQ ID NO: 4157 - DNA, 305 bp, Triticum aestivum
  Clone ID: uC-tsro9316089d01b1
acgttaagtataaagaggcggcagcccccccaccggggaggttaacaagaagtgagggcagggcacgaggcgcacccagaaaaccacaggagagggagcaagacagccacggcggcggccactcacgcagcacgcgagacctgggctcccagagggaaggtcacacgctaaaagacaaatacaggagtgacccagagcgagggacaaaaagaaacgaaagccagccattgcggcacgcgaacccgacaacacacggggagaatgcaaaagctcctgcaaaggacacaaggctggatgagagcacc

SEQ ID NO: 4158 - DNA, 413 bp, Triticum aestivum
  Clone ID: uC-tsro9316089d02b1
ttactcgcccggagttaaatactaccccggcagcacccagaacaaggggagggttttatttacaggcagcgttttgtttcttcccccgcgccaatccagtcttgtgatatagatgtgtcatctctctcagcatgacaagttcacaggtattctgcttttgatgaacttgctccacacctgcagtgacaagaaaacgctgaagaagtggttcttcatcgacaagacagcgggctaagaaaatcctgctgaaagagagacgaccaccgaactgaccacactatttcttcgtgcgacccgatggatttgagcaacggctcaccggtcatcagtgatccgatgtcaatgagccactcgctgatgggagtgctgactcccaacatgatgccgatttcaatcaggcccggaagttactc

SEQ ID NO: 4159 - DNA, 367 bp, Triticum aestivum
  unsure (1)..(367): unsure at all n locations
  Clone ID: uC-tsro9316089d03b1
ggcaacactggcatcattgntgttgctgccaccaacagggctgacatcttggattccgctttgcttagacctgggcgctttgacagacaggtgagtgtcgatgttcctgatgtacgtggaaggacagagattctcaaggtgcacggtagcaacaagaagtttgatgctgatgtttcccttgaggtcattgcaatgagaacacctgggttcagtggagcagacctggcgaatcttctgaatgaggcagccatattagcaggccgacgtgggaagaccggaatttcctcgaaggagattgatgattcaattgacagaatagtggctggtatggaaggaactgtcatgacagatgggaagagcaaagcct

SEQ ID NO: 4160 - DNA, 625 bp, Triticum aestivum
  Clone ID: uC-tsro9316089d04b1
ctgccggagcctgtttggaattcccgtttcgacttcacgcgcccgcagcttattccggagccacatacgctgctacgcgctcgcgctttcctggagcatgtcgctcattctcgccgacaagtacgccgacgtgatctactctatcgtgttgcaggatgattttttgccaagaacaccaacaccattggaatatattttcggctctatattctgcttgccctgcttgttattcctattttgcttgagagatacatttaaacaagacaagaaaaagtttaaagatccaagaagattgtatgctcctggtcggatgtatcatatcgtcgagaggaaattttgcagctgtgcaagatacccacctgaggtgagaactgctattccagtggaaggacggtttgagcatattgtgttatcgtgcagtaccactgctgatcatggcattatttggattgagcgagaatcagccttggctttagagctaatgaaggaaaaagagaaggcaacaactccacctgctgaacaaaagatggagagattgcaaagtttcaaggaagacacaagaatgcgctcacagggcgaaaacctggatgttcctatgcgaagacatctctgaagagaacccatg

SEQ ID NO: 4161 - DNA, 393 bp, Triticum aestivum
  Clone ID: uC-tsro9316089d05b1
aagcagccggggcgcagggggcgggttttaatgaaaaaaagcgcgcgttcctcaccgccgaggacacgggactcggctgcaccgatgggggcgcacgagcactcttactacggagccacgtacccgcgggcggcggcaggacgatccagatcgacagccaaagctccgaggccaagcgccgcgccggcgaccgagccacatcgaccgacgaggacacgtggcgcgacgtggcgtcgctggcgtgcgacggctcgccggcgtgcgtgcgggagctcgcggacacgaggagcgtggcgatcgaggtgcggaggaggcagaagaagatcatggggcgcgccgggacgacagagctgcttggccgcgcccaaggagcatggagggacgtgggtgacc

SEQ ID NO: 4162 - DNA, 347 bp, Triticum aestivum
  unsure (1)..(347): unsure at all n locations
  Clone ID: uC-tsro9316089d06b1
cccagccgcgcaaagacggggcggggtttatttaaaantccctttgttttttcccccgcgggggcaagcgagagccattgtccccaccaagggcgaggggccggccatcggcatcgacctcgtcaccacctactcgtgcgtatgcgtttggcaccacgaccgcgtcgagatcattgccaactaccagggcatatcgtccacgccctagtacgtaaccttgactctacttggagcgaatattatgagatgcctaaaagaaccaggtcttcattatccccatcaacaccgtcttccatgcgaaccgttttatcgggctctgggtttgctgatgcccctgtccatagtga

SEQ ID NO: 4163 - DNA, 399 bp, Triticum aestivum
  unsure (1)..(399): unsure at all n locations
  Clone ID: uC-tsro9316089d07b1
ccttaggtaactgccgnngcaanacaagangagaggncacattaatttaacaaggccttggctctcatagccctccgggcaagactatatgaattggaaaggcataggctccatacagaccggtcgaagctccgatcagagcagattggaagtggtgacaggtccgagcgcatcagaacatacaacttcccacaagggcgtgtcactgaccatcgtgtcggggtcacgcaccactccatagtggacgtcatggagggagagagcctggacgtcttcatcgaagcgctgctgctgcaagaagagatggatgcaattgcttcgtttgcttcgtgagccctaatttttgtggatttcttcctggagcgacaaaccgcatcataaacacactgaacactgaac

SEQ ID NO: 4164 - DNA, 300 bp, Triticum aestivum
  unsure (1)..(300): unsure at all n locations
  Clone ID: uC-tsro9316089d08b1
cggctagatacccagccaccaaacccancccaanaggggngggttggaagaaaagaaagcggacagaccaccccgcggaggaggaggaggagaccacgccgccgcccggaggcaagcacatcacccaggaggagggcgccaagcacagccccaaggacgacagcaggcacgacaccggcggcaaggagcacaaggcgaccaagccaccagaggaccaccctggaggcgacgacgacacgctgactacaaccgccaaggacgcgaccgacgacttcgaggacgtgggacacagcacaaccg

SEQ ID NO: 4165 - DNA, 424 bp, Triticum aestivum
  unsure (1)..(424): unsure at all n locations
  Clone ID: uC-tsro9316089d09b1
gaccgaaccggaacacccgggtcgcccacgcgcgtggataccaacccccggaacggaggcgcacgggggggtatgagaaaacagacggagcgccaccgccagggngccgcccgcgcagcaaccacccccgggaccgagaccaccggcgggcggcgggcaaggaggcggcaccgatggggaagaccccggccaagaggcacaagaccgcgcccaccgggaagaagaccaccaggactggccccgccaaggccaaggacaaaacggccgggagcaacagaggagacgccgccggcgggaaggagcccgggaacacggagagcaccccagagacccccgagccggagncacgaacaccgcgcaacaatgacgccgagccggaagaggggaagggtgagaaaaccagcaccgaaggcgaaacggcggc

SEQ ID NO: 4166 - DNA, 417 bp, Triticum aestivum
  unsure (1)..(417): unsure at all n locations
  Clone ID: uC-tsro9316089d10b1
gcaaacagaancanttcctttgaactccccctgcgttaccttcccactggattcctcgttatgagaccgttaataccaatttggtggaggtggtactactgggcaaaccccgtgtcctggaccatatatggcgtcatcgggtcgcagtttggcgataacaccagcccagtgtcggtcaccggtgggagcctcgcggtggtgaagcaattcttggaggacggtatgggcattaagcacgatttccttgggtatgtcgtgctcgcgcatttcgcgtacgtcatcggcttcttcttggtgtttgcttactccatcaaggtgttgaacttccagaaacgttaggaatgcaggcgtcccaatccatagtttgtgtgtatatctgtatagcaggatacatacgtaagcattgttgcataaact

SEQ ID NO: 4167 - DNA, 269 bp, Triticum aestivum
  unsure (1)..(269): unsure at all n locations
  Clone ID: uC-tsro9316089d11b1
cggtaagtacacaaccgcccacggccacaggaaagagggggaggcaggaagacacgcaggcacgcacgcacccanggcagcggacagcaagcagcanagcccgcagcagccgccgccggccggaagcgagggcggcggcgacgacgaggggcacggggcggccagcaagcggcaggagagcaacctgagagaccagtcggagccgcgggcgcggcggaagagcgcggcgaccgcggaggagatgcggacgcaggagcggccggcggcgc

SEQ ID NO: 4168 - DNA, 322 bp, Triticum aestivum
  Clone ID: uC-tsro9316089d12b1
ccgggaaacgcacgaggaggggtttaataaagcagaccatttttttcccgcgaccgggctaccatatcaactagtttcaattgtctctggtgctcttaatgatgctgcagctaacaagtatgatttggaagcatggttccctgcatcaaaaaccttccgagaattagtgtcctgttcaaattgcacagattatcaggcaaggagacttggaataggctatggccagaaaaagaatgatgagcaatcgaagcagttcgttcatatgttgaattccacgctgactgcaactgagaggacactttgctgtattctggagaactac

SEQ ID NO: 4169 - DNA, 349 bp, Triticum aestivum
  Clone ID: uC-tsro9316089e01b1
gccctaagtactaaaaagctgcgggccgaccaccgggctggcttacacccttccagctcgcgacgccacctgagacctaaccacctcggctgctagtgctagacgggcacggcctcgccgactccttcttccatcagggtttggtctcatctgtgggagctcacgctcttggatccaagttcaggtttgatctgtgaggaagttcgatttgcaactctgcagtgctattccgaaccggaagcttgatcatggaaggggccactcccactcccgctgcctcaaacacaaggattgctgtggtcaccggcgggagcacagggatcgggctggatgcgtgcaagcagctggc

SEQ ID NO: 4170 - DNA, 458 bp, Triticum aestivum
  unsure (1)..(458): unsure at all n locations
  Clone ID: uC-tsro9316089e03b1
accttgagtaccatctgacaaacagcttgctcagagccatcttttatcaaatggtacagttcctgtttccaactcaaaacaggcatcccatacagggttatctcctgatccttttgatgggaatggacctcataaaaagacaaagaagcctaaagcatggtccaacaaggaggatgcagacttaatggatggtgtacataagtgtggtgaaggaaattggctgaacattctgcgtaaatataacttcgatagcacaagaacttatgttcaattgtctcagagatgggcagtcatttgcaggcgtcaaggaacaaccaagcttgctaaagttaaatcagtcaccacggagttcgatataaaagctactcaaaggcattctctatggctcttgatatgcctatggngacagcctgtggattctctacattaagattaggagcttcacaacanagcgctca

SEQ ID NO: 4171 - DNA, 419 bp, Triticum aestivum
  Clone ID: uC-tsro9316089e05b1
aaggtacttgcgttgacaacatgcactatttaaatgatggcctgtgtaaggtactctctgcttttccctctaccttatgaaatactccctccattcctaaaatataagccctttcagagattccaatacggactacatatggagcaaaatgagttacactctaaaatatgtctatatacatctgtatgtagtccatgttgaaatctctagaagggcttatatttagaaacggagggactagttgctgtaactgaagcgcatatcaagtggctttgccagatttgtgacaattagtaccagacggtgattgccagccctttttacccttgcaatatgttcatgattgccgcagcaagctcactccttggggagcagagacagagcagagattcagttagaagcataacacatatgctact

SEQ ID NO: 4172 - DNA, 268 bp, Triticum aestivum
  Clone ID: uC-tsro9316089e06b1
ccacgtgaacccggacgcgtgggctggtggtggcggcgctgttgcttctatctgtatctgtgttgcttaagtttgatgtgtgatgtggaaactgttatgttaattattatggctttgattgaaccggttgtaaagtttgtaagtggattttgcatttcatagtattatcatatcactgccatttatacaagtgatagcggtggactgtggcgcactctcgcgctgtacacgtaggatttattgtccgtgcggtcgtttttcttgcgtg

SEQ ID NO: 4173 - DNA, 432 bp, Triticum aestivum
  Clone ID: uC-tsro9316089e08b1
tagttgcgcaggcaagggaggaggagagcgggggcgaatatgagtgaaactgacgctgcataagcgcctggcctcgagcgtcctcaagtgcggcaagggcaaggtctggctcgaccccaatgaggtcaacgagatctccatggccaactcccggcagaacatccggaagctgggaaaggatggttgcatcatcaggaagcctcagaagatccactccaggtctcgtgcaaggagggcacatgaggccaagcagaagggccgtcactctggatatggtaagcgtaggggtaccagggaggctaggctccccaccaagatcctgtggatgcggaggatgcgcgtcctgaggcgccttctgcgcaagtaccgtgaggccaagaagatcgacatgcacatgtaccatgacatgtacctgaaggtcaagggtaacat

SEQ ID NO: 4174 - DNA, 233 bp, Triticum aestivum
  unsure (1)..(233): unsure at all n locations
  Clone ID: uC-tsro9316089e09b1
tttactatcggcatccatggcgtcacccccggggnggtttttaattaaannaggcgttcctttaatttcccccnaaaaagaaaaaaantaaaaacaccatcaccaaaaaaaacacttaaaagaaaagaacacccaaaaaagaacaacaaacccaaaacatggaccaacaaagaagaagcaaacttaaaggaaggggtacataaatggggggaaagaaattggctgaacattct

SEQ ID NO: 4175 - DNA, 211 bp, Triticum aestivum
  unsure (1)..(211): unsure at all n locations
  Clone ID: uC-tsro9316089e10b1
ccccggtggaggcagcggcccttttcaacaaacttggaaggacaagaaacattagcgcgggcggttcccccccaccggggancaggacggaccgccccgacgagggcaggggccccgggggcgcgcggaaccccgcgcgcgacagcatggccataacggcccaggggggggggcggccggcaggcgcctgcacgccggcggccaggcccgg

SEQ ID NO: 4176 - DNA, 325 bp, Triticum aestivum
  Clone ID: uC-tsro9316089f01b1
gcattcaatatttccgccactcacaccgacctccgggccggcttacatttaatcctggccaccgtcaccagctccatcgactacggctcacccacctctgctgcctccctggaagccgccgccctcctcaacctctccgtggcactcgctgacccctcgggcaacctttccgcgcactggacgccggccacgccgctctgctcgtggccgcgcctctcctgcgacgccgccggctcccgcgtcatctccctcgacctctccgccctcaacctcaccggccccatccacgccgccgccctctcctccgtcccgcacctacggaccc

SEQ ID NO: 4177 - DNA, 422 bp, Triticum aestivum
  Clone ID: uC-tsro9316089f02b1
ccgcttcataacctacaggctggagaaccagaaggagggcattttgttccaaactggggtgcgctaggccacctatgaggagttcaccaagaccctccctgagaatgactgccgattcgcggtgttcgacttcgacttcaccaccccggaggatgtgccaaagagcaggatcttctatatcttctggtccccggacaccgcaaaggtgaggagcaagatgacgtacgcgagcaccaacgagaagttcaagaggaccctggacggcatccagatcgagatgcaggccactgaccccagcgaaatcagcctggacgtgatcaaggagcgcgcgcactaaggcaaatcatcccaatgcctcgcaatatggatttatgtcaaatatagatttggcggtgtgactcttgaaactctcttgatgattt

SEQ ID NO: 4178 - DNA, 404 bp, Triticum aestivum
  unsure (1)..(404): unsure at all n locations
  Clone ID: uC-tsro9316089f03b1
ctgctaactccagagaccgagcgaggaaagttgcggggggatacctgagagtcagggagatatggctgggattggtcctatcaggcaggactgggagccgatagtggtgcggaagaaggcgcagaacgccgccgacaagaaggacgaaaaggccgtcaacgctgcccgccgctccggcgccgagatcgacaccaccaagaagtacaacgctggaacgaacaaggctgcatctagcggaacttccctcaacaccaagcggctcgacgacgacaccgagaacctttcccatgagcgtgtttcaagtgacctgaagaaaaaccttatgcaagcaaggctggataagaagatgacccangcacaacttgctcagatgatcaatgagaagccacaggtgatccangagt

SEQ ID NO: 4179 - DNA, 393 bp, Triticum aestivum
  unsure (1)..(393): unsure at all n locations
  Clone ID: uC-tsro9316089f04b1
gcgttgcatactactcctggcgannacttcgncggccgggcgtcaatccacgagcagaacacgtcagcgccggcggctaaaccgggcttcttggccaaattctgtccatgcctcgccggcggtggagccaccagctagaccgacaagcccagccaccgtgcgccgtgcgcgtgaccacgggaggatttgaagtggaatcgggtccatgagtctcaattctgtattggaactgtgcgagttctcttcatctttggaagctctgctctgtttttcttgctttctctagcatttgattcctgcgtattcattcgtgtaatgccgacagacgtaaactcgaccaaattgccacccgtccatgtgaaatgaaaatgatgttgatttggtcaattgtat

SEQ ID NO: 4180 - DNA, 545 bp, Triticum aestivum
  Clone ID: uC-tsro9316089f05b1
ttcatacctaaacgaaatgaaaaaataaaggtagcgcacaatgcactcactctctctctctctctctctctctctctctctctgatatgatattacagcctactagtatacagaaatgctggagctccagcttgacaacgatcagttgtcgcagaaagcgcggagggtttcgtccagggctttcctgtcgtactcgccggtgaaaacgcagcctcccagaggtcctttcagaaggatgagcctcaacaatccgtccgcgaccttcttgtcgaccgccatgatgtttctgaacttctctaccgtcatgccctttggtggtgtcacgggaagcttggcttgatctagtatgtcaaatgtccgtttcttgatggactcgtctatccagcccaggcggtaagacatgtcagctgccataaccgttccagcagcaacagcctccccgtggagccattctccatagccaagccctgtttctatagcatgaccaaatgtatgaccccaggttagtgtgctcgaagaccactttccttctcatcctgagcaac

SEQ ID NO: 4181 - DNA, 507 bp, Triticum aestivum
  unsure (1)..(507): unsure at all n locations
  Clone ID: uC-tsro9316089f06b1
gctttgattttcgctgaagcttctgctcaggcatgtagcttctaagacagtggctcctaacgtggataagctggttgcccttgttcaccgtcctaatgaatcgttcttccttgctccccaggcagacaaagttacggttgtatacccaatgaggttccaggattcgattgatatcgtcttggcaacttcgtttctgcaggaatttgtagaagcaaggcggactgctgcacttaacaatgccccttcctgtatgtggtctccagtaccacctcttgagttaaaaggcgtgaatgctgatgcacttgatgcaaatgctggttttgttacttttgttgttttccctcggcatgttgagggtagaaagctagacaaaacagtttggagtttgttaacctttcatgcttatgtaagctaccatgtaaagtgctctgaaggattcatgcacaccangatgaggcgtacagttgagtctctgatccaggccttggaccgttgctaatccgatgc

SEQ ID NO: 4182 - DNA, 427 bp, Triticum aestivum
  unsure (1)..(427): unsure at all n locations
  Clone ID: uC-tsro9316089f07b1
cccttccttacgtccgccacgcgaccggagaaanggcaggactttagtctacacggcggtcattcttctatgaacgtgctgggaaggtgcaatgtcttggcagtccagaccggacaggcagtgtcacaattgttggcgccgtctctcctcctggaggagatttttcagatcctgttacctctgcaaccctcagtattgtgcaggtcttctggggactggataagaagctggctcaaagaaagcatttcccatctgttaattggctcatttcttactcaaaatactccacggctttggaaggatactatgaaaagttcgaccctggctttattgacatgagaacaaaagctcgtgaagtgttgcagagagaggatgatctaaacgaaattgccagcttgttggaaaagatgcactgggagaatctgac

SEQ ID NO: 4183 - DNA, 482 bp, Triticum aestivum
  unsure (1)..(482): unsure at all n locations
  Clone ID: uC-tsro9316089f08b1
cctacatgcgaccgcagccctgaaatccccatggcctggtttgtatacctcctctctcccgtccctctccccctctctcctccctagggttcgggtctctcctcccccgtcgccatgatgcagccaccgccgccgtcgcagccgcagccgggcatgggcgcccccatgcccccgcagggcgcgggagggcagccgccgcactggggcgcgatcccgccgccgatgccgcactacgcgcagccgcccccgcagcagcagccgccgccgcaggcgatgtggggccagccgccgccccaggccgcgccctacggccaggtgcccgccccgcagcagtactacgccgnngccgaggcccccgccgcccccgccgcctnggacgaggtcaggacgctctggatcggggacctccagtactggatggacgagaactacatctacagctgcttcgctaacaccggggagttccagtctgtcaagcttat

SEQ ID NO: 4184 - DNA, 366 bp, Triticum aestivum
  unsure (1)..(366): unsure at all n locations
  Clone ID: uC-tsro9316089f09b1
ccctgcgttcggcncgcccaanaaaaaaaaaaaggggggttttaaacaaagagggccaaatttatagcgacccaagaatagaaatagggatacaaaccacatacaaataatattacaagcaaaaaagtagaagaacgttaataagcaggaatagccagtaccagcctaaatacttttattaactgtacacttctgtttctggttttattttttccaataccttctcagcatcaataaagccccctaaggggcccaacggggtatattttacttgcctccaactgggtataaatggcagtgccaggcagtgaagatggaggtgatcaatactataaaatggtggctgatgaaaaccaaatctatgtt

SEQ ID NO: 4185 - DNA, 366 bp, Triticum aestivum
  unsure (1)..(366): unsure at all n locations
  Clone ID: uC-tsro9316089f10b1
ccctacataccctcgccgacacgccgccgacaccaccggagttagataagagaaacaacgattgagaacaactcgncgggagggctcgagatctgtgttcggagaggggaattcttgaggtcggaatcggaacaagcgggcgcgctcgggatcggggttaccatacaatttttcccaggaacctttagtgaatgtgctaatggagtcaaagggtggcaaaaagtctagcagtagtagttccctgatgtacgaagctcccctcggctacagcattgaagacgttcgacctgctggaggcgccaagaagttctctgctgcatactcgaactgcgcgaagaagccatcctgatatcgtatttgcatccc

SEQ ID NO: 4186 - DNA, 391 bp, Triticum aestivum
  Clone ID: uC-tsro9316089f11b1
gtacacacccacgacggagaaccgaggacgattaagttccttggatcgttcatttcatggactctcatcattgatgttgttgaagaggatacaccagttgaggaaaaagtcattgagattatatgcaagaagctgccaaaactgcgggtactagccgttgctttcagcaagaaacatcatggaatcaggaaacccaataagttctcggtcccaacatctattgctcagttaaagcacctacgctatcttgctttcaagacataccactcatgctttgtaactttaccaagaacactaactaaacttcaccatatccagctgctagatttttacgagggcctaatgttggaattcccctttgctgaccgtgtcaacttgcggcacatgttct

SEQ ID NO: 4187 - DNA, 519 bp, Triticum aestivum
  unsure (1)..(519): unsure at all n locations
  Clone ID: uC-tsro9316089f12b1
tccatgcgtccgcagcgagatcgtgccggacacaggcgttttctatgattttgagaagtttgcaccgacggcggccaccgtgagctcttcactgttgcttgggatcgcagggctcccggataccaagttcaagagtgccatagataccgcattggtagatggtgaatgtaacacaatggagaagcccggggaccggatgtcctgttaccttaccaaggccctggggaatgttggagctgagctggctcatcaagttcctggaagagtgtccacggaaatagatgctcgattggcttacaatacccaaggaatcgtccagagggtgcatgaactgttgcagatatacaatgaacatgatatcccatcagaacgtctgttattcaaaattcctgctacatggcaaggtatagaagcgtcaagattactngaatctgaaggaactcaaacacatctaacattcgtttacagttttgcacaagcagcagctgcagcgcaagctggtgcatccgtcgtacaaat

SEQ ID NO: 4188 - DNA, 356 bp, Triticum aestivum
  unsure (1)..(356): unsure at all n locations
  Clone ID: uC-tsro9316089g01b1
cccatgcgttcggcagcggcgaccgcgcccatcacggccaccacccgcctgacggagcccttccctcccatcggcggcggagatggtggggtggctcaaggcgctggtgtacggcgcagggggcatggcggtggtgggcctggcggcgctggtggcgctgcaggagcgcctcgtctacgtgcccgtgctccctggcctccctcgcgcttaccccatcaagccctcgcgcctncgnctcatctacgaggacgtntggctccgggccgccgacggcgtgcgcctccactcctggttcctccgccactctcccacctgccgaggtccgaccattctgttctttcaggaaaatgccggca

SEQ ID NO: 4189 - DNA, 398 bp, Triticum aestivum
  Clone ID: uC-tsro9316089g02b1
aggctgaggcagcagaagcaccatggattccctgtgtcactcctacgtcattgtccttgtgctcctattcattggaggatccgatgccaacccagccgcccgtcgccacagtcagctggatgtaaaccacaagaagcagccactacagacattcaggccttacaacattgcccacaggggttccaatggcgaaatacccgaggagacagctgcggcatatttgagggctatcgacgaaggtgcagacttcattgagactgatatacttgcatcagaggacggtcatctgatatgtcttcatgatgtaacactggataacacaaccgacatcgccagccgtactgagttcgctggcaggaagagacctatgaagtcagggagtaatatgactggttggt

SEQ ID NO: 4190 - DNA, 321 bp, Triticum aestivum
  Clone ID: uC-tsro9316089g03b1
gccgtcgatgacttcgctctgtagcagctctcgcgcggatcataccatatggcgacggctatccaccagctctccttcgccgcgccgagcgcgggcgccaggcggcggctgacccgggcgtccgcgtccgcgacggaccggcacgaggtgctgtcgcccaagcgccggctgccgctgcggaaagtgccgggcgagcacggcccgccgctgccgggcgcgctcaaggaccggctggagtacttctacgggcccggcgggcgcgacggcttcttcgcggcgcgcgtccgcgcgcaccgctccacggtgggtgcgcctcaaaca

SEQ ID NO: 4191 - DNA, 453 bp, Triticum aestivum
  Clone ID: uC-tsro9316089g05b1
cggacttcgtgggtacagtatttgttcgagtgcttccgacattgtgcttacggagccatgtctcagtgtcattatcagtgctgtcctgaccagcaggtgcattttccagaggatgaagaactacacgatctatgcagtttccatcaccatccgtattgtgcttggctttatgcttattgccctgatctggaaatttgatttcgctcccttcatggtccttatcattgccatcctcaatgatggtactatcatgacaatatccaaggacagagttaagccatctcccttgcccgacagctggaagctcaatgaaatcttcgccactggtgttgtgctcggaacctaccttgccctgatgactgtcgtcttcttctgggttatccacaagacggacttcttcacaaacaaattcggtgtcaggtcaatcagagacagtgagtttgagatgatgtc

SEQ ID NO: 4192 - DNA, 447 bp, Triticum aestivum
  Clone ID: uC-tsro9316089g06b1
ggatttggtccgctgaaactgctgcgagtagcttggttgttgtcaagtggaattaaccctgtttgcgtgcgctcttacagtttgattgagaaactcatattttcctgtagattgggaaggatgtcgagtacctcctggtggcaaagctttctgcagcagtttagtattgttcccaaattgttcagatccgaaggtgttgccatttatgttgcgcggcttgcttgcattggtttctcctcaacctgaactgaacacattttctttcttcagtgtgtaatggagaaaggaaatggttgataaaaccaagaggcacagacagagatgtgctgcatcagagtacttctctagattggtgcgctggaaatgttcaacgatctatgatcgactgcattgatcaaaaagaagagaaaaaaaaacagggactcagcagctgcttggaatctgctc

SEQ ID NO: 4193 - DNA, 482 bp, Triticum aestivum
  unsure (1)..(482): unsure at all n locations
  Clone ID: uC-tsro9316089g07b1
gattgatatctccaatnaaactccacgagacggggccaaattgtgacaccggagcagtccagtcccaaatcccccttttcggccggccacgacctcttcctccacaaaatcctccccggaattccgccgagtccccggtagccggccgccgatcggtcgattcgcggggggcgggatgagcttccaggacctggaggccgggaacggcgtccgtgggacgccgcggaggaacggccgggcggcgggggccggcgccggctcgtcgcaggccgtcgcgtcgggcgtctttcagatcaacacggcggtggcaaccttccagcgcctcgtcaacacgctcggcacccccaaggacacgcccgacctccgcgataggatacacaagacacgagcacacataacacaactggtgaaggatacatcngagaagcttaagcaagctagtgaggcggatcatcgtcttgaagcacccctaccaaaaagat

SEQ ID NO: 4194 - DNA, 297 bp, Triticum aestivum
  unsure (1)..(297): unsure at all n locations
  Clone ID: uC-tsro9316089g09b1
tacattcctaccccgaccccnggnccgaccggggggggtttaaatgaaaaagggggtttcttcactccccgcgcatnctaaccttcgcccttcttcttccccatttcggcaggggggcagcccaccaaccacccccacccggcgccatgagggagtgcatctcgatccacatcggccaggccggcatccaagtcgggaacgcgtgctgggagctctactgcctcgagcatggcattcaacctgaaggccagatgcccggtgacaagaccgcagggggaggtgaagatgctttcaaca

SEQ ID NO: 4195 - DNA, 464 bp, Triticum aestivum
  unsure (1)..(464): unsure at all n locations
  Clone ID: uC-tsro9316089g10b1
ccttaaatatgaggaagcgaggcggatctttctggcaaggttatgtaaatgattatgatttttaggataagataaatttcgctgtattcccttcactgcaaggagggccgcataataaccatattgctgctttagcgataacgctgaagcaagttgcgacgcctgaatataaagcatacattcaacaagttaagaaaaatgctcaagctttggcatcggccttgctcagaagaaaatgcagattggttactggtggcactgataatcacttggtgctttgggacctcagaacttttggcttgaccgggaagaactttgagaaggtctgtgagctgtgccacatctctataaataagacaccgatatatggngataatggctcaatatctcccggtggcgtgcgtattggaacaccttgcatgactactagagngtgcctagaagatgacttcgaggtgatcgca

SEQ ID NO: 4196 - DNA, 442 bp, Triticum aestivum
  unsure (1)..(442): unsure at all n locations
  Clone ID: uC-tsro9316089g11b1
ttcgctgccgcagccgccacctcctccgcaggcagcccactgcgaagcgaggtcgaataagccatggcagacgccaaggccacgacggcggtcaccctccgcacccgcaagttcatgaccaaccgcctgctcgcccgcaagcagttcgtgctcgaggtcatccaccccggccgcgccaacgtctccaaggcggagctgaaggagaggctggccaaggtgtacgaggtgaaggaccccaactgcatcttcgtgttcaagttccgcacccacttcggaggcggcaagtcctccggattcggtctcatctacgacaacctcgaatctgccaagaagttcgagcccaagtaccgcctcatcaggaacggccttgctaccaaggtagagaagtcacgcangcagatcaaggaaaggaagaacaggacaaagaagatccgtggtgtga

SEQ ID NO: 4197 - DNA, 484 bp, Triticum aestivum
  unsure (1)..(484): unsure at all n locations
  Clone ID: uC-tsro9316089g12b1
ttgcattgtcgactacgccactggcattaccatccatggttcctacctcattgattagccggaaagtctctacaagatggccagatgataacaacttctatgaggccactataacccgttacaatcctgctacaggcgaacatgctcttgtctatgacatgggcaaaacaactgagtcatgggagtctgtcaggctttgtgatatgagacctgaagatataagatgggaacgtgatgatcaaggcatctcaaatcgagatagttggggcccttctggtccattgttgaacaggaaccaaaacaacaatggtagagggagactatctcagaatgagcatccaaataaatatggtccacctcaaaatggcatcaacaggaatattggtgaaattgacgtgcctaacactcagagtgtcntgattgaggtggagagggtatngtcaaatccaatatgcatgaaattgaaagggcaaagaactgctac

SEQ ID NO: 4198 - DNA, 148 bp, Triticum aestivum
  Clone ID: uC-tsro9316089h01b1
cggtcactccactctccactcagctcttctctcgggcgcaattcttcctatccgcctcggctcgggctccatctccaaggattctgttcccgagtcgtacgtgatcctgctgaagcgtgagctcgagccacagccacacaggcaggat

SEQ ID NO: 4199 - DNA, 202 bp, Triticum aestivum
  Clone ID: uC-tsro9316089h03b1
gtcatagcttcagatttccttccccatggctccgagcaagatctgcatcaatggtttcggccggatcggcaggcttgtggccagggttgcgctccagagccccgatgtcgagctcgtcgccgtcaacgaccccttcatcaccaccgactacatgacctacatgttcaaggatgacactgtccatggacagtggaagcaccat

SEQ ID NO: 4200 - DNA, 359 bp, Triticum aestivum
  Clone ID: uC-tsro9316089h05b1
gccatgcgttctgcacttggctacactcattggcacggagattgatagggtgaagtgccccttttacttcaagagcggagcgtgccggcatggggaccggggctaccggctgcacaacaggccaaccacatcggcaactatagtgcttgctaacatgaaccagcggcctgatatgaggacccctggagtcgatgcccaaggtgtggctattgcaccagagaagaagcaggagcactacgaggactactatgaggatatctatgcagagctgaacaagaatggtgaggttgagaccatgaatgtgtgcgacaaccatgccgaccacatgacagggaatgactctgtgcagtgcacggagg

SEQ ID NO: 4201 - DNA, 518 bp, Triticum aestivum
  Clone ID: uC-tsro9316089h06b1
cggttgcgtgggcgagcacggagcacgtgatgaagggcctgtttgagtcggccaagacgtacgtgaacgcggcgcaggcgtacgtgcacgtcaaggatgtcgccgaggcgcacgtccgcgtctacgaggcgcccggcgcgcacggccgctacatctgcgccgagggcaccacgctccaccgcggcgagctctgccgcgtcctctgcaagctcttccccgagtaccccgtacccaccaagtgcaaggacgaggtgaacccaccggtgaaagggtacaaattcacgaaccagaggctcaaggacctggggatggagttcgtgccggtgctgcagagcatatacgagacggtgaagagcctccaggagaaagggatgctgccggtgctaccgccaggcgacgacgtccgagacaacctgcatgagcagctcatgatgaagcccgcccagttgctacgtaattaattatactctacatttggtagggatatatgctgtcggctagttaattctatgggacat

SEQ ID NO: 4202 - DNA, 51 bp, Triticum aestivum
  unsure (1)..(51): unsure at all n locations
  Clone ID: uC-tsro9316089h07b1
tttctctcaccgcaangacgcggcgcgccngggccgggatactacacggac

SEQ ID NO: 4203 - DNA, 219 bp, Triticum aestivum
  Clone ID: uC-tsro9316089h08b1
tactctcgtacgctcgcccggagcgaaaccgacgcgacttcgttaggggaaaggctcccggtgttggcagggattccgcctcttatacgcctgcccgcctcgccagattcctcacagcttccctgccccgagcggagatcctgaactccggaggccgacgtcgggggttagattcggcggccatgtcgggcgccgcgctggtcgccatagcggcgtcca

SEQ ID NO: 4204 - DNA, 261 bp, Triticum aestivum
  unsure (1)..(261): unsure at all n locations
  Clone ID: uC-tsro9316089h09b1
tcacaagannaaggaccaccaggagagcattaagatggaganggcgatcaaatacaacgaccctacctacatgatccgagctattccgagtaatgcagcagacaatgtctactgcacactgctggctcacagtgccatccatggcgcaatggcgggatacagcttcactgctgggatggtcaatggcagacatgcctacatacctttttatagggtgacgtccacacggaacaagggtaaagatcactgaccggatgtggg

SEQ ID NO: 4205 - DNA, 520 bp, Triticum aestivum
  unsure (1)..(520): unsure at all n locations
  Clone ID: uC-tsro9316089h11b1
ttccatcgtccgcgaccggcgacctcgcttgcaccggatcaaccagctagggtttcgtcttcgtcgccttctccgcggagcttggagttttcggcgagatgttcgggcgcgggccgccgaagaagagcgacagcacgcgctactacgagatcctgggcgtgcccaaggacgcgtcccaggacgacctcaagaaggcctaccgcaaggccgccatcaagaaccaccccgacaagggaggcgacccagagaagttcaaggagctagctcaggcttatgaggttctgagtgatcctgagaagcgagagatctatgaccagtatggtgaggatgccctcaaggagggaatgggaggtggaggaatgcatgatccttttgacatcttccagtcattctttggtggtggcggcaaccccttcggaggtggcgggagcagtangggcaggcggcagcgcangggtgaggatgtggctcatcctctgagggtaagcctgaggaactgtacacggacatcaaagagctc

SEQ ID NO: 4206 - DNA, 512 bp, Triticum aestivum
  unsure (1)..(512): unsure at all n locations
  Clone ID: uC-tsro9316089h12b1
tcagtaccgagcaggacagcagggctgcatgcgngtttttatttcgcccacatttagagcggaggctgtagccccggatgtcgtcggccgggagggcgagggccgcgagcctggcggcggtggcggtgcggatggtggtgggggcggcagcgcggcccgcgccgagcgcggcgctgatgatggcggcggtgcggggggaggacacggagttcgggacggcgtcctggtgggcgtacgcggccctgtccgccttcctagtgctgctggccgggatcatgtcggggctcaccctgggcctcatgtcgctcggccccgtggatctggagatcctcatgcgcagcggcaccgacgccgagaaggcccaggccgctgcgatccttccggttgtaaagaagcagcaccagcttcttgtcactctgctgctgtgtaatgcttgtgccatggaggctctccctatattccttgacaggattttcaatcctgttcttgctattatattgtcagtgactttt

SEQ ID NO: 4207 - DNA, 507 bp, Triticum aestivum
  Clone ID: uC-tsro9316090a06b1
cccgcctatcatggtgggttttccttaagatgcacttgcgttgcgcaccgcacaaggtgggactgcttctcggccccttctagatcagccatctgctgatccatacacagcggctttcacgaaactcagcgtgctcgctgagcaaagaggggatgcttatgcaaacgccgatgtaagggttcctcttgaagagcttgcagctaaaaagggccatgatgacgtctctcagctaaccccaactgatattgctgtcgaggccctgcaaaagattaagaattttgccactgagcattccatggccagtggcccattcgacgacttataaattgccgccaggagaccaacaatgcaatccttgtaggatttcggcccaattttgtttgtaccgtgtatcttcatttttgtttcgctcaacattattgattcattctttatactgaaaaaggagctgtgctgaagcatgctctgaaacataaaaaaatagcggattgagctaatgttaagagc

SEQ ID NO: 4208 - DNA, 376 bp, Triticum aestivum
  Clone ID: uC-tsro9316090a07b1
tatcttctccttgctgtgggtccgtgttgatccattcactacccgtctcgctgggccaaatatgcaaacctgtggcatcaactgctaggaaagggggagtttgtagagacagaaaatataacagtgatcgagcaacaacccgcggagccagagaatatttatgttggggttgtgaattactacgttcgagaaagctgtcaaaattgagaaaacacatttggaaatagatgtaatagaccatctaccgttttcatgaggttaagctcttttttttttggaacaaaggactctcattggtaaacctataggaattttgctatgaggcactttggattggaggaatggacctatgaaatggcggatctaattattatat

SEQ ID NO: 4209 - DNA, 129 bp, Triticum aestivum
  Clone ID: uC-tsro9316090a09b1
aaaaaagaaaaaaacccacacatagacctccccttgggggggcccgttcttaagggccaaagctagcatccccggggtgggccctaataccaccttcaatagggtccccaaaaccgactgtcaccggcc

SEQ ID NO: 4210 - DNA, 429 bp, Triticum aestivum
  Clone ID: uC-tsro9316090a12b1
gatatgacagagctggggatgcgttcaacaaagggtaagtctatgttcgcaacgttcaagcagtgtgcgcggtatctcagtcccctgtttgagttctgcaggaagaaggttcttcctgatgacatccgcaaagcattgctctttattgtggactgctgcatgaagcgtgattatttgcaagcaatggaccaatacatcaagctggccattggcaacgcgccatggcctattggagtcactatggttggtatccacgagcgttctgcacgagagaagatttacacgaatagtgtggctcatatcatgaacgacgagaccactcgcaagtaccttcagtcgatcaagaggcttatgaccctttgccagcggcgttatcctgccctgccctccaaatcagtggagttcaacagcctggcaaatgggagtgac

SEQ ID NO: 4211 - DNA, 227 bp, Triticum aestivum
  Clone ID: uC-tsro9316090b01b1
cttgcaactgtggatccggttgcagctgcggctcagactgcaagtgcgggaagatgtaccctgatctgacggagcatggcagcgccgtcggccaggtcgccgtcgtggtcgtcctcggcgtggcgcctgagaacaaggcggagcagttcgaggtggccgtcgggcagtccggctagggctgcaactgcggcgacaactgcaagtgcaacccctgcaactgtaaagct

SEQ ID NO: 4212 - DNA, 332 bp, Triticum aestivum
  Clone ID: uC-tsro9316090b04b1
caagaacggtataatgggtgctgccggatcggtaggcttgtggccagggctgcgctccagagccccgatgtcgaactcgtcgacgcgaacgaccccttcatcaccaccgactacatgacctacatgttcaagtatgacactggccatggacagtggaagcaccatgaagttaaggtgaaagacttcaagacccttctcttcggccagaaagaggtagctgcgccagggtgcaggaaccctgacgagatcccatgggctgctgctggagctgagtacgatgctgagtccaccggtgctttcactggcaaggaccaggctgcagctcacattaa

SEQ ID NO: 4213 - DNA, 100 bp, Triticum aestivum
  unsure (1)..(100): unsure at all n locations
  Clone ID: uC-tsro9316090b05b1
gagcatattgggagggggggctatatcaaaaatgtcctttactgcccaccanggaccatgacttcttgatagaagatttgagacgttggatattttgttc

SEQ ID NO: 4214 - DNA, 271 bp, Triticum aestivum
  Clone ID: uC-tsro9316090b06b1
ggaagccggcgtgggggagtgttgttcagctcatgcccgccttcatcggccacacgctcgtcgacaaggtgctcagctccaagaccgtcctccagaaggcccgcgccgctggcggccccggcccagccgccaagcccaccaggatcgccgagtgcctgatcggcgacgagaccggctgcgtcctcttcaccgcccgcaacgaccaggttgatgttctgaagcctggcaacactgtgattattccgcaatgcaaagattgctatgttcaaag

SEQ ID NO: 4215 - DNA, 257 bp, Triticum aestivum
  Clone ID: uC-tsro9316090b08b1
caccgtccttcccgaggggctcatcgaattccctctgccttattctagccgaaccgggacattaatgtgttcatggcgaaccgcagccggatccgtcagaagatggtcgagttcgatgacaactacaagctgggagacctctatgacatgaggatctccaaggaggtagctgtggatcttctgggtgaggtattcaaggtgactatctacaagatcatgggcggatgtgactagcaggagttctcgcagaatcatgg

SEQ ID NO: 4216 - DNA, 266 bp, Triticum aestivum
  unsure (1)..(266): unsure at all n locations
  Clone ID: uC-tsro9316090b09b1
tttcaagttgtaccatgcgcattctttagttatgtgttccgttctctcccccnnttttttggaatcttcagtggagcatatagcttggcatatcaaaaattatagagtactaattagcacatattcttccctctttatcttttctctcttctctcttatgttttctttctctctcatctctcttttctctcttctatcttaccccctttgtaaaaaaaacattaggtcaaatttggacctaaaaacttcagaatgatgattatctg

SEQ ID NO: 4217 - DNA, 278 bp, Triticum aestivum
  Clone ID: uC-tsro9316090c03b1
ttggttcttgaagagctgctctaattggaggagtctttcattacaacccggaggctttaaagctactgcacttcatgtagttaggatcaattctctgtttcagtttgaaatattccccatttcctcctatttgattgattcatctgatggacattttgtcaggcaaataaacaaaaggcatatgtattgttacgagtgaagccatccatactcccatgtggaattcaagaaatagagaaatgttattgttctacgagaacatactgtggacgtccaac

SEQ ID NO: 4218 - DNA, 296 bp, Triticum aestivum
  unsure (1)..(296): unsure at all n locations
  Clone ID: uC-tsro9316090c12b1
cgcgtgggtcggtggagggggtcattaaagatgttttttgtttacaaaacatnaaagagagggatgagaagaggaagctcgcaaggaaatcagtgttgagactgaaaatggatcttcaactagtatcctggagagatgcaatgatatctcccaactcccttccaagatgaggccttttttttgacaaaaatggtggtgtaagaatagatgtgaggtttgtgttgtttattcttgatatcggcggattgagatattgtattacgggtcccttttaatgtctcgtgcttttgtctttc

SEQ ID NO: 4219 - DNA, 203 bp, Triticum aestivum
  Clone ID: uC-tsro9316090d11b1
aaaaaaaaaaagaaagaaaaaatacaacccccaaaaaaaaaagaactggccagtaaaccaagatcataaaaaaaaaaaaggggggggcgtttccaggataccaaattttactccgcggggtgaacaatattattccttttttaaggggcccctaaaataatacctaggggggcattttacacaccatcgcggggggaaaaacc

SEQ ID NO: 4220 - DNA, 361 bp, Triticum aestivum
  Clone ID: uC-tsro9316090e04b1
acgctgtccagggcagggttaatctgggctgatcttgctttcctcccacagatgaaaactttgttctgctcatgttcatttttcttggctgccattgtgacggctttgtagctcaggtaggaaggggggagtgacacggccgttgaacgggagcaaaggagtgtagctggttcgtcagattcggatcggtccgtgtaggcgcttgtgtattttgtatatggcgtttttcgtatgtgcaggtgagtctgggggatatatatacatcaggggattggattattcatggatgtttggtgcgatgatgaacaataatgtgacgattctttgtagggtaattggaagaactgtgatgttcttgtgc

SEQ ID NO: 4221 - DNA, 330 bp, Triticum aestivum
  Clone ID: uC-tsro9316090e05b1
aacgggccaagccaggcggactggattctggcttgcgctttttaaacccccctggcacatcggcgtagcctatgatgatgccaaattttcgtgtaaactgtggtaactgccgtcgtcgaattacccaccgttgaccttggttgtggtggatgttgtatgtttgggatgtttggcccaactccaacctcaccctggtgggtgaggagtagatgctaactatggcaaagcaagcgtatatggaagggaacgggtgttccagatccacccagttaaacttgttgttgtgcaaggagcagtcttcatcttgggcgttgcttactcttttaattt

SEQ ID NO: 4222 - DNA, 101 bp, Triticum aestivum
  Clone ID: uC-tsro9316090e06b1
gcgggtggacccaagggtttttttgaaatctttccacggtttcccccacctataggggcaggtgaaatcaatggactgtgcgtcgtccaacgtcgacatgt

SEQ ID NO: 4223 - DNA, 447 bp, Triticum aestivum
  Clone ID: uC-tsro9316090e09b1
tcaacgccctaggacgcaccttctccgacagggagacgctcgggggcctcatcgccgcctccgtcttcgtcgtcttcctcacgtctgtcggtgggatcatcttctccgcgctggcgctcggcgccgccgtcgtctgcgcgcacggggccttccgcgtgccagaggacctgttcctcgacgaggtgcccgaccagggtctcgtaggaaacggcgccaccctcaacctcctctccttcatcaacggcgctgctggaggaggaggacgcgtctgagccagcctcatgtcctcagctctctgatctgctacgcggaagagacaagtaaagtctgtggctggttgattcgctttttcagaaacgaaatacttttacttgtttgagatcgtactacgcgttgtctttaggagcgtgaggaggagattagaagaggatgcattggagttatact

SEQ ID NO: 4224 - DNA, 299 bp, Triticum aestivum
  Clone ID: uC-tsro9316090e11b1
gggcgtgccggggggaggaatatcttggagatttattttggtacctcccagaccatccacgttgaggatgcgcagggccaccagtttgccacccgtctgggcaacgtgttcaccatcggcaagggcaccaagccgtgggtgagcctccccaagggcaagggtatcaagctcaccatcattgaggagcagaggaagcgggatgccgctgcccaggctgctgccaaggcctgattctgaggcgttgagtcgttttgctatagccagttatcttcaaggatatagacctatatcgctagcac

SEQ ID NO: 4225 - DNA, 499 bp, Triticum aestivum
  Clone ID: uC-tsro9316090e12b1
gccgcgtccgcccgctggggttttctaaaagtctgctccgttttgacccgcaagagattcagggagttgggccagaacaaggttgtccttgccaaggtgtcgccgcggtgcctcgccgtccgggccaaaagctggtccgactccgcccaccgcttcttgcagcgctgcgcggacgccgggaacctcgacgcatgctaccttcttggcatgatccggttctactgcctggggagccgggggtcgggagcggcgctgatggcggcagcggcggtgggtggccaccgggaggcgctctactcgctggccgtcatccagttcaacggcagcggtggcagcaaggacgaccgcgacctccgcgcgggcgctgcgctgtgcgcgcgcgcggcgtcgctcggccacgtcgacgcactccgcgagctcggccactgcctttaggacggctaccgcgtgcgccgctccttgctcgacgggcgccgcctcctcattcaggcgaacgcgc

SEQ ID NO: 4226 - DNA, 210 bp, Triticum aestivum
  unsure (1)..(210): unsure at all n locations
  Clone ID: uC-tsro9316090f02b1
gcctcctcgccgccagcgcnccgaggaggagaagggggggctcaaacaacacaagcgcccccacacccgcaagcagcgcgagcaggcgccgcaaccggaggcgaacgctgcgccggagcctgccgagaacaagagctccgccagcggcaagaacttcagctcctaccaagcgctgggtggccacaagacgagccaccgggtgaagcagcc

SEQ ID NO: 4227 - DNA, 201 bp, Triticum aestivum
  Clone ID: uC-tsro9316090f03b1
gccaaggcggggcgggtcatcatggagctctacgccgacaaggtgcccaagacggcggccaacttccggcagctctgcacgggcgaggccggcctgggcaagagcggcaagcctctgcactacaaggggtcggccttccaccgcatcatcccgggcttcatgtgccagggcggcgacttcacccgcggcaacggcaccggc

SEQ ID NO: 4228 - DNA, 457 bp, Triticum aestivum
  Clone ID: uC-tsro9316090f04b1
gccgccgcggcggaggcaggaccgtgtacaccaccaccaccgacgagtgcttcgactccgtcaggcccgggtatgggcagggccacggctacgggcacaacaacggtggggccatgccgtacaccaccaccaccaccgagtccttcggcggaggcgagcaggggcaggggtactacaagaaggaggtgacgcagcacaagaacagggagcgcgtcggcgaggccggcgccctcgccgccggtggcttcgccctgtatgaggggtatgaggcaaagaaggacccagcccacgcgcggaagcaccagattgaggccggcctggcaggggcggcggctgtcggagcaagcggctacgcctaccacgagcaccgcgagcagaagcagcccggctacggcgggaagcaggagtacaggatgcctgttcacaacagctacagcaactaagtaatcatgcatgc

SEQ ID NO: 4229 - DNA, 452 bp, Triticum aestivum
  unsure (1)..(452): unsure at all n locations
  Clone ID: uC-tsro9316090f05b1
gcccgaagcagccggaggggcttaattaagtgttgcttctcttggccaccagcctncgagaagcctcggccgcgaggccgctccggccagccgtcgacatgcctagcgaggtgctcaaggaccaggtgatcgtcaacaagtacgcgccgcttctgctcgccatgctgccgaggggccccgtgacgccgtccggccccagcggcggcacgaacgaggccgggaactggttgagcaagcgcagggtttcccttaggataatagatccatcgatctaaagaaatctttaggcatgcagtggtagacggtatgctctgttttgcagtacaaaatacttgtacatacatgattgttagactgggagacttgggcatatagtgtaggatataccccaaaattataccttcattctttaatttgtcccttgaagtaattgattgaaagagttttgtctt

SEQ ID NO: 4230 - DNA, 493 bp, Triticum aestivum
  Clone ID: uC-tsro9316090f06b1
gcggccgacgtggggggcttcaatggcgggatcgagcattggggcacgcgcatcttcgggccctccgggaagtactcctcccgcgacctcgccgcccacacctccctcaagcccagaaaagagggtcagcaaactcaagaggaggtacagaagaggaatctcagggacgaacttgaggagcgtgagcgcaagcacttctcatccaaggataagtcctatgttgatgagagggaccggcgaaaaagttcgagcctgctcttagaaggttcaaaacgggatgaggataagatagttccacgtgaaattgatgcagacgactctgacgtggagctcaaaagtgatgatgaaagcgatgacgacgacgacgatgatgacactgaggcactcatggcagagcttgaaaggattaaaaaagaaagagctgaggacaggcttagaaaggagcgtcagcaagcagaagaagaggccaagatgaaggaagctgagctgatgc

SEQ ID NO: 4231 - DNA, 144 bp, Triticum aestivum
  Clone ID: uC-tsro9316090f07b1
ttcctccgcgaccggaaacaagccgcagaaggggggtttattaaaaaaagggcatggtttaacgccgggaatgcgaaccaaaaacttgaaagcaaatgtgacaatcatctatagttcaactgacaatcgtttggcttcagactg

SEQ ID NO: 4232 - DNA, 480 bp, Triticum aestivum
  Clone ID: uC-tsro9316090f11b1
gagagcagccagtaggctgctttcgttgagaatcatgtgtggtttagggaccgcgcggggccgcctcgcggaggagcgcatggcctggcgcaagaaccacccccatggattcgtcgcgaagccggagacggtggccgacgggtcggtgaatctcatgatctggaactgcaccatccccggaaagcaggggactgattgggaaagtggatactacccacttactctccacttcagtgaggactaccctagcaaacctcccaagtgcaagttcccgcagggttttttccacccaaatgtctatccttcagggacgggctgcctctcgattcttaatgaggatagtggttggagacctgccatcactgttaagcagattctagttggaatacaggatttgcttgatcaacctaatccagctgatcctgcccagactgatggttatcacctctttatccaggatccagcagagtgcaagagacg

SEQ ID NO: 4233 - DNA, 180 bp, Triticum aestivum
  unsure (1)..(180): unsure at all n locations
  Clone ID: uC-tsro9316090g02b1
ctttcgttagaaacagnangcagacagagngccgggcagggttgcttagagnacaatatcatataccacacgaacaagtggtgtatttgttatcgaaaccttgtcttctatatggtccaaaaatatttagcaaagaagaaaccactacagacagaaaaagcataagacagaagccccacc

SEQ ID NO: 4234 - DNA, 440 bp, Triticum aestivum
  Clone ID: uC-tsro9316090g05b1
tattttcctcctttggggtgctcaatgaacttttcttctcttttgctgcacttagatacttgtgtagagatatacatcgagatggacaaccctccgagtacgcaggacatgtcctactatgatcatgttcagaagcgccatgaggagaaaggctgcttatatgcatgcctgtttacactgtgctgttgcttctgctgctacgagacctgcgagtgctgcatggagtccttgtgctgctgcggctaaatttagctgcacatttctgctgttgcatggagatctggcaggctgggctgtactgtggaaaacccatatcgttttgccttggtgagctggcgaataggcatatgtggctgcttgaataaaaactgtagttacgtctctattgtcatgtatgatgctggtcgccaaaaataagatagtatgccgccggtgtgtgt

SEQ ID NO: 4235 - DNA, 446 bp, Triticum aestivum
  unsure (1)..(446): unsure at all n locations
  Clone ID: uC-tsro9316090g08b1
cgtcccacgcgtctttcttttaaagnngcaaaccncngaaacgacgaaagattttattaacctttcatgttaacgttttcgctcatacagttttctaatctattgacgcttgtttagtttctcatgaattatagttcacgtaaacaatacaaacttcctattgtgctgttgaattgcttgttcactttaattatcaacaagtcatctgattgataccacaataaactgcatcaagatgagacttttcttaactgtctataacgcatggtgtgatgaccattaggaaaactttggcacaggtggaggccgaaggactagtgcttccggatggaacacttgtggtagatggacgacctgttgctgctgtgtatttcagagctgggtatgcaccgactgattacccttcagaagtggaatggagtgcacggcttttgattgaacaatca

SEQ ID NO: 4236 - DNA, 460 bp, Triticum aestivum
  Clone ID: uC-tsro9316090g12b1
cacagacaattcgagccaggcttacatcacccacgtcttcgttttgaggagtcgaagatttgttagcccgctttgttcacagggaaccgtagtttgtacgcccatcggtcgattagccatggccccctgcgattctttctcaagaaaacctaccacccgttggccagatcaggagaactcctgcatgcgcctgctccgtcagcagccgccgccgccgccgccgccgctccggcggccggacctatctcggtcaggagctagttatcgaagatttttgaagaatgttaggctcgtcgcctatggtttgagcttggtgtgggcctttacgctataatctgcatggtcaaaccagcatagatgttcttgcaatggtcgatgtggccattcaaaatcctctaatatgaaaagaggaggtcaagtagtttgaggcggcaatggcctatttttgtaagttttctat

SEQ ID NO: 4237 - DNA, 256 bp, Triticum aestivum
  unsure (1)..(256): unsure at all n locations
  Clone ID: uC-tsro9316090h01b1
aaaaaaaaaaaaaanggaaggaattagaaaaaaaaaggcggtggaaaccccaacaaaaagaaggaaacaacaaccagagccaccccaagagggcgccccagccgagaggaccacccccaaccaccccggcaagacggagaccaacgcggcggaaagggcaaaccaaaacggaccccaaggccccccaggccaaacccgcgagacagggaaaaccccgacgtggaccaccacaaaccgcgagcagaaccgacccccc

SEQ ID NO: 4238 - DNA, 237 bp, Triticum aestivum
  Clone ID: uC-tsro9316090h03b1
gtttggttgcgccgccgcgagacgagcacgggcggtttaattaaatcggacggttagttagaggcatcaagggcctgccaccgctcccggggccgatgtgcgtgtaattcctattaatgtatcttatgttgccaaacaacaacatgctcctgtcaatgctatatcattgtgggcgtggcatttttcttcctcaggtgatattccaatatacaataagttccatcaagaattgcatgt

SEQ ID NO: 4239 - DNA, 498 bp, Triticum aestivum
  Clone ID: uC-tsro9316090h05b1
tccggcactcctacgctgggtttatataagagagcgtgttcgtttcggcggactcgctgaaccccttcatgcacgcgcgcggggtggccttcatggtggacaactgctcgacgacggcgcggctggggtcgaggaagtgggcgccccgcttcgactacatcctgacccagcaggcgttcgtgacggtggacaaggacgagcccatcaaccaggacctcatcagcaacttcatgtcggaccccgtccacggcgccatcgaggtgtgcgccgagctgaggcccaccgtcgacatctcggtgacggccgacgccgacttcgtgcgccctgagctccggcagtcctcctaggctcctcgcccccttgcacctaagttaagtaagctgcgccgggccggtcggggcctggcacgagagttggtttttgatggatggacattcatggactgtaatgtatgtgtgcgactggctgtttgaactcgtgagctgctgctgggtagag

SEQ ID NO: 4240 - DNA, 180 bp, Triticum aestivum
  Clone ID: uC-tsro9316090h06b1
gaaggagcgatgagcacgccggcgtggccgccgcgctggggcgctgctggcatggcggcggcgtcagcgccgtcaactacggtctgagcgtggacagggacagggtagcaaaactgaagtcctactgcacggtgggagcacggaggccagacccagcggcgcgcgctgcaacacggagcg

SEQ ID NO: 4241 - DNA, 274 bp, Triticum aestivum
  unsure (1)..(274): unsure at all n locations
  Clone ID: uC-tsro9316090h08b1
tggttcccacaaccaaccgggngcagaaaaggaaggtttagatcaaacgaacgtgccgttacctgcccctggaggcaagatagacgtatggtcatcaaaactgatcggcttaagaactgaccaggagacagggcttccggctatagctccaaacgaacggctcgtgctgccaggcctagatgaccaatgcggaacctagacgccatacaaagtccgatgaggtacaacgcgtggagaaggccaaccacgaggaggcccaactcaaggaggtcag

SEQ ID NO: 4242 - DNA, 305 bp, Triticum aestivum
  Clone ID: uC-tsro9316090h09b1
cgcaaacaccacggggggggtttattttaaagacagtgttttttctcacacccaagaggtaaggatggtgagagtcagtgtgctgaacgatgctctcaagagcatgtacaacgctgagaagcgtgggaagaggcatgtcatgatcaggccttcttccaaggtcattatcaagttccttatcgtcatgcagaagcatggatacattggcgagtttgagtatgttgatgatcacaggtctggcaagatcgtggttgaattgaatggcaggctgaacaagtgtggtgtcatcagtcctcgctttgatg

SEQ ID NO: 4243 - DNA, 453 bp, Triticum aestivum
  Clone ID: uC-tsro9316090h10b1
gacgcggcgacgggggggggttgtttaaaggacacctacgtttaggaccgcgccaccgaggagcagctcgtcacgccgtggaccgtctctgtcgcgagtggttacaatttgttgagggatccacgctacaacaaggggcttgccttcacagagaaggagcgcgagacacactaccttcgtggccttctgccaccaaccgtcatatcccaggagctgcaggagaggaagatcatgcataatattcgccagtaccagctacctctgcagcgttacatggctatgatggaccttcaagaggggaatgagaggcttttctacaagctcctcattgacaatgttgaggagctgcttcctattgtgtacactccaactgttggtgaggcctgccaaaagtacggatctatatttagtcgtccgcagggtctttacatcagcttgaaagagagggaaaga

SEQ ID NO: 4244 - DNA, 439 bp, Triticum aestivum
  Clone ID: uC-tsro9316090h11b1
agctcgccttggggagggtgaattagaggactctttcgcttacaccgcggcccttgcgcaggtgcatggcatccccacctctgagataagtgtcgtctcgtacaaccagtgtcccggcgcagagccgatgcctacgcttgtgctatcgctcaatggcgatgactgcgcgctcgtgacgcaggcgctcggctcgctcaacgccgtcaatcagaccgctggcggtgtggttgtgggcgccacgaacaactcagtgacgcgcgccaagccctctaagaagagtggcatgccgacttggctaatcgtggggatcgtcctcgccgtcctgctgggcatcgccgcgatcgttgtgttggtggctgtgattgtgaaggccacatctggcggatcgaagccctccggcctggcgcacaggacgcactgggcgacggaggagctttac

SEQ ID NO: 4245 - DNA, 397 bp, Triticum aestivum
  Clone ID: uC-tsro9316091a04b1
tgctcattctgcttcacgtcctgcttgtcgcggcggcagcgagagccccggcggtgcatgcgtggtgcatggagggccactacatgacctgcaagatcgccgacggtttcctgacgagcgaggcgttgacggtggtgaaggccctcctgccgtaaagatccaacggcgagctcgcggaggtgtgctcgtgggcagacagacagcgcttccggtaccggtggtacagacgactacactgggccgacaccccgggagactgcaagttcagctacgccagggactgccacgacaccaaggggaacaagaacgtgtgcgtggtcggggctatcaacaactacacggacgcgctgcaggactcgtccagcccatttgacccgacggagagcctgatgttcct

SEQ ID NO: 4246 - DNA, 302 bp, Triticum aestivum
  Clone ID: uC-tsro9316091a05b1
cccacgtgtccgctttccccttccctccctccctctcccggcgggccgacagaggcaatttcgccctcgattcgaccccgattcgtccgcccgcgaccgggattccctacggcaagcgcggatctgaacgctgcgctccgtgtcgccgctcgaatccgccatgaagggggccaaatccaagggcgccgccaaggccgatgccaagctggcggtgaagagcaagggggcggagaagcccgccaagggcaggaaagggaaggccggcaaggaccccaacaagcctaagagggctcccagcgctt

SEQ ID NO: 4247 - DNA, 148 bp, Triticum aestivum
  Clone ID: uC-tsro9316091a06b1
atctcttataccaaagctcatattcttctgcttgaaatgtttttgggaccacagatttggaggatgtcttgcaactgcagatcaggctgcagctgcggctcagactgcacgcgcgggaggatgtaccctgatctgacagaacagggca

SEQ ID NO: 4248 - DNA, 152 bp, Triticum aestivum
  Clone ID: uC-tsro9316091a12b1
tccacgcgtccggtacaattgtactgtactgtatatgtaagagagtgatgatgttggcttattctttgtcgcgagactatcaggtataattggctatgtatgaagaccacccatgggcatatcttctaggaacaaagacggacgagttcttc

SEQ ID NO: 4249 - DNA, 447 bp, Triticum aestivum
  Clone ID: uC-tsro9316091b08b1
ctccttttcctcatctcctcttaatatctttcctcgtctcctccccttggcgaggaacaacagcagcaacagcgtacaggaggaggagaagcaaggaagcagcggcagcagcagctctggccgccgttgcgacgggaggagcacgaaaaacggcagccccgactgccgttgcaagcttcggccatgacgcggtggcgcggcgcggtgcagcagcttggatgcgtcgttagctccccgccgacgtcgacggcctgcaaacttctggtccaggtgtaagaggttggtcctcgagctgcgtggtaagggtagtgctcgccaacgcggtcagtgcggcactacggcgaccagcacgggtgcatggcggggcgcacgagatgggagcgccggcgactggatttgaccacgattggatctgggacgggtcgggcggcgcaacttttttttggt

SEQ ID NO: 4250 - DNA, 478 bp, Triticum aestivum
  Clone ID: uC-tsro9316091b09b1
ctcctcgccgccaccgccgctcccgtccgtccgtcctcgccgcccctccgccgtccccccgggtttccaggtcgccggccttcgccccgtcagccagccgtcgcgtccatggcggaggtagcgcccgtcgatcaggggaagaaggaggaggaggagttcagcacggggccgctgtccattctcatgctcagcgtcaagaacaacacccaggtgcttatcaactgcaggaacaacaagaagttgcttggtcgcgtgagggcatttgatcgtcattgcaacatggttcttgagaatgtcagggagatgtggactgaggttccaaagactggtaaaggcaagaagaaggctctcccggtgaacaaggacaggttcataagcaagatgttcctccgcggggattcggtcatcattggcctcaggaacccgaaatgagtttgacgactcggcgtaaaccagaagagtctcttttcgctatgct

SEQ ID NO: 4251 - DNA, 96 bp, Triticum aestivum
  Clone ID: uC-tsro9316091b10b1
gcggagcgcattcggccctcctccctgtggtgctggtttgattgagcactccagatgtgtactttagaataatttggtaataaagggcggttatat

SEQ ID NO: 4252 - DNA, 51 bp, Triticum aestivum
  Clone ID: uC-tsro9316091b11b1
tcctcgcgtccgcccacgcgtccgcccacgcgtccgctagttctagatcgc

SEQ ID NO: 4253 - DNA, 97 bp, Triticum aestivum
  Clone ID: uC-tsro9316091b12b1
tatatatttggctctgcccaaaaaaaaaaaaaaaaaggtaaactatagtgaagttagtaccgtaagggaaatctgaaaaagcaactttattgttttg

SEQ ID NO: 4254 - DNA, 480 bp, Triticum aestivum
  Clone ID: uC-tsro9316091c03b1
tccgccgccgacgacgacgagcacacccgcaggcgcagatctgagattgagtgagtgtgtgagagagaaatcggtggagatggccgggaggctgactgcgatgggatcccgcatcatgggcggccacggcgcagccgcgcgcgccgtggcctccgccctccgcaaccgcgccggcatgggcctccccgccggcaggcacatcgtccccgacaagcccctgcctgtgaacgacgagctggtgtgggacaatggcacacccttccctgagccctgcgtcgaccgcctggcgccgcacatcggcaagtacgaggctctggcgtggctgtgtggaggtctgagctttttcgccgctcttggcctggccgccgttgtgaatgacaaggccttcaagatgccatattcaccaaaagtctacccgttcgacaatttgagagcgggaccttggtgatagatcataaaaatattttcccccaccttttt

SEQ ID NO: 4255 - DNA, 450 bp, Triticum aestivum
  Clone ID: uC-tsro9316091c05b1
gcgtatgacccagtacctggacgacattgccatcctcaccggaggaactgtaatcagagacgaggttggactcacacttgacaaggcagataatacagttctaggaacggctgcaaaggttgtccttacaaaggagtcgacaacaattgttggtgatggcagcacccaggaagaagtgactaagagggttgcacagatcaaaaatctcattgaggcagcagaacaagactacgagaaggaaaaactcaacgagaggattgcaaagctcgccggtggtgttgctgttattcaggtgggagcacaaacagaaactgaacttaaggagaagaagttgagagttgaggatgctctaaacgcaaccaaggctgctgttgaggaagggatttgtgttggtggaagggtgcactcttttgaggcttgctgctaaagttgatgccatcaaggacaccc

SEQ ID NO: 4256 - DNA, 459 bp, Triticum aestivum
  unsure (1)..(459): unsure at all n locations
  Clone ID: uC-tsro9316091c06b1
gctaatcagtaaacagagagctctccgtgaatgatgtcgaggaagaggaagaagaagaagtgtggagcacgctgctgctacctggtcgcgctctcagcagtgtgaatttccagaagcatgcttgccgtgccttcttccgggtgcaccggaggccggcatgtgagcaggggtgcttcagtgatgcagaagaaaaaaggcaagtcttattggcaagggaaggctacgcctttcttccaggtctccctctctccatctaaatccgtgtttggaggagggggctacggttagtttacccaccggtttaccgtgtccttgtgagttgtggtcattatcatgcactcgtcagttgcttgtcatgtatgggggccttgaattttcagctacataatggtcggntgtgtcagtgaatgggaagtgtgttcatgtgagtcaattagcttaaagaagtgtgatgtgtgg

SEQ ID NO: 4257 - DNA, 440 bp, Triticum aestivum
  Clone ID: uC-tsro9316091c08b1
cggacgcgtgggcggacgcgtgggcggacgcgtgggcggacgcgtgggggttttaactcgcatccattctcaaggttagcaggagaccggccatggcgccgtcgcagcccaagtcagggctcttcgtgggcatcaacaagggccacgtcgtcaccaagcgcgagctgccgccacgcccgtccgaccggaaggggaaaggtaccaagagggtgctgtttgtccggaacttgattagggaggttgctggatttgctccctatgagaagcgtatcactgagcttcttaaggttggaaaggacaagcgtgcactcaaggtcgccaagaggaagcttggtactcacaagagagcaaagaagaagagggaggagatgtcaagtgtcctcaagaagatgaggtctggtggtgttggtgctgccgacaagaagaaatagattttgcat

SEQ ID NO: 4258 - DNA, 394 bp, Triticum aestivum
  Clone ID: uC-tsro9316091c09b1
gtgtcccctaactaccagctctctcggacaggggggccctctagagacggcgatcattggacaaacgccgccacacaaggccaggacctcgagagaaccagcgccaccgacgagtggcaaccagccgactgaaaaggggcgggccaggagggagaggcctagggctcgccccaatggcctgacgcagcaaaggaagcaggaaaaaaaggaagctgttgatctggaagacacagataactctggaaccattgatgcaaaagagcccacggttgccatgagagcccagggatctgagatgactgaagagcatattaggcaaaagaaggctgatggggaccaacatggcagtggagcgaacgactaccaggaggttgagcccacgacgactggccaa

SEQ ID NO: 4259 - DNA, 69 bp, Triticum aestivum
  Clone ID: uC-tsro9316091c10b1
tccacgcgtccgcccacgcgtccgcccacgcgtccgcccacgcgtccgcccacgcgtccgctagatcgc

SEQ ID NO: 4260 - DNA, 396 bp, Triticum aestivum
  Clone ID: uC-tsro9316091c12b1
cactcccacatgtgctactccaacttcaacgacatcatccagtccatcatcaacatggacgctgatgtgatcaccattgagaactcgcggtctgacgagaagcttctctccgtcttccgcgagggtgtggtgtacggtgcaggcattggcccgggtgtgtacgacatccactcccccaggatcccgtccaaggaggagattgccgaccgtgtcaacaagatgctcgcggtgctcgacaccaacatcctgtgggtgaaccctgactgcggtctcaagacccgcaagtacgccgaggtcaagcctgcgctcaccaacatggttgaggccgccaagcagatccgcgccgagctcgccaaggcgcagtaagccgtgcttgtatagcagctccccaatttt

SEQ ID NO: 4261 - DNA, 101 bp, Triticum aestivum
  Clone ID: uC-tsro9316091d02b1
aaaaaaaaaaaaaaaaaaaaaaaaaaaaaaaaaaaaaaaaaaaaaaaaaaaaaaaaaaaaaaaaaaaaaaaaaaaaaaaaaaaaaaaaaaaaaaaaaaaaa

SEQ ID NO: 4262 - DNA, 440 bp, Triticum aestivum
  Clone ID: uC-tsro9316091d03b1
gccccgtgcatctcggcggcggacgagccggactcggcgccgtcgagcagctgctgctcggcggtgcacaccatcggcaagagccccagctgcctgtgcgccgtcatgctgtccggcaccgccaagatggccgggatcaagcccgaggtcgccatcaccatccccaagcgctgcaacatggccgaccgccccgtcggctacaagtgcggagattacacgctgccttgatggcccggcaatgctgccgatgaagatgaatgctgtggaaggcgtcgtcgtgtgggaataagcgagtggtgcatgtgccacttatgtggggcactagtgacttcatggaggtgccatcatgtgatgggtgcttgggggaatatgtttctataagcatgtaatgtttcgtctgggttaacgtcaacaaacgtctccgtgtggattctattttc

SEQ ID NO: 4263 - DNA, 303 bp, Triticum aestivum
  Clone ID: uC-tsro9316091e02b1
ggttttggcttctcctccccttccggctcgggttctggttcggttcgggtccgagagtagctagcctagactagggtttccgaagatcggagaggagagaaagggagagatccatggcggagacggagtaccggtgcttcgtgggcggactcgtctgggccaccgacgaccacaacctccagcaggccttcagccagtacggagagatccttgacgccaagatcaatgaacgaccgtgagaccggcaggtcccgcggcttcggttttcgcacgttcggcagcgaggagtcggatgcgccaggc

SEQ ID NO: 4264 - DNA, 51 bp, Triticum aestivum
  Clone ID: uC-tsro9316091e07b1
tcggttacgcgtgcggccacgcgtccggccacgcgtacgtttagatcgcga

SEQ ID NO: 4265 - DNA, 478 bp, Triticum aestivum
  unsure (1)..(478): unsure at all n locations
  Clone ID: uC-tsro9316091e12b1
gttattctttacagtgaatccaaaaagcgtagcagaccctaagttccccagaaaaccgtacatatggccgtcctttctcagtccggtcggtgcccagagctaatatatgacggggaactacatccggggcgattgcaacagattctgtgctgtatgtaggccggataacaaggacagagaagtccaataatacctgtagttttcccttggatcgcagaggcactttgttttgctaatggaaatgatcaatagaatacaattttttgtgtttttgtgagctgtggctcacactgccagcattggttgatgcgcttagttttcggaaattggtttccgttattcatcagttattgtaagttcatgacttcagttcttttcttttgaagattgcatgtaccaaactttgccaaagaacctnctaatatattatgacactggatttggtgacactgttcttttttgaaattaggcacaggtt

SEQ ID NO: 4266 - DNA, 397 bp, Triticum aestivum
  Clone ID: uC-tsro9316091f03b1
cccacttttccggccgacgccgccgaccctcgcgacgccgccacttctcctcggggcgcaaccatggtgacctccaccaagaagacgaagaagtcgggggacaacatcaacaacaagctgcagcttgtcatgaagagcggcaagtacacgctcggctacaagaccgtcctcaggaccctcaggaactccaaggcaaagcttgtgatccttgctaacaactgccctccgctccgcaagtctgagattgagtactatgctatgttggcgaagatcactgtccaccactaccatggaaacaatgttgatttgggaactgcgtgtggtaaatacttccgagtctgctgcctgagtatcatcgaccctggcgattccgacatcatcaacgcaacaccagctg

SEQ ID NO: 4267 - DNA, 480 bp, Triticum aestivum
  Clone ID: uC-tsro9316091f09b1
ggatacttgaacgagatattcacatggtggcatcggattccaaagcacatgaatttcctgaagcatttctgggagggtgatgaagaggaggtgaaggcgaagaagacccagctgttcggtgccaacccaccgatcctctacgtcctccactacctgggccgcaagccatggctatgcttccgggactatgactgcaactggaacgttccgatactgcgggagtttgccagtgacatcgcgcacacccggtggtggaaggtgcatgacaagatgcccaagaagctccagagctactgcctcctgaggtcgaggctgaaggcagggctggagtgggagcggaggcaggcggagaaagccaacttcaccgacgggcactggaagcggaacatcaccgacaagaggctcaagatttgcttcgagaagttctgcttctgggagagcatgctggggcactggggcgagggccccaacaacgcgacg

SEQ ID NO: 4268 - DNA, 395 bp, Triticum aestivum
  Clone ID: uC-tsro9316091g03b1
gatctctgctgtcgagaggaactacgcatccatcccttccgcccccagctacctcgcttgctccacgcatcgtctttgaaggagaggaagatgacgagcgtatggaagaccaaggttctccccgggctcaacaagatcttcgacaaggatggcaagaaggccgccgccgccgagttcttgaaatccttcaacaaggaggagattgacaaggagattgaggacaagaagacagaactagagcccaaggttgtggagaccattgaagcatctcctccagaaattaagggcttgatgaaggataagaaaacatccaagatcaagaagaactcagttgccgtcaccaagttccttgacgatttggccaagattgatttccccggagccaagctggtgag

SEQ ID NO: 4269 - DNA, 376 bp, Triticum aestivum
  Clone ID: uC-tsro9316091g05b1
gtcccgtcaaacgcaaagaagacaagcgcagcaagtagggttaggagagccggcggcggcggcggcggcggaaagcgagagctccagcgggccgtcgggagggaaccaccctcgtcgtcggagatgacgggcaaggcgaagccgaagaagcacacggccaaggagatcgcggctaagatcgacgcggcgacgaccaaccgcggcgggggcaaggccgggcagaaggaccggctcgggcaggagaagggcggccacgccaagatggagtgcccgctctgcaaggtgacggcccccgacgtcaagtcgatgcagatccaccacgaggcgcgccaccccaagctccccttcgaccccgagaagatcaacaacctgcacg

SEQ ID NO: 4270 - DNA, 322 bp, Triticum aestivum
  Clone ID: uC-tsro9316091g07b1
ttcttttgtccgctgctttcaccgaagcctacagaggagccaggagaggggcggcccgaaaggatgtcgtagaagatgtgcgccaacaagcgcgccccggacccggtcatggcccacgagttcacactcgagttcaccatgcacctccataggtgcatctttgggtgcaccttaccgaatgccgtcccggatatcatgaaggttgtccagaaggtcgtgcagaccgacattgtaaccattgatgtgcagcttgacgtgcacatctacaagcacatcttgagcagtgtcctcaggagagtcccgagtaggattcgtctcaaga

SEQ ID NO: 4271 - DNA, 293 bp, Triticum aestivum
  Clone ID: uC-tsro9316091g11b1
gttcggcgccagtacaatgcttcagttctacactgatgaggctgctgggcgcaagatgtccccaaatgctgttctgatcatgagcatagggtttattgccgtcgttgccgtactccatgttttcggcaagctgtaccgcacccctaattaggttccatatatacaacctgagtttatgtgtctatgaatagcgaagtcgtagactttgcataggaaatgactgtcgggtcctgaaaagatttaccttataatactgagatgatattgtcgaatcttttgcaaggtgtttgtct

SEQ ID NO: 4272 - DNA, 463 bp, Triticum aestivum
  Clone ID: uC-tsro9316091h01b1
gagtctgacatggtcaagctggaggaagctgtccgaagcatcaagatggagggccttctgtggggtgcttccaagctcatgccagttggatatggcatcaagaagctccagattatgatgaccatcattgatgacctcgtctctgtcgacactcttattgaagaccatctctgcgttgaaccagccaacgagtacatccagagctgtgacattgttgccttcaacaaaatctaaatcttcctgaggcaagtgatggcggtgggtggacaatgcagcagcacaatatatctacagttttccgttgccgtgatggtgtcgtagctaaagcaagcataacatatctgccctgtgaggtttttggaccttaagtcgagttgagtcggagtggtattactgaggggtatttgcttcgtatgaaatgagacaatgtggttggatttctcgtgctattctttttctctgg

SEQ ID NO: 4273 - DNA, 376 bp, Triticum aestivum
  Clone ID: uC-tsro9316091h05b1
gtcataatgtacatctttttttcttttaccttctttgctgatagctagtataccatagagcttcatcccttttttttccctttcttctttttatattagttgatgaaatgtgtcaaccattgtgcagtttgttcgttatatgtggatatgataatggaaattgcaagatttaaaccctaaaaaaaaaaaaaaaaaaaaaaaaaaaaaaaaaaaaaaaaaaaaaaaaaaaaaaaaaaaaaaaaaaaaaaaaaaaaaaaaaaaaaaaaaaaaaaaaaaaaaaaataaaaaaaaaaaaaaaaaaaaggggggggccccttttaagggtccaagtttttctccggcggttgggaaaaaaaattttttttttttgggcccc

SEQ ID NO: 4274 - DNA, 190 bp, Triticum aestivum
  Clone ID: uC-tsro9316091h07b1
ccctcgcgtccggaagaaagggccatccatgcaccctctccctctatattttggcaatttcatagaggcatggcattttacattggcaaagactgaactcctatatgtagcttaagcttgtatcactaggcttgtaatctgtattatcgactgtaagatacagttaattaaatcatatttcagtatttcc

SEQ ID NO: 4275 - DNA, 407 bp, Triticum aestivum
  Clone ID: uC-tsro9316091h09b1
caatcatccccaattgacacaaggagggcactttataagaatattgtcttgtctgggggttcaactatgtttaaggatttccacagaagattacagcgggacctgaaaaagattgtggatgtacgggtccgtgcatctaatgctcgacttggtggagatgcgaaggctcaacccgtggaagtaaacgtggttagccatccaattcaaagatatgcggtttggtttggcggatcggtgcttgcttctacagcagaattctatgaggcttgccacacaaaagcagagtatgaagagtacggtgcaagcatctgccgatcaaatgctggtttcaaagggatggattgaaattttcgtatgaagactaggaggcatcacagatagcattttcatgcaatcagcctgagcct

SEQ ID NO: 4276 - DNA, 304 bp, Triticum aestivum
  Clone ID: uC-tsro9316091h12b1
tgtgcttgccttctctctcgtgagccgagctagctgtgagaatatcatgaagaagtggataccggagcttcagcattacgcgcccggcgtgccggttgtgctggtaggcacaaaactggatcttcgtgaagacaagcactatttgctggaccaccctggcatgatacccgttaccacagcacagggggaggaacttcgtaagcaagttggtgctttatattacatagagtgcagctcaaagacacaacagaatgtcaaagctgtgtttgatgctgctatcaaggtagtaatccagcccccaact

SEQ ID NO: 4277 - DNA, 245 bp, Triticum aestivum
  Clone ID: uC-tsro9316092a01b1
gaatctattaggtgtcgtcggacgatcggccagccgccttccacatctgctctggcatcgcatcttggactagctatagcttagcctgctgctactaatcgactttctgtcacatgtttatcgttgagcaattcgaaaaccataaaaaaaaaaaaaaaaaaaaaaaaaaaaaaaaaaaaaaaaaaagaaaaacaaaacagaaaaaaaaggctgaccgctatcaaaggaaccaacgctaacatact

SEQ ID NO: 4278 - DNA, 485 bp, Triticum aestivum
  Clone ID: uC-tsro9316092a03b1
ttggagagcgagctaggccgagacgatgagctccccagcggcggccgtgaaggtgatcggcgcagtggacagcccgttcagccaccgcgccgagatcgctctgcgcctgaaaggagtcccttacgagctcatcccagaagacctgagaaacaaaagcgagctgcttctggccaacaaccccgtccacaagaaggttccggtgctcctccagggcgaccgcgccgtctgcgagtccctccttatcgtcgagtacgtcgacgaggccttccctggcccacccctcctccccgccgacccctacgagagggccatggcccgcttttgggccagcttcatcgacggcaagtgctcgaaggcctactggctggcgctgtgggcggagggcgaggcgcatgaagggtttgtgaaggagacaaaggagaacttcgcgctgctggaggcgcagctggaagggatgcggttcttcggcggcgacgccatcggtc

SEQ ID NO: 4279 - DNA, 90 bp, Triticum aestivum
  Clone ID: uC-tsro9316092a07b1
ttgtcatgtgcggtggtcgcgtgtgtttgtatcggtgtgtttgtatggtcggtgctttatatataaagcggggcgaaagcctttttcggt

SEQ ID NO: 4280 - DNA, 323 bp, Triticum aestivum
  Clone ID: uC-tsro9316092a09b1
tggctaaacttcaatatgaataataaagtccaaggtttaattccaaaaaaaacatgcatcaaaccagtacttagtacttactactggcttaatttacgatgtggtgtagttactagtaagtcgtgtaccaccagcaagtgtgtttgtggatcgaggaggagtacgtagtactacgtgctacctcccggccggtcgtgtagaataaacggtggctaaacttcaatatgaataataaagtccaaggtttaattccaaggaataagatggcaaaaaaaaaaaacccgaacaactccaaagagagggccatggcccgattttgaaca

SEQ ID NO: 4281 - DNA, 61 bp, Triticum aestivum
  Clone ID: uC-tsro9316092b03b1
ttccacgcgtccgcccacgcgtccgcccacgcgtccgcccacgcgtccggttctagatcgc

SEQ ID NO: 4282 - DNA, 468 bp, Triticum aestivum
  Clone ID: uC-tsro9316092b07b1
ggcctctctctgtttgctctcgcgtccgccgcgcccatcctcgtccgcgcctgcgccccgaccgtgctcgccgcctcccgcccgatccaccggtccaccaccgcgccggcggcatggcggatcagctcaccgacgaccagatcgccgagttcaaggaggccttcagcctcttcgacaaggacggagatggttgcatcaccaccaaggagctgggaacagtcatgcgttcgctggggcagaacccaacggaggctgagctccaggacatgatcaatgaagtcgacgctgatggcaatggcaccattgacttcccagagttcctcaacctgatggcccgcaagatgaaggacaccgactcagaggaggagctcaaggaggccttcagggtgttcgacaaggaccaaaacggcttcatctctgctgctgagctccgccacgtcatgacgaacctcggcgagaagctcaccg

SEQ ID NO: 4283 - DNA, 468 bp, Triticum aestivum
  Clone ID: uC-tsro9316092b09b1
gagatccgatccgatccgatccgccggaaccctagccaggtccaccaccatggcggcgacccgctcgctcctcctctgcgccgccgtcctcctcgccgccctctcctgcaccttcgccgccgacgcgcccttcctcgtcgcgcacaagaaggtggccctctcccgccccaagcccggcgtcgagcgcctcgccgtctccctcgacctctacaaccagggatccgcaactgcatatgatgtggccattaatgatgactcgtggccaaaggaagcatttgaacttgtctctggagaggtctcaaagactttggaaaggcttgaacctggtgccactgcttcgcacgcgtttgtattggagagcaaaacacagggcaggttccaagcttcacctgctgttatcaagtaccgtgttgccacaaaggctgcacttcaagaggcctactcaactcccatcctccccctggacat

SEQ ID NO: 4284 - DNA, 347 bp, Triticum aestivum
  Clone ID: uC-tsro9316092b11b1
gtgaaaggttgacgccatcaagaagatctctgagtatgtgtcgcagctgagaagagtcggcaaaggccacggagtgtggcacttcgaccagatgctgcttgaggaggcagcttgaaggacacggacacgacgactacgggcaatggaggatgtaggtgtgatatgtcaagtagtggacagataagccaaccactggatgtggttttgagggatttttgcagtggggtttgtagggtgctatgccgcgctgggtttgggatttgaaataaaacgaaggagatgtgccacgctcttaaaaaaaaaaaaaaaaaaaggagaacaaactaaaggaaccaaacttacaaaca

SEQ ID NO: 4285 - DNA, 426 bp, Triticum aestivum
  Clone ID: uC-tsro9316092b12b1
ggcggggcaggtgcgaagatgacggcaagcccatggcgaagccttacaagttctcaaacctgaggctgagggagctggggttggagttcactccgctgaggcaaagcttgtacgagacagtgacgtgcttgcagaaaaagggtcacctgcgtctccccattgttcccatagcacagaagcgcgcgtacttgtaacagggcaggacaggggacaagcccatctcataaaacaacaagagcaaagctgcagcagcaaaagaaaatactgtcaggattttggagcttcagcataaaattaattgcgtatttctacaaagcaaagtgtggcatgtaaatagaactaaaaccacgacgagtattttggaagggaggggcattatttattttgtaatgaatgtacttctacacattatttataaattcttct

SEQ ID NO: 4286 - DNA, 65 bp, Triticum aestivum
  unsure (1)..(65): unsure at all n locations
  Clone ID: uC-tsro9316092c03b1
ttccacgctttcgnggacgcgtgggcggacgcgggggggatattttataagcggactgtgtaaaa

SEQ ID NO: 4287 - DNA, 481 bp, Triticum aestivum
  Clone ID: uC-tsro9316092c07b1
gagaaatcctccgtcgcggtcgcctccctatcgtcctccgcgccaaccgccgtgccctcgggcgagcggtggggcgccgcgatcggcaacctgggagagctgggcgccaacgtcgagtcgctgcagaagctgctcgcccggaaggccgtcttcgtcgacgacgacgtcttctccaaggcctccctcgcctccgaacaggcccgctccatcaagattcttgaccagagggtgcagtctctggaacgtgaactggacgctgccatttctgcagctgctcgagcccgtacagaaaaacgccaggctgaagctgctcaacgggctgcagagctgcgtgcacaggaagtcacgaaggagctggagaacaccgcaagagttttccagctgcacatggaagagctgcgggcaaaacaagaggagatcgccaagagagatagtgatataaggtgttggaagcaataatacgaaccctgagtagcaaaga

SEQ ID NO: 4288 - DNA, 469 bp, Triticum aestivum
  Clone ID: uC-tsro9316092c08b1
tgcaaatatctgcgggcttcatgattttcttcgctgtcctaggaaaatttggagccctgttcgcgtccattccactgcctatatttgctggcatgtactgtgttttcttcgcatatgtcggtgcctgtggtctgagcttcctccagttctgcaacttgaacagcttcaggaccaagttcatcctgggcttctccttcttcatcggcatatcagttcctcagtacttcaacgagtacgcctccgtctcgggccatggcccggtgcacacgggcgcaagatggttcaacgacatgatcaacgtgcccttctcgaacaagccgttcgtggcggtgctggtggcctacttcctggacaacacgatgcacctgcaccagagcgcggtgaggaaggacaggggctaccactggtgggacaagttcaggagcttcaagaaggacgccaggagcgaggagttctactccctgccctt

SEQ ID NO: 4289 - DNA, 481 bp, Triticum aestivum
  unsure (1)..(481): unsure at all n locations
  Clone ID: uC-tsro9316092d01b1
cccacgcgtccgcttggcccaggatgggccccagggcgacgagacacacgtgacaacacgtgtcatgggaacgcatggttatgcggctccagaatacatcatgacgggccacttgactaccaagagcgatgtatatagctttggtgtagtgctcttggagctcatctccgggctacggtctgtggaccgtgcacgacggccgagggagcagaacctgatggcttgggctagaccatatctcaagtgctctgacagattgtacaaagtcatggacccatcgcttgagtgtcaatactcatgcaaaggcgccgaagcggcatcactggtggcatacanagtgtctcagccagaacccaaagtctaggcccaccatggggagggtggtcaaggccctcgagcccgtcctcagcatggaagacttctttcatatgggcccatttgtgttcacggtcattgtcgaggaggacaaggtagtggacat

SEQ ID NO: 4290 - DNA, 82 bp, Triticum aestivum
  Clone ID: uC-tsro9316092d02b1
cccacgcgtccgcccacgcgtccggtagaatattgttgtttgttcaaaggctataataaaaagtgtttctctttttactagt

SEQ ID NO: 4291 - DNA, 474 bp, Triticum aestivum
  Clone ID: uC-tsro9316092d09b1
ttgaagatggttatgcctggtgacaacgtaaccgcaatctttgagttgatgttgcctgttccgctcgaaccaggtctaagattcgcgctgagggaaggagggaggaccgtcggcgccggagttgtcgccaaagtcatgagctaataacaataatatgttccagacctttctctttttttttggcgtagtgaattttagcgaacaaatgaatgttgatatgaaggatttgtccgaccggaaacacgagataaacgagagtcgagagcaaggggactggcatggatgcatcttgtgtggatgcattcagccaaccaacttcctacggataatggtttgttaccattcccaagaattgctattttttcttctcatgttgggtagtttgctgtatcataccgcagcttgttacctagacacgcttctctggcatatattagctcggtgattcaataagaccgtctcgtttcctgatgc

SEQ ID NO: 4292 - DNA, 265 bp, Triticum aestivum
  Clone ID: uC-tsro9316092d11b1
ggtgcagatcgatcaatatattgatctgcacacgactatcggaccaggatcaccgcgggcttttgattggccccttttggggtttgggtggtatggtatgagaggggagagcacgtgtgcaagagcgccgtaattgtgtaattatgcaaggcaatcgatgtaaagtattactccaaagtgtgaaggaaatccgatcatgtgtattattcaaaaattttagaaagttgggaaataagcaaaaaggcccgaaaagaaaagaactttc

SEQ ID NO: 4293 - DNA, 427 bp, Triticum aestivum
  Clone ID: uC-tsro9316092e07b1
ggagctgtctggtgttaagatctctgagccagagtttcagggcactcaggtgccaatggtggcagtggtagaaaatggcatggatttggatgaggcaaaggtggaaaagaagaggaagaagatgaaggcaaagagggctgcattagttgaaggtggggaggagggtgaggtcaatgctctgacgcatgagaagaaggtgaagactgacaggaacaagaaggagaaaaaagaatagaagaagaaaaataaggttgaggatagtgatggaggggatagcagtgagcagagtatagatgccacatcagaggaccagcagatgggcgatgacactgatgccattacatttgatgaggctttgatgtccaatcttcaaaagcagtttgagaaggctggtgcagaagccgggatgctcgtgacaccagttact

SEQ ID NO: 4294 - DNA, 392 bp, Triticum aestivum
  Clone ID: uC-tsro9316092e08b1
cccacgcgtccgaccgaccacgacggcgccgtcgtgcaccacgagcgcaagaggtccaccgagctgatcactcagcagtaaccccgagtaatctacgccgtacgttcgtacacatgtcgtgtgcttgtgttgagtgtggccggtccaaccgtcctggacgtgaatctctagattctggacacgttggtcagatttccaggctttaggacgtagggaccgacacccatggctctacggggagaaagatcacatgatattccgcacgcgtgatgaatccatgtagaaagggtcggttcaccggccgcttgcgctgcttgccgtggcgcgcactgcgcagcttgtgacagatcttttcaccgaggtgacagtgatactgtacgagtgtgtatggg

SEQ ID NO: 4295 - DNA, 289 bp, Triticum aestivum
  Clone ID: uC-tsro9316092f09b1
tctgtgattgaggtctatccataaggttgtgctcccaaagtaagatgcttatatatgttgtggattgttgtgtgctcgctctaaggatgcaaaaataaaggagtgccttgtcattttccaaacaaaagtcctgggtagatcatagaatagcaaggcggttatgccttgttaccttttgatacccgtggaactttcttttggaaaaaatagtatgcagatagagtgcttatcatatatgtactgtgtacaatatcatacaccataatatcaagtcatgtatttgttaccg

SEQ ID NO: 4296 - DNA, 476 bp, Triticum aestivum
  Clone ID: uC-tsro9316092f10b1
tgcgcttcgctctcagatcccttctcctccgtctcgcccgcgtgttggggtaggagccatggcggaccagctcaccgacgaccagatcgccgagttcaaggaggccttcagcctcttcgacaaggacggagacggctgcatcaccaccaaggagcttggaactgtgatgcgctcgctggggcagaaccccactgaggcagagcttcaggatatgatcaatgaagtggatgctgatggcaatggaacgattgactttcctgagttcctcaacctgatggcgcgtaagatgaaggacactgattccgaggaggagcttaaggaggctttccgcgtgtttgacaaggaccagaatggtttcatctcggcagctgaactccgccatgtcatgaccaaccttggtgagaagctgacagacgaggaggtggatgagatgatccgtgaggctgatgtcgatggtgacggccagatcaattacg

SEQ ID NO: 4297 - DNA, 472 bp, Triticum aestivum
  Clone ID: uC-tsro9316092f11b1
tcccacgcgtccgcccacgcgtccgcccacgcgtccggccagagagcttgtcgagccgtgccatgtcagggaacccagtggccggcgcgccgggtgccgtcgagccgtatgtgccgcaggcgacctacaacttcagcgcccgcctcgcgctcaccgtctctttggtcctcctgatgatcaccgtcgtcgtcgtcgtcatccctctcatggtttacctgatgatcactcgctcacgcagaagcggcggccacggcctcgccggcggcatcctccggtccgttggcatgatcggcagccggcggcacgggttggacgcgtccgctctctcggcgctgccggtcacccgcgtaccggaaggagagcggcgcagccgcgagggctgagtgcgctgtgtgcctggccgagctcgccgacggagaccaggctcgggagctgcccaactgcggccacctgttccacttggagtgcgtcg

SEQ ID NO: 4298 - DNA, 421 bp, Triticum aestivum
  Clone ID: uC-tsro9316092g01b1
ggaaagagtcgaaaattccaagacatgtacgatgtggaaaaatttaagatgaacttggatggtgttgtcaaagtagtagataaacttcctgctgaattgaccactaagaagccagccgttattagagtaccaaacagggtgacagaagacttcatcctggacaccatccagcccgccttccaaaagaacagtttcctacgacttgcaattattttctcttcagtaagtttgaaaccgaaagggacgaataacaaggacttggattcaactgcttgccatgcaatgttcactgggctcaaactgaacgctgaatattcagaagtggctgaacagatgctgggcaggcttaaagagctaagcaagaaatcggatggcaaggtgctggcggtcgatatgcggaccgacttgctagagaagaaga

SEQ ID NO: 4299 - DNA, 55 bp, Triticum aestivum
  Clone ID: uC-tsro9316092g02b1
tttttgacacattgatgaataaaacaataaaaaaaaaaaaaaaaaataaaaagaa

SEQ ID NO: 4300 - DNA, 445 bp, Triticum aestivum
  Clone ID: uC-tsro9316092g10b1
tcgccggagtccctcccggacgccgcgccccaaccccaccgcttcaccgtcccggtcatcgacctgtccgccgcggtcaccacgcgagccgcggcggtcgcgcaggtgaaggaggccgcggagacggcgggcttcttccaggtggtgggccacggcgtgccggaggcggccacggcggcgatgctcgcggcggtgcgcggcttcttcgagcagcccgtggaggccaaggcgccgttctacacccgcgacctcggccggcgcgtccggtaccagagcaacctcaacctgttcaagtcgcgggcggccaactggcgcgacacgctcttcatggagctgccggcgccggaggagatcccggcggcgtgcaggagcgccgcgccggagtacgcgcggctggtgcagcaggggctgggccgcacgctgctggggctgctgtcggaggcgc

SEQ ID NO: 4301 - DNA, 381 bp, Triticum aestivum
  Clone ID: uC-tsro9316092g11b1
cccacgcgtccgggccgccctttttttttttttttttttttttttttttattcgaggcacatagcaggagggctttcgatgagggaggttcttcgtatgacaacataaggctattaattcaagaaatggaaatcaagacgaatgcatgtcgttcagtggttgatacagatggtaataagctctcttttttggtgtaaacataaagtaaaagagcctatagcgtatttatcattataaaggatttcttttacaaacaaccggtagcttgtatcaggatcactgtctattctgttgcgcagatttcaaaaaaaaaaaaaaaaaaaaaaaaaaaaaaattacaaacacgtgcaagcaaaaaaaaaaaacaaatatagagtcccc

SEQ ID NO: 4302 - DNA, 314 bp, Triticum aestivum
  Clone ID: uC-tsro9316092g12b1
taaaaaaaaaaaaaaaaaaaaaaaaaaaaagaaaaaaaaaaaaaaaaaaaaaaaaaaaaaaaaaaaaaaaaaaaaaaaaaaaaaaaaaaaaaaaaaaaaaaaaaaaaaaaaaaaaaaaaaaaaaggggggggcctttttaagggaccaaagttaacgaccgcgtgattgcaacgaaaaagtttttttttggggcacctaaaataaaattaatgggccgcgttttaaaaacgtgggaattggaaaaaccttgggtttcccaaattaaatccttttgaaaaaaatccctttttgccaagttggctaaaaaacaaaa

SEQ ID NO: 4303 - DNA, 426 bp, Triticum aestivum
  Clone ID: uC-tsro9316092h01b1
gttacgacacccctcccccaaatggtgagagcctagagatgtgtgcagacagagccgtttcctatttcaaagatcaggttgttccacatctcacggctggaaagcatgtgatggttgctgcacatgcaaactcacttcgatcaatcataatgcatctagacaaattgacttcccaggaggtaatcagcctcgagttgtcaacaggcattcctatgctctacatatttaaggaaggcgagtttattagacgggggagcccggtaggaccttctgaagcaagtgtttatgcttatacaagggtaagggtctattccattttctatccctcgacagaacaatttgtatccacagtatatattaaaacaaactgattgacaccaataaaggcatataactgctctagtggctggatctgaataatctcat

SEQ ID NO: 4304 - DNA, 63 bp, Triticum aestivum
  Clone ID: uC-tsro9316092h02b1
cgacgcgacgcgcccggccacgcgttctagcacgcgtgcggccacgcgtgcggatctagatcg

SEQ ID NO: 4305 - DNA, 485 bp, Triticum aestivum
  Clone ID: uC-tsro9316092h05b1
cccacgcgtccggccattctatccctgttggtggtcttgcttactatgtaactgcaccatcaagtatggctgatattctggcgaatccattccatgcattgttctatgtggtcttcatgctgtcagcatgtgctctcttctcaaaaacatggattgaagtctctggttcatcagccaaggatgttgcgaagcagctgaaggaacaacaaatggtgatgccaggccatcgtgagtcaaacctgcagaaggaactgaacagatacatccctactgccgctgcatttggtgcagtgtgcatcggcgcattgactgttctcgctgatttcatgggcgcaattggttcaggaaccggtattctgttggctgttaccatcatataccagtactttgagaccttcgagaaggagagggcgacagagcttggtttcttcgggttttgattgatacatgatagctttgggagcatgttatggctacagcacagc

SEQ ID NO: 4306 - DNA, 487 bp, Triticum aestivum
  Clone ID: uC-tsro9316092h09b1
aaggactccaacaggcagtccaagcagctggaagaactcactgggaagatgagggagtgcaagcgcttaatcaaggaatttgatcgtgtactcaaagatgaggagaaaagcaatacttctgaggtcaacaaacagctaaatgacaagaagcaattcatgatcaaggagttgaattcttatgtcaccatgaggaagacgtaccaaagtagccttggtaataagaggatcgaactattcgatgctggtaatgaccaggtagctgaagataacgttcaaatggcatcagaaatgtcaaatcaacaactgattgattctggaatgaaacaaatggaccaaacagaccaagctattgagcgttcgaaaatggttgttgcacaaactgttgatgttggagctcaaactgctacaactctaacacagcaaactgaccaaatgaagagaattggcaatgagctagattccgttcacttctcattgaagaaagcta

SEQ ID NO: 4307 - DNA, 407 bp, Triticum aestivum
  Clone ID: uC-tsro9316092h12b1
cccacgcgtccgagacgaacacgagcaccaaggcgatggcgactgctctcaaccgcggcctccgctccgggatccgcctcctcgccaccggcgccgaggcctccaagccagcttcacgtggattccatgctaccggcgtgaagaggatgtcagggcacggccatgatgagccatactacctccacgccaagcacatgtacaacttgcacaggatgaagcatcagaagctgactgcatggacttcggtgctgggagccgtaagcattggtatcggtgtcccggtcttcgcgggtcgtcttccagcaaaagaagacctcctccggatgagctcacataccctcccagggcctacttattggacctattttgaatttagcattttgtgaaagccaaagctgtcacttcac

SEQ ID NO: 4308 - DNA, 421 bp, Triticum aestivum
  unsure (1)..(421): unsure at all n locations
  Clone ID: uC-tsro9316093a01b1
tgtagctccatgctagagcgactgacatacaagcgcggcagtctgccgaagacgcgggctcgcgggctgctcggcccaccagaatgaggcaagcccaacagcagggtccacaggccagagtgggtgtagccggggagccaccccagcgactacttagtcgtccacacacgcaagagaaggggatccagtggatcaatgaacccggcgtcggcggctccctgttctttcttatccccaattcccctttctccaattcttgtatccccggcttgtaatcgatactagcatgcccgcgcggcagcacgccgcgtcccatcgatacattatgtgtatgtatgctatttttttcgtgtgatgaatttaggcctgagagttctatgagcataaatttttagtacaaaaaggcaaattgtgcccnnna

SEQ ID NO: 4309 - DNA, 413 bp, Triticum aestivum
  Clone ID: uC-tsro9316093a04b1
cccacgcgtccgcgagttcaaggagtggctccggcgggtcgacgtggaccgcgacgggcgcatcagccgcgacgagctgcggtgcgcgatgcgcaccatccggacgcgcttctcggggtacaagagcaagcgcggcatcgagtacgccgacgccgacggcgacggctacgtcgacgacggcgaggtggacggactcatcgagtacgcgcagaatagcctcgggctcaggatcgtcgcctactatagaggagtcaatgtaggtctatcaagcgaagctagctccatgcatgctacctgctagaataagctctgatctatcgtttgccaccctgtacctttgctttcttgtctacttattagctaatctgtgcaccgacgtgtgcgtttgtgatctatcatgatgtatttggagc

SEQ ID NO: 4310 - DNA, 364 bp, Triticum aestivum
  Clone ID: uC-tsro9316093a08b1
cttttccctcgtaaagagcttttagctacttgagagaggtaaactttaagcagccagagatagcaggatacgggtaagttatttatgagatggcggtgccggttggagttttgcccgcacactctgtaaagaaacacagttgcatcagggccttgtacgcatgagtgctgttgtttaaaaaaaaaaaaaaaaaaaaaaaaagaaaaaaaaaaaaaaaaaaaaaaaaaaaaaaaaaaaaaaaaaaaaaaaaaaaaaaaaaaaagggcgtggagactagaggcctaaggttgaaactggccgacagtatacaaacaaacttaaattataaggggccggcgtttcaaaagttaaactttttttcccc

SEQ ID NO: 4311 - DNA, 438 bp, Triticum aestivum
  Clone ID: uC-tsro9316093a09b1
tttatcgatatgttgggtttttgtagatagcttatcaatacattggaaaatgactaaaaaaaaaaaaaaaaaaaaaaaaaaaaaaaaaaaaaaaaaaaaaaaaaaaaaaaaaaaaaaaaaaaaaaaaaaaaaaaaaaaaaaaaaaaaaaaaaaaaaaaaaaaaaggggggccttttaaaaaaaacaaagttaactaacccgtaaatgaaaataaaaaattttttaaaagggaaaccaaaattaaattaaatggccgtgttttaaaaacgtggtaattggaaaaaccttggggtaacaaaaataaatcgctttgaaaaaaatccccttttcgaaagttggggaaaaaaaaaaaaggcccgaaccaatcgcctttccaaaaaattgccaaccctaaatggaaaaaggaaccccccttaaaacggaaaataaaacgcgggg

SEQ ID NO: 4312 - DNA, 237 bp, Triticum aestivum
  Clone ID: uC-tsro9316093b01b1
catgtgcccggacgcctacagctacgccaagggcgagcagaccagcaccttcacctgcccacctggaaccaactaccagatcgtcctctgcccttagaataggacgcgttgaaggatcaaaagtataataaccgggatcaataaggaacaatgactactctgagtagtctacttatatgtatgtgccatgtcacgtatatgcatatgcatgactgtgcttgtatgttgaccaataat

SEQ ID NO: 4313 - DNA, 62 bp, Triticum aestivum
  Clone ID: uC-tsro9316093b02b1
cctacgcgtccgcccacgcgtccgcccacgcgtccgcgcacgcgtccggttctagatcgcga

SEQ ID NO: 4314 - DNA, 530 bp, Triticum aestivum
  unsure (1)..(530): unsure at all n locations
  Clone ID: uC-tsro9316093b03b1
ggatgtcccgccgtctgaatcgctaagccagctggcgtatgggatgaatacagcacaggcttcccgcctattctatcaaacatgtgtcttggcaacgcttgatcgcatcaaggtcacgcaggtggaaccatacgggcccatcctgatctcgaggggggccaacatgtgatcatctccctgttaatcttaaatcacacggaagaaccgggagcctcttgcacatctcatgtttatatatctatagtgttttaagtctgcacaggaagaagtcttgtaggaagctgcttagttggatctgctggtgggaagcaagcgagtgatggtgctgtgttattgcggtagtttggtcaggccacagggaaattctgtaagatatgccacgctgaaagaattgaccggcggtgtaggttagctgcttaaactatgttcatcggngcgatatttatggtacctgagatttgctggttaagtatgtttaaccggatatttattatgtttttcctatcgcaaatgatgatgccgcgtccgnc

SEQ ID NO: 4315 - DNA, 483 bp, Triticum aestivum
  Clone ID: uC-tsro9316093b06b1
cgccgcctcctctctcgtcccggcgcgcttggagctggacctacccgcgcgccgcccactatgatcatctccaagaagaaccgcaatgagatctgcaagtacctcttccaagagggggtgctgtatgccaagaaagactacaacctggcgaagcacccgcagattgacgtgccgaacctccaggtgatcaagctcatgcagagcttcaagtctaaggaatacgtcagggagaccttctcgtggcagcattactattggtacctcaccaacgatggcatcgagttcctgcgcaacttcctcaacctgccatctgagatcgtgcctgccacgctcaagaagtctgccaggcctactggccgcccactcggttctggcccacctggtgaccgcccaagggggccacctcgctttgagggcgacaggcctaggtatggtgacagggatggctaccgtggccgtcctcgtggtgcacctggagacttt

SEQ ID NO: 4316 - DNA, 482 bp, Triticum aestivum
  Clone ID: uC-tsro9316093b08b1
cctacgcgtccgcccacgcgtccgcaagaacgatcgtgcgctaccagtgccgtctccatttgagcatgtgcatgcggcggcgcccttcgacgagagcatgacgctcctcgatcatgagaccgacaagctcttctatgaggccttggccgcccatgaccatatggggatcggcacggttgtgcgggaatgccgtgggctgttcaatggtctggagtcactcaccgactgctgtggtggtgacgggacgacggccagggccatcgtcaaggcctacccgcatatcaagtgcaatgtgttggaccttccacaggtgatcgacaaagtcccgagtgatggtgttgttaactatgtcgctggcgacctcttccataccgtcccacctgctcaagccgtcatgctcaagcttgttctacacttttggagcgacgaggattgcatcaaaatccttgctcaatgcaagaaggccataccttcccgagaaa

SEQ ID NO: 4317 - DNA, 403 bp, Triticum aestivum
  Clone ID: uC-tsro9316093b11b1
gtaagccatggacgacaagtacctccgcgacatggtgggcagcttcctcctcggcgggcgtgacacggtggcctccgcgctgaccacgctcttcctccacctgtccaagaaccctcaagtcgcggcagccattcgcgcggaagccggcggcgacaagccgtccacgtacgagcatctcaagagcctgcagtacacgcacgcggtgctgtacgagaacatgcgcctgttcccgcccgtgcagtttgactccaagttcagcgctgccgccgatgtgctcccggacggaacctacgtggaaggagactcgcgcgtgatgtaccacccgtacgccatgggccgcatgccgagcatctggggcgccgattacgaggcgttccgccccgaccggtggctcactggagcc

SEQ ID NO: 4318 - DNA, 534 bp, Triticum aestivum
  unsure (1)..(534): unsure at all n locations
  Clone ID: uC-tsro9316093c01b1
tgttgtaacatctcgcatgtcagacacagaggaggagaatcctgaggagaacgatgaaggattgacagggcttgagggggagcttaaagggtggagggtaggggagacctttgaagggttcacagggacatcctcattgtcgacaacgaatgatgatgatgcatctagcacgaatacagaggctgtgttcgtcatctcgccgaatggcaagttcaagcggaacatcaagtcatggatgcgtggtgcacttctgggaagtggctcattcgggatggtgtatgaggggatcagtgatgaaggtgcgttctttgctgttaaggaagtatctttgcttgaccaaggaagcaatgcacagcaatctattctttcacttgaacaggaaatcgctctccttagtcagtttgaacatgaaaatatagtccagtattatggaactgacaaggaagaatcaaaactctacatttttattgagctntgtacacaaggttctctttcatccctctatcagaagtatanactgcgagactcacaagt

SEQ ID NO: 4319 - DNA, 468 bp, Triticum aestivum
  Clone ID: uC-tsro9316093c05b1
cacaacttcccccaccggccaccagacgccgcagacttccccaaaatccccacccaagctcgaatctgatccgacgcgcatcgaatcgagtgagatgagccgcccggacgacggacataggtctttcttccctgtgggaaaccccttccgggtcatccttccagggggacctcacctgcctaggaagctccaggcgctgctcaagtcatacgaggatgccctggccttgagcttgaggaagctaaagccagagaatgccttggaggtcctcaccttgtcctggatgaggcttgctgtcgattgcttgtcagagctgcatgccaacataggcaccctgataaccgagctcgagctgcctgtctcggattgggatgagaagtgggtggacatttacttaaacagcagcgtgaagctgctggacatctgcatcgcgctaagctcggagcttgctcggctggatcaagggca

SEQ ID NO: 4320 - DNA, 492 bp, Triticum aestivum
  Clone ID: uC-tsro9316093c09b1
cctacgcgtccgcaaaaccagaccaaatcttcggcgagcccatcggcacattctgagagcggagaggaagcaggaggcggcggatcaaggagaggagactagaagatgggtggcggcatggaggtgaacaagaaccgctggatcgaggagtggaacgccggccgggagaacctcgagctcaacttccgctttacccgccgcagcctcgccgtcatcggcctcttcggcctcgccgtccccatcctcgtctacaagggcatcgttcgcgaattccatatgcaggacgaggacgccggccggccgtacaggaagttcctgtgagcgtcgcctccggtggatgtcgagactccgagccgtctgcagggtttcggtcagggagaaggaatctccattcggtttgtttcccgtactgttgtagtcagaccggagtattttgttctcacatgttgtgcgatatgtgttaaataagatgtaatgaaatgctgttcttgc

SEQ ID NO: 4321 - DNA, 487 bp, Triticum aestivum
  Clone ID: uC-tsro9316093c12b1
tcggtaactgccatcgcaagcacacaaagaggtggtgtgcacactaaagctcattcagtggctgatgttttccggacttcaatttatcagatagtctcagccttcttggatgacatgcgggcaaatgcaaaagcttcgagtttggagaagaattggatcagtgaaggaagaaaacctatacatggttcacgtgctgtgttggttcagaagttgagcttgtttattgaataccgagctgtctgaactctgtgtgatgtctctcaaatcgacagtctgttgggatgaaggaattttgttattggccaaaatgcttgtttcagtgaagtttggagctgctgacactactatcatctcattgaggtcaaggaatatttgtttcggcactatgatccactggcgaaaaatcattttccattccccatcttttggagaacaagaagggccatgacctgttattattatgatttcttgcaaaccaatctcacta

SEQ ID NO: 4322 - DNA, 524 bp, Triticum aestivum
  unsure (1)..(524): unsure at all n locations
  Clone ID: uC-tsro9316093d04b1
gtcttctccaagaacctcaagcttggcatccaggaggactcccagaacaggaccaagattgctgagcttctgaggtaccactccaccaagagtggtgatgagctgacgagcctcaaggactatgtgaccaggatgaaggagggacagaacgagatctactacatcactggtgagagcaagaaggctgtggagaactctcccttccttgagaagctgaagaagaagggctatgaggtcatctacatggttgacgccattgatgagtatgccattggtcagctcaaggagtttgagggcaagaagcttgtctctgccaccaaggagggtctgaagcttgatgagagcgaggacgagaagaagaagcaggaggagctcaaggagaagtttgaggggctgtgcaaggtcatcaaggaggtgctgggcgacaaggttgagaaggttatcgtctctgaccgtgtgggggactccccttgctgtctggtgactggcgaatatgggtgggaccgncacatggagaggatcat

SEQ ID NO: 4323 - DNA, 405 bp, Triticum aestivum
  unsure (1)..(405): unsure at all n locations
  Clone ID: uC-tsro9316093d08b1
tcgcatagctggagcccaagcctaaacctgaaccgaaaccgaagccgcctccgaagtgcaaaccaccaaccactcacagttgatgggatactgatatatgccagttgctggaggagaccctgtatgaagccacaatgtgttatttctagaataagtggtgttgtattccctgtattcatttatagttccatgcacgtgtgatgggtattagtactttgtaattattattttcttgttggtatatgttaatctactttgtatgtgactcgactcgttgttttaagtatctatgcatgattgcatccatttatacgaatgagctattttgtccaaaanaaaaacaaaacattaaataaattgcaaaacatacacctttcaaaaaaatagataagttccgaacaattt

SEQ ID NO: 4324 - DNA, 454 bp, Triticum aestivum
  Clone ID: uC-tsro9316093d11b1
gctcgacgcgctgaccgccaaggcggcgcccgggctgtcctcgcccgagcgctccgtctcgtccacggtcaccgagtcgacgtccacggcctcggcggcggcggagcagcacggcaactcgggcagctccgcgtccgcctccgcgtccgtcaaggaggagtgcttcacctcgtccgaggagtcggaggagttccagatcgacgagagcttctggtcggagacgctgtccatgccgctggacgacatcaacgacgtctgcatggagccccacgacgcgttcggcaagcccacgggcgccgccgacggcgacatggactactggctcaaagtgttcatggagggcggcgacgacgacaacaacaacaacggcgcgctagacttaccgcagatttagggagggagagagctctagtttcgtcgctgctcccgattgatcgttcttttttctctctct

SEQ ID NO: 4325 - DNA, 442 bp, Triticum aestivum
  Clone ID: uC-tsro9316093d12b1
tcgcccacgcgtccgggtcaagaagatcctgcacaggatcgaaggggtgtaccaatccagcatagacccggagcaggggaaggtgacggtgtctggcatggtggatccggacaccatcatcaagaagctgaccaaggctggcaagccagccgaactctgggggtccaaggctggcatggctaaccagttccagaagctccaacttgacggtggtggcaagggccaggccaaggacgccggtggcaagggccagtccaaggacgccggcggtgccaagggccagaaaggtggtggcggcggcggtggcgccggaggtgctagcaaggacgcaaagatgatgatgccgccgccgacggcgcagcagcttcagcagctgcaacagcagatgcagatgaagggaatgaagctgccgcagttcatggacgggaagatgccgttcgca

SEQ ID NO: 4326 - DNA, 476 bp, Triticum aestivum
  Clone ID: uC-tsro9316093e02b1
ctcacgcgtccgggactgggcggcgcagcgcgccggggattgcctgctccagcactgcggcgggccgttcggcgagaacatcttctggggttccgggcagtcgtggacggccgccgacgcggtgaagctgtgggtggacgagaagcagaactaccatcttgacagcaacacctgcgacgccggcaaggtgtgcgggcactacacgcaggtggtgtggcgcaagtcgacccgcatcggctgcgcgcgcgtggtctgcgccgggaaccggggcgtcttcatcacctgcaactacaaccccccgggcaacttcaacggcgagcgcccgttcgcgttccttacccttggcgccgaagccaagtagtacgtacgtgtgaatgtgatcatgcatgtgtacgtacgtgcgtgtctttatgtgtgtgtggtttgaatatttatacgtctacgaacgctacgtacgtacgtaaataagcacacat

SEQ ID NO: 4327 - DNA, 536 bp, Triticum aestivum
  Clone ID: uC-tsro9316093e07b1
tcgggaacgatggcgctatcacgcagtatgagaacatgcttgcatagcggaagacttgccgccctggcaatacttgtctctggtgggatcgtattgcagattttggcatgtgctctttataacaactggtggcccatgttgacagttctgatgtacctcatactacccatgccgctcatatttttcctgggctccgattctccatcgatcatgtcaaatgagaatgatgggtgggtgaacttcaccaagttcctgacgggcgcgtccatcgtgggcagcatcgccatcccgtcgatcctgaagcacgccggcgtcatcgggtggggcgcgctgacgatggagctgtcctccttcgccgtcttcgggctggccatcgtgtggttcctccagatgaactccgaggacgagtacagcgccttctgatctccagcgctttatcctctcccgcgccttctgatctccagcgcttcatccagtcccaaacctgtggtctgcgtgtttctagtggcgcctcgctagaaatagggatcatcaac

SEQ ID NO: 4328 - DNA, 78 bp, Triticum aestivum
  Clone ID: uC-tsro9316093e08b1
cctacgcgtccgcccacgcgtccgcccacgcgggcgcccacgcgtccgcccacgcgtccgtctagatcgcgagcgggc

SEQ ID NO: 4329 - DNA, 514 bp, Triticum aestivum
  Clone ID: uC-tsro9316093e12b1
tcgctcacgcgtccgcccacgcgtccggacaaagaggactttgatgatttctgttctcgggcctcggagttggcagagcaggcgaatggagcaccgctcttcactgtcgtgcagtcagttcagccgtcgaaacagatgtacaaccaggatgacgggtccggctgttcaggctacggcgtctccgacaacatcgacacggaggacctcgatggctccggcgaaacaggagaagacgagtggcagattctctgaatgaaagggaagtttaacttcagttgttcggttaaaccttcacatgacccctgtgtgaagtaaagacttcaaaaacctcgtgtgaaatctagggtttccagttctacggaacaagcgggtgtgctgcttgttccgcgtagctgggaggctggaaaaggtaggagccgttatgctgatcatcggatcggcaccaagttggttcgatgggaaattcctctgtaccataccgtacgcgctgttgtgggtgactgcaaaatgtatc

SEQ ID NO: 4330 - DNA, 490 bp, Triticum aestivum
  unsure (1)..(490): unsure at all n locations
  Clone ID: uC-tsro9316093f05b1
gaaatagttctccatctcaaccttctcttctcccttgtcttctctcccgcgcgttacctcgaaccggaagcgaactctacatccatcctcgaccgatggatccatgggtcagcagccagccttcccttagcctcgacctgcacgtcggcctcccgccgatggggcacccgcaccaccaccaggcggcgcccatggtcgcgctggccaagcccaaggtcctcgtcgaggagaacttcatgcagctcaagaaggaccctgaggttgcggttcttgagtctgagctacagcgggtgagcgaggagaaccggcggctgggcgagatgctcagggaggtggcctccaagtacgaggccctgcagggccagttcaccgacatggtcacggccggcgcccacgccggcggcaacaacaacaactacaacaaccagccgtcctncgcgtcggagggcgggtcgggtgtcgccgtcgaggaagcgcaagagcgaggaga

SEQ ID NO: 4331 - DNA, 128 bp, Triticum aestivum
  Clone ID: uC-tsro9316093f07b1
ttttctacgcgtccgcccacgcgtccgcccacgcgtgcgtaaaaaaaaaaaaaaaaagaaaaaaaaaaaaaaaaaaaaaaaaaaaaaaaaaaaaaaaaatgaccaacaatatacaataaaaaaacatg

SEQ ID NO: 4332 - DNA, 420 bp, Triticum aestivum
  Clone ID: uC-tsro9316093g01b1
cggacgtgtgggtttttttttttttttgatggagagagaaaatgggaaattctgactgcgataaaccgagttatggttcttggctagcagtccctatattatgatctcaaaacattaggcgaagtgggtgagattacatgcccggtcgaatcccaagcaaagaatgtacaggagtcacagtacaatgctctggttcctgtgacctgaccgctagtgccacagcgccgcccggccgagcccagcccagccggcacaaaccgtagggcggggagacctttgcacttgcaggcacgcccggcgagaagaacgatcgaggagaagcgcctacaaggcggcgtcggcgacgcggtcggcgaaccgctggagcgcctcgcgcatccagaggtgcgggcagcggtccatggcgtcctgcacggtgac

SEQ ID NO: 4333 - DNA, 523 bp, Triticum aestivum
  Clone ID: uC-tsro9316093g06b1
gtcaatgctggtgccggtgtgggtgccggtgctggtgcccttgatgcattgcgacagcttccacagttccaagcactgcttgcattggtccaggctaatccccaaatcctgcagccaatgcttcaagagctggggaaacaaaatccacagatcctgcggttgattcaggaaaatcaggctgagtttctccgcctggtaaatgaaacacctgagagtggtgctggcgggaatatactaggcgcgctagcagctcaaatgccacaggcagttcaagttactccagaagaacgggaggccatccagcggctcgaggggatggggttcaaccgtgagcttgtgttggaggtcttctttgcatgcaacagggatgaagaactggctgccaattatcttttggatcatggccatgagtttgaggaacaacaatagatgttagattggtcttgctgttgaaagacagaagagtcagtgacagaagcatttcagtttggtgtcgtcttatatcttgctgcttgatatcact

SEQ ID NO: 4334 - DNA, 369 bp, Triticum aestivum
  Clone ID: uC-tsro9316093g12b1
tttcttgacgcgtgggcggacgcgtgggtaaatgtaggtttggaggagggggctacgggtagtttacccaccggtttactgcgtccttgtgagttgtgatcattatcatgcactcgtcagttgcttgtcatgtatggtgttcttgaattttcagctacataatggtcggttgtgtgagtgaatgttatggtgttcttgaatgctcatgtgtcagcctgtgtgttgactgttactgtgagtcaattagctaaaagaagtgtgatgtgtgggttcagcgagggtgtaacagtcactgaataagaatgtaagggtcctatcctatatgtatgtctaaaatagtaacatgtaacatgtgttgctctttctttc

SEQ ID NO: 4335 - DNA, 140 bp, Triticum aestivum
  Clone ID: uC-tsro9316093h01b1
ggggaaaagaatgggtagcacactttttgattcgtttgtagatcggtggagatgcaatagaatcatagagagggtgcagtgatgcatgcgattttatgttcaaacaagcggccaaatggcccgaaaatacactcttgaat

SEQ ID NO: 4336 - DNA, 392 bp, Triticum aestivum
  Clone ID: uC-tsro9316093h04b1
cctatcgcgtccggacaggcttgatggtctggaagttgagtcaggaatcaactgaaagcaatgtgaatgaacctggatactgtgtagtcatcttctattgtgaaatccatagctctggcaaggatgtaaaaagtcggtgtagaccacccgtccgaggtgaagaccgagcagtatgtcaatttgagagtaactggtgtagcaaacattgtattatataccatgttctgaacagaagagcggagttattgtaaaaactatctaatgtttagttgcttgtataaaacacaagttttgaagaaaaaaaaaaacaacgaaaaaaaatgaaaaaaaaaaaaaagaggcccaacttaatagaggggccccactttcggcttttcctaaatggggggcct

SEQ ID NO: 4337 - DNA, 73 bp, Triticum aestivum
  Clone ID: uC-tsro9316093h07b1
ggtttctaaaaaacgaaaaaaaaaaaaaaggtgagaaaaaaaaaaaaaaaagaagctgatgactaaccatgaa

SEQ ID NO: 4338 - DNA, 59 bp, Triticum aestivum
  Clone ID: uC-tsro9316093h09b1
atttaaaaaaaaaaaaaaaaaaaaaaaaaagaagaaaaatttaaaaaaaaaaagggggt

SEQ ID NO: 4339 - DNA, 485 bp, Triticum aestivum
  Clone ID: uC-tsro9316093h12b1
tttctttgagctcaggaggaagctatatggggggcggtccaggaggagccacgggaggagccgcagcccaagcccacagcacaggagggacaaccgtgaccgtggtggtgacttccgccgtgatggccgggatgaataccgtggcggcggcggcggtggcggttaccgtggaggcgatggaggtgatggtggcggttactgtggaggcggtggtggtggctaccgtggaggtgatgggggcggctatcgtggtggtggcggcggcggttaccgtggtggcggcagatgaggtggtggcaggcatgataggtatgatgatggaccgaggcgcaggtatggtggcagcccgccacgacgtggaaggagccctcctgcaagggagaacagtgaggagcgcagggccaagatcgagcattggaaccttgagagggaggagaagtgatgaaaccgcgagtagtggaaccgcaagcgtcattttacctttt

SEQ ID NO: 4340 - DNA, 471 bp, Triticum aestivum
  Clone ID: uC-tsro9316094a05b2
tcgagattttggcggactcgagtccaatccaatccactccaaggctgaggtcgagatcaaacctaccggagatgaagttcttctcggcgttcgacccgcggccggtgttcttccgccgggagtggggccgcacctggcccttgctcgccggcttcgccgacacgggggccctcatcaccaagatgaccgtcggcttcaccgaggaggacctcaagatctccaagttcatgcaggcgcacaagatgaagtagtcgccgaccgcccggaccgtccgccgccaggtcacaggggcagcatctgagtaaccagcatgtgtccttgatgcggggagacagtcctcaccctcactattgtgattgagcttttatgcttattttttcaaatgcaactgcatgcattattgctgctctggtttgtaatgtaataagcgacatttgaatcgttgaatccaagaaaaaaacggcttcggat

SEQ ID NO: 4341 - DNA, 456 bp, Triticum aestivum
  Clone ID: uC-tsro9316094a07b2
gttttaacccagtaaactactgccacccatccgccggcgaaatggcccacggccgcatcctccccctggcgctcgccgtcctggccacggccgccgtggccgtcgcctcctcctccttcaccgactccaacccgatccggcccgtcaccgagcgcgccgcctcgacgctcgagtccaccgtcctcgccgcgctcggccgcacccgccacgctctccgcttcgcgcgcttcgccgtcaggtacggcaagagctacgagagcgcggcggaggtgcggaggcggttccggatcttctccgagagcctcgaggaggtgcgctccaccaaccggaagggcctctcctaccgcctcggcatcaaccgcttctcggacatgagctgggaggagttccaggcgacccggctcggcgcggcgcagacctgctcggcgacgctcgccggaaccacctgatgcggga

SEQ ID NO: 4342 - DNA, 310 bp, Triticum aestivum
  unsure (1)..(310): unsure at all n locations
  Clone ID: uC-tsro9316094a11b2
gtttctgtnctttattgggaacgatggctgacgcatctgctcctgcccctgagggccatcgcgaggagggtggtcgcggcttcggccgtggccgtggccgtggaggccgcggtggccgccgtggccgtggtggccgcggtggcgcccccggcgacaagaaggagtgggtcccgtgcaccatgctgggccgccttgtccgcgacggcaagctgacctccctcgaggagatcttgctgttctccatgccgatcaatgagcacgacatcgtcgaccgcttgctgggcgagagcctgtaggacgaggtgatgca

SEQ ID NO: 4343 - DNA, 396 bp, Triticum aestivum
  Clone ID: uC-tsro9316094b01b2
gcgtattcctttgggttccgtagtaaacgccttaggactaagcgttaccggaatatgctttggaactcgtctgtacttaggactaagattagaaccaatagcgctttcacgcagagtcaagcatccgctgcaagctctgcacagtatacagtgggtatatacgatgccttcggcaatacagctagtaccttctggaccgcgggtggaggcgcatttgcaccggatatcagctctggtgttcctacaattactggtaacattgacgtacgtggcggtgttcttggtatacgcgttaaatatactaatagataaaagtggatgaaaaaaccattgcgatacccatcgtaatcgccttgcaagacatacacttttgctcaaaaaaaaaaaagggcggcc

SEQ ID NO: 4344 - DNA, 476 bp, Triticum aestivum
  Clone ID: uC-tsro9316094b03b2
ggtttctggagctgatcgttcgtcgataatcttgccactttctggtttgaagcagttccatgagatggtgggacactttgtagatataatgaaggacagacttgaaggaatgacgggcgcgaacgtgcgcactgtcgagcccagccagagatgattagctcgaccttgtggcacttactgctgttatgcctcctctaggatttgtgtaagtgatgtggtgtgtggttgcgtagatcacgcagtattaattcatctgatggggataataatgtttgatgtttagttttttctttcttctgaattccgtggcgaggattgatttgcttgggaccttttctgttgaggaataataagcagtataatgttcgtgggtggtatatgttggttgctgcgtgaggcggagttagtttgaggagtaggattgcttctgttctgtggtataatcgcaggccttcgaaattgattctttcactttc

SEQ ID NO: 4345 - DNA, 61 bp, Triticum aestivum
  unsure (1)..(61): unsure at all n locations
  Clone ID: uC-tsro9316094b06b2
cctattcgtncgccccacccgtccgcccacgcgtccggggacgcgtgggtctagatcgcga

SEQ ID NO: 4346 - DNA, 486 bp, Triticum aestivum
  unsure (1)..(486): unsure at all n locations
  Clone ID: uC-tsro9316094b07b2
gtcttcctcctccccaactactcctctcctccgcgcatcgcatcgcaccgggggtcacctgagatcacatacacaatggtgaaggctgtggctgtgcttaccggcagtgagggtgtcaagggcaccatcttcttcacccaggagggagatggcccgaccaccgtgacgggaagcgtcactggactcaaggaagggctccacggcttccacgtgcacgctcttggtgacaccaccaacggctgcatgtcaactggaccacacttcaaccctgctggtcatgtgcatggggcaccagaagatgaaatccgccatgctggtgatcttggaaatgtgacagctggagcggatggtgttgctaacatcaatgttactgactgccatatcccncttactggaccaaattcaattgttggccgtgcttgtgtcgtccacggtgaccctgatgatcttggcaggggtggacatgagcttagcaagagcactgga

SEQ ID NO: 4347 - DNA, 374 bp, Triticum aestivum
  Clone ID: uC-tsro9316094b10b2
cttttctccatttccacacagcctttagctaattattaagctaccactcttcctagctaagcatctttttgagttatccgtggtgatcggatggacagcgcgaggagctgtctcgtggacgacgtgagcagcggcgcgtccacgggcaagaaggcctctccggcgccagccgcgccggcgaccatgccgctgcagcgggtcggcagcggggccagcgcggtcatggacgcgccggagcccggcgccgaggcggactccgcccgcggcgggcggctgccgtcgtccaagtacaagggcgtggtgccgcagcccaacgggcgctggggcgcgcagatctacgaacgccaccagcgcgtctggctcggcacgttcac

SEQ ID NO: 4348 - DNA, 413 bp, Triticum aestivum
  Clone ID: uC-tsro9316094b11b2
cctacgcgtccgcccacgcgtccgcgcatactggtgaaaaggccgacacgatggagacctccttcctagcaaagacgctgaagaacctatatctggtgtcctgaagtacgacagtcgcatctttcaccagtggacgtttaacactgaagctcaccctttgagaatcgttccgacacatggatgtaactgccagtcaattgaaactggaaatccagtggctcgaccaggcggtaggaatcaaggtaaacatgagtaggcctgaacaacacaacagaggatttttgcattcgccgagagattgtgacctgccttgatgagaacgctatgatacgatgggaatttcttactgcagcggctaagactgcacataacggcactaggctaattacgcaacacaattgtaggttgagcat

SEQ ID NO: 4349 - DNA, 261 bp, Triticum aestivum
  Clone ID: uC-tsro9316094c01b2
acccccgggggaacgcgaaacgaaaatcccggggcgacccacacacccggttataacacccgcccacccgacccggcgagcgccggggggcacacgaaagcccacgcggcggcccaccccaaccccaacgagaccggaaaccgccaaaggggacaaaaaccgcccaaccaggcccagcgaacgaaaagaaaggaccaccgcaaaaacaagaaacggagagcccacccgccccaaaagggaaaacaaaaccacccgcaaaac

SEQ ID NO: 4350 - DNA, 420 bp, Triticum aestivum
  Clone ID: uC-tsro9316094c05b2
caatgacaagggcaggctgagcaaggaggagatcgagaagatggtccaggaggctgagaagtacaagtcggaggacgaggagcacaagaagaaggcggagtccaagaatgccctggagaactactcgtacaacatgcgcaataccatcaaggacgagaagatcgcctccaagctgccggccgacgacaagaagaagatcgaggatgccatcgatgctgccatccaatggctggacacgaaccagctcgctgaggcggatgagttcgaggacaagatgaaggagctggaggccctgtgcaaccccatcatcgccaagatgtaccagggtgctggtgccgacatggagggcggcatggacgacgacaccccagctgcatccggcggccctggccccaagatcgaggaggtcgactaaacagt

SEQ ID NO: 4351 - DNA, 478 bp, Triticum aestivum
  unsure (1)..(478): unsure at all n locations
  Clone ID: uC-tsro9316094c08b2
cctacgcgtccgcacgagttctggatctgcctcctgctcaccttcctcgggtacatcccggggatcatctacgccatctacgccatcaccaagtaaatcaaggcagccgccccgagtgttccggcggaatagtagtatatttccatgatgatctcgcctgtctattcctagcgtgctcgggttattgcttgtgtgggttctttgaattcttttccgtgtacgttgacgatgcgaatttctctgtggtttccatggaccgtgtgaagagatttcagcttctttatatgtactatgtatatgcactagtatcatgtatgggagtttatgcatacagtacttattgttgaagttagattaccgcctccctgttcaagtctggaatcggcagtgatgtgtatgtagtcgggtttctcatttgatttttcagtttttcttcagtannntatatatanataaagaagcatcaggttctactggg

SEQ ID NO: 4352 - DNA, 117 bp, Triticum aestivum
  unsure (1)..(117): unsure at all n locations
  Clone ID: uC-tsro9316094d02b2
gnatactcagacaccgccacgtacgacaatgcagggagtatttagaggcattgttggtgttggcccaccctgactagcgagtgctaccacaacagggcggatcatggccccctgggg

SEQ ID NO: 4353 - DNA, 512 bp, Triticum aestivum
  unsure (1)..(512): unsure at all n locations
  Clone ID: uC-tsro9316094d07b2
ttttacgcgtccgcccacgcgtccgtacagagcacttattccagatttgtaccgtgggaaggttgctttggaggtagctgaagcacaacatctgatggaaggactagactggcagggtgcaatcaaggatattcaggcttcagttaaatggctgaaggaaaatggatcacccaaggttggtgttactggttattgcatgggaggtgctttggcaattgcaagtggagttttggtcccagaggttgatgctgttgttgctttctacgggacgccatcttcggagcttgctgatgcttccaaggcccaggctccaatccaggctcattttggggagcttgacagttttgttgggtttgcagatgttaccgcggccaagtcgttggaggagaagctcaaggcttctggagtggcacatgaagtccacatataccctggatgctcacatgccttcatgaacgcatcgcctgaggccgtcaagaggaggaagggcantggtttgactgatgagaatc

SEQ ID NO: 4354 - DNA, 476 bp, Triticum aestivum
  Clone ID: uC-tsro9316094d09b2
agttaaaacagttttccgaagcttcgagacagggcggttggcggcagccgcggggacgatggtcggaatcttctccaggttctcttccggcgccggccaccgccgcgccaagagtgccgtcgaggttgtggagacattggcgcccaacatggagactggggagtctgacccggcagccgatcctggagatagccctcacggcattgaggtcggcatcgagttcaagccggtggagcaccctgtggagcctgtcaaccttgaccaaccagtgaaatgcccgcttcctgagccatctatactgcatgatggaaggatatggcaagagaggatgtctacagcgggcgggaggccgaggacagacctgccggtcgtgaaggaagggtcgcagctcgagcccgacagcagcaccacaaggtcgaggtctgcggtccggaggcgcgccatactgccctccgtgagcgcccctgagcataaca

SEQ ID NO: 4355 - DNA, 413 bp, Triticum aestivum
  Clone ID: uC-tsro9316094e08b2
gttggaatgggtggcggcggtggtggcagcaacaatggtgggttcggcaacggtggaggtagcggatctggatccggcagtgccggatacccctaaatttccttttcgaacaagctagaatcggagcccatcacacatttctagtctcttcatttcactattccacgtcatttgtgtttcttttcattcgtagagttttcactaggcgcctcctaataaagggctccatgattccagtggatgtattaagtagttagtggagcaatctactaacacgtaatcgctacctacgtacgaatacgttatgttatgatttctgatatgtttcgctgctagtgtgagtgcttggttactccttccgaagcaatatgcctagctaaggttgtctaaaaacaaagctaatggttattctg

SEQ ID NO: 4356 - DNA, 527 bp, Triticum aestivum
  unsure (1)..(527): unsure at all n locations
  Clone ID: uC-tsro9316094f04b2
gcatcggcggcagacacggccacggccacggccagggcctcggcggcggtgctcaccgcgccgctgtcgctggaagggggcctcgcggcggagctccagccggcgaacctcgtgcagcgggtgctcagcctcttcgggaacgtcaggccgggggccgatctctcgcacttccagctgcctgctacgttcaacctgccaaaatcgcagctccagttgtacggggaaatagtctactgcgacggagatgactacctgagcagatgcggcaaaggcaaggacagcctcgagcgcttcacggcgatcgtcgcatggagcatctcgacgacgaggccgcccatcttcggtttcgcgccctacaacccggtcctcggagagacgcaccatgtctccagagggtcactccatgtccttcttgagcaggtgtctcataaacccccagtctcggcgcttcacgctaccgatgacggcgganacgtcgagcttgtctggagccaacacccagtgccgaaatttaatggtgctagcat

SEQ ID NO: 4357 - DNA, 282 bp, Triticum aestivum
  unsure (1)..(282): unsure at all n locations
  Clone ID: uC-tsro9316094f10b2
gacggcttaccttgattatatgcgtgatcctatacaacatgttgatctgtcatggcgcctttacaagcctattgactgtgtagaagccgtagtccatacaccaacataataaagctgtatgggccacattncgctttgttgcatgaacaactgataccgagaagtgcccctaacgatcaccattgaaaaactggcgctccctgaatgacaaatgaaacaggcccttgatgacaccatgactcaccttggcagtggccggttactctacaacgtgaccgactg

SEQ ID NO: 4358 - DNA, 114 bp, Triticum aestivum
  Clone ID: uC-tsro9316094f12b2
tcggttacgcgtgcggccacgcgtccggccacgcgtgcgaccacgcgtgcgcccactgcgtgcgcccacgcgtccgtccacagcgtccgcccacgcgtactgtagatcgcgagg

SEQ ID NO: 4359 - DNA, 498 bp, Triticum aestivum
  Clone ID: uC-tsro9316094g06b2
ccttcgcgtccgcccacgcgtccgcccacgcgtgcgcccacgcgtccgccgacgcagcacgcatcccccatagccagtgctcctcctagcttgcttgttccccggcggcagagaaaggcagacagaggatgtcgaagtacgtggagctgctggacatgggcgtgcgcatcgcggccaggttccactcccactgcccgcagacggcgcgcatgtactacaagccgccgcagtccacctccacgtcgggcgccgccgaggacgcgccgacggatcggaggaccgccggctttgacggcggcgaggacgtggctgctggcttccggcccttcgccgcctcgggagctctcggcgccggcgtccagccccggttcggcttcgacaccgcgcaggtcctcatctacgaggtcgtatgagtcgagggcttgaaatgaacaacggcgacgagttcttccggagaaagatgagatctcctggatgagatttttttttttttttttg

SEQ ID NO: 4360 - DNA, 386 bp, Triticum aestivum
  Clone ID: uC-tsro9316094g07b2
gatcttctgaattccaaactgaagctttcctcagttatgttgtatccagaattgacagtacatgggaatatgggactgttgtatttaaaaaaaaaaaaaaaaaaaaaaaaaaaaaaaaaaaaaaaaaaaaaaaaaaaaaaaaaaaaaaaaaaaaaaaaaaaaaaaaaagggaaaaaaaaaaaaaaagaaaaaaaaaaaaaaaaaaatggggggggccctttaaaaaaaaaaaaatttccttccccgtgaatgcaacttaaaagttttttaaaagggaacaaaaaaaaaaattaaggggggggcgtttaaaaacgggggaatggaaaaaaccttggtgtaaccaaataaaataccttggaaaaaaaacccctttttcccagttgggg

SEQ ID NO: 4361 - DNA, 428 bp, Triticum aestivum
  unsure (1)..(428): unsure at all n locations
  Clone ID: uC-tsro9316094h02b2
ggatcttctgggtgggcccgtccatcggcgcggcgctggcggccatctaccacgtggtggtgatccgtgccatccccttcaagagccgcgactagtccaccaatcaaccagccgcgaatggaatcttatctctgttcatggtcggtcgatcgatcatgtggtggtggcggtggttgctctcgcgcgcgtagtacgtggatcatgtctcggccgcgcacgctgtaatcatctatatctaccgtgctgttcctcccctcctcggtgtgtgtgcctgtcggcagcgtcacctgttcaagtctgcgagttgcactttcccttccttgtgtattgcactacgcacgcgatttaatcgggcgtgcatatctatgcaaattattacgtattatgaaggaaggacgatcgagttaatcgcccttnccaacagttgc

SEQ ID NO: 4362 - DNA, 541 bp, Triticum aestivum
  Clone ID: uC-tsro9316094h04b2
ggttgtgttggcatgggtgctagtgacgaggctgaaattcatggcattgatgtatctgtgcaaagaaccgagagtggtgtaggtgatgcagaacctattactgaccttactgagacaatgggccataccggtgaatcagttccagggcctggattgatggatgagtttgtacctgaagaagttgatcgggaagaacctcatggagacagccaagatattgtgttccgttcagcaggccgtgctgacagtggatcaaaatattttggttctaataaagctgattctggtgagagtggaaaaaagataggacatgccattggtcatgaaagcagcatgcatccttctctctcttgcaatgctggggtgtatgccggcttcgatgcatctaaagaggaagtgacacaggctggcaaagcagtgactactgatgatcaaggcttgcaatatgatctgcggaatggattacgagcaacacatggagaaaatgactatgaaccaggtcttccaagatttgatccttgtaagcatcacaacagttact

SEQ ID NO: 4363 - DNA, 55 bp, Triticum aestivum
  Clone ID: uC-tsro9316094h06b2
acccgtcccggatttccgggttggccccacccgtccggtttttcctagatcgcga

SEQ ID NO: 4364 - DNA, 82 bp, Triticum aestivum
  Clone ID: uC-tsro9316094h08b2
tttacgcgtccgcccacgcgtccggccacgcgtgcgcccacgcgtccgcccacgcgtccgcccacgcgtccgtagatcgcga

SEQ ID NO: 4365 - DNA, 290 bp, Triticum aestivum
  Clone ID: uC-tsro9316094h11b2
gttaggtcaatggcaggggaaaggaaatacgaggatgagaaaaagatcagagagaaggccaagaagatacgatcaacaggaaagtctccccgtggatgctgcttttgagacattgccattctacaaaatttgaaacaaaatgaatggtgcgacttgaatgcgatatgagtctcacaacagctatgtattgtattataaaacgtatttggtttgatgagtgataagagtgtacagttgcatccaacatgcaattgcattgtatcaggatcagcctcgaaggacaaaactag

SEQ ID NO: 4366 - DNA, 194 bp, Triticum aestivum
  Clone ID: uC-tsro9316095a06b1
ccctcttgtccgtgcatgcttgataagtttgtgattgatcacatgatcagtgtatctcattatggcatctaaatgcatgattcatgtatttgtaaaaggattgtatgtgtatgaggaataaatggttcgtccaaaaaaaaaaaaaaaactcccctaccgcgaccaaacgcactcccaccaattcagagcgcaag

SEQ ID NO: 4367 - DNA, 308 bp, Triticum aestivum
  Clone ID: uC-tsro9316095a07b1
tttatgatttgcgtcgcggccacgataccgcgataagttccttctatagtttgctgggatttttgggtccttccagctcgagtttttggtcgcgatgctgatgacgtgtccggtgattcagaggtatagtaataaataatttggcaaaactcacggatgctaggcgctaggcacttgtaccgttgtacggtccttgcaagcttgtaatgctgattaattatgtatgatggcatcttcaattagccttttgagtgctatatctcaaagtttcttttttggtcaaaaaaaagtgaatacgggctggtcgt

SEQ ID NO: 4368 - DNA, 468 bp, Triticum aestivum
  Clone ID: uC-tsro9316095a10b1
tttgttaaaggcagcctcaagctgttccagaggcggaccatcaagcaagcgcatcaaagggagcgctgggggagcaatgtccccttgcaaggctggacgtacaagcgacaacaccggtgcaccatcttggcccgacaccggcaccagaagcagcagcaccaccgcattcatcggctctccagcctcccatgtcttctacggtaccggatctccctactcttatgataggtcagctgggcacgccctctactggggccagagcccacttccaatgagggagccatatgcatacccacctggtgagccggagcccaatgttggccttggaatgccataccaagcccctcccatgacctaccccaaatacgccggaaacaacaacggcctgggagcctatggcaatgccatgcccccagcctcaggctttcaccaggcttactaccgggagaatcagccagttggaaatga

SEQ ID NO: 4369 - DNA, 454 bp, Triticum aestivum
  unsure (1)..(454): unsure at all n locations
  Clone ID: uC-tsro9316095a12b1
tttttctgtcccgtcgcggaacccaacgcgcgcgcaccctctctccccccgaatggagcggcagcctcggccgcagctggccgtggcggaggaggccatcgcgctctacgacacctactggttccaccgcctcgtcctcaacgcctactcccctcccgcgccccagccgncgccgccggcgcctgagcgcgagcangccgagcaggcgccggcggaggagagcaagagcgagctgcggcgggccccgtccgggctgcagcggcaccgcaggacgcggagcgacgaggccaaggccgccgcgttccacggccagctggagccgctcaagatccccaacggccaccgcgcgaggctcgagaccatcctgtccgggaaggacggnctggccgcgccggagccgctgcccgagcgcccgaagccggaggcgctgcggcccggcgggaggaggccgaag

SEQ ID NO: 4370 - DNA, 512 bp, Triticum aestivum
  Clone ID: uC-tsro9316095b01b1
agagcctgatgagttatggggcaagaatgtggcggagaggctcgcttctgatgggcagagactggcgagcatccaagagagcatcgaggaactgaagcggaagatgggtggcccggccaaggggcactcggaatacgagagcgtgagcagtcagctgcgcgagacggaggggctggtgttggagcagatgaacctcaacagcaagttggcaaagaaggccgagaattaccctgcgctgttggatagcatgaacgcggagcgggaaggtggttttccaagcaagaggaagatgttggagcaggtgcggaaagggtcggacaaggtggcgaggctggagctggagcttcagaagatacagtacgtgctgctgaagctggaagaagagcacgagtacacaaggctcaaggtgtcggagaagcgcacccgggtgctcctcaaggattatctctacgggaggaaggaccaccgtggaaagaagaagagggcacccttttgcagctgtgtgcgctcta

SEQ ID NO: 4371 - DNA, 512 bp, Triticum aestivum
  Clone ID: uC-tsro9316095b02b1
gttcatcgtcttccagccgcttccttccccatgcgtccccggcgtcactcaccgtgcacacacacagaaagtagtgagctcgtcgatccgggagagatcaggatgagcgaccccaagtacgcctacccctaccccgcgcaaggttactaccagggagggccataccaggggccgccggtgatggcgccgccgcagtacgccgcgccgccgccgcgcccccagcccagcttcctcgaaggctgtttggccgcgctttgctgctgctgcctgatcgacgagtgctgctgcgacccctccatcatcttcgtcggctagatcacccaaggccaagccagggcatccggcctggcatgctgtcaactgtacaaagagatgccctcatcaaggatatttaccacgttgttgccacgctatataatatatcatgatctctctcctccatatatatgaacgtattcccttattattgttatctcactagtcactacggtgttgcctgcctttgtaactcg

SEQ ID NO: 4372 - DNA, 336 bp, Triticum aestivum
  Clone ID: uC-tsro9316095b06b1
tatactttgtaaactggacgaatgcggcctccgttccctgagtattgattattatctgagagaaaaggatggaggagagccgttcctccctgctttgggttgtatccaggaggtttgtgtagatggacaagatatcagccggattagcagatggctcgcgtcacttcccaacctacacatgttgtttttcaacggtccgaagatagagcagcaggatattgagatgattggattgatacccaatctgatcgatttgttgctgcctttacacaaaacagacgacgctgggcggctcatcattaggcgcgaaggatttcaacagttgcagagtttccc

SEQ ID NO: 4373 - DNA, 511 bp, Triticum aestivum
  Clone ID: uC-tsro9316095b07b1
tcttttctccatcccagccaaacttttctctcgccctcgaagcagcagccgccgcagcatccatggcacccaaggccgccgagaagaagccggtggagaagacccccgcgggcaagaagcccaaggcggagaagaaggtgccggcgtccaaggagggcggcgacaagaaggggaagaagaaggccaagaagagcgtggagacgtacaagatctacatcttcaaggtgctcaagcaggtgcaccccgacatcggcatctcctccaaggccatgtccatcatgaactccttcatcaacgacatcttcgagaagctcgccggcgagtccgccaagctcgcgaggtacaacaagaagcccaccatcacgtcccgcgagatccagacctccgtccgccttgtccttcccggcgagctcgccaagcatgccgtctccgagggcaccaaggccgtcaccaagttcacctcgtcctaggctcctcgggcgtagagacttgtgtttatttcttcttcctc

SEQ ID NO: 4374 - DNA, 232 bp, Triticum aestivum
  Clone ID: uC-tsro9316095b08b1
tgcattttctactgaaaatggaaaatggggaattggatgaaagtacctgagatgtgttagtaggatatttccaaggaacacctaagttgtcttttttttgtctgactagctgccgctgcttgttgagttattctggaatctgttatgcactttgagattgggtgcctttgttcgaaatctatgagctgtgtctgtcgctatctctgaataattctatttgcactattacgtt

SEQ ID NO: 4375 - DNA, 503 bp, Triticum aestivum
  Clone ID: uC-tsro9316095b09b1
tcttttacgcgtccgcggattgttggttacctctcactgcgtgtgaaacagctagacgtccgatgtgaaaccaaaacaaaggataatgtctttgtgactgttgttgcttctgtccaataccgtgcccttgttgataaggcatctgatgccttctacaaactgagcaacacaaagcaacaaatccagtcgtacgtctttgatgttattagagccactgtcccaaagctggagctggacgatgcatttgtgcagaaagatgacattgcaaatgctgttgaagaggagcttgaaaaggcaatgtctatgtatgggtatgagattgtgcaaactctgatagttgacattgagcctgatgtgcatgtcaagagggcaatgaatgagatcaatgcagcttttaggatgaggtcggcagtcaatcgacaaagcataggctgaatagattcttcagattaaacgagcagagggagaagccgagtcaaagtccttggctggtgtgggattga

SEQ ID NO: 4376 - DNA, 168 bp, Triticum aestivum
  Clone ID: uC-tsro9316095b12b1
tttgtatgttgtaaatacagagccatatgagcattagctaacttttgctgtgccgtgcgtattgtagttgtaaatcttaggaagggtgtctcaacttgtaacacttacactgtatcggtgcagacgtttgattttacgtatgatgtgtactcaaaacaacaatgacgt

SEQ ID NO: 4377 - DNA, 348 bp, Triticum aestivum
  Clone ID: uC-tsro9316095c03b1
tttattcgtccgcgcaactcatgcaaagggtggtggatctcgccctttggcaaatcgtcggaaggaaggggatctcatcattgaaactggtgaagatgtgccagaatatccccaaatgtacttcaagttctctgaatctggagattccatcatccccttggaatgaatcattggagaagcacacgatacatgaataggagaaatgcatcacactcgagtttggagaagaaaaaaggatacaaggacaaagatagatcagtattctgctctaaagctgaaactctttgtgggatccatgttacttgattctattatggacgtatgaattggttgtatatatttacatta

SEQ ID NO: 4378 - DNA, 295 bp, Triticum aestivum
  unsure (1)..(295): unsure at all n locations
  Clone ID: uC-tsro9316095c05b1
gtgttctcatggtcaggctcagccccgacctcatggacgagccccgcaggtggctcgacgacgccgtcgcgcaggcatcccacttcctcttcaccagctaggctgctgctgcatcgatccgataggaaaattaatcttcttcttccttgtcgnttcttcttctctccgctgttcatagagtcaggattcaagaaaagaaaaggcactgtcgattgggtgaatgaactccatgtgtactggcgccgccgcacgggaaactctctgaaatataatcgacataagcttctaccgcttc

SEQ ID NO: 4379 - DNA, 237 bp, Triticum aestivum
  Clone ID: uC-tsro9316095c08b1
taacttgaccggagagaagacacggtcccccggggaggaggtggacaaggtgtttgttgctatgaaccagggtaagtacatcgacgcgctgttggagtgcctcaaggagtggaacggctagcccctgcctctctgctaatcatggagatgacgagaagatgctgtgctttatgattctgaatgctccctttgttctgaactgataatgttactgtttctcgaatttatactcctatt

SEQ ID NO: 4380 - DNA, 488 bp, Triticum aestivum
  Clone ID: uC-tsro9316095c12b1
ttgctcacgcgtgcgcccacgcgtacgcgggaggtggtcgcgggcgtcaagctgcggaggacgaagagcctggtcacgttgacgggcggcctccagggcagcatgcgccgcgccctccggataggccgcggcggcagcgacgggagcagtcgccacggcaggagcgtgccgttgggccagtccgggcggtggccatcgttcctgtcgcggaccttctcggcggcgtgggggtcgaggtcgacacggaaggccgagtaggacaggtcgagcaagggcgggaagccggacggcgccggcggtaagtcagtggattgcaaacaccaagtagtgcgccgctgggcaacgtgaatagtttgacccgggccgtggtcaaaccgggcatggttacgaaacggttgctgggaatgggaagaaaacgggcgatggttttcgtggtggcgaggaacttcttgttggcggggtgttttttttaggggacaaattttttt

SEQ ID NO: 4381 - DNA, 225 bp, Triticum aestivum
  Clone ID: uC-tsro9316095d07b1
ttgtaagacggccggggcgagctctccagcggttgctatggtggatacgagggtatgtgaggtcatatacaaggttgaagctattgtatagtgtgacctaggtccgctcaagtagtcggaggtcaacaagctagtgactgccacaaccgaggggttgcccatctaagagagctaggactagaagaatatttaggcagatcttatggagaagatagggccctaccg

SEQ ID NO: 4382 - DNA, 65 bp, Triticum aestivum
  Clone ID: uC-tsro9316095d12b1
tcgttcacgcgtccgcccacgcgtccgcccacgcgtccgcccacgcgtccggttctagatcgcga

SEQ ID NO: 4383 - DNA, 85 bp, Triticum aestivum
  Clone ID: uC-tsro9316095e02b1
ctcattcgtccgcccacgcgtccgcccacgcgtccgcccacgcgtccgcccacgcgtccgcccacgcgtccgttctagatcgcga

SEQ ID NO: 4384 - DNA, 413 bp, Triticum aestivum
  Clone ID: uC-tsro9316095e05b1
gtcttaacagcaagaacaagagcaggaatatatccatccatatacagcagcaagcataccttcctcgcctttctccttgaggttcatcgcagaaacaagaaactcgcagccatggacagatctgctgtttctcaggcccttccggtgcaccaggaagacgaggacctgttcgagacctcctcctccttctcctgcgactccgacgacgaggcccagttctcagacggcgaggaccagtttgtgccggcttccccgccggtgcggagactcaactctgacagcgtctacgatctgtcgtccatgaaggccgaactctccgccaagaaagggttgtcgaaatactacgacggaaagtcccagccgttcgcgtgcatgttcgaggtgagatgcctggaggacctgcccaagaagag

SEQ ID NO: 4385 - DNA, 254 bp, Triticum aestivum
  Clone ID: uC-tsro9316095e08b1
ttggtcgtcaccaagttcacctcgtcctaggctcctcgtgcattagttcttgtgtttctttcctcttcgttgtctgatgaattctgtagctagctgtgtgtgttctgacagcgtcatactgtaacaatggtgctgcctgaataaatagtcatgttgctgcttgaatggacgactgtcgccttggaaaaaaaaaaaatataaaaaaaaaaaaaaactacaaaaaataaaaaaaatatcaaaaatcaaatcaaaac

SEQ ID NO: 4386 - DNA, 395 bp, Triticum aestivum
  Clone ID: uC-tsro9316095e10b1
ttttttcgcgtccggggaatctcagctgatgacatggaagcagtttacaagaaggttcatgctgccatccgtgctgatcccaccatggccaaatcaaccaaggcgcctcccaagactcacaagagatacaaccccaagaagctgacctatgagcagaggaaggccagcctcgttgaaaggctcaacgccctcaacaactctgcgggtgccgccgatgacgatgaggacgacgacgagtgaagagctctttgtccaccccagtgtagtcttgcaacgtgcgtttttgttaaagtccggcactctgcacaatgacctgttccattgagttctgtttgtcctgctggagttatagattgtgttatctgggttatgtgccgtgctggcatttggatctt

SEQ ID NO: 4387 - DNA, 304 bp, Triticum aestivum
  Clone ID: uC-tsro9316095f03b1
cttatttttgcacggtccgcctcctcacgcactccacacaaacagacgcagcagccggcatgacgcataagatcgtgatcgcggtgcagatggggagcagcaggtgccggtccaaggcgctggcgctggtggcggccacgccgggggtggactcggtggcgctggccggggacggcaaggaccaggtagtggtcgtcggccacggtgtcgactccgtcaagcttaccagcgcgctgcgcaggaaggtcggacacgcggagctgctgcaggtcggtgacgccaaggaggacgggaagaagccggt

SEQ ID NO: 4388 - DNA, 390 bp, Triticum aestivum
  Clone ID: uC-tsro9316095f07b1
tttttcaaaggccgctgcggagaagtcaatggcgatgggttgtttgctgtgcgaatacacggccgagacgctggtgtggatcaagggtgacacaagcgaacttcgcctcgccaaggaagcgctcgagacgatgtgctttgtgctgccgccccttgcgcgctgtgacgtgctctcgtccaagtttgacaaccttgaggaactcgtgagccaaggcaagagcccgagccaggcatgccacgcgatcagcctgtgtgacgcggcgtttgtggagaaacccgccccttcgaaccgcattgatgatctcgtcgaggagcagtaaacttcagatcgacgtgtcgctccatggatgaagtggtggcggccttcctagcttgcttttttccacgttaa

SEQ ID NO: 4389 - DNA, 350 bp, Triticum aestivum
  Clone ID: uC-tsro9316095g01b1
ctcggttgtggcgactggaatagaaactgaaattggaaatgtgggtggatggcggcgtcattggcgctcattagggtggtcactatcatcatcgcggagtcaatcttcaaattggaaatgttttccttcgtttcgttcttttttttatagagggaagatctggctttaaagaagaagaattcctgcacctgtccatgcaatacaaaaagggcgtcccgtggtagtgttgttgaaccgctaatagcaaaattcactccgttactgtaattagaacccaatgccttcagataagggctcagatagcttatgtttaagctttcacctggatatattttggtcattcatggacc

SEQ ID NO: 4390 - DNA, 471 bp, Triticum aestivum
  Clone ID: uC-tsro9316095g05b1
cctctccatctcactcactctctccctccgccgccggcgcagcgtcctccccgcgactccgatggccagcaagtgggtcaggcccgaggtgtacccgctgttcgcggcgacgggcgtggccatcggcatctgcgcctttagcctccttcgcaacatcaccggcaacccagaagtcagggtcaacaagatggggagggcagcgggagtgcttgagaaccatgaggagggcaggcgctacgccgagcacggcctcagagcctatgtgcaggacaagacccccgagatcatgccaggaatcaacaagttcttcaccagcccaaaatgaagcactttagtctgtctgtgactcgcaattagtaactgttgtggtcaagtgcaaacctatttcaagcattcagtaatgttgttgcgtccataattcagaggacatcgtcaattacctcttattggaagaaccatgtgatgtttgat

SEQ ID NO: 4391 - DNA, 409 bp, Triticum aestivum
  Clone ID: uC-tsro9316095g07b1
tttcctacgcgtccgcaaagacaagtcaacctcaccgaggagatggaaggagaagggagaagatgtcgggccgcggcaagggaggcaagggactcggcaagggcggcgccaagcgccaccggaaggtgctccgcgacaacatccagggcatcaccaagccggcgatccgtcgtctggcgcggcggggcggcgtgaagcgcatctcgggtctcatctacgaggagacccgcggcgtgctcaagatcttcctcgagaacgtcatccgtgacgccgtcacctacaccgagcacgcccgccgaaagaccgttaccgtacatggacgtcgtgtactcgctcaagcgctaatggcgcaccctttacggatggccaggctaggccgccaccagattagctagcctgtgtctagggt

SEQ ID NO: 4392 - DNA, 460 bp, Triticum aestivum
  Clone ID: uC-tsro9316095g09b1
tttctttctctgtaaactggacgaatgcggcctccgttccctgagtattgattattatctgagagaaaaggatggaggagagccgttcctccctgctttgggttgtatccaggaggtttgtgtagatggacaagatatcagccggattagcagatggctcgcgtcacttcccaacctacacatgttgtttttcaacggtccgaagatagagcagcaggatattgagatgattggattgatacccaatctgatcgatttgttgctgcctttacacaaaacagacgacgctgggcggctcatcatcaggcgtgaaggatttcaacagttgcagagtttccgggtatacaatactcgtatgggaagtttaatgtttgaaccgggggctatgccgaggctcaaggagcttgaactccggaactttatcgaaaggcccaaatctgctgaggtcgatcttgacttt

SEQ ID NO: 4393 - DNA, 64 bp, Triticum aestivum
  Clone ID: uC-tsro9316095g10b1
cttttgttcatatgccagccagtgtgaaataaaggatcattttgcccttacatgtctgaccaaa

SEQ ID NO: 4394 - DNA, 86 bp, Triticum aestivum
  Clone ID: uC-tsro9316095h01b1
aaaaaaaaaaaaaaaaaaaaaaaaaaaaaaaaaaaaaaaaaaaaaaaaaaaaaaaaaaaaaaaaaaaaaaaaaaaaaaaaaaaaaa

SEQ ID NO: 4395 - DNA, 237 bp, Triticum aestivum
  Clone ID: uC-tsro9316095h04b1
tttattataaaaaaaaaaaaaaaaaaaaaaaaggaaggattaaaaaaaaaaaaaaaaaaaaaaaaaaaaaaaaaaaaaaaaaaaaaaaaaaaaaaaaaaaaaaaaaataaaaaaaaaaaaaaaagggggggcccgttttaggggacccaatttaacttcccgggctaggcaccttaatattttttttttggggcccctaaaataaatttatggggccgcgttttaccaccggtggat

SEQ ID NO: 4396 - DNA, 478 bp, Triticum aestivum
  Clone ID: uC-tsro9316095h11b1
ttggttggtcaattgaagtgactattaaagttgtgaagacagaatttcatactggtagacttattttgtccttttcgccccaattagctcagactactattacaaattctaatacaaactatgttcatcgtgagatagtcgatctacgtgatggctctgagtttgtgattaaagtgccttattgctacaactctatgtacatggatactgaccaagctcaaaatgatttattcatgatgatgcaggtcaatgtattaaatgaattggtagctccagacacttgcgcacaaagcgtagaaattttgtatgaggttaggggtggagtagacatggaatttcaagttccagttcctttcaatgttgtaccagttcaacagatagttcctcagagtggtggagaaggccaagctgagttagttcttgattcttgaattggtagttccactgtgcatgacccgtctaagatgtcttgctgagc

SEQ ID NO: 4397 - DNA, 59 bp, Triticum aestivum
  Clone ID: uC-tsro9316096a01b1
acgcctacgctaccgcccacgcgtccgcccacgcgtgcgcccacgcattcacccacgcg

SEQ ID NO: 4398 - DNA, 477 bp, Triticum aestivum
  unsure (1)..(477): unsure at all n locations
  Clone ID: uC-tsro9316096a06b1
cttattcgtccgtaccccgattccccttcccctgtgcgatcgatactctctagggttcatcggcggtcacaccaagcaaggatgactacttcaaggcgtcttgctgacaggaagagtgcgaagtttcagaagaacgtcacaaagaggggctcagtgcctgaaactactgtgaagaaggggaatgactatcctgttggacctatcgtgcttggattcttcatctttgaggtcataggatcatccttgtttcagattatcaggacggctactagtggtgggatggcttaatatcaagctgaaaacaagacgatcattatcagagatttattttatccatgtgtctgggaggcaatatcatatctgtaccctgtagcaaacttcaaccctgatgatgctatgaggagatttaaatcttgcgcagngagagtttacctnctgttactaanaacctaggctaaactagaaactaaatggtgc

SEQ ID NO: 4399 - DNA, 427 bp, Triticum aestivum
  Clone ID: uC-tsro9316096a08b1
ttgggtcaaactgcaggggagcgccgttgagggggagtgtgccgctgctgcgggacgacgaggggaggatgaagcgggagctggtcgcctgggccaaggccgtggcatccatggccatcagggaatcgatgcggtgctaaggagtacacgcgcagcgcgaggcgatggaggagtcatgggtcgatgcatttcttgtttgcttcgtgcacgcagctacacacccgcggcaccgagcgtggccggtggccgctggcctgcatttcgtttcctctgaatccctttttcacggagcgatcggtcatagtacatcgatcattcgggatgtaaatgtttctggaaaggatggaggactaatccataatacctaaatagttgaacccattacttttaaaaaaaaaaaagaacaaaacgatcgtccttaccaaca

SEQ ID NO: 4400 - DNA, 301 bp, Triticum aestivum
  Clone ID: uC-tsro9316096a09b1
tcgcctacgcgtccgggagggttgtgtatatatcttgtctgttctttgatatgtatggcagaccattatatatgtaacagattattctggagttatttatttcatattatatttaaaaaaaaaaaaaaaaaaaaaaaaaaaaaaaaaaaaaaaaaaaaaaaaaaaaaaaaaaaaaaaaaaaaaaaaaaggaactaacttaacaaggaaacaaaaatacacacgaaagaaagacaaactagtactctttgtggggggcccccttaagggaactaactggcacctcctttaaaatcgccactt

SEQ ID NO: 4401 - DNA, 219 bp, Triticum aestivum
  Clone ID: uC-tsro9316096a11b1
ctcggtttaatgcaattgcaaatcgtctacttagcaaggtctactttacatacaaaaaatgtatatgaaggagcaatatatgtgcaaaaggatagcagcagagcacttctttggctgttggaaaaatgggcaccaagcttaaggatttacacaattttctcaaacaagtaatcaatctatctatgtatctatcacaaaaaaaaaaaaaacaagagactg

SEQ ID NO: 4402 - DNA, 470 bp, Triticum aestivum
  Clone ID: uC-tsro9316096b04b1
cctcacgcgtccggcaagtgaacggtggacaccagtgcacacagttgagagtatagttttgagcattatttcgatgctctctagtccaaacgatgagtctccagcaaatattgaagcggctaaggactggagagaaaagagggccgaattcaagaaaaaggtgaggagccttgttcgcaaatctcaggaaatgctctgaaaaaggaggatcatccgggggagtccacaagcgctgcaattctcttgctttcaccaaatggggcacctgatgccagcacttgaacttctcccctgtttattttccgttcagcgtcggtcgaaggctgttgttggtcttgtctctccgagacactcggggtgctgcctattatgaactctcgattttattgtggcatggagttggtcaatgtcaagaagtattttcgtgtgatgccacttaatcgtagttatcggcggggaccccacaaaaa

SEQ ID NO: 4403 - DNA, 498 bp, Triticum aestivum
  unsure (1)..(498): unsure at all n locations
  Clone ID: uC-tsro9316096b06b1
gcgttactcgtccgcccacgcgtccggaccagacaacgcatacgactacctcacttactcgaccggccaaagcaagcaggtcaccatgggcggcgggcacgacatgcacggcggccacagcggcggagtgaagggcttcgtgtccagcctcgtcggcggcggcaaaagccacgggtacggcggccaggggcacggttgcgaccagggctacggcggccacgggcagcagcagcacgggtacggcggccacgtgcagcagcacgggtacggcagccatgggcagcagcaggggtacggcggccacggccagcacgggtaccctccgcccgccgccggtgcttgccccccgtacggcggctacccggcgcaaggctacgcgccggcggcgtaccccgcgcagcccgcgccacaccacggtgggcaatgggatcgtanacaccggcactgcggcgggccgggcacgctactccgcgggagcacatgggcggtgcaagcacg

SEQ ID NO: 4404 - DNA, 277 bp, Triticum aestivum
  Clone ID: uC-tsro9316096b11b1
gctgcacgcctgcggtccgtccggaattccggtcaccacgcgttcttcacgcgtccgcccacgcgtccgatcgagcgagccaacaactcgcagccaccacaatttcgaaatacctcctgcctgcctgcaagaaacgagcgccgagaaagaaatggaggcggcggtcggcggcagctggacacgcgtgcgtacgctcggccgcggcgcgtccggcgccgtggtgtccctcgccgccgacgacctctcgggcgcgctcttcgccgtcaagtcggcgccc

SEQ ID NO: 4405 - DNA, 248 bp, Triticum aestivum
  Clone ID: uC-tsro9316096b12b1
tctttcaggatggtgtcaatccactccaggcaggtgatcttctccagggcgacaaacacctgatttatcattatcaggtggtctgggtctgtttttagtccagtagactgtggtgttgctgttacattcatggtcactatgtcacaggggggcacactgtgccaccagtaatgtcgaattgtttttgagttttggcacactttaagatcgttttgtcagcgcaatgaaatctacctcatagataaata

SEQ ID NO: 4406 - DNA, 487 bp, Triticum aestivum
  Clone ID: uC-tsro9316096c03b1
cattcatacatcgacggccaagctagccctcggcggagcaaggagggccggagactgatcagtttgatatggcgatcaggaacgtgacggcggcgacccggtcgctggacggtgacatgacggtggacgagttcaaggagtggctccggcggttcgacgtggaccgcgacggccgcatcagccgcgacgagctgcggtgcgcgatgcgcaccatccggacgcgcttctcggggtacaagagcaagcgcggcatcgagtacgccgacgccgacggcgacggctacgtcgacgacggcgaggtggacgggctcatcgagtacgcgcagaagagcctcgggctcaggatcgtcgcctactgagaggagtctagctaggtctctattaagcgaagctagctccatatctacccatgcatgctagaataagcgctgatctatcgtttgctactgccctgtacctttgctttcttgtctacttattggctaat

SEQ ID NO: 4407 - DNA, 419 bp, Triticum aestivum
  Clone ID: uC-tsro9316096c04b1
gtttcggtgggcaagaactcgagcatcttgtcggcgtggtccggcacgacgcccttggccgcgtccgccgcgcggaaccgctcctcccacctggccagcagcggcgtcctcgccgggtcgatcagccggcgcccgatgatcttgtcgatcgcgccgaaccagccgaggtagccgccaagcacgacgtcgacgaacccgatggcgtcgccgccgaagaacgccttccccttggagcactccgcgaacgcgccctccagggtctccagcgccgccacggcccgggacaccgcctgcgcccgctcctcctccgtcttgcacgagaagagcatacccgttcacgccgacccgaccttgtcgtagacgaacgccgcccagaagcgcgccgtggcgcgccgtaaggggtctcccctctaccgtct

SEQ ID NO: 4408 - DNA, 407 bp, Triticum aestivum
  Clone ID: uC-tsro9316096c06b1
cttctttgctcagggagatcgaagctcggtacggcgtctgctacgatgctcggagcaatgaagcttgttctcaggagggagaagagcagagctgcggggacattttcgtgtgacttggccggttacttctcgacgtcgtccagctgccagaggctgtccggtaaagtcgccgtgatcaccggcgcggccagcggcatcggcaaggcgacggccgtcgagttcatccggaacggcgccaaggtcatcctcgcggacatccaggacgacgcgggccgctccgtggcggccgagctcggcccggtcgcggagtacacccgctgcgacgtgaccgacgaggcgcatatcgcccgggcggtggacttcgccgtggtccgccacggccggctcgacgtactgtacagcaacgc

SEQ ID NO: 4409 - DNA, 82 bp, Triticum aestivum
  Clone ID: uC-tsro9316096c09b1
tcggtttaaaaaagcatagaaaagagggagggatatgagaaaataaaataaaagggaagaaagaagaaaaagtcgtgcgagg

SEQ ID NO: 4410 - DNA, 424 bp, Triticum aestivum
  Clone ID: uC-tsro9316096c11b1
ttgtgttcgccagccggtgcttctgctgcgggcgcgggctcaagccggggggctcgcgcgcctgcgccctcatgctcttcctcttgtcatggttgaccttcctcgtcgcagcggcgtgttcgctggctggatcagtccgtaatgcataccacacccggtacagggggatcttcaacggtgacccgctctcttgcgagacgctgcgcaagggcgtcttcgctgccggtgcagccttcaccttcttcacggccatcctcagcgagttctactacatcagctactccaaatcccgggatgccgccggcggcgctccatacggcggctccagcatcggcatgggcccttataattaaggagcttggttctggaggtttatggaaaggttcagtccgtttcactttcagggcggatcatgcatatgtag

SEQ ID NO: 4411 - DNA, 325 bp, Triticum aestivum
  Clone ID: uC-tsro9316096c12b1
ttggtcgctgaatcagacgcctgcgccactgggctgccactgatcagttcaatggacgaccatagatcgatgcctgctcagtccaccgctgtcatctactaccactgtcggcgacgtttgtcccgttagtttgagaagatggattgttgcgcgcgcagtatgtttatgtctatgagttttgtgtcactttgtacccaaagatatgttttgtaagctggtaattcttgtgaatatgatttgattacttttcttgaaataaaaaaggaacttgataacacaaaacctaaacattaaacatggacgaaaatatacaacaaaaagactg

SEQ ID NO: 4412 - DNA, 491 bp, Triticum aestivum
  Clone ID: uC-tsro9316096d09b1
tcggtctcgacccgtgttctgatcacaaccgaggtgtgggctcgagggctggatgtccagcaggtctctcttgtcattaattacgatctccccaacaatcgtgagctttacatccatcgtattggtcgctctgggcgttttgggcgcaagggtgtggcgatcaactttgtgcgcaaggatgacatccgtatccttcgggacatcgagcagtactacagcacgcagatcgacgagatgcccatgaacgtcgctgatcttatctgagctctggaccggatcaatccctcccctctctttgtctcggtgcgatgtttggggaatttggttgcgttgcgatgtttggatgtatttctggtgctgcaacttgagatttcttttgttgcttttgggaacatgggaagtgtatatattctttctcggattgaccaccagctcatgtaaaacactcttttggtgttacgctattttctgattcggacgccatgacagac

SEQ ID NO: 4413 - DNA, 249 bp, Triticum aestivum
  Clone ID: uC-tsro9316096d10b1
tctcttacgcgtccgcccacgcgtccgcccacgcgttcgaccacgcgtccgtgctatttggtgaaaaaaaaaaaaaaaaaaaaaaaaaaaaaaaaaaaaaaaaaaaaaaaaataaaaaaaaaaaaaatatataaaaaaaaaaaaaaaaaaaaaagaaaaaaaaaaaaaaaaaaaaaaaaaaataaaaaaaaaaaaaaaaacaaaaaaaaaagccggctgccttttaaaaaaaaaaaaatttttctctcg

SEQ ID NO: 4414 - DNA, 497 bp, Triticum aestivum
  Clone ID: uC-tsro9316096e01b1
cctcacgtttccgcccacgcgtccgcccacgcgtggcggccacgcgtccgcccacgcgtccgacagcatcctctcagtccttagcttccttccctcgccgccacccaccaaggaaaggaggatgtcttgctgcggcggcaactgcgggtgcggcgccagctgaagtgcggcaacggctgcggcgggtgcaagatgttccccgacgtggaggccaccgccggcgccgccgccatggtcatgcccaccgcctcccacaaggggagctccggcgggttcgagacgggcggagagaccggcggctgcgactgcaccacctgcaagtgcggcaccgcgtgcggctgctcctgctgcagctgcaactgagccggcgcccaggaggccggccggcagaggcgagcacgaggatgaggaggacaagcaagcaagcaccatcaccaccagtttaccaccacccagcgtatcatcaccagccgccgcatgcgctcgcgggcgcgcgc

SEQ ID NO: 4415 - DNA, 474 bp, Triticum aestivum
  Clone ID: uC-tsro9316096e08b1
ctgtggcccagtcccgccggtccggcggtgggggcggcggcggcggctacggcggccagcgcggcggtagcggaggctacggcggcggcggcggtggctacggcggccagggcggcggcggctacggccagggaggcggtggcggctacggccagggcggcggtggctacggcggccagcgcggtggcggcggctacggcggcggcggcggcggctacggcggcggcggtggtggctacggcggccagcgtggtggcggtgactccggcggccagtggaggaactgagcggcggggccctccagttatcgatctatctaccatctcgtcgtcttcgtcagcaagttatcttcagttcctgtgtcagtcagtctgagtcgtcgtgtgtgtcgttgagtcctgtggtgtttttgatcgcgagctcgagtgtcgcttctgccggggttaatcagagctgggtacgcgaggaagaaac

SEQ ID NO: 4416 - DNA, 492 bp, Triticum aestivum
  Clone ID: uC-tsro9316096f01b1
aattcagttagacatggatatggcaaaacgtatggggatggatgcaaaaattgattacccagctgcctgcaacgcaatggagacgttgcttgttcataaagatcttatgaagactccagaactcaatgacatactagtagcactcaagacagcaggagttaatctttattgtgggcctgttgcgcataaagtattgggctacccaaaagcagattcattacatctggagtacagttctatggcttgcacagttgagatagttgatgatgtacaatcagcaattgaccatatacatcgctatggaagtgcacatacagactgtgtggtcactacagatgataaagtagcagagacctttctacgtcaagttgatagtgctgccgtattatacaacgcgagtacaagattctccgatggtgctcgttttggactcggtgctgaggttggcataagtacaggccgtatacatgcacgtggacctgtgggtgttga

SEQ ID NO: 4417 - DNA, 366 bp, Triticum aestivum
  Clone ID: uC-tsro9316096f07b1
gctacgcgtgcgcccacgcatgcatccacgcgctcggaatttgcgacctcgagtcctgtatgagcagcatggatgtatgcgaccgtggctcgttgttgtgcctgatagaagaaccggcccgactgaggttgtgtgcactgctaaaccaagagacccgagggaggatatgtgagctgccttgacgcttggcatacaagaggagaaaatgcaaggcctgcggaatggcatctcatggaaaaaaaaaaaaaaaaaaaaaaaaaaaaaaaaaacaaaaaacaaaaataaacacccactctaccaacggggggggcccttctaaaggacccaactcaccttccggggggggccactcccaaggttccaatt

SEQ ID NO: 4418 - DNA, 334 bp, Triticum aestivum
  Clone ID: uC-tsro9316096f08b1
tcgtctagatcgcgagcagccgcgcccaggtctagggttccccctttcttcttctccacgcgaatcagctagatactagcaccagcatcgatggcggcggcagcgccggcggacgcgaaggcggaggccgccaagatggacctcctcgaggacgacgacgagttcgaggagttcgagatcgaccaagaatgggatgacaaggaagatggcaacgaagctgtccagcaatgggaggatgactgggatgatgacgacgtgaacaacgacttcttactgcagccgtggaaagaagctggtgggcggtttcccccaaccgagctgcccctcttccccc

SEQ ID NO: 4419 - DNA, 498 bp, Triticum aestivum
  Clone ID: uC-tsro9316096g07b1
tcgttttgcccgcccccgccgccgccgccggctccttccgcaggagctccctcctcgcaggcgagatggtgtacatcaagaaccagaagacaagggcgtactccaagcgtttccaagtcaagttcaagagaaggcgccagggcaagactgactacagggccaggctgaggctcacaaaccaggacaagaacaagtacaacactcctaagtaccgttttgttgtgcgatttaccaacaaggatgtcactgcacaaattgtttatgctaccattgctggtgatattgtgatggccgctgcctactcccatgagttgcctcgctatggtcttgaagttggcctcaccaactatgctgcagcttactgcactggtctgcttttggctcgtcgtgtgcttaagaaccgtgatcttgatgaggagtatgaaggcaatgttgaggccactgctgaggacttctctgttgagccttctgatgagaggaggccttttcgtgcgctct

SEQ ID NO: 4420 - DNA, 373 bp, Triticum aestivum
  Clone ID: uC-tsro9316096g08b1
tcgcccacgcgtccgacgcgctgctctcggcggcggcgccaccaccggccctctcgtcgtcgctgcagtcgccgtcgccgacggaggtttcgtcctcgggccaccgctcccggtcggcctcctcgtagaaccccagcaccatgttcgacaggctcatctcgtcgccggcctccgccacaaccatttcctcgtgcttggttgtaaatctggtgtgcgtggctcacgttgctccgtggtcagctgcagggtccttcccgccggcttgtatacccggagacgcggcggacgtggcgaggcggcaatggatggtacggtgctcgcgggacccgcgcggagtggatgaggcagttccagatggcgtgggccccccggt

SEQ ID NO: 4421 - DNA, 496 bp, Triticum aestivum
  Clone ID: uC-tsro9316096g09b1
gctgaaggtggtgaagggcaacccgaacccgcgcagctactacaagtgcaccaccgtggggtgccccgtgcggaagcacgtggagcgcgcgtcccacgacctgcgcgccgtgatcaccacgtacgagggcaagcacaaccacgacgtgccggccgccagggggagcgccgcgctctaccgccccgcgccccgggcggcggacagcaccgtgagcaccggccactaccttaacccgcagccgtccgccatggcgtaccaaaccagcacgggaggccccaacgtcgccgccgccgggacgcagcagtacgcgccgaggcccgacgggttcggcggccagaaccagggctcgttcggcttcaacggcagcttcggcttctccgggcccgggttcgacaacccgacggcgtcgtacatgagccagcaccagcagcagcagaggcagaacgacgcgatgcacgcgtcgagcgccaaggaggagccgagggaggaggacatg

SEQ ID NO: 4422 - DNA, 490 bp, Triticum aestivum
  Clone ID: uC-tsro9316096g11b1
tctgttcttggccccagaaatcatcaaaggcgaaggccatggaagtgcggtcgactggtggacctttggtatcttcttgcacgagcttctatacggcaagacaccattcaaggggtcaggcaaccgcgccacgctgttcaacgtggtcggtcagcagctaaagttccccgagtcgccgtcgacgagctacgctggcagggacctcatcagggggctcctggccaaggagccgcagcagcgcctcggcgtgaagaggggcgcgacggagataaagcagcacccgttctttgagggcgtgaactgggctctcatccggtgcagcacgcccccagaggtcccgaggcccgttgaggcggagctgcccatgaagtacggggtgtcggaggcagtcgcgagcaccaacaagagggtggtcggcgcggacgccaagtccggtgggaagtaccttgactctgagttcttttagagtttgcgccttaacggcagatcc

SEQ ID NO: 4423 - DNA, 257 bp, Triticum aestivum
  Clone ID: uC-tsro9316096h02b1
ctttcgcttgggcggctacaagtgcggagattacacgctgccttgatggcccggcaatgctgccgatcaagatgaatgctgtggaaggtgccgccgtgtgggaataagcgagtggtgcatgtaccacttatgtggggcactagtgactccatggaggtgccaccatgtgatgcgtgcttgtggaaatatgtttctataagcatgtaatgtttcgtctgtgttaacgtgaaaatggatatcggtacggaaaaaataaa

SEQ ID NO: 4424 - DNA, 489 bp, Triticum aestivum
  Clone ID: uC-tsro9316096h06b1
gtttcgcgtccgttcctcctgcccttcttccaggggtctccgaatatgaagttgaggatcgctctattcattctggcttcgttcaccgctcacggccacccaagcgccgaaccgggcactgccgcgtttggttcttacttcaccactgtcattcgtgttccccacggctgcactggctcatctaccacaaaggttgacgttaagataagcgaggacatatctcatgtcaaagcacacagagtacccggttggaagctggatgtcgtctatcgagacaacgacaacgccaccgctctaaagttgggcgaaaacagaaccgttgataccctgacctggacagcactaactgaagccgactatctccccgataacatgttcgaggacttcggcgtcaatatgaagcttccacagccttctgcaatgaaaatcgtttaccttccgaccactcaaacgtgtggaaacggaacgagcgcttgggtaggaattcct

SEQ ID NO: 4425 - DNA, 210 bp, Triticum aestivum
  Clone ID: uC-tsro9316096h08b1
gggccggtccggaatccccttttcgaccaacccactagacttcgtttcatcaagagaacccacgcctgagggcaggggtgatttgaaagcatagctggtgtaccacaccaaccaaagtgagttcacgggccgacaattgacaacgacatgaccgggaaaacccatcggctaccaaagtaaaaggccttgacgaaaagacaactgtttgcc

SEQ ID NO: 4426 - DNA, 486 bp, Triticum aestivum
  Clone ID: uC-tsro9316096h10b1
ttggtcttgcgaacagggtagctgacgcgagaggtggggatggcgtcacgattcctgggccgatccaaaaccctagctctcgccctctcccgcgcggatgcggcgccggcgcccctggctggatcccgcgcgctctcctccctcccgcgccaccccgccaccgccgccccgtccccggcgattggatcccctcctggcctcagcaagggtctgggacatgagccaacatcacacctcagcggcacacaatttttaccgggttgggtttctactgtagcatccaatggatctcccatgcagaatacacaggtctcagagacatgcaagccagttgctggaacgggacactctgatgcactaaaagcgactgaaggagccttccctaaattcacggcattcagcccactagaagcagctgctaaacctagaagcagtccgttgacaagtgaaagttctaaagtcaggcgatcagagatattaacagga

SEQ ID NO: 4427 - DNA, 268 bp, Triticum aestivum
  Clone ID: uC-tsro9316096h12b1
ttgttcacccccctcaccctctctaatatgcttccacacaaatttacaaagcatggcccttcgtacacattttatatctattacggactccatcaacaattataaaccgatttcccccactcccgtctgtactagtacatctttaccctatatctcaggctaacttctcaccaaacaatacctgtcactccctgcgacatatcctatagactaattctctatctctaggcctaaccacgttactgtacgcgttttatcaacattccta

SEQ ID NO: 4428 - DNA, 289 bp, Triticum aestivum
  Clone ID: uC-tsro9316097a01b1
gatcatatactccatctactgtagaaggtgtggatgttaatgaggaatctgatggcattgcccaggatgaatttgaatgtcctgactcagaattctatgaatttacagaaataaggtcgattcagaagttctaacctgggcagatctgggctctctatagtgatatggacaagttccccaattactatgccatcataaagaaagtcgatctcaagaataataaagtacaagtgaaatggccttgatctctgtcctcggggagaggaagagaaaagattgactggtaaaa

SEQ ID NO: 4429 - DNA, 285 bp, Triticum aestivum
  Clone ID: uC-tsro9316097a08b1
gtctcagaccctgtcggacgcgagcaagcaggcgtacatgcgtggcaagagggtcctggagatcaaccccaggcaccccatcatcaaggagctccgtgacaaggtcgcccaggacagcgatagcgagggtctgaagcagacggcgaggctggtgtaccagacggcgctgatggagagcgggttcaacctgccggaccccaaggactttgcctcgagcatctaccggtcggtgcagaagagcttggacctgagccccgacgcggccgtggaggtggaagaggaggt

SEQ ID NO: 4430 - DNA, 482 bp, Triticum aestivum
  Clone ID: uC-tsro9316097a09b1
tttacgcgtccgaggatctcatactagattacgttaaccagctgtgcaaccgtctgccaagccccatgggagaatcagctgtggactgtgccagccttggatccatgcctgacattgagttcaccattagtggcaagaagtttgcgctgaaaccagaagagtatatcctgaaggttggcgaaggagctgctgcccagtgcatcagtggattcacagccatggacatcccgcctcctcgcggtcctctctggatcctgggagacgttttcatgggcccctaccacaccgtcttcgactacggcaagctgcgtgtcggattcgccaaggcggcctgaaagggtggtcgagcgagcgccccaccgcggaggcgaacacttgcgccgggagagagcttagcttttttactccgaatttgaccggtgctgtgtgtgtatatatatgctacatgcttgttttcaaagaccctgacatgaccaagggtt

SEQ ID NO: 4431 - DNA, 216 bp, Triticum aestivum
  Clone ID: uC-tsro9316097a10b1
tttcgatcggtctagatatgcatcaacattaatacggctaaataagtggaggagcacttgaaaggtcttattgttgttgtatgatttgaacgtgtgtctatctcattaatctatcgttgaacgatagtatgtatgtatactggacgtgtaaggagggcaaaagtgccttaagcgtcccatgatttaatattttaagttgtgagtttgttattgccc

SEQ ID NO: 4432 - DNA, 483 bp, Triticum aestivum
  Clone ID: uC-tsro9316097b01b1
ggctaagagcctcctcgcccgtagcatcaggcaaaaacgctcccctcgatctaggtcacgtcggcgccgccgccgccaatccgctcgtatgccgccgccgccatcccccatcgccactggtcggacgtggagttcgtgtgccatgacctccatggcacccatggccgacaagacgggaccctcggcctcggccatggccgcctgctcgggagatggggtcgccatgtttgacgccgccagcgcctcatggacctcagctccaggtccaccgccatcgaactcaggtggataagtggatggcacatgtgtatgttgctgttgagggattatattcgacattttatttttatcccaacactagattgaagtggtggttcacaaaggattcttagtggggcacaagtgtagattgatacaaaagcatgctgaatattttggtccttcaggttcattttcacgatcatttttttagtgcaaaatttt

SEQ ID NO: 4433 - DNA, 264 bp, Triticum aestivum
  Clone ID: uC-tsro9316097b06b1
gatcgctcgagccctccgccgccgccgcgacttcagctctctccttccttctccgatccaagatgaagttcattgctgcctatctgcttgcttacctctctggcaacgccagcccctctgcagaggacctgacatccattcttgagtcagttggttgtgaaattgacaatgagaagatggaactcatgctgtcccaagtgaagggcaaggacatcaccgagctcttggctgctggtaggcagaagcttgctgcggttccatctg

SEQ ID NO: 4434 - DNA, 425 bp, Triticum aestivum
  Clone ID: uC-tsro9316097b08b1
tttatcatatttcatgatccggagaaatagtaatttcagttcttgaaaaaaaaaaaaaaaaaaaaaaaaaaaaaaaaaaaaaaaaaaaaaacaaaaaaaaaaaaaaaaaaaaaaaaaaaaaaaaaaaaaaaaaaaaaaaaaaaaaaaaaaaaaaaaaaaaaaaaaaagggggcccccctcctaaagaacccaaactaaactccctttccaccccactccaaaaccttttaaaaggggccccaaaattaaattccccgcccctctttcaacccaaccagaacgggaaaaccccgggcttaccccacataaaaccccttaatcacaaccccccctctcacagttgcaaaaatattaaaaaggcccccacctcccccctttccaaacatatttaccccctaaaagccaaaagaaccccccccttcaaa

SEQ ID NO: 4435 - DNA, 64 bp, Triticum aestivum
  Clone ID: uC-tsro9316097b09b1
ttatgaacacttgtcatcagacagaaaaaggaagaaaataaacactgctgcgtgagcttatgtc

SEQ ID NO: 4436 - DNA, 175 bp, Triticum aestivum
  Clone ID: uC-tsro9316097c02b1
gtttatcgagattgtagcttaagaccatggtttatgggttcgtttgtgttagaatgagctctttgatattaagacagatgttggtcgactgagaatctaaagatggtcaacttgctatttaaaaaaaaaaaaaataaaaaaaaataaaaaaaaaaaaaaaaaaaaaaataaatat

SEQ ID NO: 4437 - DNA, 390 bp, Triticum aestivum
  Clone ID: uC-tsro9316097c03b1
cggtcgcgtggggttcgagttcaccggccgttatggagatgaagcccgccgtgcagccggtcacgggcgtccccgtgggcgcggcgcccgtcgcctggtcctccggcctctttgactgcttcgacgactgcggcctctgctgcgtgacctactggtgcccgtgcatcacgttcggcaaggtggcggagatcgtggaccgggggtcgacgtcgtgcgggacgagcggcgcgctctacgcgctcctgtgcttgctcacgggctgccagtggatctactcctgcacctaccgctccaagatgcgcgcccagtacgcgcttccggacgggcccctgttcgattgctgtgtccacttctgcttgcgagccgtgcgctcttgtccagcagtacaag

SEQ ID NO: 4438 - DNA, 154 bp, Triticum aestivum
  Clone ID: uC-tsro9316097c05b1
ctgacgcgtgggttcctgctagggttttggtccttcgttttcggcggcgcaagatgggggagagggtcacgggaaccgtgacgctgtccaacactaccaaggggttcggccttcatctctcctgactactgttgcgaggacctctttgttcacc

SEQ ID NO: 4439 - DNA, 58 bp, Triticum aestivum
  Clone ID: uC-tsro9316097c07b1
ctcactacatgctgtatttcatgctgaggattaggcattatagttatgattatggcca

SEQ ID NO: 4440 - DNA, 447 bp, Triticum aestivum
  Clone ID: uC-tsro9316097d02b1
ccttatctccaaaccctagtagcgccgccgccgccaggtaagaggcgagatggtgtccggctccggcgtgtgcgccaagcgcgtggtggtggacgcccgccaccacatgctcggccgcctggcctcgatcgtcgccaaggagctgctcaacgggcagcgcgtggtggtggtcccatgcgaggagatctgcatgtccggcggcctcgtccgccagaagatgaagtacctccgcttcctccgcaagaggatgaacaccaagcccttccacggtcccatccacttccgcgccccggtcaagatcctctggcgcaccatccgcggtatgattccgcacaagaccgcgaggggcgaggccgcgcttgccaggctcaaggcgtacgagggcgtgccgcctccgtacgacaggaccaagcgcatggtcatccccgacgcgctcaaggttctgag

SEQ ID NO: 4441 - DNA, 440 bp, Triticum aestivum
  unsure (1)..(440): unsure at all n locations
  Clone ID: uC-tsro9316097d03b1
cggacgcgtgggcggacgcgtgggcggacgcgtgggttcggctccacttccatgactgcttcgtacagggatgcgacgcgtccgtgcttctggacgcggcgccgggcagcaaggcggagaaggacgcgctggcgaacaagagcctgcgcgggttcgaggtgatcgacaagatcaaggacaccctcgaggctcagtgccccggcgtcgtcacctgcgccgacatcctcgcgctggcggccagggacgccgtgctcatggtcgggggcccctactacgacgtgcctcagggccggcgcgacgggagacgctccgtcgacaccgacacgctgaccgggctcccgtcgccgttcctcaacgcctaggngctaatcaccctctttggcacccacggcttcaacgtgcaggacatggtggcgctttccggcgggcacactctgggc

SEQ ID NO: 4442 - DNA, 387 bp, Triticum aestivum
  Clone ID: uC-tsro9316097d04b1
ttctccccacgtgccgcatacgccggcgccggcctggggcctggaggagtttccggccgctatggtggcccctgcagcggcggcgaaggccaagcaggggcacgtgcgggagtggtaccacagcgacagcgacagcgacgtgttcgccgtgccggagatcacgtcgccgccggccaagcgggcgcggccgtcgtcgttctggtgcctgtgagccagctagcgcggcggcaaaccacccacgccgtcgcagcaaccgggcgagctacgtacctgtggctcgatcgatccatcactagtgtaatctttgctcgttccccgcaaaaaaaataaataaataaaaaaatgctcgttgtagcttggtgtgaaaaaaaaaaaaatttaaatttc

SEQ ID NO: 4443 - DNA, 505 bp, Triticum aestivum
  Clone ID: uC-tsro9316097d09b1
tccacgcgtccgcgacactatggaggagaacctcaagaggcagctcttcgggttgccatccagatacagagattcagtgagggcaatcaggccagggctgcccctcttcctctacaactactccacccaccagctccacggcatcttcgaagctgcgagctttggcggagcgaacatcgacccggcggcgtgggaggacaagaagtgcaacggcgagtcccgcttccctgcacaggtgagggtggccacaaggaagatctgcgacccgctggaggaggacgccttccgcccgatcctgcaccactacgacgggcccaagttccggctggagctcagcatcaccgaggccctctcccttctcgatatatttgaagacaaggacgaggcctgatcgaggctgcatgcctactgctgatcagggagggactgttgaggaaggaacaacgcaataagatcgatcggagcatatatatatacatacatacatacgattaatatcattatc

SEQ ID NO: 4444 - DNA, 496 bp, Triticum aestivum
  Clone ID: uC-tsro9316097d12b1
ttcttttcaggccgtggaggcggccgtgcggaggttcttcttcgcgtaccggcaggtcgtggcggccgtgtgtggcacggcggaggcgtcgggcaaccgggcgctgtttgcgccggcggaggggacggaccccctgtcgcagatgttcctcgagccgccctacttccccagcctcgacgccgtcaagacgttcttggccgactactgggttcagcacatggccgccgcctctgttccgtcagggcgcagctgaaagtttggaacggccaaataccgccgctagatgggttgccacttgccacggcgacgacccgtgattttgctggctagaagttacagtacctatgatccccagcctgcaatcatatagtgattcatttcagtagcggtagacgagtacatatactcagacatgtgtgtgttgtgactagtggtgccatctgttctagtgttctattacagagtttttcatcggagatccatttcattttttttc

SEQ ID NO: 4445 - DNA, 341 bp, Triticum aestivum
  Clone ID: uC-tsro9316097e08b1
ttcacgcgtccgcggatccgtaacttcgggaaaaggactggctcgtgttcgacgacatgggcgcctacaccaccgcctccggctccaacttcaacggcttctccacctcggacatcaagacctacttggcctactccagctgatatggaactagtcatgtggccacgtactacgtagcacacgccattcgatttgttttcgcagtacacaaaatgaagagctgtaattaagctcgtacaaaaaaaaaaaaaaaaaaaaaaaaaaaaaaaaaaaaaaaaaaaaaaaataaaaaaaaaaaaaaaaaaaaaataaaaaaaaaaaatcttttataaaacataaat

SEQ ID NO: 4446 - DNA, 420 bp, Triticum aestivum
  Clone ID: uC-tsro9316097e12b1
ttatcaattggttcagaaaggttcaggtgccctgaggtgctattccagccatctcatgttggtatggaagttcctggtatacacgaagcgacatacaattccatcatgaagtgtgatgttgatatcagaaaggatctgtatggtaatgttgttctcagtggaggttctaccatgtttcctggaattgctgatcgcatgagcaaggagatcacggcccttgctcctagcagtatgaaggttaaagttattgcaccacctgaaaggaaatacagtgtctggatcggtggctctattttggcctctcttagcactttccagcagatgtggatctccaaggcagagtacgacgagtctggtcccggcattgcccacatgaagtgcttctgaagagtcggggaaggtcgtttacaaaggggactt

SEQ ID NO: 4447 - DNA, 223 bp, Triticum aestivum
  Clone ID: uC-tsro9316097f01b1
gctttttccagactagcttctacttcggctacacgttgatgttctgtctggggctaggcatactttgtggtgctatcggctatctggggtcaactctgtttgtcaggagaatctacagaaacatcaaatgcgactaaactactactccgattctgtaggctattagcacttagcagatcatgtgttgttgagtaacgcttctaagattctaattaacttttgg

SEQ ID NO: 4448 - DNA, 457 bp, Triticum aestivum
  Clone ID: uC-tsro9316097f04b1
gccatggcgcccaacggagacaacaccgtggccaacgtccacagcggcatcgacagcaccaacaagacgctgctcaagagcgacgccctctacacctacatcctcgacaccaccgtcttcccccgtgagcacgagtgcatgcgcgacctgcgcctcatcaccgacaagcacccatggggctacatgcagtcgtcgtcggacgaggcacagctgctggggatgctgatcaagatggcgggcgccaagaagacgatcgaggtgggcgtgttcacgggctactcgctgctggccaccgcgctggcgctcccggaggacggcaaggtggtggccatcgacaccgaccgcgagtgctacgaggtgggccgccccttcatcgagaaggccggcatggcgcacaaggtggacttccgcgagggcaccggcctggcgcgcctggacgagctgctcgtccaggacc

SEQ ID NO: 4449 - DNA, 56 bp, Triticum aestivum
  Clone ID: uC-tsro9316097f06b1
tcgctttcgcgttcgcccacgcgtccgtccacgcgtgcgctagttctagatcgcga

SEQ ID NO: 4450 - DNA, 461 bp, Triticum aestivum
  Clone ID: uC-tsro9316097f07b1
tttggttgttaagatccaagaagagcttgacattgatgtgcttgtgcacggagagccagagaggaacgatatggttgagtacttcggtgagcagctctctggtttcacattcactgccaatggctgggtgcaatcttatggatcaaggtgtgtcaagccaccgattatctacggtgatgtgagccgccccaaccccatgactgtgttctggtccaagatggcacagagcatgactgctcgcccaatgaagggaatgttgacaggccctgtcacaatccttaactggtcttttgttagaaatgaccaaccgaggtttgagacttgctaccagattgctcttgcaatcaagaaggaggtcgaggaccttgaggctggtggtattcaggtcatccaaattgacgaggctgctttgagagagggtctgccactccgcaagtctgagcatgctttctacttggact

SEQ ID NO: 4451 - DNA, 274 bp, Triticum aestivum
  Clone ID: uC-tsro9316097f08b1
ttcacgcgtccgggcattcttggtcaggaagtgattaagtcaatatcttgtaaaggcgatccgatcaagaatttcttttacttcgacgacgctgatggtaaaggggccatggaggacatccccccaactcctgaagactgaatcacgtgatacgtactcccttcgttccaaaatagatgacctaactttattttagatcggtgggagtaactcttcattcgacatggctcgctgataacttgtcccaatcatttgaactgatcactgttagaac

SEQ ID NO: 4452 - DNA, 51 bp, Triticum aestivum
  Clone ID: uC-tsro9316097f11b1
gtaaagtaagttcttcattgactgctaatgcacacgctgaagactgtagtc

SEQ ID NO: 4453 - DNA, 313 bp, Triticum aestivum
  Clone ID: uC-tsro9316097g01b1
acttttgcgacatcagcaagtgccagttctacctcgacatgctgaacgagtgccgccgtggaggagcaggagctggtgcaactctttaagctactatctttgcttgattgcggcttaattggtcggaacctgttttcagtcatgatgatgatgatatatatctcctaaataattcattggcaatattatgaacctatgccacagcttatgtctattacctaccctagtttgtggtctctgttgtcctgggagtatttccttgtattgatgttggaattaccttcatggcagtgggtttataaatatggagttt

SEQ ID NO: 4454 - DNA, 435 bp, Triticum aestivum
  Clone ID: uC-tsro9316097g03b1
ccctcgcgtccgccagacggcaggtagggagaagggcatcgacagcctgaagaactacctgcaagtcaaggcggtcgtcaccgcgcttaagaaccccgcgtggttgtgagcatagcgcactatggtcctcttgacactccggagaacgtgaagactcgcgataattgaatgaggagaggaagaagaagatgatgatgatgatgacaccaacgaggatcactaataagcccctgccttcatgggcagccagccaccgtctctaataaatatcatatgtgatttggtttcctttgtcaaccgcggcaagacatatatgttgtagcaacattatgtttattatcgcttgttggagaagtctctggttgcagtaaatctgttttttttttatcagttgttgaagctaatggtgttcactaccctagttaattcatgccc

SEQ ID NO: 4455 - DNA, 413 bp, Triticum aestivum
  Clone ID: uC-tsro9316097g07b1
tgttgaacggaggcaacctgcactgcttcacggcgctgaccccttgcgctgttctcgacgtcatgggacccccttacagcagcgctgctggcagggactgcgcgtactacagcgagacccccttctcaaacacagctggtgtggctgacgtgcggtactcctggctcaaggagattcccaataccttccggatgaagggcgtaacgatgccgcgggacttcgtcgtctaggaacctgcatgctgaagggcgctcccgccgtctagcttctttgtgtagataacagctgtaacctgcgaaaggcaggtagtcagtcagttgtcagtcggtccaacctagctctcaggctagcaaactcttttttttttacccttacccgttcgtcggggttgaaactatctcatgtcgcctgtc

SEQ ID NO: 4456 - DNA, 295 bp, Triticum aestivum
  Clone ID: uC-tsro9316097h01b1
gtttcgtcttcatcacctgcaactacaaccccgggggcatcttcaacggcgagcgcccgttcgcgttcctcacccttgacgccgaagccaagtagtacgtgcgtgtgagtgtgatcatacatgcatacgtacgtgcatgtgtttatgtttgtgtggtttgaatatttatacgtctacaaatgttacgtacgtacgtaaataagcacacattccggttacatgtatccatgcggctctgtgcagcgtgtaaatgtaatcatatatgttctacgtccatgcaaacatctttactttt

SEQ ID NO: 4457 - DNA, 491 bp, Triticum aestivum
  Clone ID: uC-tsro9316097h02b1
gtttttcggcactgtttttgttgcagcaacttgctggcataaatgctgttgtgtactactctacatcagtgttccgcagtgcaggcattgcatctgatgttgcagcgagtgctcttgttggtgctgccaatgtttttggcaccatgattgcatcttcactgatggacaagcaagggaggaagagccttctcataacaagcttttctggaatggcggcgtcgatgttactcttgtcattgtccttcacctggaaggctttggcaccttattctggcactcttgctgttgttggcactgtcctgtatgtgctgtcattcgctcttggagctggccctgttccagctttgctccttcctgaaatatttgcctccagaataagggccaaggctgtagcattatcaatgggcatgcactgggtatccaactttttcatcggcctgtactttctgagcgttgtaacaagtttggaatcagcaccgcggtcttgggat

SEQ ID NO: 4458 - DNA, 462 bp, Triticum aestivum
  Clone ID: uC-tsro9316097h03b1
ccctcgcgtccggcagcatacacttgatctctcttcctatatccaattaatcttagtcaagctaactgctagcttcgaagaaataggaatggcggctattgctgcaaagctgcaggtttttgtggcttgtgccttgctgctcctcgctgcggggtgccaggccagccctttctggccactggagatcggctactaccacgacaagtgcccccaagcggaggccgtcgtcaagggcgtcatggagaaggccatctcccagaaccccggcaatggcgctgccatgatccgcatgctcttccatgactgtttcgtcgagggctgtgatgcttccgtcctcctggacccgactccgttcagcccgacgccggagaaactcagcccgccgaacgacccttccctgcgcggcttcgagctgattgacgccatcaaggacgccctcgaggcgggctgcccggccgtcgt

SEQ ID NO: 4459 - DNA, 398 bp, Triticum aestivum
  Clone ID: uC-tsro9316097h05b1
aaaaataaaaaaaatagataaaaaaaaaaaaaataagaaaagttagaagaaaaagtaaaaaaagaaatgaaaaatgaaatagaaataagaaaaaaatttaaaaaataagaaaaggtgaaaagaaaaagaaaaaattgaaagagaaaaattaagataaaaaaaatagaaaatgaaagtaaaaaaaaaaaaaataaaaaagaaaaataaaaaagataaaaaaaaaaaaaaaaaaaaaattaaaaaaaaataaataaaaaatataaaatgaaagataaaaaataaatataaaaaaaaaaatagaaaaaaataataataataaaaagaataatataaaaaaaaaaatattaaaataaaaaaaaaatataaaaataagtaaaaagagataaataataaaaatt

SEQ ID NO: 4460 - DNA, 483 bp, Triticum aestivum
  Clone ID: uC-tsro9316097h09b1
tttacgcgtccgctggggatcggcaccatcatgcgtgagtgtcatgacctcttcaaggggcttgaatcactgacagactgctgtggtggagacggaaagacggcgagggccatcaccaaggcccacccacacgtcaagtgcaccgtgctggatctccccaaggtgatcgaaaaaactccatccgactgcgtagtcaactatgttgccggtgaccttttccacaccgtcccaaaggcccaggcagtgatgctcaagcttgtgctgcaccactggagtgacgacgattgtgtgaagatcctaacccagtgtaagaatgccattccttcccgtgaggaaggagggaaggctgattgtcattgacattgtggttgaaccatcactaggacctgtcatgtctgaggcccagactctcatggacttgctcatgcttgtctcaccagaggccgtccacgtagcgaaaatgactggcgtgatattttcatg

SEQ ID NO: 4461 - DNA, 403 bp, Triticum aestivum
  Clone ID: uC-tsro9316097h10b1
ttcgcatctccgacgacatggcccgcaccaagcagactgcgaggaagtccaccggcggcacggcgccgaggaagcagctggccaccaaggccgcccgcaagtccgccccggccaccggcggcgtcaagaagccccaccgcttccgccccggcaccgtcgcgctccgcgagatccgcaagtaccagaagagcaccgagctgctcatccgcaagctccccttccagcgcctcgtccgcgagatcgcccaggacttcaagaccgacctccgcttccagtcctccgccgtctccgccctgcaggaggccgccgaagcgtacttggtggggctcttcgaggacaccaacctctgcgccatccacgccaagcgcgtcaccatcatgcccaaggacatccagctcgcccg

SEQ ID NO: 4462 - DNA, 506 bp, Triticum aestivum
  Clone ID: uC-tsro9316097h12b1
ttataccgagcagacgccatggaccgcgagtggggctccatgcccggcagcggcggcgccgccaccgcccagaatgaggccatcgaccggcgggagcgcctgcgccgcctcgcgctcgagaccatcgacctcgccaaggacccctacttcatgcgaaaccatctcggcagctatgagtgcaagctctgcctgacgctccacaacaacgaggggaactacctcgcgcacacgcaggggaagcggcaccagaccaacctcgccaagcgtgccgcccgcgaggccaaggacgcgcccgcgcagccccagccaaacaagcgcaagctcgcgccccgcaaatctgttaagattggcagacctggatatacagtaactaaacagtatgatcccgacacgaagcaacactcatttctctttgagattgagtatcctgaaatcgaagataatagcaagcccaggcaccgtttcatggcatcatatgaacagaaaatccaatcttgggataagag

SEQ ID NO: 4463 - DNA, 412 bp, Triticum aestivum
  Clone ID: uC-tsro9316098a01b1
gtctttcccgtccccagccaacctcccatgcgcgtcttgcgtcgcagcggctgttccactccctcgccatgggcaagattaagatcggaatcaacggtttcggaaggatcgggaggctcgtcgccagggtcgccctccagagcgacgatgtcgagctcgtcgccgtcaacgacccctttatcaccaccgagtacatgacctacatgttcaagtacgacaccgttcacggccactggaagcacagtgacatcaagctcaaggacgacaagacgctgctctttggcgagaagccagttaccgtcttcggcgtcaggaaccctgaggagatcccgtggggtgaggctggtgccgattacgttgtggagtccaccggtgtcttcactgacaaggacaaggccgctgctcacttgaa

SEQ ID NO: 4464 - DNA, 508 bp, Triticum aestivum
  Clone ID: uC-tsro9316098a03b1
gttgtggtgacccttccggctttgcccaccccggcagtcacggtggacggggacgtgctccggctcccctcccaccgccgcccctgccacctccaccgtcacctctggtgggcgcgccaccacggcctctcacaccaccgcggcgcgttctccggtccgggcgaggcgcgtgtccatcccgccgtcgacgtcgtactcaccgagcttgcccgcggagaagagcaagagcccagggaagctgagctggaggcggtcgcggagcctgaccccgactcacgcccggacaccgacgccgcagagaagctgtttcatggcgaggaggaggaagaggcggcgaatgcgtggaaggtgaagatgctaggaggttccgccacggcatccgattgcaccaccgccaccatcttcgccaccaccaggagcaggacggggaggaacacgactaccgccagcaggacaaggttgattgcgcgagcatgagcctgttcggacgctttcaccaccgccacca

SEQ ID NO: 4465 - DNA, 173 bp, Triticum aestivum
  Clone ID: uC-tsro9316098a05b1
gatctgcgcagcaggggaactcagggttaaggatcaattacttagataaagtagtagctcacatctctaactacttttcagtgaatattggcgacctggtatttaccggtacgacaaaaagagaacaagaaaacacggtaaaaaaagaaaagtgacaatatattacacacacc

SEQ ID NO: 4466 - DNA, 283 bp, Triticum aestivum
  Clone ID: uC-tsro9316098a09b1
tacacctaaagaatccgtagctagcttgtctataggccttaagcgtgctggttcacgttgcggccaagtgaagtccttttctttttcttgtgttgtgttatgagtcatgtgggaggttattgtcgcgtagttgaataaaaagaaagagtcggaaaagagatacatatagggttaatacgtcgcaaaccattatctcttcggtgaattgagcatagcacagttttttaaaaaaaaaaaaaaataaataataaactaaaaatataaaaaaatattaaacaataag

SEQ ID NO: 4467 - DNA, 512 bp, Triticum aestivum
  Clone ID: uC-tsro9316098a10b1
tagtactctcgcctcgcttgactcctccttggaagcacacagagagaggagtgcatggcgtcgtccggcggcaagctcttcaccctggaggaggtcgccaagcacagctccaaggacgactgctggctagtcatcggcggcaaggtgtacaatgtgaccaagtttctcgatgaccaccctggaggcgacgacgtcttgctgtcttcaacagccaaggatgcgaccgacgacttcgaggacgtggggcacagcacgaccgcccgggcgatgatggacgagtcctacgtgggcgagatcgacgcgaccacgatacccaccaaggtcaagtacacgccgtccaagcagccgcactacaaccaggacaagacccccgagttcgtcatcaagatcctccagatcttggtccccctcgcgatactgggcctggccgtcgccgtacggatctacaccaaggcggagtctgtctagcaccgtccgcttataccagtcagtcagtcagtcattcggaagtg

SEQ ID NO: 4468 - DNA, 361 bp, Triticum aestivum
  Clone ID: uC-tsro9316098a11b1
tccacgcgtgcgcaaagacaagtcaacctgaccgtttttaaggaaggagaagggataagatgccgcgcccctgcaagggaggcacgggactcggtaagggcggcaccaagctccaccggaaggtgctccgtgacaacatccagggcatcaccaagccggctatccgtcgtctggcgctgcgtggcggaccgaatcgcatctggggtctcatctacgaggagacccgcagagctctcactatctttctcaagaacgacatacgagactgcgtaacctacacctagcacgcgcgccgcaagaccgttcacaacatggacgtttggtacgccctcaagcgccagggactcaccctctacggatt

SEQ ID NO: 4469 - DNA, 472 bp, Triticum aestivum
  Clone ID: uC-tsro9316098b02b1
tttatgcgtccgggcaactctaccaggccctttaagttcattttctgttactccatctttcttttccgttccatattcttcaataccatttggtgccacatccgttgttaattcaatagataggactccagtggcatttttggcaaaattgtttagatattggagggggtcaattgaagtgactattaaagttgtgaagacagaatttcatactggtagacttattttgtccttttcgccccaattagctcagactactattacaaattctaatacaaactatgttcatcgtgagatagtcgatctacgtgatggctctgagtttgtgattaaagtgccttattgctacaactctatgtacatggatactgaccaagctcaaaatgatttattcatgatgatgcaggtcaatgtattaaatgaattggtagctccagacacttgcgcacaaagcgtagaaattttgtatgag

SEQ ID NO: 4470 - DNA, 476 bp, Triticum aestivum
  Clone ID: uC-tsro9316098b05b1
ggtgtgggggctcgccgccagcaagcggccgttcctctgggtcgtcaggcccacgctcatccgcggctacgagtccggccagctgcccgacgggctcgacgagcagatccgtgatcatggcaggctcgtcagctgggcaccgcaggtggaggtgctcgcccaccctgcggtaggcgccttcatcacgcacagcggctggaactccacggtggaagccgtgtcggagggcgtgccgatgatatgcctcccgttgcacggagaccagttcagcaacgccaggtacgtgtgcgatgtctggaaggtgggagctggagatcgaggcgtcgtcggcggctgggcagaacctggagagagggaagatcaaggctgccatcgacaagattgtgcacgacatagggactagagagaggatggttgccctcaaattagctgcagatgaagcagctaacctccaaactgaggtgaaagctttgggt

SEQ ID NO: 4471 - DNA, 266 bp, Triticum aestivum
  Clone ID: uC-tsro9316098b06b1
aggcaccaacatcccctggccgacccacccaaacggatcgtccacccctaccccgcccgaagggggatttttaaacctatcggcccaaaccaactcaccgcagatatctgcccgctccccctccggaacaccagcccctctgcacaggacctgacatccatgaggactcagccggaggtgaaacggacaacgagaacagggaactgaggcagacccaagccaagggcaaggacctcaccgagccctaggatgctggtacggagaag

SEQ ID NO: 4472 - DNA, 57 bp, Triticum aestivum
  Clone ID: uC-tsro9316098b07b1
tcgtttacgcgtccgcccacgcgtccgcccacgcgggcgactagttctagatcgcga

SEQ ID NO: 4473 - DNA, 204 bp, Triticum aestivum
  Clone ID: uC-tsro9316098b09b1
tattaaaaaaaaaaaaaaaaaaaaaaaaaaaaataaaaaaaaaaaaaaaaaaaaaaaaaaaaaaaaaaaaaagagcgactaatataaaaaaaaacaaacatcaactacctcattataaaaaaaaaaaaacaaaacaaaaatgtaaaaaaacaaaaacaaaaaagaacaaattaagcaaaataaaaaaaaaaaaaaagacgataa

SEQ ID NO: 4474 - DNA, 504 bp, Triticum aestivum
  Clone ID: uC-tsro9316098c02b1
ttattttctggataaacgcaaaaaaagaagaaaaatataagtatttatgctactacatggaccaagtttttcatgttgaagcccgtggagatgtattcaagatctctgctgtatggatgcgtatggacaaaggttctgcatatccttgtgtgaaaattgtctgcagcagcgcgaaggtggtgctgaagaaagcgtagcgtgttagttccaagtgaagaaaatgtggcgcaacacgaagtgctctgtgccatggtaaataattgttcagttctgtatttggagcagggtgggggttgattctgagaatcagaattcactacaaagataggatcttgatttttgttggtttaaaacagaaaatggaaaggaaaaaaagggaaccaaaagttttttatgttcgtgaaaaatgcaggcttttatttagcacatgcagtcttgtatttcatgtatgccgatgttacttggcatcacaatctctatgataccatttaatactttagttat

SEQ ID NO: 4475 - DNA, 517 bp, Triticum aestivum
  Clone ID: uC-tsro9316098c04b1
tttctcactgcataccatcacgatagttgcgagacatggcgatgtgttgccactcttcctgtagcctcatatgcatcgtcttccttctcgtttttgttgctgtggcagcggagggtgcaggatatgtgcaggcgcggcagcggaaattacagcaggtgccggcaccaccgctagtgccgttgccaaatcctaacccgcagccagacccaaacccacaacctttgcctatgccagacccaaatccacagccattaccgcagcctttaccgcaaccactgccaggcccaaacccgtagccacaaccattaccttagcctctgccgcgcccaaacctgcagccacaacctctgccacaaccgttgcctgacgcaaacccacagccaccgccattaccacaacctctgccacgaccactaccggggccaaacgcacagcctctaccacaaccactgccaggcccaaacccaccgtcactgcctcaaccagacgtccaaggctcatatccgcaggtagaacc

SEQ ID NO: 4476 - DNA, 311 bp, Triticum aestivum
  Clone ID: uC-tsro9316098c12b1
taataccaaaaaaaacaaaaaaagagaaaagggggattattaaaagaaacgctggggtacaaacaaaaaacaaaaaaaaagaaaaaaagcgggcagccggctataatggccctcctgtgcgcccgggtccctgctgacggcgtgcctgtcgtctgaggccccttgtttgcccgcccgcgctctgtgtgtacacctgtgtgccggggaaaccccttgcctggcccaagaaaagctggttccctacttgtcgcctttctgcaggtggctcttgggcacgcgggccctacggttgccctttcccacctgttgcc

SEQ ID NO: 4477 - DNA, 433 bp, Triticum aestivum
  Clone ID: uC-tsro9316098d02b1
tcgtttattcgtgcgcccacgcgtccggaacaaaccttcacaccaaaagcaaaagatgcggagtcagtgtacagccggcctatgagatcctttttgctgaatccacgcagataagcacaatggcggcgccggcgatgtttgctaaggcgaccaggaaggcctacgtggtcggtcggccgcggcggttgctgcggctggcggtgctctgggcgcggaaggtgagcgcggcgcagagcctccgcctgctcaagacgctgcagcacagccaggtcgtcggcctcagactgggtcacggcggccggggcaacgaccggctgcactacggagagcgagagctctccatcgacgagacgccggcgtttcggttccgaaccccctccgcgcgcgtgctccggttcataccatgcatggagcgctccgtcctcgacacccc

SEQ ID NO: 4478 - DNA, 312 bp, Triticum aestivum
  Clone ID: uC-tsro9316098d04b1
gatactcggcctctgtcgcacggcttagctgctcgttttcgtcctggagatcgtcggtccctttttgtacagctagagaagcaaaacaacccagccagccatagctcgtagtggtggtgtgttgtggggagagcgactcgcctgacctgacctgttgcgcctggtggtgtgctctgaagttgtaacgacaccaccgcccgaaatcatatggcaaagttgttgccttgctagttggcattcatcccccagattaccggccctttatgccctgcaaaatggttctccttagttttttcctgggttgtatcttgt

SEQ ID NO: 4479 - DNA, 416 bp, Triticum aestivum
  unsure (1)..(416): unsure at all n locations
  Clone ID: uC-tsro9316098d06b1
ttctcgcgtccggcagagcaaaggtgcgatggcgccgactgtgaaggtctacgggtgggcgatgtcgccgttcgtggcgcgcgcgctgctgtgcctggaggaggccggcgtcgagtacgagctcgtccccatgagccgcgaggccggcgaccaccgccagccggacttcctcgcccgaaaccccttcggccaggtccccgttctcgaggacggcgacctcaccatcttcgaatcgcgcgccgtcgcgaggcacgtgctgcgcaagcacaagccggaattgctgggctccggctcgccggagtcggcggcgatggtggatgtgtggttggaggcgngaggcccaccagcaccagaccccggcgggcaccatcgtgatgcagtgcattcttaccccgtttcttggttgccagcgcgac

SEQ ID NO: 4480 - DNA, 244 bp, Triticum aestivum
  Clone ID: uC-tsro9316098d09b1
tcggctcgccctgtcccttgctttgttgccttgttggagcgccggggtggttcgctcactcgcagccctcagggaacataggaggttctttagctgttttggccgtgtgtgcaaggttctctgagatgatttactgaaacagcctgctccatcgtcagacttcatcctcgagtaatttggaattcggtatcaaacgtgtgtgtcttggatgcacaatctgctttaatggctttgacaatcaatt

SEQ ID NO: 4481 - DNA, 498 bp, Triticum aestivum
  Clone ID: uC-tsro9316098d10b1
tggacgcgtgggtttctttcttgcttctgcctttccccctcctcctcattgactccgccgccgtctcactcgcaagtcacagcatcccccgtctgctatctcttgggagagttgggagcggaggagcgacgcaggccgacgcagcggcgcaggcgagcaaaggccgcgaggcagcaaggcgccctccggctgaagagcagcgattcagacagcgacatcgtgcctcttgtcgactatctcaacacccagtactatggggtcatcggcctcggcacgccgccgcagaatttcacggtgatattcgacaccgggagctccaacctgtgggttccctcgtcgaaatgctatttctcgatagcatgctacctccaccccaaatacaagtcgagcaagtcaagcacttacaaagcagatggtgagatttgcaaaatcacatatggctctggcgcaatctctggatttttcagcaatgataatgtgttggctggggaccttgtt

SEQ ID NO: 4482 - DNA, 212 bp, Triticum aestivum
  Clone ID: uC-tsro9316098d11b1
tctgaatgcacacgaaaattacaggacggttaactcaacgaaggaggaccggaaggtttctgggaatgcaactggggtgttgtcctgggatagcccccttacataataattgtaatcccctctgtgctgttcatctacacttgttcttcctgggcgtgccagggacgtaaaatttcttttggttatatgatgcccatagttttcacatgcct

SEQ ID NO: 4483 - DNA, 256 bp, Triticum aestivum
  Clone ID: uC-tsro9316098d12b1
tgcgaagtaagggatgcaaattacccgtggtggcttatataaggtgcatgtgctgcaacaggtctatgtgcagcctgcagctcaaggaataggtcgagtggcactcgcacttgcttgccggtgctgatttttctgaactgtaatgcgttatgtatgaacaacttctcgtcttttgtctttgtaatatgtaccggtgtacatttgtttgcttcagtagacgtatacacaaacctggaagcaggcagaggttttcttt

SEQ ID NO: 4484 - DNA, 434 bp, Triticum aestivum
  Clone ID: uC-tsro9316098e01b1
tttgtttgtaacctttctcccttggttttggaggtgcacgcaccaactcgatgcagggggacgccatggagcaagtcgagttcgtggaacaagtcatggacgatgccatggaagatcatgattcagagagtactacgacgacatcccgcaatctaggattcgaagatagcagtcgtgcgagataggagttatcctggtcagctgttcttgtgggaatggagtcccatcaacgttggagatccacgagtcactttcatcatccaccactagagatacttgttatattcatttgacctttgtggtcttgtactcaatttcttgtaatttgacccataggccgtgcgcccgtggctgacacttgagttgtcccattcgcaagtgtgcgatggaagactccgctagcttataaaggaagccttgcccaacttagcaaa

SEQ ID NO: 4485 - DNA, 302 bp, Triticum aestivum
  Clone ID: uC-tsro9316098e08b1
tttttcaaagcaaccgagacagcggaagacgcggagccaccgcgtgagacgagcgagccagcagcccaggcagctcaacgtccgccgccacgatgtggagctccggctccgacctcgacgagtccgcctcgacggcgacggcggccaccgcatgctccctgcagccgcagacgccgcctccgcctcgccgccgccgcagccgcaaccgccgccgcgcccagcgccgggtcaagaacggccccgaggtggaggagtctgaggcggaggcggagcaggtgtggtgcggctcgcactgggaggcg

SEQ ID NO: 4486 - DNA, 503 bp, Triticum aestivum
  Clone ID: uC-tsro9316098e10b1
tccacgcgtccgcccagaatccgccactaccggccgagcagtgaagtagagcggcgagcggcgaggagggaccatggcgtcgttgccagaggaggaggaggccttcgagcacacgctgctggtggtgcgcgaggtgtcggtgttcaagatcccgccgcgcaccaccagcggcggctacaagtgcggcgagtggctgcagacggacaagatctggacgggccgcctccgcgtggtgtcgtgcggcgaccgctgcgagatccggctcgaggacccgggctccggggacctcttcgccgcctgcttcgtgctgcccggccagagggacagcgccgtcgagaccgtgctcgactcgtcgcgctacttcgtgctccgcatcgaggacggcagggggaagcatgccttcgtcggcctgtgcttcggcgagcgcaatgaggccttcgacttcaacgtggccctgtcggatcacgagacgtatgtcaagagggagcaagatcaggagaccg

SEQ ID NO: 4487 - DNA, 250 bp, Triticum aestivum
  Clone ID: uC-tsro9316098f02b1
gtttttcatggagcccaacaaggtgtacaagggggactactacaagcactctggcctgtactacaagatgactgacacgaagcatgcagctgctcagacagatactactaaggagatgactacagccatgtcaacaacgaagaacaagactgatagcatgacccacaagactaccatgagcactgagatgcgcaagatggccaaggcgatcaccaacgatgtcaagaacaactactgcaggacctactag

SEQ ID NO: 4488 - DNA, 511 bp, Triticum aestivum
  Clone ID: uC-tsro9316098f04b1
gtttatatgcttagattgcgagggtcgtggagaggcgccatgtcctacttgcaatgctggtcagcagcatgggttttacaaagcaaatcaaatgactcggtgcagtatatgtcatggcaggggtttgcttgctcaccaagatggatctgattcggtatgtgggatgtgcaatggtcaaggaatgttgccctgcatagcatgtgcatcccggggcctagtgacatgccagacatgtaatggctgcggttcccttcttgcacaaagcactgctcatgttcgatggaagacgcttacagcaaggaaagttagtgcaacaacaggagctgcttctgtccctgacgaagttttccacagagcgcaaggggtgcaactatgcaacatacaggcttaccaatgcactcctgctttctttgccgattcatacccactcaaccagttctcgtcggagattgttgctagccggctgccagttccaccatctgcaagagtgatttcggagaggcacatcatc

SEQ ID NO: 4489 - DNA, 505 bp, Triticum aestivum
  Clone ID: uC-tsro9316098f05b1
atcagggagtcagctcgacggtccaggaggaggaagcatgcgcagctgactgaccttgagttgcaggtcgagcaacttaaaagtgaaagtgcaaccctcttcaagcaactgacagaggcaaatcagcagttcaccaccgcggtcactgacaacaggatcctcaaatcagatgtagagaccttaagaatcaaggtaaaaatggcagaagacatggtggctagaggcgcagtgtcatgcggcctaggacagcagctcggattggcaccatttctgaactccaggaagatgtgacaaagccttggtgagcgttctcacaggcacagggttgaacttgaaagggaaccatgcactcttcagaggtttctagctctagctcttcaagttcagacatcggcggtacgaagcactgcaagtctagagtgctcgaataaccggatgcccgcttgcccagcgaggcggccagatgtgtggatgccgtgtggcccggagattcacaccaaagcag

SEQ ID NO: 4490 - DNA, 508 bp, Triticum aestivum
  unsure (1)..(508): unsure at all n locations
  Clone ID: uC-tsro9316098f10b1
tgttagtcatggcatcttccaagagcagtctggcaatgttcgcactggccatagtcatggccgtggtggctgacgtctcggcgcagaacaccccgcaggacttcgtcaacctgcacaaccgcgcccgcgccgtggacggtgtcggcccggtggcgtgggacaacaacgtggccaggtttgcgcaggactgggcggcgcagcgcgccggcgattgccggctccagcactccggcgggccgttcggcgagaacatcttctggggttccgggcagtcgtggacggccgccgacgcggtgaagctgtgggtggacgagaagcagaactaccatcttgacagcaacacctgcgacgccggcaaggtgtgcgggcactacacgcaggtggtgtggcgcaagtcgacccgcatcggctgcgcgcgcgtggtctgcgccgggaaccggggcgtcttcatcacctgcaactacaaccncccgggcaacttcaacggcgagcgcccgttcgcgttcct

SEQ ID NO: 4491 - DNA, 426 bp, Triticum aestivum
  Clone ID: uC-tsro9316098g03b1
tatgcaccaaccgggcacgatgcgggcgatctcgtcggcggcgggagggatgctgcgggcgcggctgagcgcggcggcgcgcctccgcggcgggcacggcgacggcggtggccgctggacgacgcccggccacgaggtgcggcccaaggggtacccgatgaaccgcacgccgccgccgccgggcgagtcgcgcaagtgggaggactgggagctcccctgctacgtcacctccttcctcaccgtcgtcatcctcggcgtcgggctcaacgccaagcccgacctcaccctcgagacctgggcgcaccacaaggcgctcgagcgcctccagcagcaggagctcgccgccgcgttcgccttcgacgacgccctggcagagtgatccgcgcgcgggcgccccaggtcttcctcgaaacctaggttgcttct

SEQ ID NO: 4492 - DNA, 336 bp, Triticum aestivum
  Clone ID: uC-tsro9316098g04b1
acgtttctgtccagccggcgacctggcgcgtgagtctgtgcatcttgaaggagcttcttggtttccacgatgaaactgatcgctgcctacctcctcgcctatgttggtgggaactcttcccaagtgccgctgatgtcaagaacatcctggactcagttggtgctgaggctgatgaagaaaagcttgagttgcttcctgctgaactgaaaggcaaggacatcacagaagtgattgcatctggaagggagaagtttgccgctgtgccttcaggtgggaggtgccattgctgtgggagctccagttgctgcatttgacgagcgcgcggcacctgctgct

SEQ ID NO: 4493 - DNA, 226 bp, Triticum aestivum
  Clone ID: uC-tsro9316098g07b1
ttgtcagaagtttgaagaatgcactcccatgatatgcaattaacatagttaattatttagcgtggcgagccatgatggtggtcaatgtttcaatgggcacacagaagcatagaagctatttgcaatttttgtgtcaaaaaaaaaaaaaaaaaaaaaaaaaaaaaaaaaaaaaaaaaaaaaaaaaaaaaaaaaaaaaaaaaaaaaaaaaaaaaaaaaaaaaataaaa

SEQ ID NO: 4494 - DNA, 411 bp, Triticum aestivum
  Clone ID: uC-tsro9316098g08b1
tggagcccgagcgcggcgacgcgccgcgggggcgagggcggccgtggttcacggtggtgagcaacaagtggggccgcggcccgcgctgcgagttcaggagcgacggccaggcggtgcgctacaagatggacggcggcaggcggcggcagcaggcggcgcgcgcctcgtggatcgtggacgacgccaccgggctggcggtggcggaggtgaagaggaagctgacggcgactggggtgtccctgggcgaggacgtgctgacgctggtggtggagcccaacgtggaccactcgctcatcatggggctccttgtggtgcatggtcttattaaccacttcatgtgagcattgcatttgtcgtgcagggacagggtgtaattttcttgttagatgcatgcttagatgcatttatcct

SEQ ID NO: 4495 - DNA, 145 bp, Triticum aestivum
  Clone ID: uC-tsro9316098g11b1
tctccacgcgtccgataaagagaaggcagcagggctattttacttggccaattatattgcctatcggcagaactaaggtgatggttattctgctgtttgttgttgatctgtaactttgtaagaccatcaagtctgggatttgagg

SEQ ID NO: 4496 - DNA, 489 bp, Triticum aestivum
  Clone ID: uC-tsro9316098g12b1
tgtggatgggaattgccagcttcgagctggggcagatttgatattccgcagggctgattaccacagacatgtgaggaaggcagtagcgaagcagctaaaggaattcaggaaacactatgaaggctatgtaccattggactacaaggtttacttgaagaaaatgaaaagatctggggaatggggagatcatgtgaccttacaagcggctgcagaccggtttggtgccaaaatctgcttgctgacatcgtttagagacacatgcctgatcgagatagtccccagggatgccgctcctacaagagctaaatacttggtgctcatcgaaccccgtcaccttctgcagagctttggctaagtttctggtgtgaagtacactacaattccttgtatgccaatgaagatcttccgactcgcaagaccaaaaagaagcactggctgttctaggtagggttcgccggtcgttggattcaccactcccccctgattctt

SEQ ID NO: 4497 - DNA, 458 bp, Triticum aestivum
  Clone ID: uC-tsro9316098h02b1
ggcaccgagataatcaacgtgcaggggtgttttttttcaagtgcatggtgtgtttcaaagtcacctgtaaacgtggcagataaaccacaccgaagcacagaggaaggatcagattctgaatctgacgatggcttgccccctctggaagagaacatgaaccacttggacctcagcgagggcgaagaaagcgaagaggaaagtgaaactgaaaacgaagggattaccgacgcaaaatgatggttgtttgtctgatcgaaataagatccaggtctcttgaggtttttatcgtggatctgaaaacaatctatctctgtacacttgtattgcttgcttgcgtcgtgtaccagtcatatgtatttttcttttgagggattcgtgtatcagatcagtatatgtaagtgtagactgtaaacagggtcagtctctgagaacaccagtgcttttatttagactaatac

SEQ ID NO: 4498 - DNA, 490 bp, Triticum aestivum
  Clone ID: uC-tsro9316098h06b1
ctttttaggaaaaaaaggcctccgcaaaccctaaggtcacggtcggcggcggcggcggcagagatggaccccgactcagtggcgaaggcgttcgtcgagcactactaccgcacgttcgacaccaaccgggcggcgctggtggggctgtaccaggagggctccatgctctccttcgagggcgagaagttccagggagccgccgccatcgccaccaagctcacctccctccccttcaccaagtgcgcccacaccgtcgtcactgtcgactgccagcccgccggccccacgggcggcatgctcgtcttcgtctccggatccctccaagtcgacggcgagcaccacatcaagttctcccagatgttccacttgatgccaatcggaccagggaacttctatgtgcacaacgacatgttccgcctgaactacggctaagaatcttaccaaaggtcgtgcttccccatggaagacagaatgttcttgcaaacaaaca

SEQ ID NO: 4499 - DNA, 321 bp, Triticum aestivum
  Clone ID: uC-tsro9316098h12b1
ttttttacgcgtccggtggaatgggaatgccgggggactgtttgaagctcatgtgtttctgaactttgcgatcgttgtttgatgtttttattgctgttgctatacatctgtaccaactttgcttgatttgtaacatgcaaatagtcgcttcggtcgaagaggttaggattatatatttctgtgtctgcctcatgcttgccagcttttatctacattgagaacgagttacctatctgcgtctgggacaaaatgtcaatgatttagcagcagattatgtactatgaattggaactccatagtggtattctcatcagcttgaat

SEQ ID NO: 4500 - DNA, 447 bp, Triticum aestivum
  Clone ID: uC-tsro9316099a01b1
tcggtacaagtacccggagctgaagcgcgccacgcgagggttccgcgatcgcgagctcctcggccgcggcggcttcggcaaggtgtaccgcggcgtgctccctggcacgcccaccaccgtggatcaacgtgaatcgtcgataaccaacattccgcgcatgtggctcaatggaggtactgggacacccctcaagcactggaagacaagttcggcggattcttaaataggcagattgtagatgattacaaacaatttcgccgaggtgtgctttaagaacttctgcgacagggtgaagaacagggtcacctttaacgagccacatacatattgtggtttctcctacggagaggggattcatgctcctgggaggtgctcgccggggatggattgtgccgtcccaaaggagactcgttcgagagccatacactgttgggcaccaacatatct

SEQ ID NO: 4501 - DNA, 457 bp, Triticum aestivum
  Clone ID: uC-tsro9316099a02b1
tcttatttgctgcgtgacaccaagttctacacaatcttgaggaggacaagcgtcgcccgaagaaaaaatggttgcgaaagtatggtcgtttaattttgctatatacatactatccataagaccttgtaagaggtacccagcccccctgggcatatagcgatgggtatgtcgctaaactatgaagtgtgtatgtatggagagaggcgtggtgcttcttaaataggcagattggagctgattacaaacaattctccgaggtgtgctttaagaacttcggcgacagggtgaagaactggttcacctttaacgagccacatacatattgttgtttctcctacggagaggggattcatgcttctgggaggtgcttcccggagatggatagtgccgttccagaaggagattcgcttagagagccatacactgcttggcaccacatctctctagctcatgctga

SEQ ID NO: 4502 - DNA, 378 bp, Triticum aestivum
  Clone ID: uC-tsro9316099a04b1
ataaattataaaaaaaaaaaaaaaaaaaaaaaaaaaaaaaaaaaaaaaaaaaaaaaaaaaaaaaaaaaaaaaaaaaaaaaaaaaaaaaaaaaaaaaacaaaaaggggggggccgttttaggggacccaagtttactacccggggcaggcaacgaaaaagcttttttttggggcccccaaaatcaaattaacgggccgggttttaaaaacgtgggaccgggaaaacccctggggtacccaaactaaatcgcttggaaaaaaacccccttttcgccggtgggggaaaaacaaaaagggccccaaccaatcgcctttccaaaaagttgccaaccttaaagggcaaagggaaccccccttgtagggggacataaaccgcggg

SEQ ID NO: 4503 - DNA, 517 bp, Triticum aestivum
  Clone ID: uC-tsro9316099a07b1
gttgttataagcgctcaaggacatgggcatgaaagtgtataggttctccatctcttggtcgagaatactgccagatgggacgggaaaagtaaaccaggcaggtatcgactactacaataagctgatcaactcgctgatagataacgacatagtgccatatgttacaatttggcactgggacacccctcaagcactggaagacaagtacggcggcttcttaaataggcagattgtagatgattacaaacaattcgccgaggtgtgctttaagaacttcggtgacagggtgaagaactggttcacctttaacgagccacatacatattgttgtttctcctacggagaggggattcatgctcctgggaggtgctcgccggggatggattgtgccgtcccagaaggagactcgctcagagagccatacactgctggtcaccacatcctcctagctcatgctgaggctgttcagctgttcaaagctcgttacaacatgcatggagattccaaaataggaatg

SEQ ID NO: 4504 - DNA, 331 bp, Triticum aestivum
  Clone ID: uC-tsro9316099a09b1
cccggcccgtaccggtactgcctgtccggcccacccgacccgttcctttggtcacgcttaccatcgctacttatgttggaccgggcttgtaacttgcttgagagtagtattttctggtctactgggcaacctactgtcaattacccttgctatgtttcgttctcaggatgcacacgttgtcactggttaacatgatgccactctcaaggactgggacctcggagctgggaaaactatgggtactgttacacaccataagagagatgatcgggcgcatggaactgtatccaatacagaagaggtttgaataagcatctgctgacaacataaa

SEQ ID NO: 4505 - DNA, 390 bp, Triticum aestivum
  Clone ID: uC-tsro9316099a12b1
tcgtttctacacagagagccggccagagcactccgttcgttgtctgcgaagctcagccagctttccttccgcccaccagcaccaaccaaatggctcgcttcgccgaggtcgccgccatcgtcgcccttctggccatcgccgccgccgcgcagggtcccatgccggcgcccaagatggccccgctgccggcgcccccgacgaggttgcccccgaccgtattcgcgccgaccccgatggcctctcccccggccccggccaccgacgcccccaccggcgctccttccgcgatgacgccttccgcggtcgacggagcacccgtgggcgcacctgacggtgcgcccagcggtaccacccccggcagcttcgccgtctacgcctccttcgtcagct

SEQ ID NO: 4506 - DNA, 517 bp, Triticum aestivum
  Clone ID: uC-tsro9316099b01b1
tttcggtggttctcaaacttctctgaagcagaggaactattaaaactggctgctgctcgtcaacaggtgcaggctcacattgctaagctgagaaggcagctaagcatgatagagggaatgccccagcaatccagagttatctctggtcctggtcaacagtttgggcacggctaatggaacggtagctgctgtaaggaagatgctgaaacctgataacaactcgctaacagaatgtgatgaatgtgtcttcattgacgtcttaggctcgcaattgatgtttagtgctggccagtgtgcataaagcgcaacctatggattgcaccgcctttgtgcattttgaaatcaacgggagcatggagtacctgccttaaattatcacccgctgttctctttcttttatgttccaatagaagcgtagcacatcacaggggtgcaaagcctattctgctgacataatggaaaatgctatgcattgtgcgaaccagtaaagtaagtgttaatttccgaaatcacttaa

SEQ ID NO: 4507 - DNA, 463 bp, Triticum aestivum
  Clone ID: uC-tsro9316099b02b1
tgttcgttcgcacgtcctacacaaccagtgcagccgtatataaaaggccgcagggacttcgacctctatccaagcccagctgtgtgacccgaacctcggatacttggtaagaacttgtgaagcagacacaatgtacagctagaacaagagcgagtacaacccgagggcatcgtgagtgacggaagcacattgtgacagtcacactagcgtgtatcagatcctgcaataagcgaacaccaggaacgattacatgtatggataagctggagagttccaccacactaaaacattgaaaaccccatgggcctggcggccctgagcttaacgtgctgacgttctttcagagcttgcgacctgattgttgaactaaggcatgtaagccaatgaaagaccctaagttatagataagaaggacgggcagatcgcgagcttttaaaaaaaaaaaaaacgggcggcccattct

SEQ ID NO: 4508 - DNA, 127 bp, Triticum aestivum
  Clone ID: uC-tsro9316099c01b1
gtgccgagtcggtgtggccggccatgctcggcaccaccggccacgccacgccgcagtcgggcggcttccacctcggccccggcgaagagaccaccttcgacgtgccggtagggtggtcggggcgggt

SEQ ID NO: 4509 - DNA, 496 bp, Triticum aestivum
  Clone ID: uC-tsro9316099c02b1
tcgttatgaagggcatgatgttccaacaattgagactgccgttgagacgcgaccagtttgctctctgtgccaggattcggattccaaaagtctgactctgctgtatgattcgtcttcaggctgccatggaaactatgatggcagagactgttgaagatggtcagaccccaagttcaattgcagagctcgcttccaaggtactctcccatgtcagttccacaagctcgctggagtcgccggctgttcaagttcttgaggataaactcgaggcagaaagacggggtgcagttgcgctccgggaagaaatcagtgccctgaataagcgagcagaaaaagctgatgtggtaatcgcgaaaacccaacaggagatggatgaagtcgggaagaagcaagccgagactgaccagattctttagtttctgttactgagtactcagggtaaccccgtttttagtttctgtcgggactggtgatctaccggatgtgtgcttactta

SEQ ID NO: 4510 - DNA, 484 bp, Triticum aestivum
  unsure (1)..(484): unsure at all n locations
  Clone ID: uC-tsro9316099c04b1
tccacgcgtccgctcccctctcgctctctccaccaaccaagaacagcaggaactcgacctcggagcagcaacgaatccgccgccgcccggcaaaagggatccaaagctccaatggctggcaagtacatcgtcgccggcctcgtcggctcctgtgtcatctcgtatgcctgtgactacatcgtttctcagaagaagatcttcggtggcaccatcccagggactgtgtccgacaaggagtggttgaaggcgacggagcagaggttccaggcctggccccgggtcgctgggccgccggtcatcatgaaccccatcagccgccagaacttcatcgtcaaggacctcaacccctgaggctcaagatcttaaggtttgcggtcggttggaacctttaccctgatggcgatgcctgttgctaaatctacctatgtgtgctggctgtactctcgaggcntatttgtctgtcgcaataattaaaacaacacta

SEQ ID NO: 4511 - DNA, 84 bp, Triticum aestivum
  Clone ID: uC-tsro9316099c06b1
tcttctacgcgtccgatgacatatgctccattgtgtgtctttaatcagggactgctttttctaccttttgaataattgacaata

SEQ ID NO: 4512 - DNA, 227 bp, Triticum aestivum
  Clone ID: uC-tsro9316099c10b1
tttgttttcacccagaacagccgcacatcgcgatgcgtgctttttttcgctggttttcccagtgcgtatgaaggcttgtagctccccttttgcctgatgatttacaggacagttcatttgttggaagagtgaaacactttgacaaataaaacaacgtccatgttcttccctcctataactacaattaatttataaaaaaatatattttctagaaccactaaatgggc

SEQ ID NO: 4513 - DNA, 61 bp, Triticum aestivum
  Clone ID: uC-tsro9316099c11b1
tttactttgaacgcccacgcgtccgtccacgcgtacgaccacgcgagcgtctagatcgcga

SEQ ID NO: 4514 - DNA, 361 bp, Triticum aestivum
  Clone ID: uC-tsro9316099c12b1
tttattttccacccgtctccacccagataaccacgtgagatattttgtccgccccgactaccgacgaacggtagagaaaaggtaagcatgaacgtcgggaattggccgagatgcacagatctgtggtggccatggcgtggttacagtaccgatcgatatgatgatcggaagctgattggtttgctcctgcgtgtagtgaggtgatcatgagcaccatggctatgtcggtgctgaacccggacgcgcccatgttcatcccggcggttttcaaaaaggaggaggactacttgcctttgtggtgtgagttggtcaagaccactctattgggtaccgtgtccactggtttttgacagaaccagct

SEQ ID NO: 4515 - DNA, 114 bp, Triticum aestivum
  Clone ID: uC-tsro9316099d11b1
gacgcgccttgtaacgggggattaagcgcgggggctgtgggggttacgcgaaccgtgaccgcgacactagccagtggctaaacacccgatcctttcggtataataccttccttt

SEQ ID NO: 4516 - DNA, 423 bp, Triticum aestivum
  Clone ID: uC-tsro9316099e04b1
tcgtgtgctcctcccaggtatataccccccaacaatggcttgatgctagccactgccggcatgcagctcgtgctgcgctttacctctcaggttcaccggcggcgacggcggtgcgcggcggaggtatctagctagctaggcgggtgttaggccgtgtagggcaactatacatctttggcaatgtcttcttcttcctcctccatgggaggattgtaatggagtgtgtaaactgtgcgtgcatcccctgggctgggctctcgttcgtggaaactcaccgtcttgcatttctacgaccaatactggtgctctgttgcctcgttgaaaagaaatactatactagtgctcttgttgtggaggctgctgtattcctgtttgtggcgagctggtgttattgtcatgtcaactttttaccgttgatctttt

SEQ ID NO: 4517 - DNA, 98 bp, Triticum aestivum
  Clone ID: uC-tsro9316099e06b1
tctttgttggcttctcctccccactcagtcctcggttcccggaccggttcggttcgttagggtttagtagtggggaagaggttgaataacaacaattt

SEQ ID NO: 4518 - DNA, 227 bp, Triticum aestivum
  Clone ID: uC-tsro9316099e07b1
gggccgaacgtcttgtcgacccacgcaaacggtttttttaacggggagcgcccgttcgagtgcatcatcattgacgccgaacccatgtagctcgtgcgtgagagtgagaacatacatgcataccaacgggcatgatcatgggcttcgtggccagagttttatgcggaggcagacgttgacgaaagaagaacaagtaagcccacactttccttctactatgtagaaca

SEQ ID NO: 4519 - DNA, 358 bp, Triticum aestivum
  Clone ID: uC-tsro9316099e09b1
gttgtttttgacattccggaatcgatctgtagcagtttggaatttccgaggtgaactagtaacatcatttgaggatcacctgctgtggcaccctgactgcaataccaataacatatacataaccagtgatcaagatcttattatttcttactgcaaggctgattccactgattcatcttcagaagaaaatgctggctctataaacattagcaacatactgacagggaaatgcttggctaaataaaggctggcaatttcaacgagcaaaaaatacatggaagttacagaatacaattactgaggcttttgaggacatcacaggtttgtacctacgataacagcgtgatgagatctacac

SEQ ID NO: 4520 - DNA, 389 bp, Triticum aestivum
  Clone ID: uC-tsro9316099e10b1
tttattttcgatcgccggacttttctcgttcgtgggggcctttgctgctgcagagcgttcccacgccgcgcgagaggtcgaggagatgtccaccccgggcggggaggaggacaagaagccggcgagcgcatgcggtgaaggcggtggcgcccacataaacctcaaggccaagggccaggatggcaatgaggcgttctttcgcatgaagagatctacccagctgaagaagatgatgaatgcctactgggaccgccagtctgtggatatgaaagctatcgcgttcctgtttgacggccgcaggctccgattccgagcagacccctgatgagctcgagatggaagatggcgatgagatcgacgctcagattcattagaccggaggtcgcctt

SEQ ID NO: 4521 - DNA, 496 bp, Triticum aestivum
  Clone ID: uC-tsro9316099f03b1
ttaatttcgatcaaattcgacagaggattcgggaggacttcctccgtccgggaggcgaagagagggcgagatgggggcgttcgaatctgtgcccgagacctccgtacacgaatttaccgttaaggattgcaactggaaggaggtgtgcctggacacgtacaaggggaaggttcttctcatcgttaacgtcaccttcaaatgcgggttcacggagactaattacactcagttgactgagctttattagaagtacagggagaaagacttttagatattagcattcccctgcaacccagtttttgcgacaagagccaggcagtgaccagcagaatccaagactttgcatgcacaagattcaaagctgaatatccagttttttagaaggtgcgtgtaaatggcccagatgctgcgccgctttacaagtttctgaaagctagcctacctggttttgttgtgtcaagaattaagtggaactttaccaagtttttgttgccag

SEQ ID NO: 4522 - DNA, 464 bp, Triticum aestivum
  Clone ID: uC-tsro9316099f11b1
gtttgttattgcgtgcccacgtgaagcactggggaggattttttaagagctcaaccgagttatgatacgcctaaatacatgctgactcaccatcgtgcacactatagtctgttgaaagcaccactctttataatttcctgaggtaaactatcactaataagttcatcgatgtgtttgaaatactgtaaagagatttcttcccgctgtcaccagaaaatattggcttttaatgtccatcgatttacataaacctggaaaaggagaaacagaccaaaagagtaaatttgggaatggtttaccgcgcacactataatctgactaaagcaacacaaatttttccgagaaaccttttctaatcaattcatcaacatcaatgcggttgaaataccatgaaatcttcccttttactggaattcaggtaacattgaatctgaatatacaatctatatacataattttgaaaa

SEQ ID NO: 4523 - DNA, 197 bp, Triticum aestivum
  Clone ID: uC-tsro9316099f12b1
tcgtttgtttttccttgccatcgccatgagtcgatttagtttgatttgaatgaatccatgcatccctgggtcgatcggtcggtcagtagtcgagtcattttgtggtgcgttcgtgcgtggagctgtaaaagcgtggatgagctcgatctgggaccaccgaccctgtcaatttgcttctgtaaaactgtgaattcgcc

SEQ ID NO: 4524 - DNA, 427 bp, Triticum aestivum
  unsure (1)..(427): unsure at all n locations
  Clone ID: uC-tsro9316099g03b1
cggcccggaacggcccgggccgacccacgcgacccgttcacttcgntcggctagcattcgagatctctcctctctagtcataccccgctctgtctctgtctctaggtatcgctgtctggacggccgcgcggcgctgcgaaaggagacaacgatggaagaggacgagtggtctggccgagcctgcgccaagcaagcgcgcgctccaggcgggacagtggtgggcagtagagccggatgggcgggccgaaccggcaggctctacccagggcccaactgcgcgctgaccgagaaccgacagagggagtgggaacgaaaagacaggaggaccgtggacatggaagtcgaaacccgcgaaggagtgtgccacaacatagctgcccgatcaactagccccgaaaacggacggcgctgatgcgcgcgacccaca

SEQ ID NO: 4525 - DNA, 195 bp, Triticum aestivum
  Clone ID: uC-tsro9316099g04b1
tcgcttacgggtgcgatcacgcgtcagcgcgagggggtcattatacaaccagccgttcaaggggctagaccacgagaagttgaaggagatggaacatgactattaggtgatgtgtgaccatgataggcgtgagacctataatcagtgtatggaagaagctctgaaggagggaatggttggaggaggaggtggatg

SEQ ID NO: 4526 - DNA, 203 bp, Triticum aestivum
  Clone ID: uC-tsro9316099g07b1
aggagagaggcatacccccttgttcagtcggaaggcgtcatgagccgattggggcagccgccggattttgaggagtacatggtcacgaagcttcaaattatgttgcatgcgaaccgtgttgacattgacacgctccgtggatttgatccagccatgaacctggcggtggataacactgtggaggtcaatggagactaaaagac

SEQ ID NO: 4527 - DNA, 510 bp, Triticum aestivum
  Clone ID: uC-tsro9316099h04b1
tcgtttgtttgttcaccatgttattatttggaccgggcttgtagcttgcttgtgatagtattttcttgtctactgtggtacctactgttaattaccttttttttctttctttctcaggatccacaagttgtcactggctcacatgatacaactatcaagttctgggatcttgtagctgggaaaactatgtgtactcttacacaccataagaagtctgttcgggccatggcactgcatccaaaagagaaatcatttgcatcagcatctgccgacaacataaaaaagtggagcctgcccaaaggcgaatttctgcacaacatgctgtcccagcaaaaaacgattctgaatgcaatggctgttaatgaggatggtgtcctggcaactgcaggggacaatggaagcatgtggttttgggttggaaggaatggccataattttcagcaagaacagactattgtccagcctggatcattggagagtgaagcatgtatatatgcccttttttatgat

SEQ ID NO: 4528 - DNA, 474 bp, Triticum aestivum
  Clone ID: uC-tsro9316099h06b1
tcgctcacgcgtccgcccacgcgtccggcggctggggcgaatcagccaaggaccagcgaagggggagggagttgacaatggggcagtgcggatgcttcggggcggtgcagaaggagcagcgggcggaggccgaccgcctcgaggcgcaggaggcccgcgcaagggccgccgaggccgcccagaagaggcagcaggaatatgaaaagtcagctgctggacgagcagcacgagcacatattaaagctatgaaggaggccaagacatcatcaaaccaaggagagccggttctgaagtggcagatggggtaaatcatcgtatgtgtccttgcaactttcagcgtgttgttgatggtgtgtggaagcttgttttcttttgatcatgcgatgccagttggtcacctaactcagttgtgatttttgtcagtgaaatgtacattcttttaggcactgctatacacgccttttcagagagtta

SEQ ID NO: 4529 - DNA, 488 bp, Triticum aestivum
  Clone ID: uC-tsro9316099h07b1
ttttcgtttagagctcgctctccgtgaatgatggcgaggttgaggtggaagaagaagaagtgtggagcacgctgctgctacctggtcacgctctcagcagtgtgaattcccagaagcatgcttgccgtgccttcttccgggtgcaccggaggctggcatgtgagcagggatgcttcagtgatgcacaagaaaaacggcaagtcttatcggcaagggaaggctacgcctttctttcaggtgtccctctctgcatctaaatctgtgtatggaggagggggctacggttagtttacccaccggtttactgcgttcttgtgagttgtgatcattatcatgcacttgtcagttgcttgacatgtatggcgttcttgaattttcagctacataatggtctgttgtgtgagtgaatgctatggcgttcttgaatgctcatgtgacagcctgtgtgttgactgtcctgtgaggcaatactaaaaaaagtgtgatgt

SEQ ID NO: 4530 - DNA, 577 bp, Triticum aestivum
  unsure (1)..(577): unsure at all n locations
  Clone ID: uC-tsro9316099h08b1
ccacgcgtttcgtattatatnaanaaaaaaataaaataaaaataagggataaattattatattataaaaatataagggtatttatattatatattaaactctaattaatattaattacttactctcttttctattctcttttcttttcccttttctcctttctttcccttcaaaatggggggggccctttttgggggtccccgttttcttccccgttgctggccccttttttttttttttttggggccccctattttattttcctgggccgtgttttccccccgttgggttggggaacccctggggttccccccttttttttccctttgggcacctccccttttttcccggtggggtttttccgggggggcccccccccgttcccttttcccaacgttgtccccccttttttgggattgggcccccccctttttggggccttataggcgggggggggggggggtttccccccgggtgcccctttctttttgcgggtctctttggccccggctctttgcttttttcccttctttttcgcgcccttctgcgggtttccccgggggtttttatggggggt

SEQ ID NO: 4531 - DNA, 498 bp, Triticum aestivum
  Clone ID: uC-tsro9316100a02b1
ttttgaaattgcccgagcagccgccatggccatcgccgtcgacgcggacactggcctccccgcggatggagctcatgtccaggaggacctccggcgtcgtctccttcgccacgtgcaccggttcgatctaggaccgctcaaagcctcgccatcgagctcttctccgccgcggacgtcacaaccttgccgtcgtctgctgctcctggccctcaccgagcctttcttgagctccccgatgccaccgccgacggatgctactacgtggataccgctgacgacgaggagtagttaggaggtcccaggcaggaggtcttgcctcttcaatcgttgttgcttttgtgtttgccttctaaaagcagtcttgtttaagttatgtctgtgctcagatattgttgcttccgctgatgcttgtgtatcgagcttgtattcgagccctagaggcctctggcttgtgatataaagcttggattattttgaaaaaaaaaaaaaaagggcggc

SEQ ID NO: 4532 - DNA, 532 bp, Triticum aestivum
  Clone ID: uC-tsro9316100a03b1
tttagctttttgtacttgacgagtctactatgaaagacgagaggtttgctttagtcgctgcaaaagtaatcaatcctaccatgttcgatcaagttctgagaaattttactccagatgcaccggctggaacatctgctcggccaagacaagaagatgcccaagagttcctaagttttgtcatggatagaatgcatgatgaactgttgaggcttaatggcaatggttgaaattcaaaggaaggcatggttgctttttgtgatgatgaccatgcctgcgagactgtaggtaggaagaacacatctgcaatcatgaggacaacagagttttgttcccttcgatctaagcgctatttttggaggcaagctacaaagtgtagtgaaagctgcaggtaacaaaacatcagcaaccgttcagcctttcctggtgcttcatcttgatatatttccagatgccggtcaaaccccttgaccatgcacttcatttgttttccacccctgatctttggaaggatacagaacaactggtggaaagg

SEQ ID NO: 4533 - DNA, 543 bp, Triticum aestivum
  Clone ID: uC-tsro9316100a07b1
tttgtccgttttacgcgtccggccagcagaggttgaggcaccagaggaagaggcaccaaagccaaagcccaaaaatccccttgatctactgccaccaagcaagatggtacttgatgactggaagaggctatactcaaacactaagagcaacttccatgatgttgctgttaaaggtttctgggagatgtatgacccagagggctactctctctggttctgtgactacaagtaccaggaagagaacaccgtgtcctacgtgaccctgaacaaggtcggcgggttcctgcagcggatggatctgtgccgcaagtacgcttttggcaagatgctcgtgattggttctgaggcgcccttcaaagtcaaggggctgtggctcttccgtgggcaggacatccctgagttcgtcatgaatgaggtctatgacatggagctctacgagtggactaaggttgacctctccgacgaggcccaaaagaagcgtgttgaggccatgatcgaggaccttgagccgtttgaggggcaggccttgttgacgccaagtgc

SEQ ID NO: 4534 - DNA, 491 bp, Triticum aestivum
  Clone ID: uC-tsro9316100a08b1
tcggtgcggcccagcaggacggaggaggaggatgaacggcggcagtggcaagaagaagttctgcggcgggcggctgccgacggggaccccctacctggcgtggacgcagggggcggtggtcgcctccctcctcgccggcgcctccatcgaccacaacatatacaagcccgacatgaccctcccgccggtggaggccgcccacggcaacggagccggagccacagacggaggcacgcgcacggagagctgagctaaatgtgacggctggcgggcgcccgagctctgctcgatgcccatgaggatggatttactacagtgtcattagtccttactttctttttacctctcaaggcagcatgcaagcgcggcgccattctacgtgctagctcggtcccaacatatgcggagatcttcgtccgttctgctgggtgttcaaacctggacaaagacaacagctggagccgtatcttcagtactactctgcctaaact

SEQ ID NO: 4535 - DNA, 397 bp, Triticum aestivum
  Clone ID: uC-tsro9316100a11b1
ttttttcacgtttacgcgcgcgcccacgcgtccggccacgcgtacgcttaagcgctcgtgacactgaacaaggcacgagcaacgacgactcggtgggctctaagcggtggcgatccgatgggctcccaacgcttaatgggcggctgatcaaccagggggcacgcggcgagatcgtcatcatagcctgcggcgcggtggtcctcagcaccaggtgaaggaaggaagaagaggacttgattcattaagttgtcgtcgatgagattttcctcttgtttgctagtaatgcacggaaaagcttttctttgtttgagcaatgaaaacatagattaaggagtgaaaggtatgcaaagacaaacatgattctattgttactctgtcacacacccccaagtgtctt

SEQ ID NO: 4536 - DNA, 494 bp, Triticum aestivum
  Clone ID: uC-tsro9316100b01b1
ttttggcttttaaccactttattgtctgcataagcatacagggaaaagaagaggaattaagctccaagacttggaggcgatgtcgtggtggaagtccaagtcgcacttcagcgccgacagccaggactcgagctccgacgacgcgtaccgaggaggcaaggaccgttcgccgtcgcgtctcaagaagtccgacgaagactatgaggagtaccgcccatacgcaggctacggcgccaacaccaaccgtggcggggccaacgaaggcggtggcggctacaacggtggttacggcggcggtggcggtggttacaacaacggctacggcggcggtggcggtggctcgtacagtaacggtaacggcggtatcacgccctacaacggtggcggtggcggctacaacaggaactcttcctacggcaacggtgggggtggctacaacaacaacttcttctacggtaacggcggcggcgacgggtacaacaccgttccagctg

SEQ ID NO: 4537 - DNA, 330 bp, Triticum aestivum
  Clone ID: uC-tsro9316100b02b1
tttacgcgttcgcacacttccactctcgcagcagctagcctcgccctcgcaagatgtggagcggtgtgggctcgcgccttctgccacaggcggtggccatcgccatcgccgtggccgtcgcctgctgcatggccgcctcgccgtcgtcggcgcaggggacgacgacgcccgcggatgccaccggcgcgcttccgtcttgctcttctaagctcgtgacgtgcgcggtctacctgaacaccaccgacacgccgccggagttgtgctgctacccgctcaaggactcctcttccacccacgctggcgttgcttgcccgccatcctcatgaacaa

SEQ ID NO: 4538 - DNA, 428 bp, Triticum aestivum
  Clone ID: uC-tsro9316100b03b1
attcgactctacaccagcccccgttgagagtcgagagagttccaccgctcccggcccgatcccttatcttctccgacggcctcgccggccggagcggagacgggagaggtgcatggcgttgtcctatgtatatagaatctaggtataggttgaggtcgagtagtgcccatgtggcgtatggctgtatgccgatgtggagagcgccgccgccgcgtacgagcagcggctggtggctcacggtggctgcgtctcaggcaaggctggctggcggccagtctctcccgaggggcgtgctgctggctcatccaccaataagctcgtctggtcccctgttctggaggctctccgctacttctctaagctcgtggcgtcgccgtggtggtgaagacgaagagtagaagagatggggaaccagatcgggtcagtgc

SEQ ID NO: 4539 - DNA, 193 bp, Triticum aestivum
  Clone ID: uC-tsro9316100b04b1
ctgacgcgtgggcggacgcgtgggggaaaggcgaacacaactacctgcctccttcgggcaacaccgttggtccctgccacctccgtcgtctgctccggcgactagcgggtggggaccctgggggttcggctccgactgttgatagagctacaacttaatgttctccatacaatttgctatgtgcactctatga

SEQ ID NO: 4540 - DNA, 446 bp, Triticum aestivum
  Clone ID: uC-tsro9316100b10b1
tttgctccggtcaaaaaaaaaaagagagaaatacaagtaaaaaaacgcaaaaacgaaaaaaaaaacaaaaactccaaaagcacaaaaacgcaccaactggcacaactcaaggccacacaaaaaccaaagaaaggggggggggggcttaaggggccccaggtttactgcccgggcccggcagcgccatggtttttctttggggcccccgaagtccaaccgacgggcccgccttttccaccggcgggccgggaaaaacccgggggtccccccctttaaggccctgggggcaaatccccctttcgcgggtgggggtacaaccaaaagggcccgcactgctggccctttccaaaagggggccacccggaagggaaacggggccccccccttggccgggcccatcacgcggggggggggggggggtctcccgaagggggcccggtcctttt

SEQ ID NO: 4541 - DNA, 204 bp, Triticum aestivum
  Clone ID: uC-tsro9316100b11b1
tttgcctatcccgtcgccatgccctactgttatcgtatggtctgaggcgacgtttcatggttttgtctttgttgagcaaaattaggaggctaggatgaccttgtaaagtaaaccctgtatatatggcatcccatggcttattacaggttggctcaaaaaaaaaaaaaaaaaaaaaaaaaaataaaaaaacataaaaaataacaa

SEQ ID NO: 4542 - DNA, 466 bp, Triticum aestivum
  Clone ID: uC-tsro9316100b12b1
ttcacgcgtccgcccacgcgtccggcctcgtactgctccgagctccaattcttaggcaaccctgtgaccaaccatgttcagagcgcggagcaacacaaccaagatgtcaactctcttggtctcatctcctcaaggaagactgcagaggccattgacatattgaagctcatgtcctcaacattcttggtcgcgttgtgccaggctatcgacctccgccaccttgaggagaatgtcaagaatgctgtcaagagctgcgtgaagacagtggctaggaagacactgagcactgataacaatggccatcttcacaacgcacgcttctgcgagaaggaccttctgctcacaatcgaccgtgaggccgtgttcgcgtacgcagatgacccctgcagcgccaactaccccctcatgcagaagatgcgtgcagttcttgtggagcacgccttggccaatggtgaggccgagcgcg

SEQ ID NO: 4543 - DNA, 230 bp, Triticum aestivum
  Clone ID: uC-tsro9316100c01b1
ttgtcgtcgtcgtcgattcttttgtcagattgagttaaacgagtgtaatagtttgatgatttgtgttaaaaaaaaaaaaaaaaaaaaaaaaaaaaaaaaaaaaaaaaaaaaaacccaaaaaaaaaaaaaaaaaaaaaaccaaaaaaaaaaaaaaaaaaaactaaaaaaaaaaaaaaacaacaaatcccaaccaacacacaactcaacattacaccaaaacaaaaaacaaa

SEQ ID NO: 4544 - DNA, 425 bp, Triticum aestivum
  Clone ID: uC-tsro9316100c11b1
ttcggcggcggcagcgaagaagaagaagagaagaagaagaaagatgatctacgacgtgaactcccccctgttccgctccttcctcagccagaagggcggcgcgtcctccgacaagaggaaaatggaagagcagaagccgaaagaccagaggttcaaggccaacgagaacaagcctgtaatgaacgaatgagcatcgcctggacagtccggtgcctgcaaggcctagctgccaatcatgtgacactcctatgttaaaatgagtggtgtgaacatctgcttggtcgttctgaaaactatccaagtatccagtactgtgttttaagttcctatatatctgaactgcatgcctggaatgataaattaggagaatttatcttgcgatgtcttctcatggagcattcaagttttggaatccacttccagtt

SEQ ID NO: 4545 - DNA, 62 bp, Triticum aestivum
  Clone ID: uC-tsro9316100c12b1
ttcacgcgtccgcccacgcgtccgcccacgcgtccgcccacgcgtccggttctagatcgcga

SEQ ID NO: 4546 - DNA, 377 bp, Triticum aestivum
  Clone ID: uC-tsro9316100d04b1
ttttgaatgctgaacagaagataatttctggcttccctgaagctgcaacacttgctcgctggatatgccaaagttaccggttccatctgggggtcgagttatttagacaggcagatgaagctggggaatctttattgagaatgctctgggatcatgaagatgctattttgtgctgttctttcaaggaaaagcctgtatttacgttcgcaaacgagatgggaattaacatgttggaaacatctttcgttgcccttcaagatctctcgttggacaagatatttgatgaagctggtagaaaggcactatactccgagatcccaaagctgatggagcagggctttgtttacctgccaggcggtgtgtgcttgtctgggatg

SEQ ID NO: 4547 - DNA, 150 bp, Triticum aestivum
  Clone ID: uC-tsro9316100d06b1
gtatttgttttagaaactcctagtggcagaataataacatgcctgcaagagcatggggttgtagctttgtagttgccatttgatacaggagagggggtatagcaggaaatgtaatataaagcgtaggtggtgggggtgactggcgttacc

SEQ ID NO: 4548 - DNA, 184 bp, Triticum aestivum
  Clone ID: uC-tsro9316100e02b1
ttttacctttttcttttactatgccagccgattgtggcttttgggccttgttttattttgcttgctctgtgtgagccagtatcctttgttgcagtactttgcaagacattgttgaactagtttatttatttataaatgtggccatatgcatcttgtctgatgcagaggccggggaagtctccct

SEQ ID NO: 4549 - DNA, 65 bp, Triticum aestivum
  Clone ID: uC-tsro9316100e04b1
acgacatcatatatctcttatagagtgacccaaactcaacatcactgcgcgccgccttatcacca

SEQ ID NO: 4550 - DNA, 77 bp, Triticum aestivum
  Clone ID: uC-tsro9316100e06b1
caccctgacacttgcaggtgcaacgcctgcctagttcctcatatccaatccacgcttcaccaaaactctaaataaaa

SEQ ID NO: 4551 - DNA, 320 bp, Triticum aestivum
  Clone ID: uC-tsro9316100f07b1
tttgccctttagaaacgccaccaaacccaaactcgagcccccctcttccgtccgcccgtcccaacccgacccgatctcccccctcctcctccgtcgccatgggccgcaagctcttcgtcggcggcaactggaaatgcaatggaactgtcgaacaggtagagagcatcgacaatactctgaacgctggacagatcgcctctacggatgctgtcgaggctgtcgatagcccgccctatgacttccttcccaccgtcaagggtaagctgcgcccagagatccaagttgctgctcagaactgctgggtgaagaagggcggcgcc

SEQ ID NO: 4552 - DNA, 173 bp, Triticum aestivum
  Clone ID: uC-tsro9316100f08b1
tttgcccgtttctccaccgccggcgtccggcgactgccgctagccggcctaccggtgatgggtcgcgcatccacttgatggatccgtcggcggcagagcctgcgccaccacgggccgccccgggcaggggggcggacccagcggagcggcgcaggcggcggagcgggaccaca

SEQ ID NO: 4553 - DNA, 440 bp, Triticum aestivum
  Clone ID: uC-tsro9316100f10b1
tttcagtaaacagagagctcgctctccgtgaatgatgttgaggaagaagaggaagaagaagaagcagtgtggagcacgctgctgctacctggtcatgctctcagcagtgtgaatctccagaagcatgcttgccgtgccttcttccgggtgcaccggaggctggcatgtgagcaggggtgcttcagtgatgcagaagaaaaaaggcaagtcttatcggcaagggaaggctacgcctttcttccaggtctccctctctccatctaaatctgtgtttggaggagggggctacggttagttcacccaccggtttactgtgtccttgtgagttgtgatcattatcatgcactcgtcagttgcttgacatgtatggtgtcgttcttgaattttcagctacatataatggtcggttgtgtgagtgaatgggagtgtgttcatgtgtc

SEQ ID NO: 4554 - DNA, 474 bp, Triticum aestivum
  Clone ID: uC-tsro9316100g03b1
ttcatcgtttcgcgcccgcaccccaggaagctcaagaggctgtcctgagaagctcaaatggctcccaaagttgctgttgccaagaagggcgatgccaaggcccaggctgccaaggttgccaaggctgtgaagtccgggtcaatcaagaagaccgcaaagaagatccgcacgtctgtgacatttcaccgtcccaagaccctgtccaaggccagggaccccaagtaccccaggatcagcacccctggcaggaacaagttagaccagtaccagatactcaagtacccgcttaccactgagtctgcgatgaagaagattgaagacaacaacacccttgtcttcatcgtcgacctgaaggcagacaaaaaaaaagatcaaggctgccgtgaaaagatgtacgacatccaggccaagaaggttaacaccctgatcaggcctgatggcaagaagaagggttcgtgaagcttgaccccagac

SEQ ID NO: 4555 - DNA, 274 bp, Triticum aestivum
  Clone ID: uC-tsro9316100g06b1
ctcacgcgttcgggcgcggcgaggagaaagatggggaagatgccggtgcggatgaaggcggtggtgtacgcgctgtcgccgttccagcagcaggtgatgccgggcctgtggtaggacatcatcaccaagatccaccacatggtgtcccctaactggatctccttcactgttcttcatcacccctgtcgtctgcacctaccagtacccgatgttctattaaggagcatgagaagctgtcccacagatactagatgtgaagctttgtcaaatgtca

SEQ ID NO: 4556 - DNA, 500 bp, Triticum aestivum
  Clone ID: uC-tsro9316100g07b1
atttgtcctgtctgatcagctatttgatcatttgatctgtgcttagtgatcactcggcagcaatggcaggcaaggcatcaatcgcgttgttcctcgccgtgaacttggtcgtgttctccctggcaagcgcgtgcgggggaaactgcccgaccccgtccacgcccactccatcgacgcccaccccgaccccggccccgctcggcaggtgcccacgcgacgcgctgaaggtgggcgcgtgtgtcaacgcgctgaacctgatcaaggtccaggtgggcaggccgaccgcgttgccgtgctgcccgctgctggatgggctcgtcgacctcgaggcggacctgtgccctctgcacggtgatcaaggccaatgtcctcaacattgtccagttcacccttcccattaacctcagcgtcatcctcaaacactgcggcaagaaagcgcccaccctgattcatgtgctaagcgatcagcaaggtgtggcatgctgcccacgcatgccttt

SEQ ID NO: 4557 - DNA, 479 bp, Triticum aestivum
  Clone ID: uC-tsro9316100g10b1
tttgtcctttgacgcgtgggcggacgcgtgggcggacgcgtgggcggacgcgtgggcggacgcgtgggcggacgcgtgggcggacgcgtgggcggacgcgtgggcggacgcgtgggctgaagcttttcgtggaaattttagtcaactcagcagcttgattagagtcattgccgataacaatggtatttctgaagagcaagcaccagctgctggtctggtagctgatcttcctctgcaggattcggtgctaaccagacgtcttgttgaagatggggctttcaccacaataatatccaaagtgataatgatcagacaaggggagagtcgtggggggcgtttcgtcaacccttttcttgaaggtctagttaggatagtctcccggatcacatttatcttggaggatgatccagatattattgcttgtgcttgtgaatacaatctcactgcactatttagtgatctgcttcagatgaatggtc

SEQ ID NO: 4558 - DNA, 262 bp, Triticum aestivum
  Clone ID: uC-tsro9316100g11b1
ttatctctttcacccgcctacctcccctccctggctcgtgccatccccacgcccgccacgaaagccggaaagatctgccccggatagcggcggggagcgctcccggtctgctgggatttcggccatgagctgcggcggcgtggggcacggcgggtggctgctggactacggcctcgtggaggaggagatccaggcctccgacttcatctacatggtcgacgacccgtcggtcttaagctgcatactggggttcgatgttccc

SEQ ID NO: 4559 - DNA, 511 bp, Triticum aestivum
  Clone ID: uC-tsro9316100g12b1
tatccctcatcgagggcggcggcatcggcaccgccatcgagacgaccacctcgcacatcaaggtggagccggcggccaacggtgggagcgtcgttaaggtggagtcgacctacaagctgctgccgggcgtggaggtaaacgatgagatcaccaaggccaaggagtctgtcacggccatcttcaaggccgccgaggcctacctcgtcgccaacccggacgcctacaactgaaccagctgagagggaacacatatggttatgattatgattatgctggccctggtatgatttttgtgtgcttttttcctgatctaataaagccgctccaatcgcaagtagtgacgcgggagcactgagcagagtgtggacttgacaagttaaaaaggtcgtgtattcagtatttgtaactatcaaagggtgccatgctgttgtttgatgatgttgttgcttgcttatgtatcttcctcatggctttgcccggaatgaaaggaaatatttgttcgctcctactg

SEQ ID NO: 4560 - DNA, 59 bp, Triticum aestivum
  Clone ID: uC-tsro9316100h01b1
ctcacgcgttcgcccacgcgtccgcccacgcgtccgcccacgcgttcgtggtcgcgtgg

SEQ ID NO: 4561 - DNA, 288 bp, Triticum aestivum
  Clone ID: uC-tsro9316100h03b1
ttagcaccttatgaaggaaagtgcaatcggtgtgagccccttagatcttccagaaagtgattcatctcataaactggcattatatcagtactcgttttgagcgtcctgtcgatcttatatatcatgtaaaataaaaacaaactaagctggccttatttgcgaggcactttctaggctctggccatttggtatttggacaccaattcccaggaggcgatctgctattggaggatggttcaatagaccggtgaccttggatctttggaaaaaaaaaaaaaaaaggggggc

SEQ ID NO: 4562 - DNA, 407 bp, Triticum aestivum
  Clone ID: uC-tsro9316100h07b1
ctcgtcgagagcacctccgggagccgggatctccagatggtgagaattggtcttcgtgttcttacacgacccatgccagagagactaccaactatgtacaggaccctgggggagaactacaatgagagagtgctgccttcaatcattcatgaaacactcaaagctgtggttgcccaatacaatgccagtcagctaatcacacagagagaggctgtgagcagggagatcaggaagattctgacagagagggcgaagaacttcaacatcgctctggatgatgtgtccattaccagtctcagctttggtaaggagttcactcatgccattgaagccaaacaggttgctgctcaggaagctgagcgtgccaagttcattgttgagaaggctgagcaagacaagaaaagtgc

SEQ ID NO: 4563 - DNA, 311 bp, Triticum aestivum
  Clone ID: uC-tsro9316100h10b1
tttttccgtttacaccctatctcgcagcggagaaaattatatcgaagaaggcctaggcagcaacacgcggtctgaaggattggattatgcatggcgactggtcggagagatccatcaggtgtgattctgtgtgcatgtaattacgggtgttgtggcatcgtgttgccgaggtgcgcagtgatactctttccagttttgtcgtgttcaataagtgaaatctttcggattgctggctagtttcagtattcccaggatattgaaggatgtgcagtcgtaagaggccaaggcctaaaatagaaactggacgaaga

SEQ ID NO: 4564 - DNA, 200 bp, Triticum aestivum
  Clone ID: uC-tsro9316101a01b1
tcccgatgtccactgctaccaagacctccggggcgaggttaaattttaaatacggttgcgaccgccgacacccgcgctgcatatcccgcaacgagagagagggctcaagtctggaccggcaggggctatggccacgttaacaccacatcacgagaccatcttactgaacagccccgcaagctgagcgggcgacgaccacc

SEQ ID NO: 4565 - DNA, 518 bp, Triticum aestivum
  unsure (1)..(518): unsure at all n locations
  Clone ID: uC-tsro9316101a02b1
tttcccactcctaccagtacctcctctccgtggttgtggatctgtccgggcgagaccggggtcgatcgtgctgcatctcgcgcggtgagagggagctctggagtctggactggcggcggcgatggggtcgtctgcggtgcagaaggaggccgtcgtcctcaacggcggcggaagcggagcgggggaggaccaccggctgcgggcgctggcggcgaggacggtgacagactcgctcagggcggccgtggccaggtccagcgcggcggacaaggcggccaggctcgaggagtgcgcccggagcctcgaggccgagaaggccaagangggaggtcttccgccgcgagctccccatcagcgtccacctcatcgccgacgtgatcgagtggctgaaagatgaaggtggcgcagcaccggagacccgcgccggatcagctgctcgcaccggcgccgtcgccgtcacctgcaccgccggaaaagagggaggcgtaggtcgtcaagacggaagcagacgcgagcga

SEQ ID NO: 4566 - DNA, 280 bp, Triticum aestivum
  Clone ID: uC-tsro9316101a03b1
tttacgcgtccgcaaactttctgtatcactttgattggacgcttcccggcggagccagctcagcgtcccttgatatgtctgagaaatttggggtaactgtacgtaaaaggtctgacctatggctcaaggctattccacatgcacgctccaaagctacacatatatagatccaccttaacagagtggatgtctgttcttgtcgcattttgtacctttatgtttacattagaataagaggagctcttggaaaaacatgtaacaatcgggtgtgactacggcc

SEQ ID NO: 4567 - DNA, 375 bp, Triticum aestivum
  Clone ID: uC-tsro9316101a08b1
ttatgcttgaggtgtagtaacagatgcctcaggaaacggtctcttttactcgcaagggagatttctagatgttgacacaggcatcattgccacaaataagcagttgatgccatcactgctgaagtctgtccaggaggccatcaaggagaaaagccaggccccttccccattgtagaagcttttttggtttgaaccttccctattgtacttggattgatccaaaacaatgatcgcaatgccacaccttattcacactgtttatgtgtaaatgacctttttgttgggacaaaggcaatccttgctgtatcacatttgtacatctaaggagtggtgacagccatgtcttaaataaaagaggcatctgcctgcagttat

SEQ ID NO: 4568 - DNA, 66 bp, Triticum aestivum
  Clone ID: uC-tsro9316101b09b1
cttggttttgtttcagaaatattgagcgttgaggcggtggaggctttaattacagacttgataaaa

SEQ ID NO: 4569 - DNA, 509 bp, Triticum aestivum
  Clone ID: uC-tsro9316101c01b1
ttataatggcacctacaagaattcatgtaacatgttcactagttcatgggcaaaccccaactggaaggatccataaaggagtttgttctacttggatgaagaattcaactccctcggaagagagcaaagaatgcagttgggctccaattttcgtgaggcagtcaaacttcaaattgcctgctgatcctacagtgcctattataatggtgggccctgggactggccttgcacctttcaggggcttcttacaggaaagattagctttaaaagagaccggggtggaactgggccgtgccatcctgttcttcgggtgcagaaaccgccagatggacttcatatacgaggacgagctgaacaactttgctgaatcgggagccctctccgagttagtcgtcgccttttctcgtgagggtcctacaaaagagtacgtccaacacaaaatggcagagaaggctgcagagctgtggagcatcgtttcccagggcggctatgtgtacgtctgcggcgac

SEQ ID NO: 4570 - DNA, 513 bp, Triticum aestivum
  Clone ID: uC-tsro9316101c06b1
ttcacgcgtccgcccacgcgtccggccacgtgtccgcttttgcgtccgggagagtgatagaggcatcttctattcacaagatacgcggctgccatggcgagaaccctttttggtttcgtcgccgcccccgcgctcctcctcgccgtcttcatgccggccctcgccgccgcgcaggcccccgcgccggcgcccaccagcgacgcgtcctcggtcgaccagggcgttgcctactttctgatgatcctggcgctggtgctcacctacctcatccacccgttggacgcctcctccccgtacaagctcttctgagcctgtacatgcgcagaggcttctcattcttttgttcatctttctgttgtccgtcgatcgataagctagtggattcttgagagattggctgtgtgagattcgatttgaattcattaattttgttgctcctgtactctggtggattcgcacgcacgcgtgcttatttttgttccatgctcctcaggtctgttgccactaattatg

SEQ ID NO: 4571 - DNA, 91 bp, Triticum aestivum
  Clone ID: uC-tsro9316101c09b1
ttttgggttatgaacaggagcgaccgggatcggcgaggtcagatttaaaaagaagtggcgtctgacgcgccagatgattgattgctgcttg

SEQ ID NO: 4572 - DNA, 448 bp, Triticum aestivum
  Clone ID: uC-tsro9316101c11b1
ttgatatttcccccgagccgaggtcaagtcgcctcgtggcgtgctgcgtttctcctcctgccccgctcctcccccattcgccgtccgcggttctctccaccgaacaagctcacacatcaagacaataaatagagcctcgtttgtttggggccaatcaaaccaaacaacaagttcatgtctgatctcgacgtccaggttccaactgcttttgatccgtttgctgaggcaaatgctgaggactccggcgctggtgctggatcaaagaactatgtgcatgtgcgtgtccagcagcgcaacggaagaaagagtctgactactgttcagggcttgaagaaagattacagctacaacaagattctcaaggatctcaaaaaggaattctgctgtaatggcactgtagtccaggatccagaactaggccaggtcatccaactccaaagtgatcagc

SEQ ID NO: 4573 - DNA, 505 bp, Triticum aestivum
  Clone ID: uC-tsro9316101d01b1
tttccgtttccaaactcaaatcaggcggacaaatcatctctgctcgatgcaataattgagcatgcgaaaccctcttcagcttcaggtgcaggcctcaagcatgagtaggctcggagctcccggtgcagttcttcccctccttgcagaatctcaaactgagggccgtagcaattcacctctatcatctccaaccgcttcacaagggcttctggacgcagcaggcccagaagacagcttggtctttgagcaagaagttataaagctgatggaaacaagcatcacaaatgcaatgcagtaccttcagaacaagggcctctgcctgatgcctatcgctcttgcttcagccatatccaaccagaaaggcacttctgcagctgcaatccctccagaaaggtgaaaacagaaagcacatcatgctcctcccatcggcccgcggaaacaactgtcgaaatgtgctagagttcatagaagttgtgagaaaacaaaaatccgaggctgaaggata

SEQ ID NO: 4574 - DNA, 211 bp, Triticum aestivum
  Clone ID: uC-tsro9316101d08b1
ctttattgattcatgatctatcttgcattttggcgccttatgctgtaccttcattgtgttttttgggccttccacgcgtcaccctgctggcgtacgcctttttcttacaacttggcattatttgtaccaattttaatcagtttgcctttatagttcagccctgtaaatatagatgattctagtaggtacaaatgttacacatccagggaac

SEQ ID NO: 4575 - DNA, 237 bp, Triticum aestivum
  Clone ID: uC-tsro9316101d09b1
gtctgagttccgctgcttcgagggcggcctggggtgggttaacttcgacaacaacctccagtaggcctccagccagaacggcgagatcctcgacgccaagatcatcaacgaccgcgagacggggaggtcccgtgggttcggcttcgtcacgttcggcagcgaggagtcgatgcgccaggccatcgaggagatgaacggcacggagctcgactggcgcaacatcaccgtcaacgtggc

SEQ ID NO: 4576 - DNA, 296 bp, Triticum aestivum
  Clone ID: uC-tsro9316101d10b1
ttggttctgggatcgaattggcgcgcatacatgtgatgtgtggatgcgatccatggccgattccatttgctgtacttgtaccgtgagcttatctacttgattcattgttgccttcggaataaacattgctacaattagaccttaaaaaaaaaaaaaaaaaaaaaaaaaaaaaaaaaaaaaaaaaaaaaacaaaaaaacaaaaaaaaaaggctgacataaacgaaggtctgactgtcccttcggcccgaaagagctgaaacgaaggatcttgaagacacaaccccttggctgggccc

SEQ ID NO: 4577 - DNA, 520 bp, Triticum aestivum
  Clone ID: uC-tsro9316101e01b1
tttccgtttcgagagcgggtatgagcagaagaggaaggtgatgaacaagaagtatgaggtgtacgaaaagcagatgaaagcagcaaggaagactgggagcaaggctgcacatgataaggttaaagaccaagcaatgtcaaaggcccataaagaagttgccaaggggaaggggaaaggaaagaatgtggcaaatgatgatgataacgtgaagccagcggatctgccacaaaagtggcatgactacaaagtcgagttccacttcccagaacccactctgctcacaccaccactccttcagctcattgatgtgggtttcggctaccccaaccgtccggacttcaagttgccagatgttgatgctggcattgacatgggaacacgtgttgccattgttgggcccaatggagcaggaaagtctactattctaaatttacttgctggtgatcttaacccatccgaaggagaggcatgaaggtaccagatgctgaggattggacgatactcttagcattttgttgac

SEQ ID NO: 4578 - DNA, 502 bp, Triticum aestivum
  Clone ID: uC-tsro9316101e02b1
atctttttgatttttctcggccttgtgctggataccgcgcgcctcagcaaattcccgctgccgctgtcggccaccgcgcaccagatgttcatgagcgcgtcgagcgccggccacggcggcgaggacgattccgccgtcatcaagactttccccggcatcacgctgccgtccgcccgctgattcgaacgacgtacctgccatgaccgcttccgcttcccgtcccctgctcggctgcatcggcgacgatttcaccggcgcgaccgatctcgcgaacatgctcgtcaagagcggcatgcgcaccgtgcagacgatcggcgtgcccgccggcgacgccgcagtcgataccctgatcgacgccgacgcgatcgttgccgcgctgaagtcgtgcacgatccccgaggacgacgccgtcgagcaatcgtttgccgcatacgaatgggctgcacgcgcaagggttgccggaggtcttcttcaaggactgctcgacattggactccaccga

SEQ ID NO: 4579 - DNA, 302 bp, Triticum aestivum
  Clone ID: uC-tsro9316101e03b1
tttccgctcacgcgtccggcgcggatatgaaagccaccttcgactgcacctgcggtgggccctgcaagaagtactgatcggctcatgccagcatgatatgttccgcctaaaatgaaataaaagctcagacgagatgagcagcgtcatcgtgcctatgcgtgtgtgtgtggccaacaaatatgtataccagtatgccgtgtcttcgtcgctgtgttttctctctcgagaaaaagttggtgttgcttgttgttcagatatccggaatatcctccgtgaataagtaatgattgtgcgttggcggc

SEQ ID NO: 4580 - DNA, 451 bp, Triticum aestivum
  Clone ID: uC-tsro9316101e07b1
gtatggttttagcaaagggatagctcacatggggtcatttgaaaagagatgcctttccaaagcactcgcccttagaggatctgacctaggcggctgcaactcgcatgttgctgaagctaagcctaagggtcaatctggtggcgttggcgagcgatctggcggcagagatggtggccgctctggcggcggcaggttcggacggtctggtggccgcgatggcggcggcaggtccggccggcctggtggccgtgatggtggcggcaggttcggccggcctggcggccgtgatggcggcagaggaggcggccgaggctttcaaaagagacagagtgctggcacatgcagagcccggaagaagaccacgcttggtgacaattagaaaccgtttgagccacaaaatgagcctgatgcaactgccgtgtgtctagacgactgattccccgtgtttccc

SEQ ID NO: 4581 - DNA, 509 bp, Triticum aestivum
  Clone ID: uC-tsro9316101e09b1
ctgggcctgcagatccggcgcacccacgccatggccatcgacatcgaccaggatctatccaggggggaaaagctacttggggatcttgggggtttgttttccaagaagtggaagccaaagaagaatggagcgatcaggggccctatgctgaccagagatgattccttcatacgcaagggcagccatatggagcagaggcataaactggggctgtcagatcgtcctcgtcgatccaatgcacgccaattcctatccgaacccacatcagagcttgagaaagtcgaggtggagaaggcaaagcaggatgatggcctatctgatcttagcgacatactgaccgagttgaaaggaatggccattgacatgggaactgagattgaggggcaaacaaaggatctgggtcacgcagagaaggactttgacgaacttaactacagggtcaagggggcgaacactcgaacccgtcgtctgcttgggagatagaggaaagcatatgttgtcactggaga

SEQ ID NO: 4582 - DNA, 415 bp, Triticum aestivum
  Clone ID: uC-tsro9316101f01b1
gtctcaaccccgtggacgtggtcaagaccagggtgatgaacatgaaggtggcgcccggcgcgccccctccgtacgccggggccctggactgcgcgctcaagacggtgcggtcggagggcgtgatggcgctctacaaggggttcatccccacggtgtcgcgccaggggcccttcaccgtggtgctcttcgtcaccctggagcaggtgcgcaaggtcttcaaggacgtcgagttctaatgcagtgcagaccaccgcacggcgcggcgccatggatccatgatgatgacgacaagaagctgcccattgatgccgctgctgctaagaatactatgaggaccgctggagggatttctccagttcctgcctctcatttattcggatgaatttgatcgattttggatgaaattctcaatttt

SEQ ID NO: 4583 - DNA, 480 bp, Triticum aestivum
  Clone ID: uC-tsro9316101f02b1
ttttgatcctgaagaaggagggtgccaagtccctcttcaagggggctggtgccaacatcctccgtgccattgctggtgctggtgtgctctccggctatgatcagctccagatcctcttcttcggcaagaagtacggctcaggcggtgcctagaggggacgaaatgatgacgaacaagagaagtttgttcccagtcctacccttcgaggatctggtgaacttttatctttttaacgttggaaggcaataattattgtagagggtggattttcccaacattcgtttttggtggaggcatcgaactccagaggttgtcgtaggttggcggcagcgttctcaaaacatttactatcatagggttgagtttgagttcgagtatgtgccctgaatcgttaccgggcaattttccttaaatacattgtcctccaatccgactgatattatggtcaagtttatgctattggtgtcaacatcctattcc

SEQ ID NO: 4584 - DNA, 465 bp, Triticum aestivum
  Clone ID: uC-tsro9316101f07b1
ttacgcttttgagcgatctgcactagtcgctgcaagaaccaccaccacaagtgagtgaacgtcggagcaaggaaaggcagggagagatggcaatgaggccgctcgtcgtcctggctctggccgtggcgctggccggggtggcgctgcgagggggcgccgcggagggggccggcgagtgcgggaggtcctcccccgaccggatggccctgcgcatggccccgtgcatctcggcggcggacgagccggactcggcgccctccagcagctgctgctcggcggtgcacaccctagggaagagccccagctgcctgtgcgccgtcatgctgtccggcaccgccaagatggccgggatcaagcccgaagtggccatcaccatccccaagcgctgcaacatggccgaccgccccgtcggctacaagtgcggagattacacgctgccttgatggcccagctctggtgctgatg

SEQ ID NO: 4585 - DNA, 470 bp, Triticum aestivum
  Clone ID: uC-tsro9316101f08b1
cttacgcttttgcccacgcgtccggccagctctaagaccagtagggagagcatgcctaagtaagcgccgagcaaaagttttgacccttggagccatgaatttgtgcttccagacctgctgcataatacctttggttgattgatttacctgcctcggttgatttgcctgcacagcatgaatttgttctgaacacaacttgcaagtgctctttgaattgcatttaccaggagtgagcttccagcaaaggatatccctgcaatcatcaagtactacaggagtagcaataatagccgaagcggtaggttcctgaaaaaggttagtggcagaattataagtatgtatccagtttactggcaattacctacagaaaacctttcatctcaaaactactagatgtactactatgataagcaaagtgcagcagcgagcaggattcacaataaaaaaaaaagaaacataataatgaattt

SEQ ID NO: 4586 - DNA, 507 bp, Triticum aestivum
  Clone ID: uC-tsro9316101f12b1
ttcacgcttccgcccacgcgtccgtgagatagtcgatctacgtgatggctctgagtttgtgattaaagtgccttattgctacaactctatgtacatggatactgaccaagctcaaaatgatttattcatgatgatgcaggtcaatgtattaaatgaattggtagctccagacacttgcgcacaaagcgtagaaattttgtatgaggttaggggtggagtagacatggaatttcaagttccagttcctttcaatgttgtaccagttcaacagatagttcctcagagtggtggagaaggccaagctgagttagttcttgattcttgtattggtagctccactgtgcatgacccgtctaagatgtctgctgagctttgcattggtgaatcttgcacttctatgttacagttgatgaagaggtatctccgattggcaacaactaatgcatcatggactgcgaacaatttttttgcagtctacccgtattattatggggcttactttacttc

SEQ ID NO: 4587 - DNA, 452 bp, Triticum aestivum
  Clone ID: uC-tsro9316101g09b1
cttacgctttcgctctctccctctacttctcgtgccagcttcagaaaatagatacgccgacgaggaggagagagcgaaagaaactgtagtttgtttgcacttgagcagcggcgccggcgatcgacatggcggctcacaagcggctccacgacggcttcgagcaggaccccgaccagcccgagaagaagcggatggagcgctcggtctccttctccacgtgagcttccttccagcccgccgcctcttggttcgtcgtgtgtcctgttcatccatggaggtctttgctgattccatggcgtgcgtgcgtttggggttccagggtgatccgggaggccatggtgatgaagcaggtgcagagtgtgttcctggtgctggagcctctcctgcgccgagtggtgcaggaggagatccaggcggagctggtgcgcatcccgcggtacatcgagaggtcc

SEQ ID NO: 4588 - DNA, 284 bp, Triticum aestivum
  Clone ID: uC-tsro9316101h01b1
ctctgactttcttgtgctgtttctggtcctgggagactttttttttcattccattggttccattttagttgaaattcgttgtaatcccagttgctgatttttgtagacacgatccctgggttcctcccacccgtttgtttcgggttcattttctgcgtgcgtgatgtgtcgcctgggattatattggggaactgggaggggcttcctcccagaataccgtgttgatgttgttgggactgactatttctgtcgtgagaacagtttgaatttgtgatgggcatcaa

SEQ ID NO: 4589 - DNA, 485 bp, Triticum aestivum
  Clone ID: uC-tsro9316101h04b1
tttttggacagtcaactcatacttgggaacacagcaatgttttgatcttgctcggtacaccggagtacagaagattcaggaacagcttccttctgatgaggtcaccacaccacctgaaacatcccagttagagggtggtagaaccgatgtacagaacccggatgacagcagcagcagcatgcggaccgatcgagtgatccgaccaagtgatttggtcgctttccgtcggcttcaaagtccacaaccatatatgtatatatgttcaagacagcgaaaggagtctggttgctacgatgctgagcctctcactctttggtcggccaggaatgggctatttcatatgggaaaaacataaattgctgcaattagtcatttttatagaagaaaatatactcttgtagcctgtactttgtacatatgtaaggagaacgcgatccgtgtctaggggattaattgcatcagtaataagggctctgagtgtgact

SEQ ID NO: 4590 - DNA, 75 bp, Triticum aestivum
  Clone ID: uC-tsro9316101h09b1
ttttcgttacgcgtccgaacgcaagttgcgggcgagggcacatttcaaaggcacgcctgtctgggcagccacgcc

SEQ ID NO: 4591 - DNA, 497 bp, Triticum aestivum
  Clone ID: uC-tsro9316101h12b1
tttaaattctccgatgcggccctgtttcgatgtttcagagcctctgccacaggtggtgtgggcgactatccccctcagaagtggccgataaagtgaagcacttcttcaagtactatgccataaaccggcacaagatgacggtcttgacaccatcctatcacgctgagagctattcaccagaggataacaggttcgatctccggcagttcctatacaactcgacatggccgtaccagtttcgcaagattgatcaacttgtacaagatatcgacaaagatggcaaatgggtggaagatcgtcgcgcagactcgcagctgagacaacgcggagccgctaggcctgcccagggaggtggaatgggagtcgcggccgcgggatctgccaatcccggtgctgggctgtaagaaatagggcatgccgacggctggatgaagtaggtcacgcatggactttagtggcgcatgctggatacattgggaaaccagcctagtacatag

SEQ ID NO: 4592 - DNA, 469 bp, Triticum aestivum
  Clone ID: uC-tsro9316102a02b1
ctttatgcctcttttgaggacagcactgtatgggaaaggtattgagatatactgcgctcccacggctgattcaaggccagtttggcaagcttccatgacacacatcgccatggaggggggatgctttgtgttgtcggcaaaccagttctgccgcagacaggactaccctccgccatccgagtacgcctttgccggtttaggagaagagccttctccagacaccgttgtttgccctggaggcagtgttatcatttcgccgtcgggcgaagtcctggcaggtcccaattacgacggagaggcgctcatcacagccgaccttgacatgggagagatcgttagggccaagtttgattttgacgtggtgggccactactctcggcctgaggtgctgagcttggtagtggatgaccagccgcaccgcccggtgtcattcacctctgctgcggagaaggctccggctgccaagagc

SEQ ID NO: 4593 - DNA, 103 bp, Triticum aestivum
  Clone ID: uC-tsro9316102a04b1
gcctttgcccgataccctgaattctggctgccacccggagcggagccagagtgatgagaattaccagtgccgctgatggctgaccctgaccaggacgagttcg

SEQ ID NO: 4594 - DNA, 388 bp, Triticum aestivum
  Clone ID: uC-tsro9316102a05b1
taaagcccagacccacgggggcccgaattccgaattcgaccgacgccccaggcttccggttccaaaaaggagaccaccctgagggaccctgaaaaattgacaagggaatgagtgaacaggacaaatgaagactacaaagaggaagatgcatcctgagtacctaagggcagatctcgaccagacaatacaaaactacacataaggctttgacatgaatcagatgaggaaaagagaaaccccagaagagaaaaccaccaatgcgttcctgggatataggcctgaagatactaattctgcactagacctgacttacaattatggcgttgacaagtatgacattggagcgggcttcggacattttgccatcgcaaatgatgatgtggacaaa

SEQ ID NO: 4595 - DNA, 324 bp, Triticum aestivum
  unsure (1)..(324): unsure at all n locations
  Clone ID: uC-tsro9316102a06b1
tttccgcttctgagcttgtcatcaagctactggacagtgatggagttacggtcgtcctcagggctgaccatgcaacgatcccattggatggagtgtacactgaaagaagcatcccaccaactggttacaatgttgtcaaagacaaaaagtaccgtggagaaatcaaaattggtctgacgttcactccggaggaggctcgtgatcaggatcaacccgaggaaaactatggaaggtggaaccaatcatcttgagaagaaacaggtgctttgctgaactatggctgcgtgacaagtctgngtgctagaactaaagcctattttaatt

SEQ ID NO: 4596 - DNA, 464 bp, Triticum aestivum
  Clone ID: uC-tsro9316102a08b1
gtctattcgcggtgttcgacttcgacttcaccgggccggttgatgtgccaaagagcaggatcttctatatcttctggtccccggacaccgcaaaggtgaggagcaagatgacgtacgcgagcaccaacgagaagttcaagaggaccctggacggcatccagatcgagatgcaggccactgaccccagcgaaatcagcctggacgtgatcaaggagcgcgcgcactaaggcaaatcatcccaatgcctcgcaatatggatttatgtcaaatatagatttggcggtgtgactcttgaaactttcttgatgattcgtggctttgttaccgtgtcgaaaggccctcctcccgtggtccgtgtgaccacggagggcttgctctatcatgtaatctgttctttttcttctgcccatttatatgccgggccttatgctgctgcactgcactggtcctccaagatacggtta

SEQ ID NO: 4597 - DNA, 243 bp, Triticum aestivum
  Clone ID: uC-tsro9316102a11b1
gttccggaaggagatcgccctgtgggtccctggggacattgacgaggggaggagcttccagcacaactggatctacgaggcctaagatgcgtcatgagtggctgagtgcaggcttcgcaaagcatctaccaaactagtctttggttgtttacagttttgagatttgtatctcgggaaccttgtttgagagaactaaagttatctccttgtgcttgagcatgcaagcggcatctgctgctctat

SEQ ID NO: 4598 - DNA, 378 bp, Triticum aestivum
  Clone ID: uC-tsro9316102b05b1
gtttaccgttttgccgactgtggccgctccggggtcagggaggaggcccccaagtcggcgccgtggccttccgtgcaggagcatggtttgattcgaccgaaaggccccggtgtgtcaggaggatcggaggcgggagtcaattagacgaccgcaagtgctactcgctcacattcatgtggcttcccttgttctgaaagttgaaacaaaggctttgtttgctggtgattttgaatgtgtgaagtgtgcatgtgcgtgctgtgttttcaagtgttcaagacgattttttgttcatgccatgacatgacacattgagtttgataattgtcattgtaacattgttatttgatgaagcaataattgggttaaaattttacatgt

SEQ ID NO: 4599 - DNA, 374 bp, Triticum aestivum
  unsure (1)..(374): unsure at all n locations
  Clone ID: uC-tsro9316102b11b1
gccatttctctcaatcccgcaaaacccacgcgaatccaccaagctccttccttcaactggacttcctgccccttctagggtttcgccccccaccaacccctgccccccgggttactgctcgtgctctcagccatggcgaccacggccttccccacctcgacccccttcttcgtccaccacggcacccggcgcccctccgtcaacctccgaacgaccgctggtggtgtacggcccgtggtgggcggccggctggcggccactgtcgcgtcgcctgcgagaaggtggtggggnggatccgacccctcgggaccaccaactcaagccggtcgctgtcgactgggcagggcggcaaggcccaccattcgtcaccaacg

SEQ ID NO: 4600 - DNA, 226 bp, Triticum aestivum
  Clone ID: uC-tsro9316102c03b1
gtggtgctgtgaccgctgacgagttggggtccgatcaactggagctaccatggccctgtcaggtccatcggctagcgcccaggagcgcatctcacacgaggcgccgaaggtcctctcgcgagtgaggggaccacactcctactacagcctgcggtgcgaaagaggagctggcgctccatgcggctacactggaagaggacgttggtgactcaaggcctaagcttgg

SEQ ID NO: 4601 - DNA, 262 bp, Triticum aestivum
  Clone ID: uC-tsro9316102c09b1
gtctatttcggcctgtcgcgccttgctccgctgccggatacagaggggagcgcccctggccacgtgtccaccgtcgtcaagggcaccccgggttatcttgacccggagtatttcctgacacacaagctcacggacaagagcgacgtgtacagcctgggcgtggtgttcctggagctgctgacggggatgcagcctatttctcatggaaagaacttggtgaggagggtggttggtcggcgaaccagttgggggatgattcctg

SEQ ID NO: 4602 - DNA, 433 bp, Triticum aestivum
  Clone ID: uC-tsro9316102c10b1
tcccggtcgcagtgaaataatttctttaaactacactgttatgttaaaaaaaaaaaaaagatagataaacaaaaaaaaaaaagagaaaaagtacaatcatatggcattctcctgggccgttcatgtaatttgttaataaaaaaaaaaaaacaagggggggggccgttttgggggtcccaggtttccgtccgggggctggcgaggtcttggtttttttttgggggcccctaatttcatttcctgggccgcgtttttccaccgttgggccggggaaaccctgggggttccccacttttttggcttgggggcccttccccttttggccggttgggttatttgcgaaggggcccgcccggttggcctttcccaccagttgcccaccctgatggggaatggggcccccccttgttggggccctttagggggggggggg

SEQ ID NO: 4603 - DNA, 391 bp, Triticum aestivum
  Clone ID: uC-tsro9316102d01b1
gtctccgcctgccctaatctctcacgggtgggcggatctggagcccgttcggggcttcggagaggggaatccgtcgctgtcgtcatcatcaaccttcctccatcaccaatttcatgatgctcatcgtcgtggatgagtaattccatcgtagtcttgctggacggtgatgggttggatgagatttaccatgtaatcgagttaattttgttagggattgatctctattatccattatgttctgagattgattttgctatgactttgctatgcttaatgcttgtcactagggcccgagtgccatgatttcagatctgaacttattatgttttcatgaatatatgtgagttcttgatccaaattacataacaccccttttttttttaaaaattta

SEQ ID NO: 4604 - DNA, 463 bp, Triticum aestivum
  Clone ID: uC-tsro9316102d02b1
tttacgcgtttgcccacgcgtccgccctcctggagtcgaccgatcgatctcgaccgcggcggcgatggatttctccggcggggcggggggcgcgacgctgtcggagatgtaccagagcgcgcggcggctgctgctgtcggcccgcgacggcgtggcccgcgtggagcggctcgcctcggtgcccgcctcctcctcctactccgcctcggcgccgctcgtcggcgcgccggacccggcgggcgccgaggccgtgcgcagggaggtggcgcatatccagggcctctgcgcgcagatggaccgtctctggcgctccatccccgccaagggccagcgcgacctctggaagagaaaagtggagcagctatctgaagaggtcgagtcattgaaggaaaccctcgacaagcacttattgcggcaaccaaagcgggttttggagccaaggaaagggcggggctatttgaga

SEQ ID NO: 4605 - DNA, 468 bp, Triticum aestivum
  Clone ID: uC-tsro9316102d08b1
ttcgtccgtttcctttccatacctgaaggccctgaaggagctcgaagtgtccgcagcgcacaccttcatctttgaggattccgcttcagggacacgcgcaggcgttgccgcgggaatgcccgtcgtcgccgtctcgacgaggaacccggtgaagtccctacaggaagctggggccgcattgatcgtcagtgactatgaagaccagaagctgtggaacgcgctcgaggagattgatagggaggaagcgaagctaaagactggtggggcctgaaaaagatgatggtgatgaacagttgattagaccattgcaaatttacccattcttattatttataagggaatctacgccctgaagttattatggtaggacagagctcatctaggtattttgagctattagtttgatatatgcttcttttggttctctagtagagaatcaaataaaaaacttttgtgtcccacacatga

SEQ ID NO: 4606 - DNA, 470 bp, Triticum aestivum
  Clone ID: uC-tsro9316102d09b1
tttttccgttcgcctccgtccgttgtagcacaagcagaagcaccttgcgccgtcgcctccgtccgttgtagcacaagcagaagcaccttgcgccgccgcctccgtcgtctcagcagaagcagcgatccccatcgccaacaaccaaagaaagcatggatacgcaggtgaagctcgcagtggtggtcaaggtgatgggccgcaccgggtccaggggtcaggtgacccaggtgagagtcaagttcctggacgaccagaaccggctcatcatgaggaacgccaaggggcctgtccgggagggcgacatcctcaccctgctcgagtttgagcgggaggccaggaggctgccctaagcactttttttcttcacctgtctgtcttcggaagtactcctgaaattgtgtgctgttgcctttttactctactgctttcggcttttgccttggctatggagatgtaatgagtttccttct

SEQ ID NO: 4607 - DNA, 417 bp, Triticum aestivum
  Clone ID: uC-tsro9316102d10b1
gtcacctgctcctccaattggaactctcacatctgcccttgcaaatgctactccagagcaacaaagaacgatacttggcgaaagcctctatccacttgttgagaagcttgaacaccaacaagctgccaaggtgacgggcatgcttctggagatggaccagacggaggtgctgcatctgctcgagtctccagaggctctcaagtccaaggttgccgaggcgatggatgttctccgcaacgtggcccagcagcaaaacccgaatgcccctaccagccagctcgcgggtctaaccttgagcgacggcattatctcttagtttagagtcagtttgcggtctcatgatgctatagattgttttgtcctccatgggtgaactttggtgagttgcgtttttgcactgggtgttaggctctatct

SEQ ID NO: 4608 - DNA, 357 bp, Triticum aestivum
  Clone ID: uC-tsro9316102e03b1
acccagggcgtgagactcaccaggatgaagcaaagtaccagtgcttgtgctcactaacccctatgagaccggggccgctcaacgggtgctatcatggatggtcagggcgctggcctctttgatgctgagcgcctgaccaacgacaactgcttggcgcctgtcaatggctgagtgaggcacccggtcccctatgggaggctgaagctgcgaaagaagacctggcactaccagagcaccaagggaagcaggagggcgctgacacggagggctaagctacagactggccaagggaaaacaacagtcgccagtgaacaaaaccgtcgcggttcgcacctgaatttgatgggatcaaatgct

SEQ ID NO: 4609 - DNA, 371 bp, Triticum aestivum
  Clone ID: uC-tsro9316102e06b1
tgtccctttccctttgtgcccacgcgtccgcctacgtcgtttcccacgcgtccgcggacgcgtgggcgcgggagcacggtacggcgtcgaggtgacaagcggagacgatcaagaccaaggcggctatggatgggttccttgcgaggaaccgcaagaagtgatccatcttccgacttctccttttttatttagcacagcagttcctttatactgtatttttttgtccgagaatttatgtaattataaattcggattaagacttacactaacaaatacgacctttattttctctaaaaaaaaaaaaaaaaacaaaatataaaaaaattaaaaataacataaataaacaaaataattttatatatataaaattt

SEQ ID NO: 4610 - DNA, 460 bp, Triticum aestivum
  Clone ID: uC-tsro9316102e08b1
tttcaacccaagcaaagccaccaattgattgaagcaaagtcacagagcctgcgtgcaagaaagcctcggccaccggagctgctgcaggtctcctatcgagtatggacaaggtgctggccttctccatcctgagcgcctcgccggccgacatcgcccccggcgccggcaaaggcggcagctgggcccggctctcctggcgggggaggaagctgcaggagggcgaccgggcaggagcagagcaccaagggaagcagggaggcctgccgcgggaggcagagcaacagccgggcaaagggaaatcgcagtcgccgtcaacgttgccgccgcggtttgcgccggagtttgatgggatcgactgcttcgagaccatcgtgtgccattgatcgctgatgaatcgcgatctgctcgtggtccagccgggcgtgtggctacgtactgattctttctcccgttgtcggcc

SEQ ID NO: 4611 - DNA, 455 bp, Triticum aestivum
  Clone ID: uC-tsro9316102e09b1
ttcttccggtatatcctcataactatggtttcggtccgaggacactttgtgaagacatcgatccaatggatgtgttggtcctgatgcaggagcctgttattcctggttcttttctccgagctagagcaattggccttatgcccatgattgatcagggtgaaaaggatgacaagatcatagcagtctgcgccgatgatcctgaataccgtcactacaatgacatcagtgagctgtctcctcaccgactgcaagagatcaagcgcttctttgaggactacaagaagaatgagaacaaggaggtcgctgtcgatgcgttcttacctgcgaccactgtccgcgaggccattcagtattcaatggacctgtatgcacagtatattttgcagagcttaaggcagtagcatgtcggtggttttatcgtggaaatcttctattaataataagtggggaagagc

SEQ ID NO: 4612 - DNA, 456 bp, Triticum aestivum
  Clone ID: uC-tsro9316102e11b1
tttccggttttttacagatataaatatggattacgagcggaatgatgctgaggttcaggctgagggtgtattaaattctagattacagcatttaactcatacacttgataaggtaaggtatgttatgagatgtatattcggggaccccaagaatgccccccctcctctggtgaggcttaccgggagaagtctagtgtctgccatctggaaaggggaaggctcattagttgatgagctccttcagtcaattgaacatcatgttgacgaagatgtacttactgatctcaaggacaaaattcggcttcatgatccatctgattctgaagacatcgagggagacatccgaaattctctgttatggttgcgtgatgagttgagaactctttcatgcacatacaagtgccgtcatgacgcagctgctgatttgattcaaatgtatgcttacacaaagggttt

SEQ ID NO: 4613 - DNA, 409 bp, Triticum aestivum
  Clone ID: uC-tsro9316102f02b1
gtttgatcgttttcacctaaaagagaaaagaaaggcaaatcgcagattcaaggcgatggcggcggcgatccgacttgcggccagtcggctcatcggcggccagcgaccccaggcggttttcaagtccgtcgtcttgccgctggtcgaggtggggcgtcgccggctgattccaagtctaatcaacgggggccgacctgcctctttttctctcagatctatggcctccggcggcgcaggttgcaaagagttcttttccggcgccgccgtcgatgcccacccacccaacggcaaccgtgccctgaagcaaccctctggagaacctgtaccaaagctcgacccagagagagcatgggcctatcgggagtactgcgagattgataccaagaagcacgagcttttttacctgatc

SEQ ID NO: 4614 - DNA, 351 bp, Triticum aestivum
  Clone ID: uC-tsro9316102f03b1
ccacgcgtgcggacaaaatgggaagatgctgctttgaacaggaccagggcaggagacaattaccagatggaaaatgactgggcctgtctgactatcaagcaatgatgtacaggtctataccctaaagtccttttatgatttatgtatgcagcgaatcttcacgtgatgagctactatattggatgtggggagacgattttggaacctgaagtgataataggctcatagaccagacaagagggtcagcgttgagtaattataccatgagactggattatgcgaggatacctagggtgagacatcttctggggccagaccgcgaggctgtgggacttggatgatgcatgtttc

SEQ ID NO: 4615 - DNA, 413 bp, Triticum aestivum
  Clone ID: uC-tsro9316102f04b1
gtttcatcattctgggacttggcgattttgtcttctacagtgtgcttgtggggagggctgccatgtatgatctcatgacggtctatgcgtgctacctcgccatcatcgctgggcttggctgcaccctcatcttgctgtcgatatgcaggcacgcattgcccgcactcccgatctccatcatgctgggagtcgtgtcctacttctcgacgcggttgttgatggagccactcgttgtcggtgcttcgaccaatttggtgatgttctgaggtctgactaatgtcctgtcgttgatgttacatgtgtgtcaagctgaaaagcaactgtgaacatcatgtgggagtgactactactttgatggcctcgccttggaagtagacagtcatggaggtatgactaggaaaaggggattggga

SEQ ID NO: 4616 - DNA, 452 bp, Triticum aestivum
  Clone ID: uC-tsro9316102f07b1
tttccgctttcgcgtccgcttttttggatgaggaacgctcactcactcgctcaaagcagaaatcaggcagcctgtatacactgaaatttgaaatgcttgtgtttggtgttttttcaaaaaagtgacgtaattgtttgcttacaaccatgcgtatcatcatcactgtcaatcaataccaacaaaatgtgagcgacgggcgtaggtcaagcgttcgtttccatgtatgccgccttattcttattcggtttgacaaagaagacggagcagaaaaagcttcttcgccaggcgtggaaatggtcctcacgcctcggcctccatcttctcgcactcttctctgatggactggaacagcaccgacgacaggtacctttcgccgaagctcgggaacaccaccactatcagctttcccgcgttctcgggtctctgggcgacctttatggcagcggccgctc

SEQ ID NO: 4617 - DNA, 507 bp, Triticum aestivum
  Clone ID: uC-tsro9316102f08b1
gctggacgcccgcggcccggtccgggttgcggacggccaggtttgcgttttttctccggtgggtacatgaaccctgcacgctccttcggccccgccgttgccagcggcgacttcaccaacatctggatctactgggccggcccgctcatcggcggtggcctcgccggcgtcgtctaccggtacctgtacatgtgcgacgaccacaccgccgtcgccggcaacgactactaagccagccatgggaagatcattcggtctttggtttccataatgtcttcggcaacataagaagtgcgtacgtggtggtcactctcaggattgtctggatgatgtgaggaacgtcatgttgtttggttccgatcgaaagcccgcgaggctgtggcacttggatgatgcatgtttctgtatctgtactgtgatggatgttgggaagctggtggggtttcaagattcttcagttgagtttccttatgcgattcaataagagcatcattgtttagtgcattc

SEQ ID NO: 4618 - DNA, 428 bp, Triticum aestivum
  Clone ID: uC-tsro9316102g02b1
tctctctcctctccggccggccagccagtctgtgcttcttcttctccagcgagcgagcgagctaggctcggaggtgagcgaaaatgccggtcagcaggatcgccgtggggagccaccgtgaggtgtacgaggtgggcgccctcaaggcggcgctcgccgagttcatctccacgctcatcttcgtcttcgccggccagggctccggcatggccttcagcaagctgagccccgacggcgcggcgacccccgccggcctcatctcggcggcgatagcccacgccttcgcgctgttcgtggcggtgtccgtgggcgccaacatctccggcgggcacgtgaacccggccgtgaccttcggcgccttcgtgggcggtaacatcaccctcttccgcggactgctttactggatcgcgcagctgctgggctccacc

SEQ ID NO: 4619 - DNA, 330 bp, Triticum aestivum
  Clone ID: uC-tsro9316102g06b1
ttttatttcttgttttggttaggagttcccacgatgggatggttacaaacttaaagtccaagtgactataaaagaaacaacaaaaacatagtaaaatgtataaaattacgcagctttccccccaccactggtggggggttttggagctgaccccttaagaaaacaattcttcgattgtttgctagatacgttatgagacggacctgtttaaggggccggtccatttctgaagctaacaaactttaagtcgttgatttgcctgcgattggaagacgtcgacactggatctgctctggttaatttcagtgcatttgcggctgtttgtattgc

SEQ ID NO: 4620 - DNA, 383 bp, Triticum aestivum
  Clone ID: uC-tsro9316102h01b1
ccctacctctcgactatcacctcacgatcatgggcagttcacgggtggaaggcctcatccccttcatctacaaggccatcaaggagcaccgccggagcagcagccgggccgcctaccggggcgcggaggcggaggacgacgtggacctcggcgacacggaccagaggcggcgctggctggagcaggagctgcggtcaccgctcaacgccgccgccgccccggcgtcgacacaggcgcacgggcggaaccggtcgctggaggagctggccggccaggtggggctctcgccgggccggcggctgccgctgcccaaggccaggagcgttcgcgccttcgcctgcatcggcgccggcgccgcgtgaccgccgaacacgtacgtgctt

SEQ ID NO: 4621 - DNA, 446 bp, Triticum aestivum
  Clone ID: uC-tsro9316102h04b1
cctgtatgatatgcgatgggtgccaatgttaatacctacggcagtagtgctgattgccaaggttggtgcaactcggtgtagccatgggtaaaacgatcgtatacatgggagcatggacaattgcacagaagacacatgccgcattggatctgctcttcaatgtgtggatcatggtgctgctctatacgtttgcattggcgatcatgggacggtgggcaaagaggccagtcatactgctggtcttgttgccggttgcctttacaatagtttgcctagtatataatggtgctcatattttacttgttagttatcttacattttagccaagtgatatagtagaaaccactgtatagtttagattttgtagaaagctgggagccaaatatgctccgtgtattcaatgaaccattgtaatacttgtcctttgaaccttaatatagaatggt

SEQ ID NO: 4622 - DNA, 466 bp, Triticum aestivum
  unsure (1)..(466): unsure at all n locations
  Clone ID: uC-tsro9316102h06b1
acttagagctcaaccaagatagcgagccaagatctgcagagccacaggcgaccacacaccggcgaccatggccgtggacctcatgggctgctacacccctcgccgtgccgacgaccagctcgccatccaggaggccgccaccgccggcctccgcagcctggagctcctggtctcctccctctccggcgcggcgccgtccaaggcgccccagcagcacccgcagcagccgttcggcgagatcgccgaccaggccgtctccaagttccgcaaggtgatctccatcctcgaccgcaccggtcacgcccgcttccgccgcggccccgtccagtcggcgccgtcgccgccgacttctccagcaccggtcgctccacctnctcccccacctttgaccgttgtgggccggtggtggtggccgacccgctcccgcagccgcagagcctgacgctggacttcaccaagccgaacc

SEQ ID NO: 4623 - DNA, 303 bp, Triticum aestivum
  Clone ID: uC-tsro9316103a01b1
cccacgcgttcgcggttacctcttctgctagagccgtcgcggtggcgtgtgatgagatgagatgacccttcttcgtctgtccggcttggtttactcgtcgtcttggtgtgtgtgcgtgtgttcgtgttggggcgtgaggtgtgggcgcgtgcgtgtgtgtatgtatgggtcgcggtggtgtgggaggtgtgtccagtacgtgcgccggcgtgccattctttgtgttggagatcatgtacttactctcttgttcttgcaatgaatgagaccatttatttgattctttctccccagcttagaaaa

SEQ ID NO: 4624 - DNA, 343 bp, Triticum aestivum
  Clone ID: uC-tsro9316103a02b1
ctcacgcgtccgctcgaaggtcggcattgctattgctctcaagccttgattgcgaaatcaagccccccattctctaaagctctcagtcaggggtgttcctcggtttcggatgaaatcggggcgggttgacaatacttcacacgccttgggcgcgttgttgcagtctgttagatttgaagaactgccgtgtttcattcctgaggaattttgtctttgctcggtgtagtgcctgtccgttgagccacacttctcagtaataattcaagctctgaaaattccgaacttgattcaaaaaaaaaaaaaaaaaaaaaataaaaaaaaaaaaaaaaaaaaaaaatataag

SEQ ID NO: 4625 - DNA, 191 bp, Triticum aestivum
  Clone ID: uC-tsro9316103a05b1
ttcccggtcgaccgactcacccggttttgggactttagcctgctgagcctgcttcggcgacgaccagtgaatctgacaagtcaccgtgctcagcggatccgacggccgctacgttcttcgacctccacaccgccgactggctcatgggcctaggagcgcacctcgacagatggacctacatctccggtgat

SEQ ID NO: 4626 - DNA, 171 bp, Triticum aestivum
  unsure (1)..(171): unsure at all n locations
  Clone ID: uC-tsro9316103a06b1
tttattgacagtaattagtaaagtactttgtactgagagtagcaaaatctatcgccccagtgtttgaatgatattttgcaagattcttatcgctgtcaactcttttgattttgtgagcttgaagaccatgtttcgttgcaaccaatnaaaaaaaaaaaaaataacaggaat

SEQ ID NO: 4627 - DNA, 327 bp, Triticum aestivum
  unsure (1)..(327): unsure at all n locations
  Clone ID: uC-tsro9316103b01b1
cctacgcgtccggttagttcacccaccggttaactgggtccttgggagttgggatcattatcatgcactcgtcagttgcttgacatgtatggtgtcgttcttgaattttcagctacatataatggtcggttgtgtgagtgaatgggagtgtgttcatgtgtcggtctgtgtgtcgactgtcactgtgagtcaattagctaaaagaagtgtgatgtgtgggttcagcgagggagtaacagtcactgaataagaatgtaagtgtcctatcatatatgtatgtctaaaatagtaacatgtaacatgtgttgctctttctttcaaaanaaa

SEQ ID NO: 4628 - DNA, 487 bp, Triticum aestivum
  Clone ID: uC-tsro9316103b03b1
ttatagtatcatcattgaaggtcattgtgttggtgatcatgtcaatgcttcttaccaattcatgccaatgtgtcagttcaaggagcatcaaagggaatgcaatgcaagtgaagaccatgcacaaactgacttctagttctgttgatggaaggagtagccctgctggtgaggaaattcatcatgcgtgtccactagggaactacccctgccaagggatgttccacagttccatggagagcacagaagaagaaggtggaggaaactaactcccgttattatcattgaaatagctgaagataagtcatagtgcgagatcatgcatgtgcttgctatgtaacttttatcttgttttgaagacttaatgttcaagtacgtgtatattgtacttctaaaattattatatttataaataagagtcttaaaaactctattgtaaggctacttttcttgtggtgaagtgatgttaaaaacttttggatgctaggac

SEQ ID NO: 4629 - DNA, 146 bp, Triticum aestivum
  Clone ID: uC-tsro9316103b04b1
acgctctgtgatagtacaacctggttggtaaacctttgttatgcatgcagctactgctaccgttcaattcgaatatatatactcgatgaactgtatcggttatcaaatgggtgcatctggagaatatagtgactgaatatcaggtg

SEQ ID NO: 4630 - DNA, 66 bp, Triticum aestivum
  Clone ID: uC-tsro9316103b05b1
gctggttccccgggggcgccggcccggactgccccggacgacccacgcggacggttctagaccgtt

SEQ ID NO: 4631 - DNA, 390 bp, Triticum aestivum
  Clone ID: uC-tsro9316103b06b1
aggcaccggaccggcagtcccggaatgaccgacgcgaccgatgtgctcgtcagttacggcgacggcgcgagcccagatctatctgttcgtccgccacgcaagactagtgctctccgcctcgtgaaggcggcgaaccgacacgaagtactgctaaaagtgctggcagtcgcagacggagaggaactgctccgacatcttccgctgcttcggcgctcgcatgcagcgcctggaccaccggtgcatcggcctcgacccctgagcggccctccctgcgtcagcgacccggcgaatccgacgctcttttgattcccccctgaacccgccctggttattttgatctcgagtttttccctgccaagaagagaattcatcagaaaagaaaagaggaac

SEQ ID NO: 4632 - DNA, 73 bp, Triticum aestivum
  Clone ID: uC-tsro9316103b10b1
gacgatttgtgacagttcaacctgcgtggacaagtttggctatgcgtgcagctacgcgaccgtgaggtgaatt

SEQ ID NO: 4633 - DNA, 414 bp, Triticum aestivum
  unsure (1)..(414): unsure at all n locations
  Clone ID: uC-tsro9316103b11b1
accgttctagacggtaagccgcccgtcaagagcatccaagctcactgaccctcgcctacaacctcatgcctntcaagtagccccacgagagccgactccagaggttcctcgaggaggagaaccacgtggaggacaacaggaacgactccaggtacctgcccttcggcgtcagccgccggagctgccccggcatcatcctcgtgctcctcatcatcggcatcaccatccaccgcttcgtacagaacttggtgctctggccggcgaccggtcaggacaagcttgacacgactgagaagggcggacagatcagcctgcacatcatcatgcactccaccatcatggccaagcccagcgtgttctagagcagcgccctgcctgacgaacgtgctcttgaattatgacttccagcatttt

SEQ ID NO: 4634 - DNA, 546 bp, Triticum aestivum
  Clone ID: uC-tsro9316103b12b1
aagctgtacgcgctgcaggccccggaccggcagtcccggaatgaccgacgcgaccgatttgctcgttattgatggcgaccgagcgaggccagagcgatctgttcctcctcgacgcgacgctagtgctctccgcctcctgagcgggcgacgccgacttgaagtactgcaaaaaggggtgccactatcacatgaaggtgagcggcgtggagatcgtcccctgaccccgtcgtgcgcggcgagcccgccaccttcaagatctccgcctccaccgataaaaccatcaccaaagggaagctggtggtagatgtgcggcacttctttgtccacgtcgattcagagactcacgacttgtgtgctgggactccctgtcccgcaacgggcgaattcgtactagccagcgaacagactttgccatcttacaccccaccaggttcttacagtctccagatgaagctgctgggagacaagaacgaggagctgacctgcatcttgttcgggttcagcatcgggttcgtcgcacctgtcgccattatgtgaaccaaatat

SEQ ID NO: 4635 - DNA, 522 bp, Triticum aestivum
  unsure (1)..(522): unsure at all n locations
  Clone ID: uC-tsro9316103c01b1
cctacgcgttcgccgtttattcccctccggcgcagccgcccccgtgtcctgtgcgcaccttctcgaagcctcctccctccctcatggcggaccagctgaccgacgagcagatcgccgagttcaaggaggccttcagcctcttcgacaaggatggcgacggttgcatcaccaccaaggagctcggaaccgtgatgcggtccctcgggcagaaccccacggaggcggagctgcaggacatgatcaacgaggttgacgcggacggcaacggcaccatcgacttcccggagttcctgaacctgatggcgaggaagatgaaggacactgactcggaggaggagctcaaggaggcgttccgcgtgtttgacaaggaccagaacggcttcatctcggcggcggagctgcgccacgtgatgaccaacctcggngagaagctgacggacgaggaggtggacgagatgatccgggaggcggacgtggacggcgacggccagatcaactacgaggagttcgtcaggtcatgat

SEQ ID NO: 4636 - DNA, 564 bp, Triticum aestivum
  Clone ID: uC-tsro9316103c03b1
atcgctcctttgcccctgacgaggagattaacgaagcattgaggaactgcttcatcgaccgtgaaacaagtttcaaacaagtacagaagctctgcatgcctttcatcaggttcaagaaagatgaagcaaggaatgttggtccccaggctctaaatttgaagcttccttttggtgaaataaatgtgcttgaggagaacctggagctgatcagaaggcagttgggtcttgagcatgttgaggtcctgtcggcatttgatggagctgctcgtgccaaagctggaaagcatgcttctctgctggacaagaatccgccttcccctggtgagccggttgcaatattcatgagcaagcaggagtttgaagcgcagaattaagcccagattaatcttctcacagaactttgttgaggtgttttgcaaggcgtggtatcgactggttggtgctcctgttgattctagcatgaggcgcctattgggaaaatgaaaggagccttttcttcagcttgactgcagatgattgagaaggaattggtttccaagttttgccagtttgttctttttagat

SEQ ID NO: 4637 - DNA, 481 bp, Triticum aestivum
  Clone ID: uC-tsro9316030e12b1
tgccacgcgtccgcgcgcactcctccttagctcgagcccagaccggagccctgttccgccgtggatcgctggaggagagggccaccggccggatcccgacgggccagatggtgggcgacccccgcggcgggggcgagtagcacggctgcgatcggcggcggacggatcggcggcgccgcaaggcggcgggggccaccatgtctgccgtagtgtgcggcaagaggtcctccatcttcgccgacgagctcatcccttcctctacgccttcccctccccaccaccacccttccaagcgggcccgctgctccccgacccgcgccttcgacgacgccgtcgcggcccaccggcgggaggcgctgctccaccaccttcgttccctcttccctcaatggatccccagttgcttgaaagagctcttgagcatctggagatgatttggattttgcataaggagtttgatgacctgcgctggagtcagctg

SEQ ID NO: 4638 - DNA, 418 bp, Triticum aestivum
  Clone ID: uC-tsro9316030f01b1
ttttatcgacttctgtgcccccaacttcggcctcgccgactactacggcggctggtgcaacttccccaaggagcacctggagatgaccgaggccgcattcctccgggtcgccaaggccaaggctgacattgtccaggtgcagttccgaagggtgagctgtgacagggccggcggcattcggttcaccatcaccggcggccccaacttcctccaggtgctgatcaccaacgtggcagcagacggcgaggtcgacgccgtgaaggtgaaggggtcgaagacggggtggataccgatggggaggaactgggggcagaactggcagtgcgacgccgaccttcgagggcaggcttttgtgttcgaggtcaccggaggaaaaggcaggacgatcacaatgtataacgtcgcgccttggactgga

SEQ ID NO: 4639 - DNA, 405 bp, Triticum aestivum
  unsure (1)..(405): unsure at all n locations
  Clone ID: uC-tsro9316030f02b1
ctgctccggtccacgcacccgctcagccccagcaggagctgcggaggtagctcggctccggcgtctagctccggcgaggcgatggtggggggcgcgccgagcggggcgaagctgctgcagatcctgaacgtgcgggtggtgggcaccggcgagcgcgtggtggtgctgtcgcacggcttcggcacggaccagtcggcatggagccgcgtggtgnngtacctcatacgcgagcaccgcgtggtgctctacgacctcgtttgcgcctgcagcgttaacccggaccacttcgacttacgccggtacaacaacctggacgcctacgtgacgacctgcnnnncatcctcgacgcgctccgtatcccgcgctgcgccctcgtcggccactccgtctccgccatgatcggga

SEQ ID NO: 4640 - DNA, 260 bp, Triticum aestivum
  Clone ID: uC-tsro9316030f05b1
tgctcatgcgtccgcccacgcgtccggccctgatacccgtttaaacacctctcccgaacaatggaaggtgttgacgattgcaccgcctggatgcatgcctccatctagttagcaatacaagctattgccacgaccttatattgaacccatagtaatatcgtctcgtgtgcttaaatgtttactagtccgaataaaactggatgtctgttgtttggttcagaaataataaagatggacggcgtttctaacgaataaacaaa

SEQ ID NO: 4641 - DNA, 422 bp, Triticum aestivum
  unsure (1)..(422): unsure at all n locations
  Clone ID: uC-tsro9316030f07b1
agttaataatgctaattgacaaatcatttcttacttttttgggagaaaaaacatttcctacttgtgtaaactggaaacagagcaagactccgtgtggagcttcaccctatgccgtcactggatcaatggacttgccatccttcaccattgcaacgctcggcttaggagcaggagcgcttgctgccgagacctcgatgacccttcccttgtcccggctgctgctcgtgtacgtgccggtgccgctcgacaacgcccagtccgtggagctgccgccgttcgacacgtagtggaancggttaaccggtggcgcgaggggcanttgatcctgcagtattcgaaccacgctgcttatttttgtgcgttcccacggcttgtattgtacgcaccatagcgccaccttacacatgggtttcgcctttttc

SEQ ID NO: 4642 - DNA, 428 bp, Triticum aestivum
  Clone ID: uC-tsro9316030f09b1
cctcagatcttcgacaacatgcagaagccggccttcgtgttcgacggccgcaacgtggtctacgccgagaagctcagggagatcggcttcatcgtctactccatcggcaagccgctcgacgggtggctcaaggacatgcccgccgtggcctaattcctctccctccctcgtcggccggtccgccgggccggagctgcaggggaaggaagcaaggaaggaagagcaagaagtggtttgaccgtgattcattctttatagtttgcattttgcaggagaagcatccacattttctctctcggccataagaatttagtaaaccttcatgtcttgttaagttcccgatacatgtttgcgtctgtagatcttacttataatcaagtcaaatcctcgggcccctgtgctgcctgaggaggtttttcctttgttaa

SEQ ID NO: 4643 - DNA, 368 bp, Triticum aestivum
  Clone ID: uC-tsro9316030f11b1
ttctcacgcgtccggcaagaagcaaaaccccatagctatagctcaagtgaagtgagctgagggattgaaatttagaggagaagcctaggcatgcaattcagctagcaatggcggacatggtgacggcgctcgtctttttcagggcaccgtggtgatcttcagggtgagcagctgctgcatgttaaacacaatgaaggcgctcttcgcgcacctgggtgtgagctcgacgatggtgcacgagctggacaaggccccccaaggcgaggaggtcgagagggcgctggccggtatggtcagccaaagcccagtggtgccggcagtattcatcgtaagcgagcttgtgggccgcaccgacacgatcatgtcgc

SEQ ID NO: 4644 - DNA, 286 bp, Triticum aestivum
  Clone ID: uC-tsro9316030g01b1
tcctaaggtgaaggaggaggagcgcaaggacgtgttccacgtcaaggtcgagtaggtagtggtagtgctcatgcaggatggccggcgcgagagtgtgagagacgccttgttgatctggtcatgtttggtgtctttcttccttgttttgcttcattggtcgtcttggatcgagttggtagtggtctggtggtgaagttggtcgcgaactctgttaatttcctctagttcggcatatgatgaacttactttggtggtgaaattggtcatgaaattctgttgatttcct

SEQ ID NO: 4645 - DNA, 308 bp, Triticum aestivum
  Clone ID: uC-tsro9316030g03b1
tgttcaggaaaaaaagggcgtgagtattactctgaaataggactgtcaatcatacaaagccggggcacatcgcccagtcctggtcaccgacacaccaccgtgcgctcttcctgtctaccaagattatgcaagaacaagattgatcaatcataagcctgctgggagatatattatagcatggattttaaactcagtgtacttgaaaccattaccaataatttttcagaagaccgaaaagttggcagtggtgggtatggagatgtttacagggggatgtataatggggatgagatttgcgtgaagaagct

SEQ ID NO: 4646 - DNA, 177 bp, Triticum aestivum
  Clone ID: uC-tsro9316030g06b1
tccacgcgtccgctaccaccatctgttatcatatcatggacgatgctttaaaacatttgaatactttaaaaaaaaaaaaaaaaaaaaaaaaaaaaaaaaaaaaaaaaaaaaaaaaaaagaaaaaaaaaaaaaaaaaaaaaagaaaaaaaaaaaaaaaaaaaaaaagatagaacgatt

SEQ ID NO: 4647 - DNA, 402 bp, Triticum aestivum
  Clone ID: uC-tsro9316030g11b1
cctcaacaccccagaaatcccacccgtctccacccagataaccacgagagatatttcgtccgccccgacgaccgacgaacggcagagaaaagtgaggtgatcatgagcaccatggcgatgtcggcgctgaacccggacgcgcccatgttcatcccggcggcgttcaagaaggtggaggactactcgcccgagtggtgggagctggtcaagaccaccgcctggttccgcgaccactggttccgccagcaccagctctacgaggacctcgccgacgacgtcgacgtggacgacgtcgccgtccttctccccgacgactccgtcgacctgctcgacgccgacgacctcttctacttcccgccgtcggcccagccccagcccgacttctaccactacaaaccagca

SEQ ID NO: 4648 - DNA, 387 bp, Triticum aestivum
  Clone ID: uC-tsro9316030h02b1
ttctacgcgtccgcagcgggtccatccggttgactccctttgccaactacggagtccgacccgttctttggggtaaagttcccggcggccggagccgggcgttcgccaagcaagtccgacagcgcctcgtgtgcccggtcctcccccgcgggcgggaccgtcaccccgaagacccgtgggacatgcatgtgctctccgacgaaccacccgggctcgctccgctggagcctgcacaaggaacgcaagcagaaggccccggccgaaggcagatgcatgaaggcatcctacccgtcttcggcgccggcgaagggcacggccagcccgttcgcgcaactgggtcccatcggcagcagctgcgccaagggcacgggccgtacgcttccacag

SEQ ID NO: 4649 - DNA, 438 bp, Triticum aestivum
  Clone ID: uC-tsro9316030h05b1
tcgagccagccagccaaatcgagccccgttccccgaatccaggcggcaccaccaccacccacccatggcctccctggcggcgagatccggcctccgctccctggcggcgcgcgccagggcccccgccccggtcacgggcggacgccgcatgtcctcctccgcccacgacgactcctatgagacggccaagtgggagaagatcaccatcattggggccgtcacctgcaccctcctggcggcgtggaacctctccaagggccacccccacttcgacgagccgccggcctacccctacctgcacatccgcaacaaggagttcccctggggacccaatggcctgtttgaggtcaagcacgaccattgagtactgaatagtgcatcataagaagtccgtgaatgcttcagtaaaattctctgtttgtccagtggtttttttat

SEQ ID NO: 4650 - DNA, 318 bp, Triticum aestivum
  Clone ID: uC-tsro9316030h07b1
tctcccacgcgtgcggatagctgaaaaggtactagctcatggagcagagggtgccacatcaatcgccgagcagactatagttcaggccctaacaacagcaagagagcactttgccaaatctctgcttatgtgacgtgtccctttctcgtggacgaagatggcattggaccaatgtgttcatttcattgtcaaaggagaaatgaggggaaaaggtccgaatctgtgggtgtaaaattacgcgttttcgttgacgttatatgattgttcagttttacgagtgctccaaagttgtgtggacaaagattgtgaaatgtgacc

SEQ ID NO: 4651 - DNA, 201 bp, Triticum aestivum
  Clone ID: uC-tsro9316030h08b1
gtgggccgacgcgtggggtcgctgctgttaccaccgcacccatcgttcacagggtctccggtagtgaaaaggacttcttcacagaattgcgcggtctcggtggtgaaaatggggaacataagtccattgacggcaagggctggggagatcaggaacaactgtctgagggtgaacatcaaaccctattgaagaatgagatta

SEQ ID NO: 4652 - DNA, 417 bp, Triticum aestivum
  Clone ID: uC-tsro9316030h09b1
tgcaaggtcaccgtcacctccgacggcgccttctacaataggtacctcaagtacttgaccaagaagtacttgaagaagcacaacgtgcgggactggcttcgtgtgatcgcagccaacaaggagcgcaacgtgtacgagctccggtacttcaacatcgctgagaatgagggcgaggaggaggattagagtgcattgctatattgtagtgcttgttgagttttgatacttgatctgagtacctcctagttatccacctatattatgtggtgccccgtggaacctggatggtttaattggaagaatccttatattttgtctccccgactattgatccatatgtctctgaacctagacaagtaatatgggagattggtcctggttttcaggtgaaaaaaaaggccccaaacaaatagcctt

SEQ ID NO: 4653 - DNA, 176 bp, Triticum aestivum
  Clone ID: uC-tsro9316031a03b1
tggtgagtacgtttttgttggtatcgcctgtctagcagatatttggatggcagatgcttgatctttagactgttgctttcgttgaagttgtcagcgcagaatttgttctaaaggagggaggaatgtctgcaagttatgacaggacaagttataaatctaaaactgtcatgaactgt

SEQ ID NO: 4654 - DNA, 217 bp, Triticum aestivum
  Clone ID: uC-tsro9316031a10b1
tggtggcaggggagactagttcatattgatttcggatttattttggagatttcccctggaggtaacatggggtttgagagtgcacatttcaagctaagccatgagatgactcaattgcttgatccatctggaactatgaagagtgacacctggaatcagtttctcagactgtgtgtcaagggatacctagcgggaaggagacacatgaatggcattg

SEQ ID NO: 4655 - DNA, 180 bp, Triticum aestivum
  Clone ID: uC-tsro9316031a12b1
gttgttcacccgtccgcccacgccgtcggctaactaacttaacagtaaaccgagagctcgctctgcgtgaccatgatcaggacgaggaggacaagaagaagtgtggagcacgctgctgctacctggtcacgctctcagcagtgcgaatccccagaagcatgcttggcgcgccttctttcg

SEQ ID NO: 4656 - DNA, 389 bp, Triticum aestivum
  unsure (1)..(389): unsure at all n locations
  Clone ID: uC-tsro9316031b02b1
tccgatcggggcagccgccggatctgaagaagtacatggtcaagaagctccaaatcaagctgaatgcgaaccgtgttgtcattggcacgcttcgtggatttgatcagttcatgaatttggtggtggataacactgtggaggtcaatggagatgagaagaccgacatagggatggtggttctgagaggaaatagtgtggtgatgattgaagcccttgaaccaattgacaggtctcagtgatattttggcatacctgcttatggtttagtacttaatagagtttggtcaaaaccgacgcttatggaatcaagcaaatngtatcctaatatttgtaatgtgagatttagcacttgctgtatagtttggagtttgttctggctttagagatgc

SEQ ID NO: 4657 - DNA, 365 bp, Triticum aestivum
  unsure (1)..(365): unsure at all n locations
  Clone ID: uC-tsro9316031b05b1
gtantcggcgacgacggcgagcgtgaccgcgaccgcgctcagcccccctacagatccgtgcggcggccggcaagatgtttgacgatcaagacttgggtttcttcaccaacttcctggggatcttcatctttgtgttggtcatcgcgtaccactttgtgatggcagacccgcagtatgagaactgatcgccttttgtttagcaatgagaccgtattatactcggagcaaatagggaaatgtgttggttaatggtaacagagtgcttgacagatctttttaagtgcaattatctggcattgtgacttgaatcatgtttaatctgttgaacaagcgaactgtggcgatttaaaagatcgtttactatc

SEQ ID NO: 4658 - DNA, 405 bp, Triticum aestivum
  Clone ID: uC-tsro9316031b07b1
tcttaaccactctccactccacttttgtacgaagaacacttgtgaaatatggctgcccagaacaacaaggaggtggatgccctggtggagaagatcaccggcctccacgccgccatcgccaagctgccgtcgctcagcccatccccagccgtcgacgcgctcttcaccgagctggtcacggcctgcgttcccccgagcccagtggacgtgaccaagctcggcccggaggcgcaggagatgcgggagggcctcatccgcctctgctccgaggccgaggggaagctggaggcgcactactccgacatgctcgccgccttcgacaaccctctggatcacctcggcatgttcccctactacagcaactacattaaccttagcaaactggagtatgagctcctggcgcgc

SEQ ID NO: 4659 - DNA, 341 bp, Triticum aestivum
  Clone ID: uC-tsro9316031b10b1
actgctgacgcgtgggcggacgcgtgggcaacggcggcttgcacggcagtaagtggatcaggtgaagtggcgcgcgtggcagcgcgtacgtgcgtacgtgcgcgcctccatggcatgccttagttgatcattaaccatgctctccgtatactacctaaataagggcgacgcatggtgtgtgacactatgtagctttcctttcagctggtaatgatgtgtgtggtgacctaataagtctgtgtgtggcttagtacgaaaaatttgtgtttgctgtactgatgaaatacaaggaatatgtaccaccgtgcaaaaaataaaaaaaattaaaaaacttaattttt

SEQ ID NO: 4660 - DNA, 408 bp, Triticum aestivum
  Clone ID: uC-tsro9316031c01b1
tgtacacacagatccggaccttgcggatgaggcttgtcattcgttcacctgagattaataaactccgttagtcaatcatggaacaacaacaagtcaagccatctctccccccgtctgatactcctatggataaccaggattcatctccacttcctgccgttactactgctgatcctgttccacgtgctctttcaaatgattccgcgacacaggctgccagtccaaatcctgttgccccttcatctccttctgctccaacctctgccaccacacaagatgctgcaggacgcgaggcaccatcatccatgttttctacatcaggcttatcttcctgggcgaaaaatctgaaaatccctcagccttcttcaggtcaagaatcaccaacaggtaaaaataccgtttcccgtc

SEQ ID NO: 4661 - DNA, 315 bp, Triticum aestivum
  Clone ID: uC-tsro9316031c04b1
tcagcgccccggctgggccacccgttcgtcggcggctgcctcaggcactgggggcggaactcggtgctcgcagccgtgtgcgctggagggcccttgattgggtggcatgaggtgtgggatcagctggtgaatgcccgcatgggcgacaccgaatggaagaccgggatcaacctgaggcaggataggggaaaggatgggatcgtgagcagggacgccgtctgtgatgccgcgaggaagctcatggattcggacaacgacactggccaagagattaggaaaatggctgcgcatctccgcgaggcttcccttggaggg

SEQ ID NO: 4662 - DNA, 383 bp, Triticum aestivum
  Clone ID: uC-tsro9316031c09b1
ttccacctcctccagctgcgcccccgatcccagctgcattctgagcggattccattccattagattctcccgaggagcaaattgcctcccgagatcttcatctcgtttcggattcctctcgtctaattggttccggagccaggcaagaagcgaaagaggaggaaaatgtgcccgctgagggtgatactcatcttcctctccgccaccgtcgccggattcttcctcctacagggccctaacgccgacaccgactgtttccgtgaccgcgaccagggctcggaatctcccacggcccgcgttccccttcattccaaggggtggttcaagctgcaaaactgggttctggacaacggtggacatggccagcggtcggtacctttggc

SEQ ID NO: 4663 - DNA, 53 bp, Triticum aestivum
  Clone ID: uC-tsro9316031d06b1
aaccggaccggaatacttgggtttgtccacgcgtccgtagacctagaacgcga

SEQ ID NO: 4664 - DNA, 54 bp, Triticum aestivum
  Clone ID: uC-tsro9316031d07b1
ggttgacccacgcgggtaccacgcgtacgcccacgcgtccggttctagatcgtt

SEQ ID NO: 4665 - DNA, 333 bp, Triticum aestivum
  unsure (1)..(333): unsure at all n locations
  Clone ID: uC-tsro9316031d08b1
ggtgantatctcaaccaggataacctcgtttatgtttgttatgcgaaaacaaaacataatgtagcatatcttgtcgagtcgctcgctcgctggatgctggccgacactgggcgtcgacccgacaacacttttatttagcccacgccacgcgccaccccgcgcaaagcaccccacaccttgtacgtagtaaaaagcagtagcactccagtccactccactggctgactaagcatcacgccgtgccacgtaggagcacatgaccgccgccgtggacgctgacccagccagctcctcctccgcgcgcgccggcgcctcacacgctgacgctggcca

SEQ ID NO: 4666 - DNA, 394 bp, Triticum aestivum
  unsure (1)..(394): unsure at all n locations
  Clone ID: uC-tsro9316031d10b1
ngtgcttctctccatagatgtgcatctgatgacttccatttctcgttttggttaggagttcccacgatgggatggttacaaacttaaagtccaagtgactataaaagaaacaacaaaaacatagtaaaatgtataaaattacgcagctttccccccaccactggtggggggttttggagctgaccccttaggaaaacaattcttcgattgtttgctagatacgttatgagacggacctgtttaaggggccgttccatttctgaagctaacaaactttaagtcgttgatttgcctgcgatttgaagacgtcgtagctgcatctgctctggttaatttcagtgcatttgcggctggttttattgcaaaaaaaaaaatatcaaaaactgatataatt

SEQ ID NO: 4667 - DNA, 464 bp, Triticum aestivum
  unsure (1)..(464): unsure at all n locations
  Clone ID: uC-tsro9316031d11b1
acccacgcgggtgnccacgcgtccgcccacgcgtccgcccacgcgtccggtgccatcatgtacccgaccatcacgtcgcgcacgcagaaggtggagctggccaaggacgacgtcgacggcatccagagcctctacggcggcaaccctaacttcaagggcgtcacgccgccggccaccagcagcgaggagacccacagcgccgcccccagcgcgctctccgggccgtggagcggcctggccgtggcggctgcgctcgcactagctctgtcgtgctagttcttcttgggtcgatcgattcacgaccattttttggtttttaccttttttaacgggcattcactttgctctaggatttgtgttggtgtataaacaatagtagtcattgggtgtgtaagatagtgtagatacgtgattggtagtgcatgtatagagcggatcatataggacatttggtaaaaaataca

SEQ ID NO: 4668 - DNA, 406 bp, Triticum aestivum
  Clone ID: uC-tsro9316031d12b1
ggtgatcaatgatgagaatatttacctcttccctaaaaatggagggctgggacccgacccaaaatcatccgtcaaaattggaggcggtgaagggtccaactcaatagtgtttgcatccggtgaagatgttgatcgacctgcgcctcaggtatatgttgggcatcgcaattgtgagactgtgaagggtgtgacttttattgggccaaatcatgaatatgttgccagtgggtcagactgtggtcggttatttatttggaggaagagagatgggaaatttttacgggcaatggagggtgatgaatgcatagtcaattgtattgagccccatcctcatgctatgacaattgcaagcagtggaattgataatgatgtgaagctatggactccctttgccgttgaacgagca

SEQ ID NO: 4669 - DNA, 428 bp, Triticum aestivum
  unsure (1)..(428): unsure at all n locations
  Clone ID: uC-tsro9316031e01b1
cgtccgaaccaccaccgctcctccaatcccacattcgctcatcagcagctcgaagcggatcgtcggcgaccatgtccgggcgcggcaagggaggcaaggggctcggcaagggcggcgccaagcgccacaggaaggtgctgcgcgacaacatccagggcatcaccaagccggccatccggaggctcgctcggaggggcggcgtgaagcgcatctcgggcctcatctatgaggagacccgcggcgtgctcaagatcttcctcgagaacgtcatccgcgacgccgtcacctacaccgagcacgctcgccgcaagaacgtcaccgtcatggacgtcgtctacgcgctcaagcgccagggccgcaccctctacggcttcngcggctaggcttcgtctcgcccttctgcatatcccaaaaagttgatatgaatg

SEQ ID NO: 4670 - DNA, 454 bp, Triticum aestivum
  Clone ID: uC-tsro9316031e06b1
ccacgcgtccgtccacgcgtccgcaaaagaggcggtcatcgtctaccaccgcagcgatacggcctacatctcgcaggtttgcctgcacgagatggatttgtcctctctgctgcagaccatgaagcctctgagctagctgcttgttatggatcagttttgggaatgttcttcagtccacttcttgttctactgctttgtttgcttagagcagctgttttagctctaagcagtcgtgctccttggccaatactagttgtaaaaggaatcgagtcactcctaagtttgttaagtcttgtcatttctctcgttatgctgttagtgtttgccggcaatctgtcgttcatcctgtaaaataacggattgtatggttcaatatgtactttaaccaggtctcaaaggtgaaaaaaaaatctgtttgcccttaaaaaaaacaaacaattgcacatccttaggg

SEQ ID NO: 4671 - DNA, 265 bp, Triticum aestivum
  Clone ID: uC-tsro9316031e09b1
agctgaccagtcgatctcgtaaggtgtaagatgtttgacattaccctactttgttttcgtgaagaaaatgcaaccgtgtttctatggtgcccgaatgctggcaggctgcattcgtaattgtgtttcgaaggttttgtaacgatatgtcacagcactacatttttaccaaatatgtaaccgtgtgaaactattggctccaaataacattttatttataaatagattgcaagaaaaaaaaaacatctccctgaaaataattaaaaag

SEQ ID NO: 4672 - DNA, 229 bp, Triticum aestivum
  Clone ID: uC-tsro9316031e10b1
cggaccggccggaatctggttgcccacgcgttttaccccctgtagaccacatcagcgatttcatcctcccgtgagccggccggggtacacagctcgccgactggcggcgggagtcctgcgcatagcaaccatcgaggaagggccgcagtggctgagtctatacgatccctgagcctacaaggatggaaggaagcggcaggggcaccttgacaccgagcaatgcagatgc

SEQ ID NO: 4673 - DNA, 442 bp, Triticum aestivum
  Clone ID: uC-tsro9316031e11b1
agcggtggtggcgtcctcctcctcaccggcggcggcggcggttgggcgagcggtcgaggaggtgcgttcggcgctgaacgagcacgccgacgtggtggcggagctcttcggccgcgtctccaccgagctccgcggcgggttcggccccgccgtcgacactttcgtcggcttcttccacgccgtcgactggaaggaaccttggttgatcggcatgataagtttccatgccattctgctactggtaaccatcatctccaggaggaacatcaatttccaacttatcttgtcagccttaacattttctggtgtattccttgccgagaaactaaacacgttcctaggacaaaactggaagagcttctcaagccagaattactttgatccccaaggcctcttcatctcggtcatgtggtctggccccctgcttctgattacgatactt

SEQ ID NO: 4674 - DNA, 436 bp, Triticum aestivum
  Clone ID: uC-tsro9316031f01b1
gtcgttgcacaggagaaggagcaggcggcggcggtgccttaagaggagaagcacggcgacctagcccgagctcgcaaccatggctaggggtttgaagaagcatctgaagaggctcaatgccccgtctcattggatgcttgacaagcttggtggagcttttgcccccaagccatcatccggtcctcacaaggccagggagtgcctgcctctgatcctcatcctgaggaacagactgaaatatgctctcacctaccgtgaagtgcaatctatccttatgcagcgtcatattatggttgatggaaaggtccgcactgacaagacctaccctgctggtttcatggacatcatttccattcccaagactggtgagaactacaggcttctgtatgacaccaaaggtcgcttccgccttcactctgtcagggacgaggatgct

SEQ ID NO: 4675 - DNA, 186 bp, Triticum aestivum
  Clone ID: uC-tsro9316031f03b1
ccggcaaaaaagcgagagagcgggggaaaaaaaaaagaaccgcccgaagcagcccgcagacccagaagagagcgagaccgccaaaaggggggaaaaagggccgcccgggcgaccgaggccagcggaggagggcacgacgaaagaggaaaagagggccccccccccccgcggggggaacaacagaac

SEQ ID NO: 4676 - DNA, 470 bp, Triticum aestivum
  Clone ID: uC-tsro9316031f10b1
tttctgacgcgtgggcggacgcgtgggttcgacttcaagcgattcctcgaactcatgcgcgcccacctccgcccggagcccttcgaccgcccgctccgcgacgccttccgcgtcctcgacaaggacgcgtcgggcaccgtctccgtcgcggacctccgccacgtcctcacctccatcggggagaagctcgagccccacgagttcgacgagtggatccgcgaggtcgacgtcgccgcggacggcaccatccgctacgacgacttcatccgccgcatcgtcgccaagtagtggattgatccgtatcccagcccgctcagacttcttcgtatttaataactccttcttcgcgtgattttaatttcgatcatctgatctgatctgctgcgcttctgttttgtgctttggtttcggtggggtttcccaactgccctagggtttgggataaaaaaggtgtgattatgggataaaaa

SEQ ID NO: 4677 - DNA, 250 bp, Triticum aestivum
  Clone ID: uC-tsro9316031g04b1
tcatgagaagcgcgcggagcatcagaaacatcatcccttcttgccttgttcttttatctcttcctaatagtttgttggtcgaatttataggattcttaatcgacagatcaggaatcacctccccattcagctaagctgcatgtcttttgcttatattatgtcctttcttgtacttacatctcatgctgcggggatttcctatggctcaagcttgttgctgcgctcaggtttcagcaattgctgaacctgc

SEQ ID NO: 4678 - DNA, 497 bp, Triticum aestivum
  unsure (1)..(497): unsure at all n locations
  Clone ID: uC-tsro9316031g05b1
ctgcagangaccggccggaatctttgggtttacccacgcgtcggtatgcctaccccggcaccggcaaggtcgagtaccgtgtcgccctcgacatccccaccgccacctactacgtgcgcgcctacgcgctcgacgcctccggcacgcaggtcgcctacggccagaccgcgcccgcctccgccttcaatgtcgtcagcatcaccggcgtcaccacctccatcaaggttgccgccggcgtcttctccgccttctccgtcgcatccctcgccttcttcttcttcattgagaaacgcaagaagaacaactagatgtggagatcgaaaccgtggcaaagtttgttggctttctctggccggtcgttttctctctaaatgtaacagtatcagtacggaccagcacgtacgtacgtacggtgcaaactgtacggataaatgtttcgggtgcatacctcctttttggttgtgagcctgtaatgactatgaatgaaatattttgat

SEQ ID NO: 4679 - DNA, 126 bp, Triticum aestivum
  Clone ID: uC-tsro9316031g06b1
gaccggaccgaatactcgggtttcccacgcgccggtaacaccatcatctctagctctctcaaaaaaaaaatttaaaaaaaaaaacaaaaaataccaaaaaaaaaaagaaaaaaaacaaaaaacaaa

SEQ ID NO: 4680 - DNA, 61 bp, Triticum aestivum
  Clone ID: uC-tsro9316031g09b1
gctagtagcccgaattatgaatcagggtcgttcaatatcttgggcgtagatcgccgttctc

SEQ ID NO: 4681 - DNA, 448 bp, Triticum aestivum
  Clone ID: uC-tsro9316031g11b1
acggtggttacggagcccatgatctctcaaccagtggggtttttgaggttgaaccaaaacgttgccctggctatgtctatagaaggtctgtatggatgggtacaactgagatgtctagggcagagttccgctcgttcattcaaactcttgcaggaaagtacaatgggaatacatatcatctgatttcaaagaactgcaaccattttacggatgatgtctgtaagaacataaccaaaaaaccagcccctggatgggtaaatcggctagcaagagtgggttactttttcaatcgccttctaccaaaaagcaattaagactctactgttactcacggagcaacccatcctgcattctctgatgatgatgtggaatcatcaggttcattccttaatggggaccgtgatatggatgacctggaccagaacctgctaccagccgcaggcactga

SEQ ID NO: 4682 - DNA, 397 bp, Triticum aestivum
  unsure (1)..(397): unsure at all n locations
  Clone ID: uC-tsro9316031h03b1
acgaccatacaagatgaacactcgaggtcaaatgaacagaaagaagagctgtactgcaagcttgcaaactgtatgaatgcactcgaatcaaaagatcaggaactgcttaatctgcagagtgctccttggacagtactatgccgagagtgaagcaaaggagcgacttggggatgatttagctatggctagagaagcattggctaaattatctgagtcactgaaagaggcaaatcaaggaattgaaatttcaagaagggaaaaggacgaagnaagttgccaaacttactcaagccgagaagatgctagcggacgggaagcgctacctgcagaagcttgaggatgacaattcaagattaaagcatgcgctagaacaaagcatgacaacagtcaataggat

SEQ ID NO: 4683 - DNA, 371 bp, Triticum aestivum
  unsure (1)..(371): unsure at all n locations
  Clone ID: uC-tsro9316031h09b1
gggcaatgcattgcttcgcttgcaatcattgccgatgagatttgctgtttgctgctcagcaaagcaggatacagtggagaaggtttgtgaaattgttaagaagcagcttgctgttcctgaaggcactgaagtttgcggtaccaccaagttttctgaccttggagctgattcactggacacggtcgagattgtgatgggccttgaggaggagttccagatcagcgtggaggagacgagcgcgcaggcaattgcgacagttgaagatgctgccacgctcattgacaagctngtctctgcgaagtcatcttgaagggaggtcgtaaatcgtaatgattggagcttcgaagctagtattcttaccttgngctgat

SEQ ID NO: 4684 - DNA, 411 bp, Triticum aestivum
  Clone ID: uC-tsro9316032a01b1
tgttgcaccggttcggcaacacctccagcagctccctctggtacgagctcgcctacgccgaggccaagggccggatccgcaagggcgacctcacctggcagatcgccttcggctccgggttcaagtgcaacagcgccgtgtggagggcgctccggtcggtcaacccggccaaccccggggacgtcgccggcaacccctgggccgacgagatccaccgcttccccgtgcgcgtgccaaacttctcagccatcgatcctccatccactttcagcgacaccacccagcaataaggatttctagtggtcacgtacgtacgtcttttggtctgtagctagcattatactgtattagcgagctgcttggttggggttgcattggtattaagtagagtcagtcgagctaggtttgctt

SEQ ID NO: 4685 - DNA, 339 bp, Triticum aestivum
  Clone ID: uC-tsro9316032a04b1
tgagcccgatggaaggactggccgcctgcaggccccgccccagtatcccggtggtcccaccacgcgcgtttttcgcgcgcgccactggctgataagcgggaaggtttggccaccatgtgggcagcgccatggggtccgctcaggctaactaaaatgtggctgcaatgtgggcaccatgcgtgtgtgggcgtcataattaaataagggtccacagcctgaaggagtgaataatcgcgagaccattaattgttggggctgcgcacgatctgagtgggcctggtgaatggatatggatcaaagcagagatgcggcatactagaggtgggggcagaatcccta

SEQ ID NO: 4686 - DNA, 396 bp, Triticum aestivum
  Clone ID: uC-tsro9316032a10b1
tttttcacgcgtccgaaaagatcatttactcgttacttgtttcttttgcagaaaagtgcgatgaggcactataatcgtcaagagtccatccatgtggctattgagaagagagaagggcgggaaagaagtgaagaaagggacatgagcatcaaggaaagaagaaaccgggggccaaaacttaagatggaggggatctacttgggaagaaagaaggaaaggagaagggccaaatcagaaaagcggcagactagaggaggggtcaaaatccctagcagcagccccgatcccctttgggcctagcatcttcatctctctgccccgactgcttctccacctctggccgccgccgcggccaggccggcatgtgggcgcgcgaccgcgccaacagggccaccc

SEQ ID NO: 4687 - DNA, 149 bp, Triticum aestivum
  Clone ID: uC-tsro9316032b02b1
tttttgtcgtttggttactgtgaagcagccggccaggctattgctctctgaataaactattagctctaggtggtttgctgcgtctgccacaatgagcgtacttctggggaaaagctgtctcgaacttataaataagcattatttttcct

SEQ ID NO: 4688 - DNA, 143 bp, Triticum aestivum
  Clone ID: uC-tsro9316032b03b1
ttttggtgaaagcctttttctcaaataatgatttttgtctttgcaaaaaaaaaaaaaaaaaaacaaaaaaaaaaaaaagaagataaaaaaaaaaaaaaaaaaaaaaaaataaaaaaaaaaagaaaaagaaaataaggaagagg

SEQ ID NO: 4689 - DNA, 311 bp, Triticum aestivum
  Clone ID: uC-tsro9316032b04b1
actattttatcctcaagaaggacatcaggaacttccacatgctccaggagatgtacaacgagtggccattcttcagggtcaccatcgatcttgttgagatggtgttcgccaagggtaatcctggcattgctgccttgtatgacaggctcctagtttcagaggggctacagccactgggtgagaagctgagggccaactatgaggagacccagaagctgcttcttcaagttgctgagcacaaggatcttcttgaaggtgatccctacctgaagcagcggctacgcctacgtgacgcgtacatcaccaacatg

SEQ ID NO: 4690 - DNA, 70 bp, Triticum aestivum
  Clone ID: uC-tsro9316032b05b1
gctttttgcgtccgcgggagggcttcggacactgggtccatggtcacctgacgcgcaccccgtacatgga

SEQ ID NO: 4691 - DNA, 486 bp, Triticum aestivum
  unsure (1)..(486): unsure at all n locations
  Clone ID: uC-tsro9316032b07b1
ttttaaaactgaagagtgcgagagcttcttcaactttttcagccccccacaagtacctgatgatgatgaggacattgatgaagaagccgctgatgagcttcagggtcaaatggagcatgattatgacattgggtctaccataagggacaagatcatccctcatgctgtttcttggtttactggtgaggctgtgcaagctgaggatttcgatgatatggaagatggtgacgaggatgacgacgacgatgatgatgatgatgaagaagatgatgaggatgatgaggacgaggacgaagacgatgatgaagatgaggaagagctaagcaagccgacgaagaaggtggcgggcaaaccgaagggacctgcaaagggtggcgcacaagggaacgccgagcaaccgacggagtgcaagcagcagtagactttgtggatgcagttgttgcagtattttttccattgaactgcccagggngaatgagcttttat

SEQ ID NO: 4692 - DNA, 315 bp, Triticum aestivum
  Clone ID: uC-tsro9316032b11b1
ttttcacgcgtccgcggacgcgtgggatggtactgtcatactagagtcaacttctgttctcatacagacaagttccactgttggagcagcaggagcattcagttattcagattgcgtgtctgactcaacaattgacctgtgcttccattatgagattataacttcgagctgattgtagtcttaatgtttgatagaaatctccaaatatgataagtttcctgttattaccaatgtcatgtcagttatgttgggtgagtcacaaaacaccagttgacaccgttcttctgtgtgggaacacggcatgtatcttgtggg

SEQ ID NO: 4693 - DNA, 485 bp, Triticum aestivum
  Clone ID: uC-tsro9316032c02b1
ttctacgcgtccgcccacgcgtccgtcatggcatcttccaagagcagtcttgcaatgttcgcactggccatagtcatggccgtggtggctgacgtctcggcgcagaacaccccgcaggacttcgtcaacctgcacaaccgcgcccgcgccgtggacggtgtcggcccggtggcgtgggacaacaacgtggccaggtttgcgcaggactgggcggcgcagcgcgccggcgattgccggctccagcactccggcgggccgttcggcgagaacatcttctggggttccgggcagtcgtggacggccgccgacgcggtgaagctgtgggtggacgagaagcagaactaccatcttgacagcaacacctgcgacgccgcaaggtgtgcgggcactacatcaggtggtgtggcgcaagtcgacccgcatcggctgcgcgcgcctggtctgcgcccggaaccggggcgtcttcatcacctgcaactacaacc

SEQ ID NO: 4694 - DNA, 413 bp, Triticum aestivum
  Clone ID: uC-tsro9316032c03b1
ttctcacttcaagtcccagtacaactcgtcgcacaccggctcctggtgctcggcgttcgaggtgctggtggccaaggcgtggcagagccgcacccgcgcggcgggcttcgaggaggactccatcgtccacctctgcttcgccatgaacgcccggcccctcctgcacgcctcgctcccgcgcgccggggccgggttctacggcaactgctactacatcatgcgcgtgtcggcccccgccggcaaggtggccggctccacgatccccgaagtggtgaaagatcatcaaggacgggaagaggcggatgccgtcggagttcgggcggtgggcgactcgtgaggccggcgccgacggtggcgtggacccgtaccagatcacgtcggactaccggaccctgctggtgtcggactggacg

SEQ ID NO: 4695 - DNA, 103 bp, Triticum aestivum
  Clone ID: uC-tsro9316032c05b1
accgtccttttacccgtccgaaaaattgactaataagaacaccatgattaaaacagcaccagatgaaaaaaaaaacatgaccctgaagagttcgtgtccgtac

SEQ ID NO: 4696 - DNA, 269 bp, Triticum aestivum
  Clone ID: uC-tsro9316032c06b1
tttttacgctaagctgcactccggcctttggtatgatatattaaataaggaaaaatgagccatcaattgttgttcttgcggggcatgtggcaggcggtttttgtacattggcgattattcttcccaagttgtaaccctcgaaattctagtaccagaaatatctgattgttcgtctcggttgcaaggtcagcaagtatgtacgacctagaacacttgccatcacacagagaaaaaggaagataataaacactgatgcgtgagcttatgcc

SEQ ID NO: 4697 - DNA, 478 bp, Triticum aestivum
  Clone ID: uC-tsro9316032c10b1
tttcccacgcgtccgcctcgggctagtaagaacgtgtggaaggaaaaaatcctggggtatgacgaagccagcaatgtgatcattctgtatgttgatgacagtgcctacatgcttgatcttaagtcgatggaatccacaaaacttgatggaagccgtttgatgaattcctgtcacccattcaccagtttctatccgccagacatggccatctaagaagcattgatatgtgcacacggacacaggggtacggatacacggaatacggcattttccagaaacaaccatacataaataaataaagtacagcatgtaatgttgtgaggacaaaagtatatttgtaagatgtgcgatcggttgttttctgccttcatttccacgtttgtatatgggtgagcttaatgcagctgacgctgcatgtttatgtaagtagatatttcaggaaaaaaagataatacaatgcagcatgtaatatggacat

SEQ ID NO: 4698 - DNA, 471 bp, Triticum aestivum
  unsure (1)..(471): unsure at all n locations
  Clone ID: uC-tsro9316032d02b1
ttgacgcgtgggcgtgcaacagcgcggtgatcggcccggcggacaagctcgtcggcgacggggacgagcccgtgtaccgcagctacacctacgacgagtactacaagaagttctggagcaggaacctggaccaggaccactgcctggagctcttcacgggtcagaagtgatccgtgtgcgcaagcttgcctcatctacggttgggtgcagtggacatccacgacgcagcattactcaaataaaaaatgcccccaatgtgcggggttactcgagttgtttgaacttgtttttgcttcagcacaacgtatctatcgatgttcatcttgtattgtattccctatatactagtacgtgtgtgtgtgtgntgtttgtttattaattgtgatcctacttgtaaagaattatggtacactggtccaagaggaaacggctgtgtaataaatttgctgtcgaggagctgagctaactaaa

SEQ ID NO: 4699 - DNA, 389 bp, Triticum aestivum
  Clone ID: uC-tsro9316032d03b1
atcagatttactgtgcatcgcgaaaaatgcagggagctttctgtgcggtgatcatcctcggggagaacgccgactaacagcgacgacagcgacggcctcccccgggtgtggtcgacggtgcgagccaacaaggccaagcgttgggcgggccgtgtgtgcagatgccgaccatcatcatcaaggtggacctggattgcgcccgctgccaccgcaagatcgagagggtgctcgacaggatcagagagaaaggcgagttcgtgatcgacgacatcgagtacgatgagaagaacaacaaggtgatcgtgaagggccccttcgacgcggacaagctctccgacaagctctgctgcaaggcctgcaagatcatcaaggagatcgagatcgtggag

SEQ ID NO: 4700 - DNA, 324 bp, Triticum aestivum
  Clone ID: uC-tsro9316032d07b1
tttttagtgttttcggcggcgccacacgacacggatgtaaaaagaaaggtgggatggcactcaatatgaacagctttcaccctccaggtgccaagggttttaccgtatacattccaataagctggtgttcctggatcggcaggaggagccaggacgcgacggtcgtgttgtatacatcttctacagatagattgtgatcatcagaatatgcatgcagcctgtgctgtgctccctatgcatggctggctggctggccttcataaaatttctctcagcctttttctgtaccttttgttaatatgctgtggtagcagaatggtcggt

SEQ ID NO: 4701 - DNA, 72 bp, Triticum aestivum
  Clone ID: uC-tsro9316032d08b1
ttggacgcgtgggcggacgcgtgggcggacgcgtgggattaccagttggaaaaattggaaaggaagtgatct

SEQ ID NO: 4702 - DNA, 334 bp, Triticum aestivum
  unsure (1)..(334): unsure at all n locations
  Clone ID: uC-tsro9316032e04b1
tttaagaggctgttggagggaggtcaagtatgttgggttatagaggcgagccctgacaccatcaggcattcttacattgtgcacctgatctctaccatgtagatggaatggtctatgtgggcttgcccgagattgcccctctctgcaggtgaattgggactttacaaactcgacttttgtgcttccataatcaatagtcctgattgaatgagttgtatcggttatgtaaactcgcttcatgcgtgacttactgtgcacatataagctatgctatattgttnaaaaaaaaaaaaaaaaaaaaaaaaaaaaaaanncaaaaacaaaaaaacacaaa

SEQ ID NO: 4703 - DNA, 372 bp, Triticum aestivum
  Clone ID: uC-tsro9316032e05b1
tttacggcggcggcggcggtggctacggaggtggccgcagcggcggcggcggtggctacggcagccgtgagggcggcggcggctacggcggcggcggcggcggctacggcggcagccgcggcggctccggcggcggcaactggagggagtgaatggtggggcccctcgctggccagttatcctagttacccgatccgtttgtacctgtctaccaaaatgttatcgctcgctcgctcccgagtatcctagatctcgctccgtcgcgtaggttccgagatgttcaggctaccgatagatgtgacgctgctaccgttccgtgttactgttccgtccacgctctgaacgctttgcttctaagattgaaatgaaaac

SEQ ID NO: 4704 - DNA, 169 bp, Triticum aestivum
  Clone ID: uC-tsro9316032e06b1
ctgacgcgtggggcaatggtctgtgtgtgatgtaataaaacggcagcctcttccgctcgacgaacaaacataaaaaagcaaccaccgcatgcgtatgcggtgattgacctagtgttatcaaaaaaaaaaaaaaaaaaaaaaaaaaaaaaaaagaaaaaaaaaagaaaaa

SEQ ID NO: 4705 - DNA, 242 bp, Triticum aestivum
  Clone ID: uC-tsro9316032e08b1
tttgtacaggcgccgccaccgctgctgagggcgcgggagccgccgtgaagtcggcggcccagggagcaggccaggcagctagtggcgccggcgaaggtgctggtaaatcttactccggcggcggccgtcgttgagcctgccgtgtaccgcgggatcgtcgccgccgtggctgaggaatgatacccaaccatgccactgcgaataataaaaatcaagctgcttaattagcatgctgtcaactg

SEQ ID NO: 4706 - DNA, 397 bp, Triticum aestivum
  Clone ID: uC-tsro9316032e11b1
ttttggccgccctgctgttgctactcgccatcgtcgtgccggtgactcagacccggacgcagagcgcacgggacaaggctgccatggcggaagacgcggggccgatggtgggaggcatcaaggactcgccgatgggccaggagaacgacctggacgtaatcgcgctcgcccgcttggccgtgtccgagcacaacaacaaggtcaatgccatgctggagctggagaatgtggcgaagctgaagaagcagactgttggtggcacgatgcactacattacaattcgggtcactgaaggtgggggcaagaagctctatgaaactaaggtgagggagaaaccatgggagaactttaagcagctgcaggagttcaagccggtggaggacgctgacatggcatg

SEQ ID NO: 4707 - DNA, 295 bp, Triticum aestivum
  Clone ID: uC-tsro9316032e12b1
ttcttggatgcacgcaccatgtgtttgtgtgtgagtgtgctgtgctgtctagtcaataagacgagtgtgctgcttagttcgtatgcttcctatagcatagggtcgaccgagcttccttttgcacgccggtgtaagatttctttctttttttttgcgggaaaccggtgtaagatttcagtagcatcgtaatgtcgtcttttagatttccaaaatcgtaatgtctcactaagctgcatgaccatccaagagaaaaaactgaaagaggagcttgatgacacgagagactaaacttgaa

SEQ ID NO: 4708 - DNA, 376 bp, Triticum aestivum
  Clone ID: uC-tsro9316032f01b1
ttttgatcactggtggaatgaaggtcaaggctgatcgtgatgagtcttcaccctatgctgctatgcttgcatctcaggatgttgctacacgttgcaaggagcttggtattaccgcactgcacattaagctccgtgccactggaggcaacaagaccaagacacctggacctggagctcaatctgctctcaaggctcttgctaggtctgggatgaaaattgggcgcattgagggacgtgactgcagatgccactgacagcacccgtcggaagggaggaaggaagggaaggaggctgtaagctatcttccaactctactggcggctatccagaaacttactcctctctgggcagctctgctgattctatgaatgtcatg

SEQ ID NO: 4709 - DNA, 496 bp, Triticum aestivum
  unsure (1)..(496): unsure at all n locations
  Clone ID: uC-tsro9316032f02b1
ttttaaacagagggctcgctctccgtgaatgatgtcgaggaagaggaggaagaagaagaagtgtggagcacgctgctgctacctggtcacgctctcagcagtgtgaattcccagaagcatgcttgccgtgccttcttccgggtgcaccggaggctggcatgtgagcagggatgcttcagtgatgcagaagaaaaaaggcaagtcttatcggcaagggaaggctacgcctttcttccaggtctccctctctccatctaaatctgtgtttggaggagggggctacngttagtttacccaccggtttactgcgtccttgtgagttgtgatcattatcatgcacttgtcaagtgcttggcaagtatggtgttcttgaaattttcggttacataagggtcggtgtgtgagtgaatgttatggtgttctagaatgctcatgtgtcagcctgtgtgttgactgttactgtgagtcaattagctaaaagaagtgtgatgtgtgg

SEQ ID NO: 4710 - DNA, 459 bp, Triticum aestivum
  Clone ID: uC-tsro9316032f06b1
ttctacgcgtccggggaaggatgcggagagcgcttactgggaactcgtcataaaggacatccaagacgcgtgcaagctgtttgagcccatctacgacgagactgatggggctgatggttacgtttcagtggaggtgtctcctaggctggcaaatgacacccaaggaaccgtcgaagctgcgaagtggttacacaaagtggtcaaccgccccaatgtgtacataaagatcccagctacagcagaatgtgttccttctatcaaggaagtcattgctaatggcatcagcgtcaatgtcactcttatcttctctgttgcaagatacgaggctgtgattgatgcttacctcgacgggcttgaggcttctggtttgagcgacttatcccgagtaaccagtgtagcatccttctttgtcagccgagttgacagtctgatcgacaaatgcttgagaagattggaaca

SEQ ID NO: 4711 - DNA, 409 bp, Triticum aestivum
  Clone ID: uC-tsro9316032f07b1
ttttgtaccttgtgaaggatctgctgcggcacgacacgagccgcctcgaggacttcgccgagctgctccggcacaccgtcgccggggcgcggcagtcctcgggcctcataatcaacaccctgggcgccatcgaggccgccaacctggagcagatccgcgaggacctgtcggtcccggtgttcgccgtcgcccctctccacaaactggcgccgtcggccaagtccaccagcctgggcgagacgcaggcagaccgcggatgcctcggctggctcgacacgcaggagcccggcagcgtgctctacgtgagcttcgggagcctggccgtcatggacccgcacgagttcgtggagctggcgtgggggctggccctgagcaagcggccgttcgtgtgggtcgtccggcccaagct

SEQ ID NO: 4712 - DNA, 448 bp, Triticum aestivum
  Clone ID: uC-tsro9316032f08b1
tataaaaaaaaaaaaaaaaaaaaaaaaaaaagaaaaattttaaaaaaaaaacgaaaatacctacagatgataaaggaagagatcttgtacggtctccggtcgctttcttggtccttcgaggctctttttttgggggggggcctttttgggggtcccattttccgttcgggggcttgcgccgtttttgtttttttttgggggccccttatttcttttcccgggccgggtttttcccccgtgggggcggggaaacccctgggggtcccccctttttttggtttggaggaattttccctttttgccggttggggttttttgccaaggggccccacccttggccttttcccccctttggcccccttttttgggggtcctggggcccccccctttgtttggcgtttttttgcggggggggggggggggggtttcccccccctggtgccccttt

SEQ ID NO: 4713 - DNA, 297 bp, Triticum aestivum
  Clone ID: uC-tsro9316032f09b1
ccaccggcgaaccggcgcgtgagggggggcatttttaagacagcaccgcggatgcccctggcagacccagaagagtccgtgtccgcaacaaatggcagtaaacatggccctcgggggccagtgtatctatgtggaggagcacatgacaaaagatgaactgagtgcccgtctacgctcgctgggtgcaaaacagaaccgtgatgtcaagtcaaagggggacaaaagaagaactggccctccgtgtggaagatttaaaagaggatctaggtaacgcgaggcctaagcgtggcactggcc

SEQ ID NO: 4714 - DNA, 403 bp, Triticum aestivum
  Clone ID: uC-tsro9316032f12b1
tcttccgtgtcctttctccacgcctcccgacttcttatagcgcaaatggcggctcgtgaatcctgatcacatcgtcacatcccccatccctatcgcctagctactacttcgggcccgagcacgaagccatttttgcatctctgcgagcgacttgggaagttgagatccactttgcagcgtcaaagatgaagcggctgctcgttcatggcgggaggggaatcggctgcccctccaggagcgcctgggagatccctccgccctgcccgcgcttggcaacagcgttctactgcccaggtaccactcgacagagaaacacgacgacagtgacacgctgggcgaaatcggagagaaggcacgaacgacagcggaggagttcctgaaaatggccaaggagaagaccgac

SEQ ID NO: 4715 - DNA, 474 bp, Triticum aestivum
  Clone ID: uC-tsro9316032g05b1
ttctctcgcatcttaatagatatggtttttggagcatgtggttaatgatctaaaagcaagaaagagaatgggcttttacttaatttcataagagaatatgccgtggtcttatgccatatcgatgggtatgttgatattggtttttcaaattgtacgagatgctgcctccttggtcgcctctcttaaaccttatgtctcaaagcattaatgtaatgtgaatgctaaaccgtaagttgaatggaacctatctttccacaacctattacctaaagagaagccattttatggttcctaatatgacattgagtgctgtcatgcatgatttggtataatgtttgccgttgatttggtatactatttgcagttgtcacccagcacaatttcttgatgaatggttagatttgtattgccctttccttggtttgccagtcactgtcagttattaatactgaaacttctgtattgcaaaacctt

SEQ ID NO: 4716 - DNA, 270 bp, Triticum aestivum
  unsure (1)..(270): unsure at all n locations
  Clone ID: uC-tsro9316032g07b1
tcntgtggtgctggagtattacatatcttgtccaaaaaatttgtactatgactccatatatgaggccctcggatgcaggctagctagatggtggcttgtggcgttgtagtattacatatatctgtccaaaaaaatgtactactgagattggagcagtaaccagagatttcatctcatctaaaaaaaaacaactgaaaaaaaaaaaaaaactaaaagagacaaaaaaaaaaaataaaaatctaaaaggaaaaaatgaaaaaagaagattga

SEQ ID NO: 4717 - DNA, 384 bp, Triticum aestivum
  Clone ID: uC-tsro9316032g08b1
tctgcgagggaagggatgtccgaacggtgtgaagagcaagcatctcctcttgattctctgggtctttggtatgctgctgctttggttctgcagagtaaccgtggcggagtttgtttctgcacctctcgttgcctggagcctgggaacgatatccacggagccacgctgctgtgctacatgacaagaccaagttgccccttgcgtgctgcgtgttcactcaggtccatttcaacccatgccactttcccggggaatggggccctgcctcgtttcggttcctatccattgagccaagtagtgctctgtgtgtagccaccgtgaaatcaatcaatcaatcaatggatccccactagctgccgtgcaatcatgaactgggctgaaata

SEQ ID NO: 4718 - DNA, 467 bp, Triticum aestivum
  Clone ID: uC-tsro9316032g09b1
ttcttccacgcgtccgcctctttccattcttgcactttgcaattggctttgcactgaatacaattgcaatcttctatgggtcattagcggcaataccatttggtacaatggttgtcatttttgtcctttgggctttcatatcttttccactggtgcttttgggaacggtcgttggtagaaactggagtggggctcctaacaatccctgccgagtaaagactattccccggcctattcccgagaggaagtggtaccttacaccttctgtcatctcattgatgggtgggctgcttccctttggcagcatcttcatcgagatgtactttgtgttcacatcattctggaactacaaggtgtattatgtttaccgcttcaatgtcgctggtctttgtcattcttctaatagttacaatctgtgtcacaattgtcggtactttatttttgctgaatgctgagaactatcattg

SEQ ID NO: 4719 - DNA, 319 bp, Triticum aestivum
  Clone ID: uC-tsro9316032h02b1
ttttcgcgtccggtggcggagcgcaaggctgctgaagcctgggccgccctgaaccgcctcccgctcgtcccctcggtgacccgtgctgtcctccccacggcagcacagctctcagccaagtacaactctgccgtgcttgatggcgcgaagcgtggcaactccgtcgccacctacctcccgctcgtcccaactgagcgcattgcaagggttttcgccaacccggccgacgacactgcgcctgccacagctcctgagatgcagcccatcccgacgcagtaacaataagagctacccggagttctattattacctaatagct

SEQ ID NO: 4720 - DNA, 446 bp, Triticum aestivum
  Clone ID: uC-tsro9316032h04b1
gtcataaccaagaggagagaccaaggtagacgacgatggcggtgtcggtggagctgcccaaggagtacggctacgtggtgctcgtcgtggtggcctacgccttcctcaacttctggatgagcttgcaggtcggcgccgcccgcaagaagtacaaggtgttctaccccaccatgtacgccaccgagtcggagaacaaggacgccaagcgcttcaactgcgtccagagggggcaccagaactcgattgagatgatgccgctcttcttcgccacgctgctgctcggcggcctgcagcacccggtcgccgccgccgcgctggggctgctctacaccgtcgccaggttcttctacttcaagggctacgccaccggggtaccggagaaccgttacaagcttggggggactaactttccgcgataatggggctgatcatctgactgggtaaat

SEQ ID NO: 4721 - DNA, 480 bp, Triticum aestivum
  unsure (1)..(480): unsure at all n locations
  Clone ID: uC-tsro9316032h10b1
tttttcggaggcgacgcaatcgtcggcgagctaaaacgacatcattcacatctcagtctggggttgcgaattcctttgggttccgtagtagacgccttagcactaagcgttaccggaatatgctttggaactcgtctgtacttaggactaagattagaaccaatagcgctttcacgcagagtcaagcatccgctgcaagctctgcacagtatacagtgggtatatacgatgccttcggcaatacagctagtcccttctggaccgcgggtggaggcgcatttgcaccggatttcggttctggtgttcctacaattactggtaacattgtcgtacgtggcggtgttcttggtatacgcgttacaaaccagagtgctgatactcagcctcaagaagtcaggattacattgatacgtactggaagtcgtaggggagttgcaccttccgccatcgncaataaacagtcggatttgacataactca

SEQ ID NO: 4722 - DNA, 253 bp, Triticum aestivum
  Clone ID: uC-tsro9316032h11b1
taataaaaaacaaaaaaaaaaaaaagagagaaaaaaaaaaaacaaaaaaaaccaaaaatgcagcagaaaaacccaggggggccgcgtgtacgagccccagggccccaaccgggccctgcgggggcttgggccctctgagggggtcaccatgacgaaagataccgggcgcggtcttacagcgtgcggggggggaccaccaggaccgtgccgcgctcccagcggggagcgacagagcctctgggtccccgggggg

SEQ ID NO: 4723 - DNA, 447 bp, Triticum aestivum
  Clone ID: uC-tsro9316033a03b1
gtcacgcttcgccgagggcgccgccggcatcgcgctcctcgccgacgccgccgccgcgcagggccccatgccggcgcccaggatggccccgctccccgcaccgccggcgaggtcgccggccaccgcccctgcgccgggcgccaccccgcccaccggcgcgtcgccgtccccgatggcctcgcccccggacccgcccaccgacgctccctccgcgatgacgccctccgcggtctccgccacgcccaccggtgccctcaccggcgcccccgcgagctccgccgcgtactctgccgccgccagcttcgtcgccgccgccggcgcggtcgcagacgtcatcatgttctagatgtggcgagggtcctgagctgatcttcgacctgccgccgacgaggggctatgagtctgatccaacgttgtttatactccgacgagattctttttcggttc

SEQ ID NO: 4724 - DNA, 457 bp, Triticum aestivum
  unsure (1)..(457): unsure at all n locations
  Clone ID: uC-tsro9316033a06b1
ataccgaaaggctttgatacgacatgtgcgctggaaagctccatcttgttgttggacttggtgaagctaatgggcccgaggtcggtaagaagagttggatgcctgcatcttatcctggtggtccgcgctgtatgactgaaaacttctatgatggggtggctgttttgcgtatgcatgcctcgcctgatataatcacaaccttcacatgtagtccaaagtggcctgaaataacggagagtactgaacctgggcaaaaaacagtcgataggtctgacattaccgttcgagtgtatcgcttgaaacttcttgagtacctacagaaaatgaggacagggaggatgtttgggcctatagttgctgatatccacgcaggggagtttcataagagggagctgccgcatgcgtgtgtncttgtttggcaagagaagcatcatgactcggtggtcacaccaacttc

SEQ ID NO: 4725 - DNA, 490 bp, Triticum aestivum
  Clone ID: uC-tsro9316033a07b1
ttgcatggagccagtggagaagtgcctgagggatgccaagatggacaagagcactatccatgatgttgtgcttgttggtggttccaccagaatccccagagttcagcagctgctgcaggacttcttcaacgggaaggagctctgcaagagcatcaaccctgatgaagctgttgcctacggtgctgccgtccaggctgcaatcctcagcggtgaggggaacgagaaggtgcaggaccttctcctcctggatgtcaccccactgtctcttggtcttgagactgctggaggagtcatgactgtgctcatcaccaggaacaccaccatccccaccaagaaggagcaggtcttctccacctactccgacaaccagcctggtgtgctcatccaggtgtttgagggtgagaggacaaggaccagggacaacaacctgctcggcaagtttgagctctctggcatcccgcctgcgcccaggggtgttccccagatcact

SEQ ID NO: 4726 - DNA, 416 bp, Triticum aestivum
  unsure (1)..(416): unsure at all n locations
  Clone ID: uC-tsro9316033a09b1
tccacgcgtccgcccacgcgtccgattctgatgtgattcagtgcaccaaaggttacataatacgagtaaaaattgttaggtcatagatgtgcttcaaaatgtaattctgagcgcatatgttgcgggaaatctgtagcatgtagagcaaattggtaattgtttgtattgttttgtacacaatagattacttgtgattcttttcgttnaaaaaaaaaaaaaaaaaaaaaaaaaaaaaaaaaaaaaaaaaaaaaaaaaaaaaaaaaaaaaaaaaaaaaaaaaaaaaaaaaaaaaaaaaaaaaaaaaaaaaaaaaaaaaaaaaaaaagggggggggcctttttaggggaccaaatttatcttgccggggatggcgaggaaaaactttttttttggggcccctaaaatcaaattcatgggc

SEQ ID NO: 4727 - DNA, 404 bp, Triticum aestivum
  unsure (1)..(404): unsure at all n locations
  Clone ID: uC-tsro9316033a10b1
actaccacgcgtccgcccacgcgtccgattctgatgtgattcagtgcaccaaaggttacataatacgagtaaaaattgttaggtcatagatgtgcttcaaaatgtaattctgagcgcatatgttgcgggaaatctgtagcatgtagagcaaattggtaattgtttgtattgttttgtacacaatagattacttgtgattcttttcgttnaaaaaaaaaaaaaaaaaaaaaaaaaaaaaaaaaaaaaaaaaaaaaaaaaaagaaaaaaaataaaaaaaaaaaaaaataatttaaaaaaaaaataaaaaaaaaaacatataaaataagaggggggggccttttaaaaggtaccaatttttcttcccggggtttgcacgaaaaaattttttttttggggcccccaaa

SEQ ID NO: 4728 - DNA, 203 bp, Triticum aestivum
  Clone ID: uC-tsro9316033a12b1
tacacgtgcgtcttagacctgtggatcaaatgtctggaatgtggtctgtcgaggtattgcaattgcgggcgcctattttcacttggaaacttatgtgaggaagctctgcacttcctgaatgcaagctttccacaagtattatttcatatgtatattcaagtgttgcactacgtattatgctctcttgcaattatccaattgcc

SEQ ID NO: 4729 - DNA, 431 bp, Triticum aestivum
  Clone ID: uC-tsro9316033b11b1
ttttaccagcgcaggattttatctggtcctaatgggtacaattctgtgccttcaacaacaagagaagacactagctctagaattccagatcgattttctgggagaatagcaactgctgcacaatctgctagttcttcacacagacctgccagccaggagggtcgttcaggaaataaatcatactctgaggaggaattgagagagaaatctattgcaaccatccgggaatattatagtgcgaaagatgaaaaggaagttgcattgtgtattgaggagttgaatgctccgagcttctatccttctcttgtatcactttgggtaaatgattcctttgagaggaaagatatggaaagagagttgttggcaaagctctttgtcgggctttacaatggtggatataatttattgagcaagcctcagctcattgaggg

SEQ ID NO: 4730 - DNA, 498 bp, Triticum aestivum
  Clone ID: uC-tsro9316033b12b1
ttttaccaaccacacaagaaccgatcaagacaccagcaatggccggaggaggaagcgacgaagtgaagctgctgggcatgtgggcgagcccgttcgtccttcgagtcaagctcgcgctcagcctcaagggcgtcggctacgagtatgtcgaagaggacctcaagagcaagagcgagctgctcctcaagtccaaccccgtgctccagaaggtgccggtgctgatccacgacggcaagcccatctgcgagtcgtcggtcatcctgcaatacatcgacgaggctttcgccggcgtcggctcctcgctcctcccggaggaaccccacggccgcgccgttgctcgcttctgggccgcttacatcgacggcacgctcgtgaaagcatcgtccgaggcgtccatggccaagacggaggaggagaaggccgaggggaagaagcaggtggcccgcgcggtggagaccttggagggggccctgagggactgctctaacgggaaaccct

SEQ ID NO: 4731 - DNA, 412 bp, Triticum aestivum
  Clone ID: uC-tsro9316033c02b1
tttacgcgtggggccccgtcaaggtgaacctcggcgtcggcgcctaccggaccgaggaagggaagcccctcgtgctgaatgtggtcaggcgcgccgagcagatgctgatccaaaacgagtcacgtgttaaggagtacttgccgatcactggattggccgatttcaacaagttgagtgccaagcttatctttggtgctgacagtcctgctattcaggagaatagggtggctacagtacagtgcttatcaggaactggttccttaagagtgggaggtgaatttcttgcaaggcactatcatgaacgcactatctacatcccccagccaacctggggggaatcacccaaaagtgttcactttagctggcctgacttgctaggagtaccggtactatgatccctgcactcgtggac

SEQ ID NO: 4732 - DNA, 418 bp, Triticum aestivum
  unsure (1)..(418): unsure at all n locations
  Clone ID: uC-tsro9316033c03b1
tgtccgnccagcttgttttatgtttaattatgacccctgcagtttgcctagctagcactatgctatcgtacgctgtgatattgtgtgacatggtatcatgttattatatctctacctatctaaaaaaaaaaaaaaaaaaaaaaaaaaaaaaaaaaaaaaaaaaaaaaaaaaaaaaaaaaaaaaaaaaaaaaaaaaaaaaaaaaaaaaaaaaaaaaaaaaaaaaaaaaaaaaaaaaaaaaaaaaaaaaaaagggggggcccgttttaaagaaccaaatttaactaccccgtgattgcaaagaaaaattttttttatggggcaacaaaaataaaataaatgggccgggttttaaaaacgggggaatgggaaaaacctgggggtacccaaattaaaaggcttggaaaaaaatccccttttc

SEQ ID NO: 4733 - DNA, 461 bp, Triticum aestivum
  Clone ID: uC-tsro9316033c04b1
ttgaattcaagaaagacatggacgagcagtggatgatggggcagacttccctcagcctcggcctcaacgtcggccggccgacggcgcggcggggtgcccctccggtgaccaaggtcctcgtggaggaggacttcatgtcctccaagaagaatcacgaggtcgaggcgctggaggcggagctccggcgcgtgggcgaggagaacaggaggcttagcgacatgctccgcgcgctggtggccaagtactccgacctgcagggcagggtcagcggcaagatggcggcggtgaccgcggccaaaaaccgccagtcacccacgacgtctgagggcggctccgcatcctcgccgtccaggaagcgcgcccgcagcgacagccccgacaccgccgtccaggaagcacgcccagccagcggcggcttcgccgtcagcgtcaacgtcggccccgaccaggcggagtgcacg

SEQ ID NO: 4734 - DNA, 514 bp, Triticum aestivum
  unsure (1)..(514): unsure at all n locations
  Clone ID: uC-tsro9316033c08b1
ttcagacaatgccatcacaggaactgtccctatctcaacaggaacgacaccgggccttgaccttcttaccaacacgaagcacttccatttcaacaagaaccagctatctggaacgcttacaggcctcttcaagcctaatatgaccctcatacacatattgtttgatagcaatcagttcacaggcccaattccgcgtgagcttggaagcattacctcgctccaagtactccgactggataggaaccaatttgcgggagcagtccctaacatcaccaacttggtcaacctaaatgagctgaacttggcaaccaacaagctaactggatcagtgccaaatctcagcagcatgaacgtgttaaatgttgtggatttaagcaacaacagctntaccgcgtccgcaataccagcctggttcacaaatctaacaaatatttcttcaatatcgatgtcttctgcgaggctcacttggcgggtccctcaggaactcttcaatttgccccagcttgcatgaagt

SEQ ID NO: 4735 - DNA, 403 bp, Triticum aestivum
  Clone ID: uC-tsro9316033c12b1
tcttcgaggcggagagcaacatgaacgacctcgtctcggagtaccagcagtaccaggatgccactgctgacgaggagggcgagtacgaggatgaggatcaggagcctgaggaggacatgtaaggtgggatgtccatgtcgtgctttgctgggtgggggttctgggggcagagtttgatctgtttggtgctttgttataaatctgattatcatcgcaactaccgcttgtacgccaccgccattcttcctgcctttcctaagctctgtatttcctatgttatggcaccttttcggtattgtatcacttgatgccgcgcggtatgttctgagttgaggtttctggttctctcaacagacaagcaacacatactactttaaaacagctggcaaaataacaaaaaggc

SEQ ID NO: 4736 - DNA, 491 bp, Triticum aestivum
  unsure (1)..(491): unsure at all n locations
  Clone ID: uC-tsro9316033d02b1
gtctgccacttcatcggggagggcgggttcgggccggtctacaagggcttcctcgacgacaaggtggtgccggggatgcagccgcagcacgtggccgtcaagtacctggacgccgagggcccccagggccaccgccagtggctcgccgaggtcgtctacctcggcatgcagctcagccacccgcacctggtgaagctcgtcggctactgctaccaggagcaccaccgcatgctggtgtacgagtacatggcccgcggcagcctcgagcaccacctcttcaagaatctgctggcgagcttgccgtgggcgacgaggctgaagatcgcggtgggggcggccaaggggctggcgttcctgcacgaggcggagacgccggtcatctaccgggacttcaaggcctccaacatcctgctcgaatcggtcagtgctcctncaccatccctaccaactncggcgggcatatcatatcccgttcatacctncataccttc

SEQ ID NO: 4737 - DNA, 72 bp, Triticum aestivum
  Clone ID: uC-tsro9316033d05b1
atcacgcgtccgcccacgcgtccgcccacgcgtccgcccacgcgtccgcccacgcgtccgtctagatcgcga

SEQ ID NO: 4738 - DNA, 420 bp, Triticum aestivum
  Clone ID: uC-tsro9316033d09b1
tcgtgcctctcttccttttctcctttcaaactgagatccttttcttaaaccctctcctcctcccctatccctctcccttttttaccctgtctttgtctctaaaagaaagaactcggaagatcctcttgaaatgcaaaaccgcccaatttttcttcaattctttttttctcttccacttcattttctcggctgtctggttctggtgtcggtttgtttgggctgggtactggttcggatggatcaacacaggactttgggaaagctacggttgattagggtgtattgggtgtgttttttgttgcctttctgggagggctttgaggggcgaggagatatgaaaactcttagggggtgaagggaaatggggaatgattgagggatatgccttgggcttcgttagagcggattcagatgtgtttt

SEQ ID NO: 4739 - DNA, 440 bp, Triticum aestivum
  Clone ID: uC-tsro9316033d10b1
tcttgcctctcttccttttctcctttcaaactgaatccttctcttaaaccctctcctcctcccctatccctctcccttttttaccctgtctttgtctctaaaagaaagaactcggaagatcctcttgaaatgcaaaaccgcccaatttttcttcaattctttttttctcttccacttcattttctcggctgtctggttctggtgtcggtttgtttgggctgggtactggttcggatggatcaacacaggactttgggaaagctacggttgattagggtgtattgggtgtgttttttgttgtcttcctgggagggctttgaggggcgaggagatatgaaaaccttttgggggtgaagggaaatggggaatgattgagggtcatgccatgggctcgttagagcggtttcagatgtgtagtcctcgcaatgacaagaggcttc

SEQ ID NO: 4740 - DNA, 499 bp, Triticum aestivum
  unsure (1)..(499): unsure at all n locations
  Clone ID: uC-tsro9316033d11b1
tcttcctcgacatcctaaaggacaagtggagtccagctcttcagatacgcactgttcttctgagcattcaggcactgctgagcgccccaaacccagatgatcctctctcagaaaacgtcgcaaaacactggaaatccaatgaagctgaagctgttgagacagcgaaggaatggactcgtatgtatgccagtggcgcatgacaagctaacgctgttatggatgtaataacactgtgtcatagttgggcctaatcgaaaaccatttgcttgataaaaacacacttgaaatgatttgcgatggacgaatgtatccagagcggcatcatttcttgttggtggttgtatttgtggtgcgtgttctggcacgcttcataacttgctgcttatagaacacgctctgtttctcgttcatcctcaattgtttctccaattaaaaatatctgttgtgatccggtatgtaagctcttcaaatgaaatagtggctctctgtattntccccc

SEQ ID NO: 4741 - DNA, 466 bp, Triticum aestivum
  Clone ID: uC-tsro9316033e01b1
ctgtactggcgcgcgcggcttcggatcgcgcggggcgcggggcgcggggtgctgcacatccacgaggtgtgcacgccgcagatcgtgcaccgggacatcaagtcgagcaacatcctgctggacgagtccggcgaggcgcgggtggcggacttcgggctggcgcggctgatcctgccggaccggacgcacgtgacgacggagctggtgggcacgctggggtacatcccgccggagtacgggcaggggtgggtggcgacgctgcggggcgacgtgtacagcttcgtggtgctgctggagctgctcaccgggaggcggcccgtggagatgatggcggcggcggggcagccgagggacctcgtcgggtgggtgacgcagatgcggtcggcggggaggcacgcggaggcgctggacccgcggctgaggcaggggagctcgcctggcgacgaggcgcagatgctgtacgtgc

SEQ ID NO: 4742 - DNA, 496 bp, Triticum aestivum
  Clone ID: uC-tsro9316033e12b1
ttttaatcttacggatcaaggtgcgtcaagccaccgatcatctatggtgatgtgagccgccccaaccccatgaccgtcttctggtccaagatggcgcagagcatgactgctcgcccaatgaagggtatgctgacaggccctgtcacaatccttaactggtcttttgtcagaaatgaccaaccgaggtttgagacttgctaccagattgctcttgcaatcaagaaggaggtcgaggaccttgaggctggtggtattcaggttatccaaatcgatgaggctgctttgagagagggtctgccactccgcaagtcggagcatgctttctacttggactgggccgtgcactccttcaggatcaccaactgcggtgtccaggacaccacccagatccacacccacatgtgctactccaacttcaacgacatcatccagtccatcatcaacatggacgccgatgtgatcaccatcgagaactcgcggtccgacgagaagcttc

SEQ ID NO: 4743 - DNA, 88 bp, Triticum aestivum
  Clone ID: uC-tsro9316033f01b1
ctgacgcgtgggaaaaaaaaaaaaaaaaaaaagaaaaaaaaaaaaaaaaaaaaaaaaaaaaaaaaaaaaaaaaataagggaggaggtt

SEQ ID NO: 4744 - DNA, 97 bp, Triticum aestivum
  Clone ID: uC-tsro9316033f02b1
gtgccccgtgggaaaaaaaaaaaaaaaaaaaagagaaaaaattaaaaaaaaaaaaaaaaaaaaacaaaacaaagaaagggggtaggatattaatgag

SEQ ID NO: 4745 - DNA, 511 bp, Triticum aestivum
  unsure (1)..(511): unsure at all n locations
  Clone ID: uC-tsro9316033f03b1
tctacgcgtccgcccacgcgtccggggccgcaagctttaacatcattcccagcagcactggtgctgccaaggctgttggcaaggttcttcctgagctgaatggcaagcttaccggtatgtctttccgggttcccactgtggatgtgtcagttgttgatctcactgttagaaccgagaaggctgcatcatacgatgacatcaagaaggctatcaaggctgcatctgagggaaaactcaaggggatcatgggttatgtcgaggaagatttggtctccactgactttgtcggtgacagcaggtcgagcatctttgatgccaaggctggaattgctctgaacgaccatttcgtcaagctcgtctcgtggtacgacaacgagtggggttacagcaaccgcgttgtcgatctgatccgccacatggccaagactcagtagagcgttctgatttcctttggtcagaggtgtccctgctttgtctatgcgaagaataaatgtngatggtgtcgccagac

SEQ ID NO: 4746 - DNA, 468 bp, Triticum aestivum
  Clone ID: uC-tsro9316033f09b1
ttgttcacgcgtccgcccacgcgtccgcccggaccagagcaagagagagatttcccccgattcgatccgatcagatccgagatctccatccccgatggcgtcccggagctgcaccttcctggagatcctgctcgccatcatcctgccgccgctcggtgtcttcctccactacggctgctgcagcatggagttctgcatctgcctgctgctcaccatcctgggctacatccccggcatcatctacgcggtctacgtgcttgtcgcgctcggctcggaggagcgggatcgggactacgacacccttgcttaataatcctgcagcaactcgtattgtgtgatgaacctctcgcctggtagttgcgaatcgacgtcgtgtgttcccatctggactgtgtagcgtgccttctttctgtcagcctgtaaatgcttaaaccatcctccccttcgctttcgccgtcctgtaattct

SEQ ID NO: 4747 - DNA, 502 bp, Triticum aestivum
  Clone ID: uC-tsro9316033f10b1
tcgttcacgcgtccgcccacgcgtccgcccggaccagagcaagagagagatttcccccgattcgatccgatcagatccgagatctccatccccgatggcgtcccggagctgcaccttcctggagatcctgctcgccatcatcctgccgccgctcggtgtcttcctccactacggctgctgcagcatggagttctgcatctgcctgctgctcaccatcctgggctacatccccggcatcatctacgcggtctacgtgcttgtcgcgctcggctcggaggagcgggatcgggactacgacacccttgcttaataatcctgcagcaactcgtattgtgtgatgaacctctcgcctggtagttgcgaatcgacgtcgtgtgttcccatctggactgtgtagcgtgccttctttctgtcagcctgtaaatgcttaaaccatcctccccttcgctttcgccgtcctggaattctgatacgacccgatatatttcagcagcttcgaaga

SEQ ID NO: 4748 - DNA, 242 bp, Triticum aestivum
  Clone ID: uC-tsro9316033f12b1
tcgaaaattctctggttgttccagtggtttttttattttcattgcgatctatttgtggcaagaaataagaaagacaaactcttgtgttgacaatccggaattggctgaattgtgtctaccctgttttcacatcaatgatatatgtgagccgattgaaaaaaaaaaaaaaataaacaatatacaagagtaaaacaaaagaaccaaaaaataaaacaaaaaaaaaaaaaaataaaaaaaaccag

SEQ ID NO: 4749 - DNA, 431 bp, Triticum aestivum
  Clone ID: uC-tsro9316033g01b1
tatcacatgtgatctgaatgataacatcgctgccccatggtcgccttctttgcaagcatcggcttcgacatgcaataaatcagctgctcctggtccaacaatcccagagaggcctgcagcaacatcggcgcagaacggtgtcaaccacaacagactggagcttagcctagccgtctgctttggcgcccttgtggccactattttactgcaagtctagttcaccttagtttgtcaaattatccagggtttgaggagagctgattggaacagtgaaccgcggagtttttgtgcgtgcttggtcatcgcatcagagcattgtaactggtagctattagtgtaatttgctgtaagccacagaatgatagtgaatgcaacactgactctaatttattactattatgccttttgtatagcgagtagtgaaggttcat

SEQ ID NO: 4750 - DNA, 493 bp, Triticum aestivum
  Clone ID: uC-tsro9316033g02b1
aaggtgggacccctgcgcaggaccgcggccgaattcccggggcggcccaagccgtccggtggttcatggccctgggcctaccgttactgacgcgcgtgacgaccgctaccgacgcagcaaagatgccggccgaggagctgcgccacggccccgtcggcgccttctcctggctcggcatcgccttcctcaccgtcaactcggccatggcgatccacaggtccaaaggcgacccgtccgcggtcggcttcgtggccttctcctacctcgacctcgtactgctcttctacttccataggaggttcgagagcgccgcgcccggctcaccggcgagacggaggctcaaggtggccgtctgggtcctcaccaccatgctcacggccgttctaagctataaggtggcggctatcatgccgctgccagggcagatcctcgtttgggccatggccggcgccgccacagcaggaggattctacgccttcttcctgttccggga

SEQ ID NO: 4751 - DNA, 344 bp, Triticum aestivum
  Clone ID: uC-tsro9316033g03b1
tttgtttgactaccgcgccgcggccatggacgccatcgccaaggccaacccggtggtgaaggcggagaagctcgacaagatctaggaaggggcctccctacggtcggcagaacataaggtcccaaatcaaatctgcgctacctcgtcatcgtgcgtctttgctgcattatcctttcatcatgttggcttctgcaatcctagttgttgggcaatcgtgatgcatggcacacgcgccacggcggcagccccaggtccgaacggtctccttgttggctatgttgtgtaagctttatttatggtcgtctctctgcgcggcggaacggtaacggtattgtggctttcgc

SEQ ID NO: 4752 - DNA, 382 bp, Triticum aestivum
  unsure (1)..(382): unsure at all n locations
  Clone ID: uC-tsro9316033g07b1
tgtattcttaaagcctttggtggtctccttttcatcatcagcagctcgttcggagcgctcgtactgcttgtttacttggcattcataacccctgtcgtgtacgacttctacaactacgagatggagtcccagcaatttgccaagctcttcaccatgttttcacagaacctggccctcttcggcgcgctgctcttcttcctgggaatgaagaactccatcccaaggaggcactccaagagaaggaccgcaaaggctaagacaacctgaagccagtaaggggattgtgataggaggggaagctatcaatatggaaactcgtcgtgttttacgcatacttttggagcagtacatgtnccgctttttgcccataggattcgtgagc

SEQ ID NO: 4753 - DNA, 424 bp, Triticum aestivum
  Clone ID: uC-tsro9316033g08b1
tcgtctggagtaagaaagagggagcatggggaagaagggggttgccctggtggcgctgctgctggtgatggtcagcatggcggtcgtgatgactgccgacggccagggtgccggcagcgagttcggcaaagcggccgaaggagccgggacaggcgccgccaccgctgctgagggcgcgggagccgccgtgaagtcggcggcccagggagcaggccaggcagctagtggcgccggcgaaggtgctggtaaatcttactccggcggcggccgtcgttgagcctgccgtgtaccgcgggatcgtcgccgccgtggctgaggaatgatacccaaccatgccactgcgaataataaaaatcaagctgcttaattagcatgctgtcaactgaaaccatgttaacatgccgctcgatgtatgtcacgctta

SEQ ID NO: 4754 - DNA, 235 bp, Triticum aestivum
  Clone ID: uC-tsro9316033h01b1
atgttggctggccacgaccacatggagatcggccccatgctccggcagtgcagagagctgctcgagggccttgagactatcactgactgccgaggtagcgatgggacgacggctaggaccatcgttgaggtctacccgcacatcacgcgcactgttgtggaccttccaaggctcatggacagagttcttcgtgcccctgaagaaagagcgcgtgaagtatcgatcttggtgacct

SEQ ID NO: 4755 - DNA, 453 bp, Triticum aestivum
  Clone ID: uC-tsro9316033h02b1
gtgtggctgcccacgaccacatggggatcggccccgtgctccggcagtgcagtgagctgttcgaggggcttgagactctcactgactgcggtggtggcgatgggacgacggctaggtccatcgtcgaggcctacccgcacatcaagtgcactgttctggaccttccaaaggtcatggacaaagttcttcttcccgctgaagaaggagcggtgaagtatgtttctggtgacctgttccacgtcgtcccacctgctcaagccgtgttgctcaagcttgttctgcacttctggagcgacgaggattgcatcaagatcctcgcacaatgcaagaaggccgttcctccccgagacgcgggagggaaagtcatcgtcatagacattgtgcttggctcggtttctgcagggccaatgctggaaacccagcacctcatggatatgctcatgctcgtgatga

SEQ ID NO: 4756 - DNA, 348 bp, Triticum aestivum
  Clone ID: uC-tsro9316033h04b1
atagaaggagctcatcaagatccacggcttctaagctgaagccgcctccgataaatgcccgaaccgccagccggttctactctatattgaagacttaaggcatctatattgccgcccgcttgttgaaccggtttcttgcttgatgcaagttgtgttgtcacctggttattatgctgctgctgtaccagcatatcagtatggtttgtctaagatgttgccgactaaataaaaatccgtatcgtttggctgaaaaaaataaaaaacgtcactatacgaaataaaaaaaaaaaaaaaaaaaaaaataaaaaaaatacaaaaaaaaaaaaaaaaaaaaaatagagagaacgg

SEQ ID NO: 4757 - DNA, 95 bp, Triticum aestivum
  Clone ID: uC-tsro9316033h06b1
tcacgcgtccgcccacgcgtccggctatttgtcttcatgtgaggcgtcgtgttgtaaatttccatatataatgtgatgtaaaacttcttggctcc

SEQ ID NO: 4758 - DNA, 478 bp, Triticum aestivum
  Clone ID: uC-tsro9316033h08b1
tcgtttcgagcgcctcctcctgtctcgtcctcgtcccccgttccccgtcccctcgtcggcgcccgatctaagtcaagatgagtcgtggcgggagtgctggaggtggtcaaagttctctgggttacctgtttggagatggtgagcctgcaaagcctgctgcagcaccagctgcgaagccagcacctgctgagaaaccagcactggcagctgccgatgtaaccaagcagattccagctggcattccaggtagccgggcgaacaactactaccgtgcagatggccagaacacgggcaacttccttacggaccgtccttcaaccaaggttcatgctgctcccggcggaggctcgtccctgggctacttgattggcgggaagtgatctctgttaatgatgctgcgatgaattggcctgtatctctgctatccatgtggtgaaaactggaagtgtttggtttcagcagtttaccacctgcgtcg

SEQ ID NO: 4759 - DNA, 455 bp, Triticum aestivum
  Clone ID: uC-tsro9316033h11b1
ttgtcgaccggtaaggagctccccccgggcccgccggcgctagtcttcctggctaagttcctagcgctccggcgatccatcttccaccttgagccgctcctccgcgagctgcacgcgcgctacggccccgtcatctccatccgcctcttccgcgccctcgtcttcgtctccgaccgccgcctcgcccaccgcgttctcgtccagggcggcgccacctttgccgaccgcccgaggctcttcgagccggggctcctcttcacctccggctcccgcaacatcaacgccgcgccctacgggccttactggcgccttgtccgccgcaacctcgcctccgaggcgctgcacccggcctgcgtcagccagttcgcgcccgccaggcgccggatgcgcgacgtgctcgtacgcgacctcagcgcgcgcggcgccggcggcgaccccgtcgaggtgaggacgcc

SEQ ID NO: 4760 - DNA, 337 bp, Triticum aestivum
  Clone ID: uC-tsro9316034a01b1
taacgacatcctgtggtgtggtgtatcattccctttgtgcggattcttcaaatttgtcgcttcaagtagaaactgcacgtggatgattgctattcgatgtttgcttgtggtgtggtgaagtcaataatatctcatcataagaaataagcacacatgtttgcttaaaaaaaatacaataagaaaaagaacaacaaaaccgataaaaaaaaatggcggggacttaaaaaaaaaaaaaagcttcttgcgggagagctcaaaaaaaaagctttttttatacgaggcctaaaattaacactggccggcgttttacaacaccgtaactgagaaaaaaccgggg

SEQ ID NO: 4761 - DNA, 251 bp, Triticum aestivum
  Clone ID: uC-tsro9316034a03b1
tgttggagaagcgcgcggagcatcagaaacatcatccctccttgccttgttcttttatctcttcctaatagtttgttggtcgaatttataggattcttaatcgacagatcaggaatcacctccccattcagctaagctgcatgtcttttgcttatattttgtcctttcttgtacttacatctcatgctgtgtggatttcctatggctcaagtttgttgctgcgctcaggtttcagcaattgctgcacctgc

SEQ ID NO: 4762 - DNA, 391 bp, Triticum aestivum
  Clone ID: uC-tsro9316034a07b1
tctagagaagagagctagtatgtttgtagtagtaatttgtacaaagaaaattaagaaaaaaaatctataacatcggatcttgcccaaaaaaaaaaaaaaaaaaaaaaaaaaaaaaaaaaaaaaaaaaaaaaaaaaaaaaaaaaaaaaaaaaaaaaaaaaaaaaaaaaaaaaaaaaaaaaaaaaaaaaaaaaaaaaaaaaaaaaaaaaaaaaaaggggggggccttttaaaagaaccaaagtttactcccgggggaaggcaaaaaaaaaattttttaatagggaaacaaaaaaaaaataaatgggcggtgtttaaaaacgggggaaagggaaaaacccgggggtaaccaaaataaatcgcttggaaaaaaatccccttttggcaaggtggag

SEQ ID NO: 4763 - DNA, 277 bp, Triticum aestivum
  Clone ID: uC-tsro9316034a08b1
tctcttgtatgtaatctcatcagtactcaaaaaaaaaaaaaaaaaaaaaaaaaaaaaaaaaaaaaaaaaaaaaaaaaaaaaaaaagaaaaaaaacaaaaaagaaaaaaaaaaagacaaaaaaaaacaaaaaaaataaaaagaaaaaaaggggggcgaatgaagaacagtttgtgcgccttcgttcgctgggggaagaactgaacaatgctggggggcccgccgggactaaagaagtactggatctttcaaacgcaaaaaaaaaaaaaaaaattggga

SEQ ID NO: 4764 - DNA, 436 bp, Triticum aestivum
  Clone ID: uC-tsro9316034b01b1
tttacgcgtccgcccacgcgtccggggaagagggctgtcagctttcatggccagcaggagtccctaaacatcgcgggatatgcatggcaacaatggaacgaagacaagggcgaggaaatgatcgatccgttgataaaaccgtcgtgctcgattcgacaggtcctgaggtgcatccacattgcattgctatgcgtgcaagatcatgcccaagagcgtccggacgtgccggcggtcatcctgatgttgagcagcgacagctccagccttcccatgccgagggcgcccaccctgatgctccgtggccgtgctcttgagtcgagcaaatcaagcgagaacgagaggagccactccattggcaccgtatcaatgacacagttgcatggaagatagcatggcaggggcagtatatactgaagatatcatgtctttctttttc

SEQ ID NO: 4765 - DNA, 287 bp, Triticum aestivum
  Clone ID: uC-tsro9316034b07b1
tctaccacgcgtccgagaaactcttccgagatttatttattcgtgaagggtaccagtctgatcatatatttgactggactgtgtcgaggcacttagcagagaataacagattgcgaccaagtggaaggacagctgggttggtgggaccatctgcagaacgggctgaacggattgcagcaagacaggatggtcctgatagattctgtagttcagtggaaacatttgccagaagaactggctctggttctggccatcaaaaaaagagcttgatgacacgagggctaaaa

SEQ ID NO: 4766 - DNA, 368 bp, Triticum aestivum
  unsure (1)..(368): unsure at all n locations
  Clone ID: uC-tsro9316034b11b1
ttttgctttcttttagtgaattattttgaattaatcctgtaattcgtagtggttttgtcactgtaatttctatatcttatcagtgtaattataattttgcaaatgctagtgggatttgtagcacgccatcactgtaaatcctagcggttctttatcagtgttatattccttgtaatcctagtggttattttactgtgatgtatttgcaactgattgttgatgttatttcatttttaaaaaacnnnnnnnnnnnnnnnnnnnnnnnnnnnnnnnnnacnnnnnnnnaaaaaaaaaaaaaaaaaaaaataaaaaaaaaaaaaactaaaaaaaaccctnaaaaaaaccaaaaaaaaaaaaggggcggccct

SEQ ID NO: 4767 - DNA, 235 bp, Triticum aestivum
  unsure (1)..(235): unsure at all n locations
  Clone ID: uC-tsro9316034c01b1
ngtcccacgcgtccggaagctatcaaccttgtgggtgcttttaattttgtggcatcatcagataaaaaccagatggagttcctgaaaaattctctggatttcattgtcgatactgcctctggtgaccacccatttgacccttatctcgagcttctgaaagttcgtggcacactggcactagttggtttttctggcgaaatcagagtgcatcctgtaacacttaaatttgggtgca

SEQ ID NO: 4768 - DNA, 81 bp, Triticum aestivum
  Clone ID: uC-tsro9316034c04b1
tttacgcgtccggactagttctagatcgcgagccgacgtcctttacattttattggtagagctgagttgtgatatagagaa

SEQ ID NO: 4769 - DNA, 266 bp, Triticum aestivum
  Clone ID: uC-tsro9316034c05b1
agacgtggaggcccccggggaaacggggggggaggggggcaatttacagcggggccccgggaggtcccccagtgacccgcgagagcggggccgcacacacagagggacaactaggtcgaccagagccagtggttgcgtccaaaacatccccgacctgacaagaactgcgtgccactcgccagagttgcggagagcaccggaggatccatggcacgttgctgatggcaataaaggagcaacagctgcgcggggcggaagaacaaaaa

SEQ ID NO: 4770 - DNA, 256 bp, Triticum aestivum
  Clone ID: uC-tsro9316034c06b1
ttcagctttccccccaccactggtggggggtttgggagctgaccccttaggaaaacaattcttcgcttgattgctagatacgtgatgagacggacctgtttaaggggccgatccatctctgaagctgacacactctaagtcgttgatttgtctgcgatttgaagacgtcgtagctgcatctgctctggttaatttcagtgcatttgcggctgtttttattgcggaaaaaacaccaccaagggggccacgtaggtgc

SEQ ID NO: 4771 - DNA, 367 bp, Triticum aestivum
  Clone ID: uC-tsro9316034c07b1
tctttccacgcgtccggaagctatcaaccttcttggtgcagataattttgtggtatcatcagataaaaaccagatggagttcctgaaaaattctctggatttcattgtcgatactgcctctggtgaccacccatttgacccttatctcgcgcttctgaaagttcgtggcacaatggcactagttggctttcctggcgaaatcagagtgcatcctgcaacacttaatctgggtgcacggactctatctggcagtgtagttggaggcacaaaggatacccaggagatgataaatttctgcgcggcaaacagaatatacccaaatgttgaggtgataaaaatagactacatcaacgaggctctcgagagg

SEQ ID NO: 4772 - DNA, 324 bp, Triticum aestivum
  Clone ID: uC-tsro9316034c08b1
ttgtggggttggcttctcctccccttccggttcgggttctggttcggttcgggtccgagagtagctagcctagtctagggtttccgtagttcggagaggagagaaagggagagatccatggcggagacggagtaccgctgcttcgtgggcgggctcgcctgggccaccgacgaccacaacctccagcaggccttcagccagtacggcgagatcctcgacgccaagatcatcaacgaccgcgagacgggcaggtcccgtggcttcggcttcgtcacgttcggcagcgagggagtcgatgcgccaggccatcgaagagatgaacgg

SEQ ID NO: 4773 - DNA, 331 bp, Triticum aestivum
  Clone ID: uC-tsro9316034c10b1
cccacgcgtccgcccacgcgtccgatggaacatatctcatgccgagtggctcggggttccgctgaaggtgtacgcggaccggttgtcgtagatcgtcgcgcgccatcatcattttgtgcaaggtcaaccggttcgacttccaggagctcaccgtggatcttgtcaagggacaacaccgcgcaccagagttcaccaaaatcaaccccatggcgcaggtcccaacaatcgacgatggaagattcaaactctttgaaagtcatgccattcttaggaatctcgcccccgtcttgcccggggtttcacattactggtattcagccgacttatttac

SEQ ID NO: 4774 - DNA, 393 bp, Triticum aestivum
  unsure (1)..(393): unsure at all n locations
  Clone ID: uC-tsro9316034c12b1
tcgtccactctgctcaaccaagcagatccaagcagcagcagagcgccggagggacgccaggatgcacgccaagacggactcggaggtgacgagcctggctccatcctccccagcgcgctccccgccgcgcgcggccaacaacaaccccaactccggcgggggcggtggggtgatgcgcggctcggtgtactacgtgcagagcccgtcgcgggactcgcacgacggcgagaccaccaccaagggggccacgttggtgcactccacgcccgcgctcagccccatgggcgtncccccgccactcccaattcttcggtgggccgnaattcttcttccagccgtttttccgcggggggtgcccaccacaaggacaagtcggcggggcgcaagggcgcg

SEQ ID NO: 4775 - DNA, 471 bp, Triticum aestivum
  unsure (1)..(471): unsure at all n locations
  Clone ID: uC-tsro9316034d05b1
tttcaaatccccaaccccgactgacgacgagtggatctgttccggcgcttcctgccgccgtcgaccatggcgtcttccaactccggcggcatccccatcaaggcggaacaggattcggatggctcggcccagagcacagctgatatgactgcttttgtgcaaaatcttctagttcagatgcaaaccaggttccaaactatgtcagagaacatcattacaaagatagatgaaatgggtgcaagaatcgatgaattggagctgagcatcaatgacctcaaggctgaaatgggcagcgatggtatgacccctactaagtgaaggacgaagaatcaaagccagcagacagctctgcctgatttaagagaagtagcagagcaagtcgattagtcttggttccatgtcaatatcatcagccattcatcactaacttaatgcatgtatgagatgntattcgcactggtatatgcattt

SEQ ID NO: 4776 - DNA, 253 bp, Triticum aestivum
  Clone ID: uC-tsro9316034d07b1
tcttagagagatagcctggagggcactgagtgtcatggatgaaaccggggcactggtcggggtggtgctgcgagcaaagctcgcgagtgggaccggagagtgcgagaggagctcacacgaccgcattgctctacgcatggccccgcgcatttgggcaggcgacgaggcacactatgctccctcaagcatctgctgttttgtggagcacacagataggtaagagtcccagctgcctgctcgctcagcatgctgt

SEQ ID NO: 4777 - DNA, 275 bp, Triticum aestivum
  Clone ID: uC-tsro9316034d10b1
tctcgctcattgcgctgtgcctaccgctactgacgcgcgtgacgaccgctaccgacgcagcaaagatgccggccgaggagctgcgccacggccccgtcggcgccttctcctggctcggcatcgccttcctcaccgtcaactcggccatggcgatccacaggtccaaaggcgacccgtccgcggtcggcttcgtggccttctcctacctcgacctcgtactgctcttctacttccataggaggttcgagagcgccgcgcccggctcaccggcgaga

SEQ ID NO: 4778 - DNA, 387 bp, Triticum aestivum
  unsure (1)..(387): unsure at all n locations
  Clone ID: uC-tsro9316034d12b1
tctaaaccattcagttcaaccaatttgagcagaattattacactaatgaagataagtgtgatcatggttgttgggctgatttttatcaacctatgcacctgcatgccaagaaatgtggcgaaccatgaatctcacgatacagtggtgccacagaaggaaatgcgcagtctgatgtctggcactgctggaaggaaccggcctccgagcaatgatcaccagtgcccacttggaacctaccctaattgccaagggatgtcccagaatactcaagaagcagctcaagatgttggaggaaactaaggcaaactaagggattatgagacggaatgaatcccccagtttatattgcttttacttncacgacggagtcatttggcatgaaatatg

SEQ ID NO: 4779 - DNA, 274 bp, Triticum aestivum
  Clone ID: uC-tsro9316034e01b1
tttcagatcttcgtcaagaccctcaccggcaagaccatcacgcttgaggtggagtcatctgacaccatcgacaatgtcaaggccacgatccaggacaaggagggcatccccccggaccagcaacgccttatctttgctggcaagcagctggaggatggtcgcacccttgctgactacaacatccagaaggagtccacccttcaccttgtcctccgtcttaggggaggcatgcagatcttcgtcaagaccctcaccggcaagaccatcacgcttg

SEQ ID NO: 4780 - DNA, 281 bp, Triticum aestivum
  Clone ID: uC-tsro9316034e02b1
tttccgccgcgccggccgccgccgggaagggcggcgcgaagacagtcgccaatctgcccaccaagccgcctcctcctggtcaggctgctaatgagtctcgtggtggtggtccaccctcccgtggaggatatgggcgcggtgaacgtggctcaggcagaggtggacgaggagggtatggtcagaatcgcgactacggcagtgaagacacaaatggctacaggggaggttatggtgccagaactggaggtgaggaaggcgcccaggatagagagagggcccct

SEQ ID NO: 4781 - DNA, 327 bp, Triticum aestivum
  Clone ID: uC-tsro9316034e06b1
tgtaattttctgagggattcaaacccctgtacatcaggacaaagggaataagactatgggagattgggaagcaccccgttgtcacctttggttagaatatgcttatgtgcaagcttagatgcaaaaaagccgcatcctgagtctcttttgtagtcgaccctttccctagttgactgtcgatgaaccgttgtcatttatgagtccgatgaaccgttgtctttatcttttgacaatttttatgtcgttgctaccatttctgaatgtgaacagcatggatctgtgtccagtttgctttaatctgtgcactcgattgttttttccctctta

SEQ ID NO: 4782 - DNA, 438 bp, Triticum aestivum
  Clone ID: uC-tsro9316034e07b1
ttttgcagcttcccattcctcgccgccgccgccgcttcgtacccgctcgaagccgacccgaccatggcggacgtcgacgttgacacggaggtggccgtcggcgcgcagccgaagaagaggacgttccgcaagttcagctatcgcggcgtggatctcgatgccctcctcgacatgttcaccgacgaccttgtccagatgttccccgctcgcgcccgcagaaggttcaagaggggtctcaagaggaagcccatggcgctcgtcaagaagctgcgcaaggcgaaaaaggacgctcctgctggtgagaagcctgagccagtgaggacacatcttcgtaacatgatcattgtccctgagatgattggcagccttatcggtgtctacaatggcaagacctttaaccaggttgagattaagcctgagatgattggccattacctt

SEQ ID NO: 4783 - DNA, 426 bp, Triticum aestivum
  Clone ID: uC-tsro9316034e08b1
tcttgcagcttcccattcctcgccgccgccgccgcttcgtacccgctcgaagccgacccgaccatggcggacgtcgacgttgacacggaggtggccgccggcgcgcagccgaagaagaggacgttccgcaagttcagctatcgcggcgtggatctcgatgccctcctcgacatgtccaccgacgaccttgtccagatgttccccgctcgcgcccgcagaaggttcaagaggggtctcaagaggaagcccatggcgctcgtcaagaagctgcgcaaggcgaaaaaggacgctcctgctggtgagaagcctgagccagtgaggacacatcttcgtaacatgatcattgtccctgagatgattggcagccttattcggtgtctacaatggcaagaccttcaccaggttgagataagcctgagatgattg

SEQ ID NO: 4784 - DNA, 395 bp, Triticum aestivum
  Clone ID: uC-tsro9316034e09b1
tctctctctggcaacgccagcccctctgcagaggacctgacatccattcttgagtcagttggttgtgaaattgacaatgagaagatggaactcatgctgtcccaagtgaagggcaaggacatcaccgagctcttggctgctggtagggagaagtttgctgcggttccatctggtggtggtggtgtggctgtttcagctgctgcccctgctgctggaggtgctgctgcccctgcagctgagtcaaagaaagaagagaaggtcgtggagaaggaagagagtgatgatgacatgggcttcagtctgttcgactaagttgtggggcatcttgtgtctgaagtatctatacttggccaggaaactagagtcaatgatgttttagcccttatttagctgag

SEQ ID NO: 4785 - DNA, 489 bp, Triticum aestivum
  unsure (1)..(489): unsure at all n locations
  Clone ID: uC-tsro9316034e11b1
tctcccgacgctcaagcccccagacgccgcagcgccgccactccacccgcagcggcaaccatggcggtcggcaagaacaagcgcatctccaaggggaggaagggtagcaaaaagaaggccgtcgatccgttcaccaagaagcagtggtatgacatcaaggcgccgctgctgttcaccagccgcaacgtcggcaagaccctcgtgtccaggacacagggtaccaagattgcctcagagggtctgaagcacagggtgttcgaagtatctctagctgatcttcagaacgatgaggaccaggcctacaggaagatcagactccgtgctgaggatgtgcaagggatgaatgtcctcacaaacttctggggcatggacttcaccactgacaagctcaggtctcttgtgaggaagtggcagacactcattgaggctcagtggatgtgaagaccactgacaactacatngctcgcatgttcaccattggcttcacga

SEQ ID NO: 4786 - DNA, 487 bp, Triticum aestivum
  Clone ID: uC-tsro9316034f01b1
actgtcacctaccccgattccccttcccctgtgcgatcgatactctctagggttcatcggcggtcacaccaagcaaggatgactacttcaaggcgtcttgctgacaggaagagtgcgaagtttcagaagaacgtcacaaagaggggctcagtgcctgaaactactgtgaagaaggggaatgactatcctgttggacctatcgcgcttggattcttcatctttgaggacataggatcatccttgtttcagattatcaggacggatactagtggtgggacggcttaatatcaagctgaaaacaagacgatcattatcagagatttattttatccatgtgtctgggacgcaatatcatatctgtaccctgtagcaaacttcaaccctgatgatgttatgtagagatttaaatcttgtgcagtgtgcgattacctgctgatactaaaaacctagtgtaaactagaaactaaatggtgcaagtacgaacttt

SEQ ID NO: 4787 - DNA, 225 bp, Triticum aestivum
  Clone ID: uC-tsro9316034f04b1
tttcacgcgtccgaaaaaaaatctttctagaaaaggatatgtaaaaacaaaacaaaataaaacaaaataattatgccacaatttgatcaattttcattttttaatcaagtttcatggtttctttttttttttataaatttttatttttttattacttatttttttttaccaaaagtttgttacaacttaaaatttagaaaaaaaaaaataatagttaataataat

SEQ ID NO: 4788 - DNA, 359 bp, Triticum aestivum
  Clone ID: uC-tsro9316034f09b1
tcttggcggcgcgcgcataggaggcgaatcagcagcggaaccaagccgccgacgccaccatgggtatctcgcgtgactccatgcacaagcgccgggccaccggtgggaagcagaaggcttggaggaagaagcgaaagtatgagctcggccgccagccagccaacactaagctttcaagcaacaagacagtgaggagggtccgtgttcgcggaggtaacgtgaagtggagggctctccgtcttgacactggtaacttctcatggggtagtgagtgctgtgacccgcaagacccgtctctggatgtggtttacaattcgtcaaacaatgagcttgtgaggactcagacccttgtcaagaat

SEQ ID NO: 4789 - DNA, 388 bp, Triticum aestivum
  unsure (1)..(388): unsure at all n locations
  Clone ID: uC-tsro9316034f12b1
tcgtaccaccaacaaggactattcggacttggcccagacggaggacatcaacgcgggcgtcttcgccaccgacgacttccgcatgtacagcttcaaggtcaacccatgctcccgcgcctacacgcacgactggaccgagtgccccttcgcccacccgggcgagaacgcgcgccgccgcgacccgcgccgcgtgccctactcctgcgtcccctgcccggacttccgccgcgacccgcaggcatgccgcaaggggcgacgcctgcgagtacgcgcacggcgtcttcgagtcatggctccacccggcgcaataccgcaccaggctctgcaggacgaggtccgatgcccccgccggatctgctttttcgcgcacggcgccgncagctcgggg

SEQ ID NO: 4790 - DNA, 301 bp, Triticum aestivum
  Clone ID: uC-tsro9316034g01b1
actgtatgagctagcaaactcacacgagctagcaaaccagcccacacgagctccatcggatggggtccttcgccagagctgcgcgcttcctggtgctcctccagatcgtactgttcgtcatctccgacgtgctcatgagcgggcccgtctgccatggagcccgcccagggatcggtggtggagctctcgatcctaatcgtccgacggatacagtgccgcctggtgacccctacaccggtcgtctgtgcagcagcttgtacaggtgctcaccaagtgatcagacctgatacctcgagaaaca

SEQ ID NO: 4791 - DNA, 435 bp, Triticum aestivum
  Clone ID: uC-tsro9316034g04b1
tgtaggcaagggcaaagggcgctgaggggtggaacgcgacgggcgagtttttccgtggctcgtgacgagtggaggaggcaccctatggtggggaaccagctgcgccacgccactccggggctaggcatcgccatcgtcgcctttgggatctaccttgtcggggaggccgcctacaaccgtctataccgacccgccggagacaaccaccactagatcttccccagaggtaaagtagatggagcaaactgtaccgaagcaccaatgttgatcttttccggattgatctcataacgcctgcatgaccaccttgtaattcgcgatcaggagacgtgctggtggttcaactagggttcctggaacgcgtgttctttaaatctgatactattttgagggtatacttggcatctggacatggcattgattatattttttttg

SEQ ID NO: 4792 - DNA, 462 bp, Triticum aestivum
  Clone ID: uC-tsro9316034g05b1
tctcacgcgtccgggccgtgttcctgctcgtgcaggggctggtgtacctcatcctcaccaactcctccgacgtcttctccaagagcaagaggctccggtccctcagcttccggcccatgcggtccatgagcgtgcgccgcgtcctggcgccgctctccgacgtccccgtcggcaccgacgacgactctcctttgccttcgtcggcttcttcgtggtcgtcgcgccgctggggtagccgcaaagaggattgagcagcttggagtcagcggctggttagttctgacaccaaatgggtagatactagcgagcttgataattctgttctgaactgtcctgggtttgttatcggggtttgaccgtttgagatttaagaatggtatttgttaaaaaaactcaacatgtaaatcaggttgggtggggccttgtacatatgttcattgatttgatcgggatgatgaatta

SEQ ID NO: 4793 - DNA, 321 bp, Triticum aestivum
  Clone ID: uC-tsro9316034g12b1
tttctcccccgtcaaggactattcggactgggcccatactgtggacatcaacgcgggcgtctgctccaccgacgacttgacgatgtacagcttcagggtgaacccatgctggcgcgcatacacgcacgactggaccgagagccccttcgcccacccgggcgagaacgagcgccagttcgatccgcgccgagtgacatactcctgcgtgccatgcccggactttcgccaaaaccaataggcatgccgcaagggcgacttctgcaagtacgcgcacagcgtattagagtcatggctacaccccgtgcaataccgtaccaagct

SEQ ID NO: 4794 - DNA, 154 bp, Triticum aestivum
  Clone ID: uC-tsro9316034h02b1
tgtttgagaggcctttggacgtgcccctctcactgcgcctgtgactttctacactcgtgcggccagccttacatcaagtcgtgaacggtcactgagcaaatttgtctccttgttttggccacttttttctttccgtaaatttggaattattttc

SEQ ID NO: 4795 - DNA, 349 bp, Triticum aestivum
  Clone ID: uC-tsro9316034h03b1
tgtgtcatcttcgacagtcgagcttacagcattacgaaggatgtcttgcagctgtggatcaagctgcggctgcggctcaaactgcaactgcggcaagatgtaccctgacttggaggagaagagcggcgccaccgtgcaggccaccgccgtcgttcttggcgtcgggcctgcgacggtgcagttcgaggaggccgccgagtccggtgaggccgcccatggctgcagctgcggcgccagctgcaagtgcgacccttgcaactgctaaggtgcaagcggtcgatgcgcttgtggtgattgtgccgtgtgtgatcgagtgcgaataatgaaaccggccctggccgtctggttg

SEQ ID NO: 4796 - DNA, 64 bp, Triticum aestivum
  Clone ID: uC-tsro9316034h04b1
tccacgcgtccgatcgactattggcgtagtcaacaaaatcccggctcatgtacgagcattcgac

SEQ ID NO: 4797 - DNA, 138 bp, Triticum aestivum
  Clone ID: uC-tsro9316034h06b1
tttttacggtttgctgttgttggtcggatattgagtttaatcttttcttgttgggaataatccaccacccaaggggatcaaggtttgtagaatattgttgtttgttcaaaggctataataaaaagtgtttctcttttt

SEQ ID NO: 4798 - DNA, 385 bp, Triticum aestivum
  unsure (1)..(385): unsure at all n locations
  Clone ID: uC-tsro9316034h11b1
tttagactagaggccaagatcgccgattttggcttgacgaaagcctttgactaccacaacaacacccatcttttcacgaacacgctcgcttttacccccgggtacgttgatccacagtaccaggccacgatgcagccaacgaccaagagtgacgtgtacagctttggagtggtgctgctggagctagtcaccgggaaaccagccattctttcggacccagagcccacaagcatcgtccaatgggcaaggcagcggctggcgcgcggcaacatggagggcagtggtggacgcgcgaatgcagggtggttatgatatcaaggncgtgtggaaggtggcggatattgcactcaaatgcaccgcaaggggtcaacacatcggcccacca

SEQ ID NO: 4799 - DNA, 317 bp, Triticum aestivum
  Clone ID: uC-tsro9316039a01b1
tttggttatgtatgttgccggcaaagttcctgatgaggtgcaggcaaagcagaggcagctgaaagccattctgaataaactgaccccacaaaactttgacatgctttttgaacaagtgaaagaggcgaacattgacaatgtgtcaactcttactggggtgatttcacagatatttgacaaagcattgatggaaccaactttctgtgaaatgtacgccaactactgatcccatttgtctggtgcactgtcagactttagtgaggacaatgaaatgattacattcatgagactgcttttgaccagtgccaaaaggagtt

SEQ ID NO: 4800 - DNA, 179 bp, Triticum aestivum
  Clone ID: uC-tsro9316039a02b1
tggcttgcgaagggcaagaagaaagaaactgaggcggagcaagggcagccaaagcagcagcgagccacaccgaacaagcggacgccacaaaacccggacacgcgactgggagacgggcaagaggagaacatcgaccaagggacaagcccaaccggggagacaccacagaaagaccaaca

SEQ ID NO: 4801 - DNA, 122 bp, Triticum aestivum
  Clone ID: uC-tsro9316039a04b1
agctcctgcccatggtcccctgactcgccgagggatcacggagccgctgtgatgcagggggatgcactggcgcctaccgcgcccttgcacctggcacatccattgcccctccctgctcattc

SEQ ID NO: 4802 - DNA, 501 bp, Triticum aestivum
  Clone ID: uC-tsro9316039a07b1
ttttctgctccaagtcaaccaaagttggagatatcattaccgtagagaacaagctgatcacggtgaaacctgaaaccagagtcctgaaagcaatgcagctgatgacagaaaagcgtatcaggcacatcccggtgatcagcggcacggagatgatggggatggtctccatcggcgacgtggttcgcgcggtggtcagcgagcacaatgaggagctgaaccggctcaacgcctacatccagggtgggtactaggacccagccgttttgcagggcgtccctttgatgtgaactctacaataacgaccagggtgatgatgacgaaataggccgtgtttcttcgcggacaatggctgttgaacttgaatctgcgtgtgtgatgttttcctgcttatttagtgcatatttccgtggccgcgcgccgccgggtgcttgtttttggagcgtatagaccatccatcttagctgatggtgatagacgcataataaagcttgggagtgaccc

SEQ ID NO: 4803 - DNA, 303 bp, Triticum aestivum
  Clone ID: uC-tsro9316039a08b1
ttggtgccgtcgtgagggaattcttttttaccccttttttttgactttttcatcgatgcaatttgtaaagtccggttgaatttatatgctgacttgtgtgcgaggaagggatgtttgacccatgtatagcttctggtagctgcagccgatgattctttcatatgttgttgaccgatctgctcaccgccgtttgctatgtataattcaaagagctaattgagtgctgtactgttcactcctactcaaggttgagtaagagtaaccccgcgtacattttagtgaactatacaataactaccaaag

SEQ ID NO: 4804 - DNA, 100 bp, Triticum aestivum
  Clone ID: uC-tsro9316039a09b1
tgtgtctgcccacgcgtacgcccacgcgtccggccacgcgtccgaaaaaaaaaaacacaaacacccaaaaaacaaaaaaaaaacccaaaaactccacccc

SEQ ID NO: 4805 - DNA, 95 bp, Triticum aestivum
  Clone ID: uC-tsro9316039a10b1
cccacgcgtccgtccacgcgtccgtccacgcgtccgtaaaaaaaaaaaaaaaaaaaaccaaaaaaaaaaaaaaaataattataactctcttctac

SEQ ID NO: 4806 - DNA, 474 bp, Triticum aestivum
  Clone ID: uC-tsro9316039b01b1
tttgtttctgctactggtgctgcagcaatttgttcataacaggtggccctcacggaccgtctgaaagctggagcagtctgtgcatctgcgaagcagctcgaaacaaagaaatgaatccttgccaggaactcaaaagacgcagaacatgtcggtcgtagtctagttataccgaatttagcaacaaactgaacgagcaggtgatgacggtaaaccggatgcttaggattgagaggtgtttcagtctggaggcgtggagtgaagtaggaagagtgtatagcaacagtacataatctcagagcagctgttaatgttaattcatccatcctattattgattgattccaagatagtgtagtacatatggaataaattcggctgctcttgccatcatctttattgttgtcagctccggtagaaaagatcgtgttaacaaaaaggcatgaaattatggaataagttattggttgttgccatc

SEQ ID NO: 4807 - DNA, 81 bp, Triticum aestivum
  Clone ID: uC-tsro9316039b02b1
tggctgcctctacgggtgcagctagaatctgagcattacctgtggccctcacggcccctccgaacgctggcgcagtgtccg

SEQ ID NO: 4808 - DNA, 390 bp, Triticum aestivum
  Clone ID: uC-tsro9316039b03b1
tctgtttcgcgtgggggatatcccagcaagcgtgcctttgcctactttgccctgagtggtcggagatacgcatatgcatcactggtgcccctgctcgtcttgaagcctgtgtcgagcatgtcagcaagtaaggatgtgcttgcacttgcttccctcgtggttgatctatccagcattgaacccggtagcacagtgactgtcaagtggcgtggaaagccagccttcatacggctactgacagactatgacatcaagctggccaacagcctagatgctgcatgcctgcaccacccagatcaagacactgatcgtgtgaagaacccatagtgactgacggttattggagtctgcactcatcttggtggcattcccctttccaactctggagac

SEQ ID NO: 4809 - DNA, 146 bp, Triticum aestivum
  Clone ID: uC-tsro9316039b04b1
ttccttctcgcccggaagaaaaaaaatcgcgttcgtggagtttactcagacgcgtcgctaatatgacgtgggaaacatgtgataggttcggtgccataccgagctacttggaaatgctgcctggactcttacattagacttgaaca

SEQ ID NO: 4810 - DNA, 207 bp, Triticum aestivum
  Clone ID: uC-tsro9316039b05b1
ttgattttttgcgttctatccttgcaattttagctatcaaatctgattcagagatgtttttactcctcttttatgcatgtttatatgcccttttgatgaacaaaaaaaaaaaaaaaaaaaaaaaaaaaaagaaaaaaaaaaaaaaaaaaaaaaaaaataaaataaaaaaaataaccaaaataaaataaaatggggcggacctttaaa

SEQ ID NO: 4811 - DNA, 135 bp, Triticum aestivum
  Clone ID: uC-tsro9316039b06b1
ttgcattttttgcgttctatcctcgcaatttaagctatcaaatacgatacagagatgtttctactcctctttcatgcatgtatatatgcccttttgctggataaacaataaaacctaatacacacactgcttaaa

SEQ ID NO: 4812 - DNA, 499 bp, Triticum aestivum
  Clone ID: uC-tsro9316039b07b1
tttttgctcagcatcaagatacagcagcacctcccttctacctcgactgctttgcatacccacttccggatgcaaccgcaatcaaaggctgccacgaagatcaccctacttgccgtgggccccttattatggcaccgtgtcagctggaacctacaactgtttcatagcagggcggctggaccctcaacaccgactacagcatgctgtgtgtacggcaagaagttcaacgctgacgatgagatcgtattcaaggactgcgtccgacgcgcacgatgtggtcgaggtcagcaaggccggctacgactcctgcagcatcgacggcgccatcaacaccttcaaatctggcaacgacgtcatccccctcagcgccaccggcacccgctacttcatctgcggcatcactggccactgcagccccaccgccgcggccagcatgaatgtcatgatcgacgttcgctctggctcctcttcgccttcctcacccatgccagccgcaagt

SEQ ID NO: 4813 - DNA, 365 bp, Triticum aestivum
  Clone ID: uC-tsro9316039b08b1
tttctgtccacgcatccggactcatcgctgccacactgaaacgttgtctgagtccaattggcgcctgctggatgcacccttgtgaatggggggcgatatgatcaccgatattgccgtggccagcatgtgtggcaccgagttggcagtaacctactgcgtaaacacacagagcagaacacccctatgctccttaagcactaggtgcaggtggcctacgaaaaacagcgttatatatgagaggccgttcaagctcctatcaaccgtcccagaattgctgccttgataaactgacgcctcacactccagcaggatttacctgtgccgtacgaactctaagtgtagcacaaccgtcgtccttcccaggg

SEQ ID NO: 4814 - DNA, 107 bp, Triticum aestivum
  Clone ID: uC-tsro9316039b09b1
ttccacgcgtacgcccacgcgtccggggacgcgtccgtaaaaaaaaacaccacaaacaaaaaaaaaaaaaccacaaggatcaacaaaccctacaacgagagcggcaa

SEQ ID NO: 4815 - DNA, 117 bp, Triticum aestivum
  Clone ID: uC-tsro9316039b10b1
tttttctgccgacgcgtgggcacacgcgtcgggaggcgcctatgacaaagacaacaccgatactgccacaggaagaccacgaggaggaggcagccgatcagccaggcgaggcacacc

SEQ ID NO: 4816 - DNA, 472 bp, Triticum aestivum
  Clone ID: uC-tsro9316039c01b1
ttggatcaatcctggagatgctttggtctcacgtgctcctgatattgcaaaatttcaactggaaatagatagttcatctggcaactttggtgcaacatcttctctccatagatgtgcatctgatgacttccatttctcgttttggttaggagttcccacgatgggatggttacaaacttaaagtccaagtgactataaaagaaacaacaaaaacatagtaaaatgtataaaattacgcagctttccccccaccactggtggggggttttggagctgaccccttaggaaaacaattcttcgattgtttgctagatacgttatgagacggacctgtttaaggggccgttccatttctgaagctaacaaactttaagtcgttgatttgcctgcgatttgaagacgtcgtagctgcatctgctctggttaatttcagtgcatttgcggctgtttttattgcaaaaaacataactcc

SEQ ID NO: 4817 - DNA, 408 bp, Triticum aestivum
  Clone ID: uC-tsro9316039c02b1
tggttctctgccgccgccgctcccagatcgcggggtcccgccccagtcgccgtagccgctcccatatcggggcgagcgaggaggatgatgggctggtccgccccggtcgacggcgccgctgccaaatcggggcgagcgaggatcgtcggcgtcgccgccagacctctgcggaggcgcctgtccctctgccgggcgacggggatacgccgcggcacggccgtcggccccccgccccgcgcgagtcgctgccgtaggatatgcttggggagatccttctccttctggcaccgcagccgtcgtccggcctgctggcgcccttggtctccaggcgctggcgaggcctttccaccgaccccaacttcatacgtcagtttcaagcccgccgcaggagctggaagccgcccctgc

SEQ ID NO: 4818 - DNA, 95 bp, Triticum aestivum
  Clone ID: uC-tsro9316039c03b1
tgctctcaaaatgtcagtctggtatagaggggacgttcttgtcatagagacccattagaccgaaagcctgccagggtatgggttggccgcgcagt

SEQ ID NO: 4819 - DNA, 448 bp, Triticum aestivum
  Clone ID: uC-tsro9316039c04b1
tggttctgcgtggcttctcggagaagcctaggtacaccgtgaagcccaccaagtacgccggctgaccgaggagcggtggcgcaccccgcttcatccaccagcctcgctaggttgggatgccaagcttaaagaatcgagcagatcctgcgccttttctgcctgcagtgatgcattgctctgccttcttctaatacaccatctgtcccaaaaataaatgtctcaaacttaatacaactttgtactagccctaatacaaagttgagacacttatttctagactgacggagtagtcagtattggcgtccgcttgtatattatattaagtagaaacgaaatgaccttagaaaaaggcatcaaaatgcaacccgatgtttagtgtgagttgcctttgaagatatgttgtgcccagtgcgctggacaagaaatgctagtagaatgcaccctcgtt

SEQ ID NO: 4820 - DNA, 174 bp, Triticum aestivum
  Clone ID: uC-tsro9316039c05b1
tttctttctggtaggagggatcacacttgcggtcctgcctgctttatttcatggcgttgacccaagatcatcattacatattggagaaggtctgctgctttagttggtggatgagaagaaccaaaaccggtatttttcgttgagggctccaaaaaagaaagaataacaagtagg

SEQ ID NO: 4821 - DNA, 359 bp, Triticum aestivum
  Clone ID: uC-tsro9316039c06b1
tgctttctaggacccccaagcatacatacggcgcgtgtcttttgggtactttgctgatactgccggaggccgaacgattggcaaaaaggtcgccgagaagattctgaacaaaagagagccggagctctacaagcggggagggaccctgtcccagctgctgcagaatggtcgccccccactaaaccaagttgctaccaactggtcctcggaagagaaggaccactgcctgcaggagaccgagaagtcgttcgcctactcaggggatctcccacgccagatttttacctgaaccaaacacgatctgtgatacgtttcacgttaaacattgtgaatacccagccctgtccgagcacccgggg

SEQ ID NO: 4822 - DNA, 98 bp, Triticum aestivum
  Clone ID: uC-tsro9316039c08b1
tttttaccaaacatacaaacacacataaaaaacagagagacagacaaaaagaaaaaaaaaaagggcggccagaataagaaggaaccaaagcttacaaa

SEQ ID NO: 4823 - DNA, 480 bp, Triticum aestivum
  Clone ID: uC-tsro9316039c09b1
ttggaggatatgtacctgaagccgctcaaccttggtctcattgctgcgtactactacatcagctacactaccattgaacggttcagttcaatgctaactcagaagaccaagatgaaaggtctcctcgaaattctagcttcagcatcagaatgcagagcttccaagtcgcccaggcgaagaggaatacattgagaggctagtccgtcaccagaggttttctattgacaaacccaagtatggtgatccacatgtcaaggcgaacgccctgctgcaatcccactttgcaaggcacacggtggtagggaacctggcagccgaccagcgcgagatcctcctttctgcccataggctgctcctggcaatggttgatgtcatatctagcagtggatggctcactctggctctgaatgcaatggagctgagccagatggtgactcaaggcatgtgggatcgtgattctgtgctgctccaacttccaca

SEQ ID NO: 4824 - DNA, 79 bp, Triticum aestivum
  Clone ID: uC-tsro9316039c10b1
ttggctggccacatatatacctgacgccgatgaagcttgttttgatagggttggtcttcctcatcagatttactaccat

SEQ ID NO: 4825 - DNA, 394 bp, Triticum aestivum
  Clone ID: uC-tsro9316039c11b1
tttctgttcacgcgttcgttcacgcgttcgttcacgcgttcgaaaaaaaaaacaaaaaaaaaaaaaaaaaaaaaaaaaaaaaaaaaaaaaaaaaaaaaaaaaaaaaaaaaaaaaaaaaaaaaaaaaaaaaagaaaaattaaaaaaagtaaaaaaaaaaaaagaaaaaataattggggggggcggttttataggttcaaagtttacttcggggtgtttggaaggtattaacttttttttggggggacctaaattaatttaatggggggtggttttaaaagggggagacgggaaaaacctgggggttaccaaatttaatgggtttgaaagaattcccctttttgcaagttggggaaataaataaaggggccgaacgtttggccttttcaaaaattt

SEQ ID NO: 4826 - DNA, 307 bp, Triticum aestivum
  Clone ID: uC-tsro9316039d01b1
tggatgtttcctgtgatgattgtgaggataggtgggctgaggaggaagaagaaacacccattaagccagagactggctagaagagggcggctggaagcgtgttgaagacccctgtttctgacaagaaggccaagatcgcaacaccgtcaggccagaagacaggctacaagaagggagctgtccatgtggcgactcctcacccggccaagaaggcaggcaagaccccggctaccaccgagaagtcgcccaagtctggatgtgtggtcgcgtgcatgtcgtgcatgaagacattcaacagcgagggcgc

SEQ ID NO: 4827 - DNA, 355 bp, Triticum aestivum
  Clone ID: uC-tsro9316039d02b1
tggttatgcactagcttcaagaaggccaagactgactctgtctaataaggttctgacgttgaggatgatggccaggaggacgaggtgtaaatagttgatgagggaacagcagtggtgcaaaccagcgtttgctgattagggtttagcttgccatgacgatgtcctcattatgtaatgctatgtaaggagaatgtttagatgcgtactcctgggctgtggcatgctagagatgcatctgtttgactatcaacgaagaaaagctttaaaaccctcgactgcttttctttcttggactttcacatcatgtgtatacagtcatcatgatggcttgctattaatcgcgttttgttttgaa

SEQ ID NO: 4828 - DNA, 268 bp, Triticum aestivum
  Clone ID: uC-tsro9316039d05b1
tgttttctagcatcgactacccaagatcggagaggcgtttctgggagaatccgccgccacgtctgccagccaggtcatcggcaccctggccgccctgatacctcacgataacagtatccccatcacttctgagaagaaagggccgctgtcaaagctgtccgaatctatggcgaggcctacagccccgggctcttcaccaagcttctggaaaagaagagcgacaactacctaatcccctccgtgggatctggtggaatgaggtgatcca

SEQ ID NO: 4829 - DNA, 206 bp, Triticum aestivum
  Clone ID: uC-tsro9316039d08b1
tctttctggcacagcctcattgaggagtacaagctgtagggccttatacgctggatctctggtcaaatgaaccgggtgcgcaaaggagagccgccccgctccatgtgtaagaccaagggagcatcagggcaggcagcatgctatgacgctattggccgtactgccatggaagccatgacatggggtgtggcgacaattgcgacatg

SEQ ID NO: 4830 - DNA, 499 bp, Triticum aestivum
  Clone ID: uC-tsro9316039d09b1
ttctggaaagataagaacctgaaagccgaagaaagcgagttcttataggtgagtactactacttcagctacactaccattgtacggttcagttcaatgctaactcagaagaccaagatgaaaggtgtgggtgaaattctagctgcagcatcagaatgcagagcttgcaagtggcccaggcgaagaggaatagattgagaggctagggcgtcaccagaggttttctattgacatacccaaggttggtgctccacatgtcaaggcgaacgccctgctgcaatcccactttgtaaggcacacggtggtagggaacctggcagccgtccagcgcgagatcctactttctgcccataggctggtcctggcaatggacgatgtcatatctagcagtggatggctcactctggttctgaatgcaatggagctgagccagatggagactcaaggcatgtgggatcgtgaatctgagctgctccaacttcacacttgaccagggacct

SEQ ID NO: 4831 - DNA, 391 bp, Triticum aestivum
  Clone ID: uC-tsro9316039d10b1
ttttttctggtgtacgacacgctggagatcatcgagagggcgcacctcggcgacatggactacatcaagcacgcgctcaccctcttcaccgactttgtcgccgtcctcgtccggatcctcatcatcatgctcaagaacgcatgcgacaagtcggaggacaagaagaagaggaagaggaggtcctgaacgtgttgtcctctgcacatcgtagataccatcaccgtcgccggcgctactggttccacctccactgctaagtacttgtaggaattaagctggcgcagtaacttgtcgccgtgccacccttgttaattcgcgatctgggtcgtgtgaacctcgtgtgagttcgctgctgctgatgaagcttttgcagaccctgtctgcgttccgg

SEQ ID NO: 4832 - DNA, 87 bp, Triticum aestivum
  Clone ID: uC-tsro9316039d11b1
tcgatgaggtattttgtactcatggagcggcaaagtattataaggatatcacaactagcacccgatagcaggacctaatgggtactg

SEQ ID NO: 4833 - DNA, 402 bp, Triticum aestivum
  Clone ID: uC-tsro9316039e02b1
ttcgtttgcgcactcatcgtgatctcaaccaggcgcgcactcctcctcctcgccgtcgtcgtctccggtccaccgccgatccacgcgaccatgtcgtcgaagaggaagaccagggagcccaaggaggagaatgtcacccttggaccggctgtccgagagggagagcatgtctttggcggtgcttacatctttgcatccttcaatgacactttcatccatgtgactgacttgtccgggagggaaaccctggtgcggatcactggtggaatgaagggcaaggctgatcgcgatgagtcttcaccctatgctgctatgcttgcatctcaagatgttgctacacgttgcaaggagcttggtattaccgcactgcacattaagcttcgggccactggaggcaacaag

SEQ ID NO: 4834 - DNA, 76 bp, Triticum aestivum
  Clone ID: uC-tsro9316039e03b1
tttcttactcgtccgcccacgcgtccggttctagatcgcgagcggccgccctaaataaaatctccctggtttaact

SEQ ID NO: 4835 - DNA, 497 bp, Triticum aestivum
  Clone ID: uC-tsro9316039e04b1
tttagtgtgctctccctcccctcctggtcctggagccgcgactcatctgaaccctaaaccgtatatcccggcgcagcaggagcgagatatcctccagcaagcaagcatgagtcgccacccgagcaccaagtgggcgctgaggctggacaaggtttacctgacgattgatctgcccgacgccaaggatgtgaagctcaacttgaggcctgatggccatttcaacttctaggcaaaggcccctgctgatggcatgcagtatgagcttgaccttgagctctttgatgctgtcagcgttgaggagagccaagcggctgatgccccgagggctatatgctaccttgtcaagaaagctgaggccaagtggtggcctaggctgctcaagaaggaatgcaggccgcctgtgttcctcaaggctgactgggataaatggcaagatgaggatgatgaagacgctggatttggtgactttggtgatatggacttctcgaagctggaca

SEQ ID NO: 4836 - DNA, 251 bp, Triticum aestivum
  Clone ID: uC-tsro9316039e05b1
ctcgtccgaagaagattagacattaatagtcacttgtttgatggggtgtgatccacgagacaatgatcttgcgaatttcgttttcatgatatgggtcgcataccactaggtttagttggaaatcttcgtcaatccttagatacattcgctggaaaaccccattacgcatgttttgaccacacaacccggcggtgggactagaatgcacacccttgttgcttaacatgagatctttaaaactgatataaaaa

SEQ ID NO: 4837 - DNA, 344 bp, Triticum aestivum
  Clone ID: uC-tsro9316039e06b1
tttgttttcgatggtgtctcatgccccgttggaaactgttcatcttgtagcggcactttgctcgttgtccccttccttttggatcgatccggccttcggcggccatcaattgcgccggggtcgccgatgggttgcctgcaggcgagcctgataccggtgtcgtcgaccaggcacggaggaggaggcttgcctggagcgtaacttagctataatgctcggtcgatcctgctgcttcttggggggcaaggaaaaagattacaccgaggcttactctctacgaccgcaccaggctgagccagattatttccggtgacgcacaccatggatccccagacatttgtgag

SEQ ID NO: 4838 - DNA, 112 bp, Triticum aestivum
  Clone ID: uC-tsro9316039e07b1
gccggcaggcaccggacctggaaattcttgggttgacccactttgcttccaacgcgacacgagaaaaccaggggggggcccaatctctgactccgccgcacgccgcacgcac

SEQ ID NO: 4839 - DNA, 344 bp, Triticum aestivum
  Clone ID: uC-tsro9316039e08b1
tcttttgatcacacacacacactcacacacacacacacacacacacacacacacacatgtggcgttcgtttctgtagctattccggcacattggtgcctctgatctatcaactaatctgaaaaggttcggtttatcactctaaaacaaatagcactgacacaaaggatgccaaggacaaccttaaacctgatggtggattctctttctttgccactgctggaactgatggcaactactatgaatcgaaactggattatgattgacaacattaaatggtgtggcaagcatagccatttgctggtgttaggtccatattctagaatttggaaaaagcctacgtcca

SEQ ID NO: 4840 - DNA, 375 bp, Triticum aestivum
  Clone ID: uC-tsro9316039e09b1
tctgatcatcttaacaagtagtgtagcatagaaacttgatacaaataattagcaggaaaatgcccttttgtcaaaaaaaaaaaaaaaaaaaaaaaaaaaaaaaaaaaaaaaaaaaaaaaaaaaaaaaaaaaaaaaaaaaaaaaaaaaaaaaaaaaaaaaaaaaaaaaaaaaaaaaaaaaaaaaaaaaaaaaaaaaaaaaaaaaaaggggggggcccttttaaaaaaccaaattttacctcccggggcttgaaaaaaaaaattttttttaaaggggaacaaaaaaaaaataaactggccggtttttaaaaaagttgaaacgggaaaaacccggggtttcccaaattaaaaagctttaaaaaaaatcccctttttcc

SEQ ID NO: 4841 - DNA, 458 bp, Triticum aestivum
  Clone ID: uC-tsro9316039e12b1
tttgcttactagcagcagcgctctcttcttgctcttcgctatctagctccactttgctcgttgtcctctccctcttggatcgatccggccttcggcggccatgaattgcgccggggtcgccgatgggttgcctgcaggcgagccggataccggcgtcgtcgaccagccacggaggaggagctgcctgtagcgtagctgagctatagtgctcggtcgatctgctgcttcttgggggcgaggaagaagaataaccgaggcttactctcgacgacagcacaaggcggagccagataatttccggtgacgcacaccatggatccccagacatttgtgaggctctcaatcgggcagcttggcctgaggctcccccgcgcatgtgccagaaaggcttgccactgcgagatccggctccgaggcttcccggttcagttagctccggtgccctctgaaaattcttc

SEQ ID NO: 4842 - DNA, 164 bp, Triticum aestivum
  Clone ID: uC-tsro9316039f01b1
tggctctagggagttgatctgtattccaccatcacctgtgtcaggtttgaggagctcatcatggacctcttcaggaagtgcatggagccagagtgaaagtgcctgatggatgccaagatggacaagagcaccatccatgatgtcgagcttgatggaggttccac

SEQ ID NO: 4843 - DNA, 84 bp, Triticum aestivum
  Clone ID: uC-tsro9316039f04b1
ctgagggacgggctctcatagatgagaagggttccatttccgtgcttgatgttcgtttggcgccaagatgtatcgcagtgtaga

SEQ ID NO: 4844 - DNA, 303 bp, Triticum aestivum
  Clone ID: uC-tsro9316039f05b1
ttacttcaggtcttagattgccgttgcatggagtagacagtatgtcggcctttagatgttgaaggaggagggtggttcctttgtgtttacagcacttttaagttgataacttatgatcgtgttggtgaaaactatgcctttgtcacattttgctcctgttaagggaaagtgctactgttgtgagttttgttccccagtttgagatgaatttcccttgtcctgaaataaaacaaatacagaagagaatgataataactaagagtaggatgataattaaacagaaaaaatcaatcaactgcactg

SEQ ID NO: 4845 - DNA, 294 bp, Triticum aestivum
  Clone ID: uC-tsro9316039f08b1
tttccctgaaacaaaaaaaaaaaaaaaaaagggagagaaaaaaaaaaaaaaaaacaccaaaaatgcaaaaaaaaaaaaaaaaaaaagaacgcgaccaaacaacagaaacaaggggcgcccgccgcagaggacccaagctcgcggccgggggccagcaccaaagaagaaccgaaagggggcccccgaaagccaagcaaacggccgcaacttaaaaaccccgcgaacggggaaaacccggggggcccccacccaaaccgccagaggaaaaaaccccccttggccacagggggaaaa

SEQ ID NO: 4846 - DNA, 507 bp, Triticum aestivum
  Clone ID: uC-tsro9316039f09b1
tttcttattcctaggattcttgagcttgctgaagagctgtgcatgccgcttgctgccgtcaagtactctcgtgggatgttcatcttccccggcgcacagcctgctccccacaggagcttctctgaggaggttgatgtcctgaaccgctacttcggccacctgaagtctggtggcaatgcttatgtgatcggagacccagcgaagcctggccagaagtggcacatctactatgccaccgagcaacctgagcagcccatggtcaccctggagatgtgcatgactgggctggacaagaagaaggcctctgtcttcttcaagactcaagctgatggccacgtttcctgtgccaaggagatgaccaagctctctggaatctctgacattatccctgagatggaggtctgtgacttcgacttcgagccctgcggctactccatgaacgccatcaacggatctgccgtctccaccatccatgtgatccccgaggacggcttcagctacgcgagc

SEQ ID NO: 4847 - DNA, 424 bp, Triticum aestivum
  Clone ID: uC-tsro9316039f11b1
tttttggagaacaacaggagcaaccagcaggctcctccaccaccgccagggtacccgacggcggctgcggagcaggaccaggtcggcgggaagaaggggcgccgggcgagcaccaaatccaggggcgagaagggcttcatcgagggatgcctcgccgcactgtgctgctgctggatctgcgagatgtgctgcgactaaccggccggccggcgaggccgctgctggctggcacaagacctcggtgctatagtacccacgaggaggaggagcgtatgcgtatacagagagagaattgttcttaatttcagtgcccgttgttttaggctctatacagtatatactcctaagttgatgcatgcatgatcagtaccagtgtgagatatcgattcatgtatccgtgttgggtgcgatattcatgcacctc

SEQ ID NO: 4848 - DNA, 62 bp, Triticum aestivum
  Clone ID: uC-tsro9316039g01b1
tttggttctttcgctggggcggcacacgaggagacgggttgttatgctgtaccgtcgctgct

SEQ ID NO: 4849 - DNA, 464 bp, Triticum aestivum
  Clone ID: uC-tsro9316039g02b1
ttgtttctcgtccgcccacgcgtccgcccacgcgtccgccctctcgtccgcccacgcgtccgtgctcacttactcacacgcaggtttcggcgggaggaggatcgatggcgttcatgcggtaccgtgcgctgccgcagggggaggtgaaggcggaggagttctgggcgtggctggggcagttcgacgcggaccacgacggccggatcagccgggaggagctgcagcgcgcgctgcggagcctcaacctgtggttcgcgtcgtggaaggcacggggaggggtgcaagccgcggacgccaaccgtgacggcgccgtcggcagggaggaggccggcctgctcttcgcctacgcacagaggcagctcggcggcaagatcacccagctcggctcctactgataagctgggcatgtattaacctgctgctgtaccaccatcgtgtgtggagcacgagattttttttttccc

SEQ ID NO: 4850 - DNA, 500 bp, Triticum aestivum
  Clone ID: uC-tsro9316039g03b1
agcctagggtttcctcccgccgcccgtccgccccacccgccgccatggcccgccgcagcggaggaggaaggtcttcccgccctgctccacgtgctgctccagtgagaaacccaccagcgccagcccgtccagctcctccacctgctaccacccagagcagcggtggtggtatcatgagcgggattgggtccaccattgctcagggcatggctttcggtactggaagtgccatggcgcacagggctgttgatgctgcgatgggtccccgtaccattcagcatgagactgttgtcggtgaggctgctgcatctatgactccaatggacaatgctgctgatgacaagtgtggcaacccttccaaggccttccaagattgcatcaaccactacggaagcgatatcagcaagtgccagttctaccttgacatgctgaacgagtgccgccgtggaggagcaactctctaagctactatctttgcttgattggagcttaattgggca

SEQ ID NO: 4851 - DNA, 427 bp, Triticum aestivum
  Clone ID: uC-tsro9316039g04b1
tttgttttgcctagggtttcctcccgccgcccgaccgtcctacccgccgtcatggcccgccgcagcggatgaggaaggtcttcccgccctgctccacgtgctgctccagtgagaaacccaccagcgccagcccgtccagctccttcacctgctaccacccagagcagcggtggtggtatcatgagcggtattgggtccaccattgctcagggcatggctttcagttctggaagtgccatggcccacagggctgatgatgctgcgatgggtccccgtaccattcagcatgagactgtcgtcagtgaggctgctgcatctatgactccaatggactatgctgctgatgacatgtgtggcaacccttccaaggccttccaagattgcatcaaccactacggaagcgatatcatcaagggccagatctacc

SEQ ID NO: 4852 - DNA, 447 bp, Triticum aestivum
  Clone ID: uC-tsro9316039g06b1
attttccttctcgtacgctttgtcaaccgaacaaaccggcttactaaaagcaaatgagcggagcacctacacaggcctagggatgcttatggtgaatccacgcacataaacacaatggcggcgccggcgatgtatcctagggcgaccaggaaggcctccgtggacggccgggcgtggcgagtgctgcggatggaggcgctctgggcgcggaaggggagcgcggcgcaaaggcttcgtctgctcaagacgctgcggcacaggcgtatgggcggcctcggcctcggccacggcggccggcgcaacgaccggctgcactacggctagcgggagttctacatcgacgagacgccggcgtttcggttccgcaccccatccgcgcgcgtgctccggttcatcccctgcatcgcgccctccagcccggacaccccctgcgtctacggtgacgac

SEQ ID NO: 4853 - DNA, 468 bp, Triticum aestivum
  Clone ID: uC-tsro9316039g07b1
ttctgctttcctctaccttgcaaggaagctctcaggggacatgaccctccggttcgtcgaggagacggccctcctccccgccgacgtgaccgtcgacctcgccgcgcagcaacagattgaggcagagatagcagctgcggcggcaatgcccctcccggatgacgatgatgacaacatcatggactgagctgatcaattggaggctgtgcctagtttagtagcagcatatatagtttcaatcaaactcttataagaagtgagacttctgtatccgtatcagacattcagtaggcatctgatgacgatggtttgtgcgatagttccatgtttttctcagtggtagttgatctgagatttctttgtcgagtgcttgtcaaaaccgaacgaatgtgaaggttaatcggtttctttaccattctggagtgtggtgttcattagaaaaatctaaagaaaaatccactttttgct

SEQ ID NO: 4854 - DNA, 289 bp, Triticum aestivum
  Clone ID: uC-tsro9316039g08b1
tgtttctgaggcgcacggccacgcacggaaggcctaccgggacaagagcgggcaccacggccacaagacagcacaccacaccgggcacgggagcgggcaccaccacgggcagcagcaccacgggggccagatcagcggcggcgcgcacgggccccagcgggacaagggaaatggcgcgcgcaggaactcagccgagcaagtgcacgcccatgacatgccagaggcgaacactaacgatgctctccgactgctaccagaagaagaacgatctatgcacggtgagagatac

SEQ ID NO: 4855 - DNA, 210 bp, Triticum aestivum
  Clone ID: uC-tsro9316039g09b1
cggacgcgtgggacaaaaaccgacgaacgaactaaagtagttaaggagagaaaagaggtgccaataaagctggctaggatagataagatatatattgcagttacaagaaacgacagcttatctaacgacagtggctgttgttgtgagaaggaagccccagtacgtgtactaatgcgacagaaatgggggggggcgccttgtgggttgcct

SEQ ID NO: 4856 - DNA, 453 bp, Triticum aestivum
  Clone ID: uC-tsro9316039g10b1
tttcttcagaacgtatgcacacgaaccgacgaacgtactacgtgtttggcgagctatgtggtgccgattaagctggctaggttagtttgtttatatattgcagttcaagaaacgacagctaagctaacgacgtggcagtgtgtgagtaggaagcataagtacgtgtactaagcgacagcgattgacagtagtgactagtgaatgagtggatctgtgaatcatttttgtagatgtagagtcctggaatcaggattatgcaactatgattgggtgattggtacactgattgccagcaaaaaaaatgtgatgaaaacttttggccggtggtcttaacaagtagaagtagtatagtatatttttgacagttggtggtctaactagtaaatttaccagttgccccacagctgtcggattatgagtcggccggcggcggagccgtccatccgggtaaaa

SEQ ID NO: 4857 - DNA, 347 bp, Triticum aestivum
  Clone ID: uC-tsro9316039g11b1
tgccgtctccgacactcctccgttgccggcgccatgatgggtcgtgtgatccgcgctcagcgcaagggtgcggactccgccttgaagttccacacccaccaccgcaagggccccgcccgcttcatgtcgctcgacttcggccagcgcaactggtacctcaagggcgtgacctccgatgtaatacacgacccgctgcgtactacgccggtcgccaatgtgaccttccgccaccctttcacgtactagcaccagacggagctcttcgttgccgcctagggtatttacacctgacagttcgtctactgcggacgccgatccaccctctccgttagtcacatgctcccgct

SEQ ID NO: 4858 - DNA, 492 bp, Triticum aestivum
  Clone ID: uC-tsro9316039g12b1
ttcttcaataaggcacgggcacgcattttcaatggttccattcctgcagatgttgtaggcccaagtgatttaggaggtttgtcgattgccagaaacgaaccggtgaatgttgagccttctgttgatgagaacaagggttgcacattcaatagccgttccagggttgctgtttttaaggacactgaaaaagatcgtagtgatcctgactacgatcgtaattacaaaaggtatgttaggccccccgtgcctgactatggtgtgagcccaggcgccttcaattttgccgtgcctcagtttgtgcagtatggtgttggttatatgcagtctcctagcatgccgagaaaccaaccttctgtgtactttggtcaacctgatttatcgatgggatcttctggaactgctgtttacccacagtggcctaccccagcaatgatgtacccccattgctatgacaatcttggccatgtgatttctcatgttccggtgtaccag

SEQ ID NO: 4859 - DNA, 237 bp, Triticum aestivum
  Clone ID: uC-tsro9316039h01b1
ttgtttttcgaagaaaatgagagacagaaacttgccattttcacggcacttgcattctctcagaaattatcaggtctgccacctgaaactgtctttcagccattgcttaaggacaatcttgccgccaacgggatagtgctttcattcattactgagttcttcaaggaatatctgaaggaaaatagtctggatgatctgatcgcacttttaaagaaaggcaaaatggaggacaattta

SEQ ID NO: 4860 - DNA, 265 bp, Triticum aestivum
  Clone ID: uC-tsro9316039h03b1
ttcgttcacatatgtgtatggggccgcaagctatggaatgatatgctgccgagctcctgacggagaaagtaggccaaagatcgcgcatatccgctagaaggaatatagagtgcgatctagacaccccacctacaaataaacggaaaggccctccagcaagctgttacgaggtggagtgcttcagcctggctcatactgcagcccaaactgtcttcgactgcacgggccggggatgatctcctcagactcttttctgctttgctga

SEQ ID NO: 4861 - DNA, 390 bp, Triticum aestivum
  Clone ID: uC-tsro9316039h04b1
tttgtttcacatatgtgtacggggtggaacgctatcgatggagagcttacgcgcacctgctggaaaaagatgaccaaagatgtctcatatgcaccggaaggaatgtcatgtgacgatctatattgcccacctacaaatagactgtaaggcactacacctagctgctacgaggaggagctgcttcagcctggctcatactgcatcccagactgactatcacttgacctgccggtgttgatctcactcagtgtatttgctgctctgctgattgctacacacattggcctctatctcgagtctaccacctgctggcctatagtgatgcttttgtcgtcctggcgatgggtatcatatatccttatccatgctattctcatccattgactgaac

SEQ ID NO: 4862 - DNA, 414 bp, Triticum aestivum
  Clone ID: uC-tsro9316039h05b1
ttggtatatgtagcgcttgtggttttcaccgggagacatggctaagccagctttctccttggtgaagtgtgtgtgcgtgtgagtttccatggtgtgtgttcttgtcttcttaagagaagaagagagaaaccacaggagagttgtgcgaggcagctcgaggaagaagaaggttggcgctgcaagaggagcggcgccaacaattggtattcagagccttgtcggtccggagcggtggcggcgcggcaaactccatgcgagatggaggccggcggcgcaaggaggaggtcggtggctgctgctacggtgcgaggccgttatgaggaggagatggtgcgcggtgatcgtcgtcgtgaagtcgtcgtccgcgttaagagaaggccgcttcatacggcatgacaccgaggtgatcggcgt

SEQ ID NO: 4863 - DNA, 58 bp, Triticum aestivum
  Clone ID: uC-tsro9316039h07b1
ttgtctccgaccacgaccacgcacggaacgggggagggtgacaagagggagcggcccg

SEQ ID NO: 4864 - DNA, 483 bp, Triticum aestivum
  Clone ID: uC-tsro9316039h08b1
cagatcttcgtcaagaccctcacggggaagaccatcaccctcgaggttgagagcagcgataccatcgacaatgtcaaggccaagatccaggacaaggaggggatcccgccggaccagcagcggctgatcttcgccggcaagcagttggaggacggccgcacccttgccgactacaacatccagaaggagtcgaccctccatctcgtcctcaggctccgcggaggcatcatcgagccatccctgcaggcgcttgcccgcaagtacaaccaggagaagatgatctgccgcaaatgctatgcgcgcctgcaccctatggctgtcaactgccgcaagaagaagtgtggccacagcaaccagctgaggcccaagaagaagatcaagaactagagtgccactagtcagtttcatgggccggttgaatccatcgcgtgtcggagtttatgctattatcgtctcgtttgtcgttgaaccctattttacttt

SEQ ID NO: 4865 - DNA, 443 bp, Triticum aestivum
  Clone ID: uC-tsro9316039h12b1
tctttttattgctagaagcagggttctatccatggcaatggtggtgaaggccctcctcgttgccgtcgtggccgtggcagcgcttgcgcagctcaccgaggcagtggatcaccaggtgggcggcagcggcgcgacctgggccaccagcggcggctacgactcgtggtcggggaagcagaagttctctccgggagacagcctcgtattttcgtactcgccggcgcacgacgtcgtggaggtgagcaaggccgactacgacgcctgcacggccagcatagtcgtcgccagatacaccggcggcatgaccaccgtcaagctcaccactgccggaaagcgctacttcatctgcagcatcaccggccactgcgacgccggcatgaagcttcaggtgaacgtggacggcgtgaccgcccgccccacctatcccaggggccagaggagcg

SEQ ID NO: 4866 - DNA, 396 bp, Triticum aestivum
  Clone ID: uC-tsro9316041a04b1
tttgttgacgcaggtgcagccggacgtaggcatcttctacaaggccatgtccatcatgaactattgcatcaacggcatcttcgagaagctcgccggcgagtacgacaagctgggccgttacaacaagaagcccaccatcacttgccgtgagatccagacctccgaacgcctcgtcctccccggggagctcgtcaagcacgccgtcttcgtgggcaccaaggtcgttaccaagttgacctcatcctgcacaggttaggcttgaggctcgtcgcttcatgccttctgtgtgtacctagtccgcagtgtgatgttacaatcttcgtaaggatctctgctgctggcttgctggctcgacagaaatagtgatgctggtgcctgatcaaggtgggtgatccc

SEQ ID NO: 4867 - DNA, 445 bp, Triticum aestivum
  Clone ID: uC-tsro9316041a09b1
tccctgtaaacaaaaaaaaaaaaaaaaaaaaagagggatctatttaaaaaaaaaaaccgaaacaaaacaaatgggggggactatcacctcggttcctcgctttcactcgcgcttccttgctgtatctttagctcctccaatagataacaacaaaaatgggggggggcccttttgggggtcccacgttcccgccccggggccgggggctttttcccttttttttgggggccccctattcctttctccgcggggggggcttctcaccgctggggggggggacccccgggggtcccccacccttttttcctttgggctccgcctcttttttcccccggggggttggttaaaatggggccccccccctccgcctcccccccctggggccccccccttgggggtggggccccccccctgggtggcgttttttgggcgggggggtgggggg

SEQ ID NO: 4868 - DNA, 430 bp, Triticum aestivum
  Clone ID: uC-tsro9316041a12b1
tttgcggcttgggccggcggctggtgctctgcttccggcagtgatggccgctggtggtggtggtcttggcccgtgcttgccagatttgcagtgagcagggtgaggatggtggtggcgatcctgtggtggctcgtcatcgtgggcgtggtcctgtaggaggcgcatggggcgggatgtgaactcggcagcgtgtcgtagccgctccaaggcggctcggggctgtccctcgaggtcccggcgtggatgtgggctgccacggcgtggtggtggctcatggcggtggtctgggttgtgtcacggcggcggcaggacttcttcggtgtccgccggtcggtgagcgccttgttgacctttgattcctcccccttgtcgtttgggcactatcttcattgaagggttggccattctccagttgtggttcctcgtccgt

SEQ ID NO: 4869 - DNA, 524 bp, Triticum aestivum
  Clone ID: uC-tsro9316041b01b1
ttgtttcgaaccaaaaccagaccaaatcttcggcgagcccatcggcacattctgagagcggagaggaagcaggaggcggcggatcatggagaggagactagaagatgggtggcggcatggaggtgaacaagaaccgctggatcgaggagtggaacgccggccgggagaacctcgagctcaacttgcgttttacccgccgcagcctcgccgtcatcggcctcttcggcctcgacgtacccatcctcgtctacaagggcatcgttcgcgaattccatatgcaggacgaggacgccggtcggccgtacaggaagttcctgtgagcgttgcctccggtggatgtcgagactccgagccgtctgcagggtttcggtcagggagaaggaatctccattcggttagtttcccgtactgttgtagtcagaccggagtattttggtctcacatgttgtgcgatatgtgttaaataagatgtaatgaaatgctgttcttgcattgctgaacctgagaagtctgattggttattt

SEQ ID NO: 4870 - DNA, 518 bp, Triticum aestivum
  Clone ID: uC-tsro9316041b03b1
ttattgtttcatgtctgatctcgacgttactctgccatctgccttcgatccttttgctgaggcaaatgctgaggatgctggtgcaggctccggcgcaaaagattatgtgcatgtgcgcatccagcagcgcaacggcaggaagagtctgaccactgtccagggcctgaagaaggagttcagctacaacaagatcctcaaggatctcaagaaggaattctgctgcaatggcacagtagtccaggatccggagctaggccaggtcattcagcttcagggtgatcagcgtaagaatgttgctactttcctagtccaggctgggattgcgaagaaggagctcatcaagatccacggcttctaagccgaagccgcctccgataaatgctcgaaccgccagccggctctttttatattgaaggcataaggcatatatatattgccgcccgcttgtcgaactgtgtcttgcttgatgcaagctgtgttggcgcctgattattatgctgctgctgtaccggcatatc

SEQ ID NO: 4871 - DNA, 413 bp, Triticum aestivum
  Clone ID: uC-tsro9316041b04b1
gctacatccacccacggcggtgttggacggcggcgacggcttttctttgctgcaactgtctcggatttttgctactaccggagacgccatttgctactaccagagtcttgttggaagcatcagaagttttcgctaccaccccaagttttttttgacttttgctgaaccagcctaaaaattgctaccaccgtcttttgattttgctggaaccggcattttttttgcttcaccggcggcggtgaaggtgggtcgtgttttgcttcgccggcggcaagcaggggtagcggccggcgacgtgaggctccgcgagccgcggggggcctcgccggagatgcgccgcaggggcgttgctggagctgggcctcgcgcgaagatgcgccgcgggggccttgctggagcttggaccctcgccg

SEQ ID NO: 4872 - DNA, 346 bp, Triticum aestivum
  Clone ID: uC-tsro9316041b08b1
gagcaagcgccgcaggggacgctctcatgtcgaagcgcgggaggggaggatcggcggggaacaagttccggatgtccctgggtctgccggtggcagcgacggtgaactgcgccgacaacacgggcgccaagaacctgtacattatttccgtgaagggcatcaagggaaggcttaaccgtctgccgttggtctgcgtcggcgacatggtcatggccaccgttaagaaggggaagcccgacctcaggaagaaggtcatgccggcggtcattgtgcgccagcgcaagccatggcgccctaaggacggtgtcttcatgtccttcgaaaataatgctggggtgattgtgaa

SEQ ID NO: 4873 - DNA, 459 bp, Triticum aestivum
  Clone ID: uC-tsro9316041b09b1
ttgctaatgcttctcttgaagacaagttgtcatccacagaggcgcagcttaagcaacttcatgccgaaaaggcagaagcatctgctgagagtgagaagctgatctctggattgaagcaagatattgccaatcttaagacagagctcgagttactgtcctcacagaaagctgcagttgataataaggtgtctggtttgctgagtgatctcgcgacttgtgatgaaaagatgaaggagatggatagccacttgcatcagctgcacctggagcatgtgcaagtgattgcagaggcagatgccgcacggaagtccgtggcagacctgcgtgcacgggtctgtgagctcgaggaagaggttgagaagcagaagctcatggcctttgacagtgcaaaggggaagcgggaggcaatcaagcagctgtgcttcttgctcgagcactaccgcgacgggtatcagcacc

SEQ ID NO: 4874 - DNA, 91 bp, Triticum aestivum
  Clone ID: uC-tsro9316041b11b1
ttttccacgcgtccgcccacgcgtccgcccacgcgttcgcccacgcgtccgcccacgcgtccgcccacgcgttcgactagttctagatcgc

SEQ ID NO: 4875 - DNA, 348 bp, Triticum aestivum
  Clone ID: uC-tsro9316041b12b1
ttttatttccactcctctctcccctacccctcgccccatcgccccgccggcgccgcacgcgccaccggcgacggcgaccccgatgggcgccttcgcctccgttctatttctttccgtggccgacttcttccctggcgcggtcaccgctttcgcgggcgccgccggctgcttcgcgcttggctactttcttgcccttgtccggcttcccattcacgccggcggcgtccccgacttcggtgacgacgatttcgaggacgacttggacgaagatgatgactaaaatttcggccgcgcccggccggcgaatcgagcctcccggcggaagcggaccgggctcaagctgctgtt

SEQ ID NO: 4876 - DNA, 406 bp, Triticum aestivum
  Clone ID: uC-tsro9316041c10b1
cccaaggcgcatatagttctacagaagaggtgaaggaggaagttaagtgcatcaaggccattatagagaggctgttacagagggaaggccatcttgtggtcatagatgaaggaacagcggcagcagaaggtgctgcggcaagggcatcggagcacagaatcctggctgttaacccgaactacgtcattgattgattaaccagctgaggtcacacagctaactagatccatcatatgtggttgaccaatagagcagacattcaaacggaagacatcctgttgtgatatgctctagaaatgatatgttgtacctgccatccccttcccaaggaagcacaagatctctggaattgtatcttcttccaaggttgaagtgtggtaattaatttgccaccagtattggttgc

SEQ ID NO: 4877 - DNA, 465 bp, Triticum aestivum
  Clone ID: uC-tsro9316041c12b1
ttggcggcgtcctcctcctcaccggcggcggcggcggttgggcgagcggtcgaggaggtgcgttcggcgctgaacgagcacgccgacgtggtggcggagctcttcggccgcgtctccaccgagctccgcggcgggttcggccccgccgtcgacactttcgtcggcttcttccacgccgtcgactggaaggaaccttggttgatcggcatgataagtttccatgccattctgctactggtaaccatcatctccaggaggaacatcaatttccaacttatcttgtcagccttaacattttctggtgtattccttgccgagaaactaaacacgttcctaggacaaaactggaagagcttctcaagccagaattactttgatccccaagccttttatctcggtcatgtggtctggcccctgcttctgatacgatacttatctggtgacaccctgtgacctctgcatgct

SEQ ID NO: 4878 - DNA, 497 bp, Triticum aestivum
  Clone ID: uC-tsro9316041d01b1
ttcttttcgcgtccgtccgcatccacccgaacgaaaccctagtctcccatcacttggatccggtctttgacattcttcgacgcaggacgccgtaagaaatttcgctagagatcttgcagctgccatggcggacaatgaacctattgacccaaagaattaccttgaggaacgctgcaagccgcaatgtgtaaaatcattgtatgactatgagagatgtgtgaagagagtcaagaatgatgaaactgggcagaagcactgcaccgggcaattcttcgactactggtcatgcgttgacaaatgtgtagcaccaaagctctttgagaagctcaaatgatggatggggtggcgctgattgccacagaccccaataaatcgatccactgtcctgatttctgattgtgctgaacctgtaacaaggagctttcttctatctgttgctaaaacttgtcaaaacaagcaaacacaattattttggcagtgggaaacaatactttatt

SEQ ID NO: 4879 - DNA, 528 bp, Triticum aestivum
  Clone ID: uC-tsro9316041d02b1
tttgttaccaggcggcaccaccaccacccacccatggcctccctggcggcgagatccggcctccgctccctggcggtgcgcgccagggcccccgccccggccacgggcggacgccgcatgtcctcctccgcccacgacgacgcctatgagacggccaagtgggagaagatcaccatcattggggccgtcacctgcaccctcctggcggcgtggaacctctccaagggccacccccacttcgacgagccgccggcctacccctacctgcacatccgcaacaaggagttcccctggggacccaatggctctgtttgaggtcaagcacgaccattgagtactgaatagtgcatcataagaagtcggtgaatgcttcagtaaaattctctgtgtgtccagtggtttttttattttcattgcgatctatttgtggcaagaaattagaaagacacactcttgtgctgacaatcccgaattgactgaattgtgtctaccctttttttcacatcaatgatctatgtgagacgaaaa

SEQ ID NO: 4880 - DNA, 295 bp, Triticum aestivum
  Clone ID: uC-tsro9316041d04b1
tttcttaaacatagtaaaatgtataaaattacgcagctttccccccaccactggtggggggtttgggtgctggccccaaacgaacacactcctgcgtgcgacgctagataccttatgtgacggaaccgaaaaaggggtcactgcatgtctgaagacaacaaactgactgggaaaactctgccttcgctcagaagacaacccaacctgatcagctctcgttcatcagatggcatatgagcgatgaggtcttgcccgatcgctcaagaggacacttgatcacactagacctgggctg

SEQ ID NO: 4881 - DNA, 478 bp, Triticum aestivum
  Clone ID: uC-tsro9316041d08b1
gcccacgcgtccgcccacgcgtccgctcacacacacacatcatctcccccacctctctcccaaagccaagagctcagagaagcaccggccatggagggcaaggaggaggacgtgcgcctgggcgcgaaccgctactcggagcaccagcccatcggcacggcggcgcagggcggcggcgcggacgagaaggactacaaggagccgcccccggcccccttcttcgaggccggggagctcacctcctggtccttctaccgggccggcatcgccgagttcctggccactttcctcttcctctacatctcggtgctcaccgtgatgggcgtggtgggcaacccgtcggggtccaagtgcggcacggtcggcatccaaggcatcgcctggagcttcggcggcatgatcttcgtgctcgtcactgcaccgtcggatcttcggcggccacataacccctgggacaccttcgggctgttttggcaag

SEQ ID NO: 4882 - DNA, 355 bp, Triticum aestivum
  Clone ID: uC-tsro9316041d10b1
tttgatcagtgtcttttgcaaaaaaattacgctagatatggtgtcttctgcaacaaataaaaaaaaaaaaaaaaaaaaaaaaaaaaaaaaaaaaaaaaaaataaaaaaataataaaaaaatataaaaaaaaaaaataaaaaaaaaaaaaaaaaaaaaaaaaatattggccgtcccttttaaagtaccaaactatactttcccgtgcatccaacattataatttttttatatggccacctaattaaaattctatgcccgcaatttaacaacctctcaacgggaaaaaccctcgattccccaaacttaataatattgtaaaaaatctctcttttttccaatttgttttaattaaaaa

SEQ ID NO: 4883 - DNA, 70 bp, Triticum aestivum
  Clone ID: uC-tsro9316041e01b1
tttgtttggtggactccgcctaggttgccgactgctgcgattttgcagtgcactcggctttaagggtaaa

SEQ ID NO: 4884 - DNA, 531 bp, Triticum aestivum
  Clone ID: uC-tsro9316041e03b1
ttgcccgtctcctctctcctttccccaacccaaaccaggagcgccctccctcccccagccgtccgccccctccccacccaggaaaccagccatgaagggggccaaattcaagggcgccgtcaaggccgacaccaagttggcggtgaagagcaagggggcggagaagccggccgccaaggggaagaagggcaaggccggcaaggaccccaacaagcccaagagggcgccctccgccttcttcgtcttcatgggcgagttccgcgaggagttcaagcagaagaaccccaagaacaagtccgtcgccgccgtcggtaaagcggccggtgagaggtggaagagcttgagcgaatcggagaaggccccctacgtggccaaggccaacaagctcaagggcgagtacaacaaggccattgccgcctacaacaagggcgagagtgctgctgctgctgccccaaagaaggcggcggccaaagaggtagaggaggacgatgaggaggaatccgacaagtccaagtcggagaacaatgatga

SEQ ID NO: 4885 - DNA, 550 bp, Triticum aestivum
  unsure (1)..(550): unsure at all n locations
  Clone ID: uC-tsro9316041e04b1
tttttgtcgcgtgggttggaaaccatgctgcagggctggtaaatgcctaaatcatgcgtctcagtgtggtgctggtgttggcatatttcttttggtgaggaaaacaacaatcctgttgcaacgatcggctcgtcttacattttggccatctctgtaccttatgctttcggtgaggaggatcatgaaatgcacagaggaaagcccttgtatcttagccaagaaagatacgcagccctcacatatctggtggcatctcatagccttgaccggacttctgaagttctgcggcaaacaaccatcagcttttatacatctgattaagtgcatcgttttgaggaacaatgcccaaaggatcatgtgatgtgcatattttctgggaactgtggtctagcttcatattcatgctttccagtgatggtgaattgcatccattcccaaggtggcacggattctggcagactatcgagccgtgcgtcggtgtttcagaccttgttcgagcacaatgtacagcggtgcctatggcgccccttttntctttcctttttcgtct

SEQ ID NO: 4886 - DNA, 232 bp, Triticum aestivum
  Clone ID: uC-tsro9316041e05b1
tgttgtacgcgtgggtttgtttttgcggggggtggaaatagtgttatgttgaatgtatttaagcaaagacatgctgtggctttgtctagcattgatgtgtgcatatactgttgttgtgctgggacaatgggcttcaccactgcggtgacctcgtgtataccactagtaagagacatgttgtgttgtgagaacaaataaacctaagtgttaaaaataaaaataacaaatgtaa

SEQ ID NO: 4887 - DNA, 444 bp, Triticum aestivum
  Clone ID: uC-tsro9316041e07b1
tgtttggaggacttcgccaaggttgccgacttcttcgattcggcagtgaacttggctttgaaggttaaagctgcagcagcaggtaccaaactgaaggacttcgttgccactttgcaatccgacagcaacatccaagctgaaattgcaaagcttcgccacgatgtggaggaatatgcgaaacaattcccaacaattggattcgagaaagagaccatgaagtacaagaactaagaactgctatgtttcaacagcaaggaagcaaccaggaagcacaactgagtacaagtccatgtaaacaatagatgcatgatgaagcgccaccatatgtaaaaggaatccaagcattttacagaatatgggaactttgtcaatagtttcttattgcaggcacatactgtaagatgctttcgtgatatgctatatgaaccgccattcttcttggat

SEQ ID NO: 4888 - DNA, 307 bp, Triticum aestivum
  Clone ID: uC-tsro9316041e10b1
taaactgcctgttgtgtgtcaaaaaaaaaaaataaatataaaaaaaaaaaaaaaaaaaaaaaaaaaaaaaaaaaatatacatatatatataattatcacctaccctatactacattagctaaatttttattcttattattacataattaaaatttcatatctttttaacccgggggggccccttttgggggtcctagtcttctctccgttggtcgtgttttttttcttttttttttggggccccctatttcttctctcgggggccgtttttctcctctcttgttgggggaacccccgggggtccccc

SEQ ID NO: 4889 - DNA, 316 bp, Triticum aestivum
  Clone ID: uC-tsro9316041e11b1
tttttttgcgagggcgaggcgagccactggctgatccgtgtctactctacgtccctgccgcccgtacggacatacatattgagtaaacctggggagtttcttccctgctctcgtgttaccgatgatttgtcccatgtatacatatcgagtagtaggcgcacggatttagtacgatccatgtatagagggtggctcagaaccgtgagcggtgtgtctcaccatcactcgattgtacagagtgttctcttccattttgctatgtgaatatgtgatcagatatttgtaggacagcatatgattattagtacaactttac

SEQ ID NO: 4890 - DNA, 461 bp, Triticum aestivum
  Clone ID: uC-tsro9316041f09b1
ttcgaaggaagcgtggcatatatttgctgggaaagcccttattttggatcctacatgctccaaacgtagctgggaaaagaaatcaaaggtacatatgttctttcaggaaaatgggacgttatggacaaggtttggcgcactctcacttccaggtcgttggctgctgccgcaactgttgccgctgagcacgcaaatgttcgacttttgtccttctagggccatgggcactgagctcgggagggcgttctctctgtcaaattcttgtcacgctatatgaaaccttacatctaagctgctaaagtgaatgacgggtattgtctgtattgtgtattgtgtattgtgtaggtagcaagcagcttccttttgttccaggtcatgtaatatcatcagcaaaaatagaacttaagacagcaaggtcttacatttttttttgttaaagaagaaggtggggtagcaagact

SEQ ID NO: 4891 - DNA, 75 bp, Triticum aestivum
  Clone ID: uC-tsro9316041g02b1
tttaataataaaaaaaaaaaaaaaaaaaaaaaaaaaaaaataataaaaagaaaaaacaaaactaaaaataggggc

SEQ ID NO: 4892 - DNA, 437 bp, Triticum aestivum
  Clone ID: uC-tsro9316041g05b1
tttgttacccgtgcggtctccgaaaccgcaccccaattcgtagacggagaacatggatcgccgccggcggcgacccttctggtcatggccggcggaggagcatacgctggagagactacgacctactgcgggagatcctggtgcgcctaccctcgcagaccgacctacctgctgcgcgcctctccttgggtcaagagctggagacacatggccatctgccccaagctactgcggcgctggcgcgtccaccaccggaagcctacactgctcggggactacacgagtgagaacgggggactttcgcgcagatccaccctggacctgccgtaccgaatccgtcccggccacattttcctacaactacaagtacacggtcgtgatccatggaggttggtcgactgacgccacggacgcgtgctccttctaacaaggagagg

SEQ ID NO: 4893 - DNA, 335 bp, Triticum aestivum
  Clone ID: uC-tsro9316041g12b1
tttttgcccacgcgtccgttaagtttgaatgtcttgggacaaaatctggtagtcttttgatccaaataaggtctggatctggatatcttgcttatgatttgtcagattaagcttttctggtggtgttgaatttgcatgctagttgcgttaataaaaaaaagaaaaaaatttattcaaatactaaaataaataaaaaaaaaaataaaacaagattatagatctaatttgaacaaaagaaaaactagttcttattggggcggcccttttaggggtcccaagtttacctccgcgggcatgcaagctcttggcttttttttagggtcacctaatttaaa

SEQ ID NO: 4894 - DNA, 206 bp, Triticum aestivum
  Clone ID: uC-tsro9316041h02b1
gacgtcatacatctggtatagtgatagctaaattcaagtccatctggctcgtctggtggtacgaacgtcagtgactaggggaaacacctggtggtacccaacttaatggtgtgggagcacatgcacctttaggcaggtggggcaatagcgaagagggcagtaccgatcgccctggccaacaggtgcgcagactgaatggacactgg

SEQ ID NO: 4895 - DNA, 325 bp, Triticum aestivum
  Clone ID: uC-tsro9316041h04b1
ggtggaacctgataagtctgtgatcgtgcaacctggattcaaatgagctgtcggggctatagaacgtctggagtggaaaaaccgtggaaagaccaaactgaagcccgttgcacgcacatctgggtgaacaacaggatggcgtgatggcagaactggccgcgaccaaagaggaactgcaactgctggtggaacagattggcgagggggacgagcacatgagggctacactaggcactggccgtggggtgacaacgcgcagactggcaaaatcactgggcagcgcaactaaagcccgcttgctgcacattcttcctttgcctgctgg

SEQ ID NO: 4896 - DNA, 392 bp, Triticum aestivum
  Clone ID: uC-tsro9316041h07b1
tggtcgccactgggggctctcaggcggactgtaaagcgattgacgtaggtggggggatgtgggctgatacccaaggagcgtcatgattccttcaattgcgaagaagaggtgacaagacagacggagaaagtaaatggagtgctccaggactatagcaacatgcaccagaagctaaaccaagacatggatgcaactgttgagtctgtaaggcctgatcgcaaacaatagtaaaggtgacaccatatgggggatatatgagagaggacaatgcaggctctaggcttaggcatgccactggttgtattgacaaatggtataaagtgtgagaacgatatcttcgcgtatcttcatttgagcgcttggaggtcgaaggacttatggatgtgatgatg

SEQ ID NO: 4897 - DNA, 248 bp, Triticum aestivum
  Clone ID: uC-tsro9316041h10b1
tccttgttatagatcgcgagcggggccctgtgttgttttttttttatcacaaatgaattaaggcaagaggcacatctgtagcaaactagcttgggcatttaatagcagccatgacaaaatatgaagtagttcttcgaaaacagttgtactaattctggctttaagaacactggaacatagagcagatccaacttggcacaaacaaagattctaacctgacggagacaaaagaagaactggctcttcag

SEQ ID NO: 4898 - DNA, 370 bp, Triticum aestivum
  Clone ID: uC-tsro9316043a02b1
ttgtttacgcgtccggtaaaaccaaggctccggcgaacaattaccacagcattagcaaatccaagtccaacaataaaatgaaaacctcggagcctcgggcgaagcagcccaagccccagctgaaggaggaagatcacgaggacgaagcccctgatgcgggcgaggatggtggaggcgccgccggtggtggtggtggcggcggggaagagcacggcgatacgctgtgcggcgcatgtggggacaactacgggcaggacgagttctggatcggctgcgacatgtgcgagaagtggttccacggcaagtgtgtcaagatcacgccggccaaggcggagcacatcaagcagtacaagtgcccgtcgtgcatggg

SEQ ID NO: 4899 - DNA, 179 bp, Triticum aestivum
  Clone ID: uC-tsro9316043a03b1
tgaatgcacacaggtgctcgataaacaagcggaggtttttaaaatctttttcctcttactaccggagtggcaaggtctgggtctgtttgaatcccggttaaggatggactgtcgagttcttcccaagacaaacaaacacaaaaaataaagacaaaaaagcaaactaattaaacctccgg

SEQ ID NO: 4900 - DNA, 351 bp, Triticum aestivum
  Clone ID: uC-tsro9316043a04b1
ttggtgcaccggaaccatcggcttctgtgcctgcgtctggttcacgaggatgatctactcgtccgtgaagatcgattagtcgctggaagcacaggaggcagagacagagacagaagcatagcatatgttttcagctttcgcggtcagaggtgataattgtatgattaaggtgaaggtggggatcatccccgtgtttgttactcttttgagggaaaagttacattttgggattagattatgaactgttgatttatgattattgctgcggtcacaagtgatgatacttgctagtgataaatgttggagttacaagggtagaattcactacagtgggatagacttgtctgtttt

SEQ ID NO: 4901 - DNA, 317 bp, Triticum aestivum
  Clone ID: uC-tsro9316043a05b1
tggctggtcccacccgtcttgtagcagcactggcactgcagaaagggcgggggatacgttactcttcacgtgcgagtccaggcacgagggccatcccgacaagctgtgcgaccagatctctgacgccgtcttggacgcctgcctggcccaagatcccgacagcaaggttgtctgcgagacctgcaccaagaccaagattgttatggtctttggtgagatcactaccaaaggcaccgtcgactacgagaagatcgtgcgagacacctgccgtaacataggcttcatctttgacgacgtccgtctccatgctgaccatt

SEQ ID NO: 4902 - DNA, 347 bp, Triticum aestivum
  Clone ID: uC-tsro9316043a06b1
tgttgctcacgcgttcgcccacgcgtccgcccacgcgtccgcccacgcgttcgcccacgcttccgcccacgcgttcgaggcctcgtcgacccggggacggtggggcacacttccctcagcctcggcctcaacgtctggcggccgacggcgcggcggggtgcccctccggtgaccaagatcctcgtggaggaggacttcatgtcctccaagaagaatcacgaggtcgaggcgctggaggccgagctccggcgcgtgggcgaggagaacaggaggctcagcgacatgctccgcgcgctggtggccaagtactccgaccttcagggcagggtcagcggcatgatggcggc

SEQ ID NO: 4903 - DNA, 441 bp, Triticum aestivum
  Clone ID: uC-tsro9316043a09b1
tcgggccaaagccgcagacagcacgcacgcggagcccaccgtcgccgctccaaatctcgcccgctcgcccgccgctctccgccgccatggacgccgcctcctcgctcatgggcgggccctcctccgccgacgcccccaccgacggcgagcaccggatgggcaccaccatcgtcggggtatgctacgccggcggggtcgtcctcgccgccgactccaggaccagcaccggaatgtatgtggcaaaccgtgcttcggacaagattagtcagctcactgataatgtctatgtctgccgttctggatctgccgctgatacacaagttatttcagattatgtgcgctattttctccaccagcacacaattcagcttgggcaaccagctaccgtgaaagtcgcatccaacttggttaggttgctgcctatcagaacagagcatgttg

SEQ ID NO: 4904 - DNA, 473 bp, Triticum aestivum
  unsure (1)..(473): unsure at all n locations
  Clone ID: uC-tsro9316043a10b1
ttggaaaaaccctagccctcgcagccgcagcggcgcgcacacctctccctcctccctgaagacagcgccgccgtcggcgagagcacaggatggcgaccgtgcccgctcccgcagccgagaccgcggcctccacggcgcgcacggtgaaggatgtcaacccccacgagttcgtcaaggcctactccgcgcacctcaagcgctccggcaagatggagcttccggagtgggttgacattgtcaagactgcaaggttcaaggagcttccaccttctgatgctgactggtactacatcagggctgcctcgatggcaaggaagatctacctgaggcagggaattgggatcggcggcttccagaagatctacggtggccgtcagaggaatggttcacgcccaccgcacttctgcagagcagtggtgctgtgtcccgcaacatcctncaggagttgcagaagatgggcatcattgatgtgg

SEQ ID NO: 4905 - DNA, 423 bp, Triticum aestivum
  Clone ID: uC-tsro9316043a11b1
tttttggggcactgccgatgctcgaggatctgggcctagtctactctgtgtcaatggcgaatgccaatggattctgcctgggttttcagcacctcccaagactgagaaatgcacgagtccgtctctacaaagagggcgcaacatcttctgctatcacttctgcagaagttgctataaagaatgaagcagatgcccatcccaaccatcccacagtaactctgatagaacatgtcaagagagtggattattgctctgaggaatgtcctaagagaaccgtacagagctactctgaagacccagaactagttgacaatacaactaagcaaaaggaaacttaaatttgtggactggtgacaagtgagagatggcgtgctgctgcttgtgtggctggaacgacgtggtactgtcatagaagctcgaacg

SEQ ID NO: 4906 - DNA, 310 bp, Triticum aestivum
  Clone ID: uC-tsro9316043a12b1
tcgtccacgcgtccgcccacgcgtccgcccacgcgtccgcccacgcgtccgcccacgcgtccgcccacgcgttcgcggacgcgtgggcgcggtgacgggggcggacgcgtgggcggtcgcttgtgagaagtcgattgaacattatgatttagagaaagaagaaatcgttgtttgcctggatgaatcccacataccagagacaattcagcgatttttgagtgaatagaatgctgaaataaacttgtactagcatcgaaaatttcggttcattatttgcaggaagttgtgctgatctattatttacagaaac

SEQ ID NO: 4907 - DNA, 217 bp, Triticum aestivum
  Clone ID: uC-tsro9316043b02b1
tctttcacgcgtacgcccacgcgtccggctggacttgcaaagaaagagagcatcaagattcacggattttaggcaacacacaaatgctcgtgtgctgtcaccgaagcctggaagttgtcgtatacttggtattgtcacatctaagacatttgaattgctagtactcgtgtgaggcatctgtgtttgatgcacttttacatccaagacatttgaattt

SEQ ID NO: 4908 - DNA, 262 bp, Triticum aestivum
  Clone ID: uC-tsro9316043b05b1
tgtaaatgtagaaggtttttttgctgtatataaactggagatatgacactgttcttcgtcaaaaaaaaaaaaaaaaaaaaaaaaaaagaaaaaaaaaaaaaaaaaaaatggacgaaaataaaaaaaaaaaaaaaaagaaaaaaaaaaaaaaaataaaaaaaaaaataaaaaaaaaaaacgggccggcctttttaggggacccaatttcaaatgccaagacgtcggaaaccaaaaatttaataaagttaaaccaaaattaaaa

SEQ ID NO: 4909 - DNA, 362 bp, Triticum aestivum
  Clone ID: uC-tsro9316043b08b1
gcagaatgtgttccttctatcaaggaagtcattgctaatggcatcagcgtcaatgtcactcttatcttctctgttgcaagatacgaggctgtgattgatgcttacctcgacgggcttgaggcttctggtttgagcgacttatcccgagtaaccagtgtagcatccttctttgtcagccgagttgacagtctgatcgacaaaatgcttgagaagattggaacaccggaagctcttgccctgaggggaaaggctgccgtagcacaagcaaagatagcaaatcagctttacctgaagaaattctctggaccgaggtgggaggctttggtgaagaagggagccaagaagcagaggttgttgtgggc

SEQ ID NO: 4910 - DNA, 459 bp, Triticum aestivum
  Clone ID: uC-tsro9316043b09b1
tttttgcccgaacccccagctcccctccccggcgccgtcgtagcagcaagatggtgaagggacgcaccggccagcgcgtgaggctctacgtccgcggcaccatcctcggatacaagaggtccaagtcgaaccagtacgagacggcgtcgctggtgcagatcgagggggtgaacaccagggaggacgtggcctggtacggcggcaagaggatggcctacgtctacaaggccaagaccaagagcaacggcacccactaccgctgcatctggggcaaggtcttccgcccccacggcaacaccggcgttgttcgtgccaagttcaccttcaacctgcccgtcgaggccatggggaaaaaggtcagggtcttcatgtacccgagcagcatctaaaaggttaatttgaagggtggaggaattcgctcgtcccttaagtttcatttcagagtcttgttagatggat

SEQ ID NO: 4911 - DNA, 404 bp, Triticum aestivum
  Clone ID: uC-tsro9316043c02b1
ttgtacaggctatattactggtgattatgtggggcttttggcttcatgttatgcccattctcgtggagccctgaggtatagatggatgaacggtcaaaccactgcttcgggtacgatcactaagattataccctatgataggctagtggtagctccagtgtctgttacaactaagacgacctcccaattgcttggccaagcacctcaaatcacattaagtgaaaatgcggagctctctaatcaggcgaccacctatgatgatgttcagtcatcgggtgctagttcttttatacctatgtataatcgaactttttgtagattgaatcggttgttctatacgaacaatcctggagatgctttggtcttacgtgctcctgatattgcaaaatttcaactggaaatag

SEQ ID NO: 4912 - DNA, 243 bp, Triticum aestivum
  Clone ID: uC-tsro9316043c06b1
ttgttgacgcgtacggccacgcctgcgcgcagcgcgtacgatcacgcattcggccacgcgtacgcccacgcgttcggtgaatgtaaaggttactagtacagcctagtgaaaaaataaaaaaaaaaaaaaaataaataaaaaaaaaaaaaaaaaaaaaaaaaaaaaaaaaaaaaaaaaaaaaaaaaaaaaaaaaaagaaaaaaaaaaaaaaaaaaaaaaaaaaaaaaaagggggggggcggttt

SEQ ID NO: 4913 - DNA, 191 bp, Triticum aestivum
  Clone ID: uC-tsro9316043c10b1
tcggtcccgatctatcaccataaggatgcggtgatagagattgatggtaacattttgtctttcgactccaccaatggttaggtggtatttcgtacaattcaccgacatatttcgcgctgattatgaatgatgaatgctatgttgtgggcacaaaaagataaactgaatgcccaactacggggggtgcgtta

SEQ ID NO: 4914 - DNA, 327 bp, Triticum aestivum
  Clone ID: uC-tsro9316043c12b1
tcgattcgaaaaggccaagatcgtgcaggagaattggtagcaaataaatgaaacaaagataagattcaaccaaccatgtgctcccaggagaatgctcttctctcttatgatggatcctccatgcatttctttgtacatagcagcattcccttttcttgtttgtaaaactactactgccagtctgttggtgttatttccatgccatttgtaatttgttctttgaaatggtttgtgatttgttttgtggggagacagaattatcctcatttgtgtgggagccattttctcattggtcataaataaaatggatggtttaccaaaatagaa

SEQ ID NO: 4915 - DNA, 441 bp, Triticum aestivum
  Clone ID: uC-tsro9316043d03b1
ttgtttcacgcgtccgcccacgcgtccggcagagttggactcatagataccacatatctttgcctccgttgatgcaatcatgttatttcactccaagacacacactttttcatgattccaaaatttgcgtgcagttgtttgctcggaacctatactgctatgatccaaattcaaactctgaggaattggagattgcctgtccagaatctgagtttcctttcagcattcatacgtttgttgaaagtataattcctctgtgtcaagataatttcatcaagaagatacagtgatgttggtcttctttattcttgaagatagatttcagcttacagatttacattatctttgatgttttttctcttcaaaaatggacttgttaactgccttaatttggcctactttatcactttgtgattagttataagaacaatcttgaaaatt

SEQ ID NO: 4916 - DNA, 391 bp, Triticum aestivum
  Clone ID: uC-tsro9316043d05b1
ttgcgcaccaccaccgctccccatctcgatctaaaaccgagggtttcgtctagctccgtcgccgcgagccagagccagcccaccccagccagccagccatgccgaagaacaagggtaagggaggcaagaaccgcaagaggggcaagaacgaggccgacgacgacaagcgcgagctggtgttcaaggaggacgggcaggagtacgcgcaggtgacgcggatgctcggcaacggccgctgcgaggccatatgcgtcgacggcaccaagcgcctctgccacatccggggcaagatgcacaagaaggtctggatcgccgccggggacatcgtcctcgtcggcctccgcgactaccaagacgacaaggccgacgtcatccttaagtacatgaacga

SEQ ID NO: 4917 - DNA, 208 bp, Triticum aestivum
  Clone ID: uC-tsro9316043d06b1
ttgtccacgcgtccgctcccgaaaactttatggggcgattttaagccacatggacgccttgctccagagtgctacaactatgttgctgataaaacttacgtgtcgcgcaattgtagaaaccattgtcatcattacagataggaataataatgggacctaagttaaccgttattactgcacaattaactggatatttgataagctttcc

SEQ ID NO: 4918 - DNA, 383 bp, Triticum aestivum
  Clone ID: uC-tsro9316043d07b1
tttggtataatggggctgaccatctcgtgcgtgtgcacgagctgggtgggcgtgacgatgctgacaggaggcgggcggggagcatggccatggccacgctgaccgtgctgacgctgatgaacttcaagatacaacgcagagacatccgggaccacatgacattggctagcaaaggccttcatggcacaagcacgggtgaacaggcccgcagatggtcggagtactgtcagacttgcaaacatatatgctaccagattgatcgccgtatatttaggccggggctgaagatctctactatgccgctcctcagggtggaacgggtcacggaccacttccggatgttcgtggaccgggagctcactctggcgcactgctacacactg

SEQ ID NO: 4919 - DNA, 427 bp, Triticum aestivum
  Clone ID: uC-tsro9316043e01b1
ttgttctggccagccttgggtgagagggtgggatgacaaggacaagaggggtctggatggacccaagtatggaaaccagtgataaggtgcttgaaaccattatcgcagtcttaaaactcagcttgttatcctcggtgtgtatgatgcttgtgtaaataaagcaagtcatggttagtgatgcgctatgatttgtattgtcatttgatttgtgctagtaataaggtttcacttgttcccgttgagggaaacgtgtctgactgtagtggtaatgtgcagccaaatgtatctccttgttccagatcggagttaactatgtatgcacaaatcactggcgcattttcactaaattcagtaaaaaaataaaaaaactggtaaattctgaaaaaaaaaaaaaaaaaacgctcttctcaattttctccccctttat

SEQ ID NO: 4920 - DNA, 122 bp, Triticum aestivum
  Clone ID: uC-tsro9316043e04b1
ttttttttttttggttttttttgagggggaaggaggtgataactacttgctttcaccacgtttatttgtaagctggcggccatgatgttttttaatatgatgattgtcgactatttttttat

SEQ ID NO: 4921 - DNA, 384 bp, Triticum aestivum
  Clone ID: uC-tsro9316043e07b1
tcggtggaatgaggcctatgagtttacttggctggaatgccacggtgatgcatgtttggcaaattgctcttgtcctgaccacatggcaccatggagcatggctgacaaattactgtaaaccccctgctgattaagcggcggacatgattttaatgctaaaatattaagtgctgcatccaatagccgcaattgtattacagtgtactgtttggtaaatctcatgcgccagttttttgtccaagagttcacatgcatgctgaacaatagcatttgtggaagggtagaatgcagtatggttagcattgagatggtgtgagcactgagcacaaatgttgatgtagtcttcctcatgcggatttgctgcctgaatccaggtgaactctt

SEQ ID NO: 4922 - DNA, 429 bp, Triticum aestivum
  unsure (1)..(429): unsure at all n locations
  Clone ID: uC-tsro9316043e12b1
ttgcacccatggggctacatgcagtcgtcgtcggacgaggcacagctgctggggatgctgatcaagatggcgggcgccaagaagacgatcgaggtgggcgtgttcacgggctactcgctgctggccaccgcgctggcgctcccggaggacggcaaggtggtggccatcgacaccgaccgcgagtgctacgaggtgggccgccccttcatcgagaaggccggcatggcgcacaaggtggacttccgcgagggcaccggcctggcgcgcctggacgagctgctcgtcgaggacgagggcgcggccagctacgacntcgcgttcgtggacgcggacaagcccaactacgtgcgctaccacgagcagctgctgaagctggtccgcgtcggcggcaccatcatctacgacaacacgctgtggggcggcacggtg

SEQ ID NO: 4923 - DNA, 495 bp, Triticum aestivum
  Clone ID: uC-tsro9316043f04b1
ttgttgaattggcacagcagaggttgagtctgctttggtttcgcatccacagtgtgcagaggccgctgttgttggtgttgagcatgaggtcaaaggtcagggaatatatgcttttgtaactttggtggatggcgttccttacagtgaagaactacgaaagagcctcatatcaaaagtccgcactcagatcggggcatttgcagctccagacaggatccactgggcgccggggctccccaagacccgcagcggcaagatcatgcgcaggatcctgcgcaagatcgctgcaaagcagctggatgagctcggcgacataagcactctcgctgaccccggcgtcgtcgaccagctgattgcgctcaaagattgctaggatgtaaagaagttatgcgactgttttttcccctatgtggttatgtggttggtagaagttggttttagtgttcattggtctccttttaattggtgcaattttctcctgaggctagtggactg

SEQ ID NO: 4924 - DNA, 501 bp, Triticum aestivum
  unsure (1)..(501): unsure at all n locations
  Clone ID: uC-tsro9316043f05b1
ttgatcgcgagcgggcagctcaatgtgggtgtgggtggtttctggtggccggcttggagctgcaactggaggagcccatctctgcggtcaccctccccaacgcccacgccactccgtccagtccgcccatccacaaggaggaagaccgccgcttgccaggtgagtccgcaattttcttctccatccccggccgtatccgtatggctggctgctctcaagtctcaacacaccaacgacctcgagcagcgaccgtctgcctggtcccagcatcaagttctcgatgactccggccatggccggctcgccgtacatgcacttcttctccgctgctgagaggacaggcggaaggctccgtcatgttcgttccctgttacgacaaccccgtcatgtacgacatcgacatggagtccgtcgccggcgtgcccctgcccagctttcccaagcagagcgactccatcttcctgtccatggccgactccgtcgaggtgtngaactacagga

SEQ ID NO: 4925 - DNA, 379 bp, Triticum aestivum
  Clone ID: uC-tsro9316043f09b1
tttgctccagttgtgttgagtttcacagacatcatcatcaacttagctgtttgaaaaaaaatccctctttgcttgcccacttgtttaaaaaaaaaaaaaaaaaaaaaaaaaaaaaaaaaaaaaaaaaaaaaaaaaaaaaaaaaaaaaaaaccaaaaaaaaaaaaaaaaaaaaaaaaaaaaaaaaaaaaaaaaaaaaaaaaaggggggcccttttaaaagaaccaaatttaactaccccttcattccaactaaaaacttttttattggggcacctaaaattaaataaactgcccgtgttttaaaaacgttgaaactgaaaaaaccttggtttacccaaattaaattgctttaaaaaaaatcccctttttccaagctggct

SEQ ID NO: 4926 - DNA, 152 bp, Triticum aestivum
  Clone ID: uC-tsro9316043f11b1
atcgcccacgcgtccgcccacgcgtccgggggggaatattaaaaaaaatggggcataaacaaaaaaaaaacgcgtgtctggaaaaattttaggttctttcttacggtacgcataaaaataatcttatttggcggggcggtcccgtttaatgg

SEQ ID NO: 4927 - DNA, 508 bp, Triticum aestivum
  Clone ID: uC-tsro9316043f12b1
tttttgcggacgcgtgggcaagcagctggtggggggcgacgtgttcgtgttcccacaggggctcatccacttccaggtgaacaacggcaaggtgcccgccgtggccatcgcggcgctcagcagccaggacgccggcgtgatcaccatcgccaacgccgtcttcgggtcaacgccgcccatcagtgacctcatcctcgccaaggccttcatgaccgagaaggacaccgtcgactggatccaggccaagttcgcgccggccatgagcggcaacagcagcatgggaggaggcggctacgacatgccgcccggcggcggcgagggcgaaggcggcaacagcaccggcggcggtggcgggtactaccctggcatgcgcaagcggaagccctaagcacggacaggacggccggccatccacgcgcttatactaataattaatgaataatttaagtacaagtaaacaaagaaaacatgcatcaaaccagtacttagtacttactactggcttaat

SEQ ID NO: 4928 - DNA, 398 bp, Triticum aestivum
  Clone ID: uC-tsro9316043g01b1
tcgtttgatcaagccctccggcaacaacgtcgacggctccaccggcgtcaagggcaacaacatgctcctcggcagcgtcgtcagcaaggacttcccgctggcctgctactccgtggacaagatgccgctcccctacgagctgttcggcccgcagccgcccaccccggcgcccgccccggccccggcccccaccaagtccaagcccaagaagaagaagaagtccgccgggatcgccgaggcgcccgaggccgacgacgccaccgccgacgacgacaccgagaagtccgccgccgcgtccctctccggcgtcgccaggtgggccgctgtactcggtgccgccgtcctcggcgccatgttctgatctgatccgatccgatccgatccgagaggaacgacac

SEQ ID NO: 4929 - DNA, 356 bp, Triticum aestivum
  Clone ID: uC-tsro9316043g02b1
ttctttaaccttgcggttgtagggggcgaccatgggaatctatgaaaggacatggaggagcacgctgagttcaagaagatgtttgaccttattgagcagaacaacctgaatgggcatgtccgctggatctctgctcagatgaaccgtgtacgtaatgctaagctctaccgttacatctgtgacacaaagggtgcctttgtgcccactggtttctatgaggctgtccggcttactgtcatccaagccatgacctgcagtcttactacctttgcaactgcatacggtggtcctgctgagatcatcgtgaatggagtgtgacgctaccacattgatccctaccagggtgacaaggcctc

SEQ ID NO: 4930 - DNA, 309 bp, Triticum aestivum
  Clone ID: uC-tsro9316043g04b1
ttgctcacgcgtccggcttgccttcgtcaaccatggtgaggtcaagcgaacccttgccgattggataacgagggtggcaccagacgacttcgacaagtcctgcacacgcatgtaggaggtactggaattcagcattgaattattcacctgctgctaggatgtgctctagcagagagattgtgtatttgtgttgctatagttgctccacacactggagtttgattgttcatgtttccatgacatttatcatctaatgataactgaaagttacgtggctgcaaaaaaaaaaaaagaaatgaaaagggcggc

SEQ ID NO: 4931 - DNA, 231 bp, Triticum aestivum
  Clone ID: uC-tsro9316043g06b1
tctttcatctcagcggatggtgatagacgcagaataaagcttgggagtgtcccggaaaaaaaaaaaaaaaaaaaaaaaaaaaaaaaaaaaaaaaaaaataaataaaaaaaaaaaaaaaaaaaaaaaaaaaaaaaaaaaaaaaaaaaaaaaaaaaaaaaaaaaaataaaaaaaaaaaataaaaaaaataaaaaaaaaaaagggggggtccccccccccccacccctttcaaa

SEQ ID NO: 4932 - DNA, 154 bp, Triticum aestivum
  Clone ID: uC-tsro9316043h01b1
tgctgagtttgttcagttgataagttgctggggtggttttataaacattttgggtaaaccacccccaaaaaaaaagggaacactgtcttataaggtcgggccgttctttcgggtccccgctacctttctcggcgtcggtggggtcgcctccttt

SEQ ID NO: 4933 - DNA, 385 bp, Triticum aestivum
  Clone ID: uC-tsro9316043h02b1
ttgtgcttgctgagtggataaaaacaagctggggggaatcttcggacgtgagccaggcccttcgccaggatattagcaaacactgccagttaacaagtgctacagccccggtcgacgatgaactataacagcacgtgttagctccccgtatttactcgacaaagaaaagcagatgaatgcctgagaagcgtcaaagaagaagctccagtaggatatgaggctgtgatgtcttagcgtctgcatttttacacactcgcattgttgtcttaaagagggacttgcagattttcacatatgattactgatgtattgagaacattcaaactttgaggaatttctgcatgctgaattacagttagcagcatggtatgattcgctgaactta

SEQ ID NO: 4934 - DNA, 483 bp, Triticum aestivum
  Clone ID: uC-tsro9316043h07b1
tttgggatcgggtgctgccctcctcttgcggcgggccatcgtcgtgccgtttactcagacccagacgcagagcgcacgggacaaagctgccatggcggaagacgcggggccgctggtgggaggcatcagtgactcgccgatggggcaagaaaacgacctcgacgtcatcgcgctcgcccgcttcgccgtctccgagcacaacaacaaggccaatgccctgctggagttcgagaatgtggtgaaggtgaagaagcaaactgttgctggcacgatgcactacattacaatccgggtcactgaaggtggggccaagaagctctatgaagctaaggtgtgggagaaaccatgggagaactttaagaagctcgaggagttcaagctggtggaggacgttccaagcgcataactcataaggcgcgtcccagctttgcaaggatctgcagctatggtgttgatgtagctatctatcggacatgggttagc

SEQ ID NO: 4935 - DNA, 95 bp, Triticum aestivum
  Clone ID: uC-tsro9316043h09b1
tttttgaatgttatccggtttgcctacgagagagagaatacattagagaaaagggcaaaaaaaaaacaaaaaaaaaaagtaaaaagaaaggactt

SEQ ID NO: 4936 - DNA, 400 bp, Triticum aestivum
  Clone ID: uC-tsro9316043h11b1
tttgttattatcactggctgtaggtatcactattgctgttggtgtagtcggttacatacaggagaaccttggctggggaattgggtttggcatgctctgcgccatcatgctcggtgccttagttgtcttcttccttggcacccctacataccgcctctatgcacccactcccggtgctgagaacccctttgccctccttgctcgtagccttgccgcgctagcccaacatgacaatgccacttcgagctcattgcttggttacaaaaaagaataccaggtagaacaaaaagaggatgcggtaaaaaaggaggaggcgcgtggcgtggtacggttgctgtcaatctgggcggcgtgcctggcatatggtgtggtgtttgcgcagtttatgacactcttttac

SEQ ID NO: 4937 - DNA, 57 bp, Triticum aestivum
  Clone ID: uC-tsro9316043h12b1
ttcttaaaaaaaaaaaaaaaaaaaaaaaaaagaagaaaaaaaaaaaaaaaccctaga

SEQ ID NO: 4938 - DNA, 128 bp, Triticum aestivum
  Clone ID: uC-tsro9316046a05b1
tttctttgcattgtattgtcttgtgtatcccttatttatttccttgggcatgatttgctacatgcttttgcgagcgtaattaggaccgattgtacctgtctctctttgcctgaaatgacttgttgcag

SEQ ID NO: 4939 - DNA, 494 bp, Triticum aestivum
  Clone ID: uC-tsro9316046a06b1
tttcattaacgcagcacactcgcataccaggaaaccgaaacgcatcaaggctaggcgccgctgaccatggacaggatcttggctttctcgatcctcagctcctcgcccgcggacatcccgggtgccggctacagcacgcccacgcgcctttcctggaggggtggcagcggggagcagccggagaaagcggcggacaagcatcggcaggaggagaaggtcaaccagggctctcggccggagaagaagccggaggtgcggttcgccccggagttcgacggcatcaactgcttcgagtccatcatctccttttgagcggctgatccgctgttgtctcgggatagttatcgagcttcatatctatttttgctggttgcttaattagtgatgatgagacatgtatttctcaaaaagaaaatgtaaatatttgggcccgggcgacggccgaagctttcggccggtcttatgcgcgacgcccgatttagtgggatcgtgcg

SEQ ID NO: 4940 - DNA, 413 bp, Triticum aestivum
  Clone ID: uC-tsro9316046a09b1
tgttttcggacgcgtgggtggaagcacacatccaagaggagccgctgggatgagatgttcgagtacatcaaccgcgccagatatagtatactcgtgacttatattgcctgctggattaaataagtggtgtgttgtaacccaccaccatcaagtcattctgtgctatataatgtcaagatcaatcaagattagggtatgatgcccatgtaaatcttgtgattgttctgacttacttttctggcttgtatggatgataattgtatgtgtgtgctggttgtactatgattgtgtgatgatatatattaaaatttctactttgtaccttttaaaaaaaaaaaaaaaaaaaaaaaaaaaataaaaaaaaataaataaaaaaaatgtctgtctttattaaaagatccatgataaatacg

SEQ ID NO: 4941 - DNA, 448 bp, Triticum aestivum
  Clone ID: uC-tsro9316046a11b1
ttgttttttttttttgtgtcatatattatgcctcagccaacgaacagcaaaataaattaaatgtcactgacgaaaagaaaagaaaaaagaaaactatatatgatttcttctaagccaggcaggccattctctctgaatctgcttttgcggtgcagaagctccgtgttcagggagatgaagaaataccagatgggtttttctagctggtgcggtgagtgccagcgtgaaaagagagaaaggcagattcagtgcgtcaaagcgaccaagcatttcttaggggtgctggaggggcaatgatttaagtcatatttactgcatgtattttatgcaatcctgtattatattaaacatcctttgatcatttggaaacgtctagtataactgttgtccaatttccagctcgtattttgtcagtgtcattgcatcttatgtaaatctgaacttttct

SEQ ID NO: 4942 - DNA, 278 bp, Triticum aestivum
  Clone ID: uC-tsro9316046b02b1
tttcatcttttaaagatggtttcttaattatctgtaattaggggggtcacaagagcctttaatgtaacaacaattggctccttttaacaggaaccacctctgttttctagtgcagctctgtctgatctatttaaggtttaacaagtttttgttaaaaaaaaaaaaaaaaaaaaaaaaaaaaaaaaaaaaaaaaaaaaaagccgaaaaaattaaaaaaaaaaagacggctgaacaatagatgctaccttaggtactatttcatagaggagcctaattac

SEQ ID NO: 4943 - DNA, 236 bp, Triticum aestivum
  Clone ID: uC-tsro9316046b05b1
tttgtttctcaacaggcaaaaggacatcaagactggaaagtactcccaactgctctccaacggtcttgacaacatgctacgtgaagatcttgaacgcctgaagaagattcgtgcccaccgtggtcttcgtcactactggggtctccgtgtgcgtggtcaacacaccaagacaaccggccgcaagggtcgtaccgtcggtgtatcgaagaagaaataagggcttgggcaacgacaat

SEQ ID NO: 4944 - DNA, 440 bp, Triticum aestivum
  Clone ID: uC-tsro9316046b10b1
tgtgttttcggacgcgtgggcggacgcgtgggcggtggtagtgctacaagcgagtgacactagttcttgcaccgatcagatccaacttatgcacaggatgctggacaagctgtgggacgacgtggtggccgggcctcgcccggagacgggcctcgacaagctccgccgggccgtcgccacccaacccctcgccatcaacacagctgcaggggaggcgatcaagcagtcgccgtcgatgccgacgaccccgaccacgccggtgacgccgttgttgtccacgccgccgtgcggcggcagcgtgtggcggagcgttttccaccccgggagcaacctggccaccaagagccttggcgccaacctcttcgatcgtccgcagcccaacttctccaccgtttacgactggctttacagcgacgagaccaggacaaggagcaaccacc

SEQ ID NO: 4945 - DNA, 485 bp, Triticum aestivum
  Clone ID: uC-tsro9316046b11b1
ccgggtcgacccactttttttttgatgtccttcttgtgatattcagaaacctttatgaagacaggtccctggagttgaagtctttgcatgatgattttctgtgtctccaagccgtaggaagtgagctttgtaaggacatcaggatgatgaacaagaagcttggtgattttgaattcctggatgaccatctcggcaaagatacaaccatgagcatttgtgaccggtctagtgaagaaaataatcacaaagaagttgacggcgctggccttcaagaatcaaatgaaatgctactggaggagatactcaagttacatggaaatgtggaaatgcttatgagcaaggagaaggcttctgtcgacatcagatcctgcaatgaggagatcacaaagttggtatcccacatgcaaatggccatcatgaatgcagttctgttcaaggagaagatcgttgagcttatcgttacatgtgagagttatgagataagt

SEQ ID NO: 4946 - DNA, 253 bp, Triticum aestivum
  Clone ID: uC-tsro9316046c05b1
atttggtttcctccgtgcagccgactcaaaagtaagctaggatacgggctctaacgcactggctggaagagaacccttatgagtgcatcaatgcacggcaggaggcagcatgatgatgaggagccattgttactttacggaggactccatcacaaaagatcaactgagatgcacgcgtgcgggcgatgagagaacaacggaaccgcgaaagcagcctgacgtggagaagaaaagcaacggccctatgcgtggc

SEQ ID NO: 4947 - DNA, 494 bp, Triticum aestivum
  Clone ID: uC-tsro9316046c10b1
tttgtttgctgccctccccttctccttaggttaggttaggctaggggcttcgcagagctcgcggaaatggtggccttcaggttccatcagtaccaggtggtgggtcgcgcgctgccgacgcccggcgatgagcagccgaagatctaccgcatgaagctctgggcgaccaacgaggtgcgcgccaagagcaagttctggtatttcctgaggaagctgaagaaggtgaagaagagcaacggccagatgctcgccatcaacgagatctttgagaagaacccaaccacgatcaagaactatggcatttggctgcgttaccagagcagaaccggctaccacaacatgtacaaggagtaccgtgacaccacactgaatggtgccgtggagcagatgtacactgaaatggcctctcgccaccgtgtgagatccccctgcattcagatcatcaagaccgcgactgtcaacttcaagctatgcaagagagacaacaccaagca

SEQ ID NO: 4948 - DNA, 495 bp, Triticum aestivum
  unsure (1)..(495): unsure at all n locations
  Clone ID: uC-tsro9316046d03b1
tttctcacgcgtccggacgacgaatcattacagagcattattgacatgacttctgactggacaaaggaagaaagagagatgttgagacggaaggtgccagtaactggtttgaagacgccattccgggatgggtatgtaagagatttagctgaagatgttctccagttagctaagaatggattagaaagaagaggatacaaggaggttggtttcctgagagaagtcgacgaagttgttagaacaggagtgacacctgccgagaagcttctgaatctatacgagatgaagtggcagcgcagcgtggaccctgtgttcgaggagttgttatattgatatgctgatatcgtatataacttcggtggaagctggacaaggtggacagggtcttcagattgtatccccatacaaaatcccgtccccaattctacaagccacctgaccagngaagcctactctctggtctcgcggctgcgaataaatttgaagctcgaacac

SEQ ID NO: 4949 - DNA, 354 bp, Triticum aestivum
  Clone ID: uC-tsro9316046d04b1
cttggttaccaccggagaaccacctccgatgctcacaacgagggaggcaggagccccgacgccgccggacagagaccgacaagatctccgcccaacagccggacgcagcaaggcgccacggcgccacgggagacagggaggagaacccaagacagaacgacaccggagaggaggacgaagcgcacgaggagaacaaagaagacgaggaggaagacgaactgccaccaaagaaaaaccggcgcaccgcgtgggccaacagaagaggaggccgatgacacgaagccgaagctagggaccggccggcgctacacaaaggactaactgggaaaaccccgcagcatccaaacggaaata

SEQ ID NO: 4950 - DNA, 496 bp, Triticum aestivum
  Clone ID: uC-tsro9316046d10b1
tgtttttggtgctattgggcttatgcctatgattgatcagggtgagaaagatgacaagatcatagctgtctgtgctgatgatcctgagtaccgtcacttcagagacatcagtgaacttcccccgcatcgcctacaggaaatccgtcgcttctttgaagactacaagaagaatgaaaacatggaggttgcagtgaatgatttcctcccagcagaagatgccatcaacgcaatcaagtactcgatggacctctacggttcgtacatcatggagggcttaaggaagtgatctccagttggcggactgcggatgctacgcgatccgccctacggcttatcaatagtacgacaaacatctatgttaacatgatgatcgaaaaccatcagtctgttggggatctatttataccttctgtccatgctgattaagcatgggtacatttttctttcgtttttgccatgtaggtccagtttttgacctttgttggaacctttttgt

SEQ ID NO: 4951 - DNA, 418 bp, Triticum aestivum
  Clone ID: uC-tsro9316046d12b1
ccacgcgttcgaaaatttccccactcgcgaaccctaacttcgaccagcctctcgccccagatccccttcccctactctcaccaggagcagaacccacccgctcggaccgctccgtgtaatcgccatggcggacgaggaacccgttgatcccaagaagtatcttgaggagcggtgcaagccacagtgtgtaaaaccactgtatgagtatgagaaatgtatcaagagagtcgaggccgatgatactgggcacaagcactgcactgggcaatattttgactactggtcattgcatcgattaatgtgttgcaccaaagctctttgaaaagctgatatgatattggggcgctactttcagtgagtgagcctggtcattggccagaactttgttcaagttgaaatatttgaccaagtttgcaat

SEQ ID NO: 4952 - DNA, 597 bp, Triticum aestivum
  unsure (1)..(597): unsure at all n locations
  Clone ID: uC-tsro9316046e01b1
ttgcccacgcgtccgctgtaagagaaaaggcagatcttctttctgattctcagagaattaaatatactattgagactttcacgaagggcatccctgatgcaaggacgtacttggatacccttcagcagctcaggaaaaagagtggtctcatagatgatatgggtattgaggatatgatgatggaagctctcgagaaagttgagaaggacattaagaaacctcttctgaggagtgacaagaagaacatgggtctcctcttggcagagtttgacaagattaacaaaaagcttggcattcggaaggaggatcttcccaagattgaggaaaatcttgaaatggaacttgccaaagctgagctgacggaacttaagaaggaagttgttgaagcaatggagggccaactaaagagggaggagtttaaagatgaggcgatgcctgacgtcaggaagttggacattagaaacttcctctaggtccctgattgatgataaaccctcgngtgaccgatctgtgatttttcttttaagtgacggncgtgctgtagccacaccgatggatgtattgttgcttttgtataaactgcacgaaattgacagc

SEQ ID NO: 4953 - DNA, 459 bp, Triticum aestivum
  Clone ID: uC-tsro9316046e03b1
ttgaataaatgctgcgccacgccgtccgccgcctcgcctcccgcgccgccgctgccggcagcggctccatgagccgcagggccctcgcgacggcgcaggcgcccgcggaggcgggcgaggaccccgccttcctggaggcgtggaagaaggtgaccacaatcatcgagcccccccagacgcccatgtcggccatgaagccccgcccgcccacgccggcctccattccctccaagctcaccgtcaacttcgtcctcccctacaagtccgagatcaccaacaaggaggttgacatggtaatggtaccggctacaactggcctgatgggtattttgccaggccatgtttccacaattgcagagctcaagcctggtgttatgtctgtacatgagggaaatgatgttacaaagtactttgtgagcagtggctttgcattcatccatgcaaactccattactgatg

SEQ ID NO: 4954 - DNA, 309 bp, Triticum aestivum
  unsure (1)..(309): unsure at all n locations
  Clone ID: uC-tsro9316046e09b1
ccggtcacccgaaattctgggcgaccaccggcaaaccggcgcgggagcccaccaagaaacagccagcaccgcagacgccgccggcagaccctgangagcccggcgccagacaaccggccgaagcaaggcccaccggggccaagagagcaatgaggaggagtccacgacgaaagaagaacagattgcccgcctccggacgctgggggaacaacagaaccgcgatgacagcccgacggggacgaaagaagaaccggcgccccgcgtgggaaagctgaaagaggagcacgacgacacgaggcccaagcttgg

SEQ ID NO: 4955 - DNA, 490 bp, Triticum aestivum
  Clone ID: uC-tsro9316046e12b1
cgccgcagcctccatcgaagccaagagaggagcatggcgaaaggaggccgtcggcgatgtcggagaagaagcgcgcccccggcccgtgcaaggacgaggtggtgacccgcgagtacactgtcaacctccacaagcgcctccatggatgcaccttcaagaagaaggcaccaaatgccatcaaggagatcaggaagtttgcacagaaggccatgggaaccaacgatgtccgcattgacgtgaagctcaacaagcacatctggagcagcggcatcaggagtgtcccgaggagagtccgtgtcaggattgcccgcaagaggaacgacgaggaggacgctaaggaggagctgtactctctggtcacagttgcttgaagtcccccaggaaggtcttaaaggttcgggtaccaaagttcgtggatgatgaggactaaaccccctggctgttgattcaatcagttagaatttaatacatattcgctgagagcatattt

SEQ ID NO: 4956 - DNA, 477 bp, Triticum aestivum
  Clone ID: uC-tsro9316046f01b1
tttgatagaaggacttcttcccttgttcctcgcccagtctccttgttcctccaagccaagaaactgctctgtctgtgagaaaagcgagcgggcgatcggccatggggaagatgtgctgcagccaggaggaggaggaggcggggttcaacctgctgccgctggtgatggccgccttcgtcatcatgctgctgttcgtcgtctgctcgccgcagccccggcgcaggcgctgcgtcgtcgtcccgtgctactgacgtggcatcatggtggtggtgcggtggtgggagcctcgacctcgatcggcggcgctcaaggcaggcaagtggctgctactgtggtggtaggcgtttggttggtgtctggatttttctgactgatgcgtgttgggttgggtggaagaataatctcaatttctgctgaattccatcggactgtaaagctaaagtcattctcttgttgcaagtctatcttgttgttaat

SEQ ID NO: 4957 - DNA, 545 bp, Triticum aestivum
  Clone ID: uC-tsro9316046f03b1
ttgtttatcgcgtccgccgaaatccccaattccccaccccagagcgtcagcgagagagatggcgtcggcgacggagatgcagtcgctggcaccgtcgggctaccgccgggcgccggagatgaaggagaaggtggaggcgtcgtcgatcgacctggaggcggggaacggggagacgctctacccggggatctcgcgcggggagaacgccctccgctggggcttcatccgcaaggtctacggcatcctctgcgcgcagctggtcctcaccaccgtcgtctccgccatcaccgtcttccaccccaccctcaacgccacgctcttcaactcgtccgtcctcgcgctcgtgctcgctgtccttcccttcatcctgatgatcccattgtacatctatcagcacagacaccctcacaatcttgctatcttgggtttgttcactctgtgcttgagcttcagcattggtgtggtttgtgcaaacactgaagagactatggtgcttcaagcattggtactgacctcagctgtggatgtctctttgactgatacac

SEQ ID NO: 4958 - DNA, 359 bp, Triticum aestivum
  Clone ID: uC-tsro9316046f11b1
tttctgtgcgacttcctcccccctcttgcgaaggtctagggtttggctgcgtagaggagagaggctttccccctcgttcagtcgggagccgtcatgagccgatcggggcagtcgccggatctgaagaagtacatggacaagaagctccaaatcaagctgaatgcgaaccgtgttgttattggcacgctttgtggatttgatcagttcatgaatttggtggtggataacactgtggaggttaatggagatgagaagaccgacatagggatggtggttctgagaggaaatagtgtggtgattgattgaagcctttgaaccaattgccaggccttagcgatatctttgcctacctgcttttg

SEQ ID NO: 4959 - DNA, 517 bp, Triticum aestivum
  Clone ID: uC-tsro9316046g03b1
ttcttttttgaggtcactgcaggaggagaataaagttctccataaggaagtaagcccgttatatcacctttggtccaaccggtctaaattgtttcgtatagcatattttattgacagaggtccgtgtcccttccccacagctcgtggagaagcagaaggcccatgtggcgcatcaagatcaaactcagccttaaaccagctcttcatcttcttccttcatgctgagggatgctccccctgccgcaaataccagcattcattcagcggcaacaggcgagagggcagaggatgcggtagtgcatccgcaggccccaccccggacggggcttccaccgtggatggtgagccacatcaacgggtgaagggcatccagcccatacaggcgtactattcagtagagggtaacaagttgcaccggccagcctggtgtatgttgcggttgctagcacgcctgaccccttttgaggggaaaggataagaaattagagtaaagtatcaagctgcagcgatgtgtata

SEQ ID NO: 4960 - DNA, 283 bp, Triticum aestivum
  Clone ID: uC-tsro9316046g04b1
tttcttacgcgtccgcccacgcgtccgcccacgcgtccgcggacgcgtgggcgcgaaaagaccagagtgccccgcccctcatccccgaagtctccaaacccctcgtcggaagaggtgagcaagccttcacgatggcggtggcggagctctgggagacgctgaagcaggcgatcttagcgtacacggggctgaccccgacggccttcttcaccgccgaggcggtcgccaccgggctgtaccacgtcgtgtcggggatctttgcgccgccgccgtctccccggca

SEQ ID NO: 4961 - DNA, 239 bp, Triticum aestivum
  Clone ID: uC-tsro9316046g08b1
ttttgattctgtatcattgtaatagtgagactttactacacccattctgtcggtagaacattctcttaggagattgttttatttgttttggttgagatatactaaaggctgtgtacctatggaaagaaaaaatacactttcaagttttgtatgtagtacttgatgtatgtctcaagtataacttataatgatccaaaaaaacgagacgatatactggccgcccactaagaacaacaagc

SEQ ID NO: 4962 - DNA, 194 bp, Triticum aestivum
  Clone ID: uC-tsro9316046h02b1
tttgggtcgcgtgggcggacgcgtgggcaactagtaaagaacattgcattgccaactgctcttaggtcatcacaaaagagttaattgacgttggtgatacaattaaaaaaaaaaaaaataaaaaaataaataataaaaaaaaaatacattattaaatattgacaaaaaaaaaaataaataaaagataaataaaa

SEQ ID NO: 4963 - DNA, 202 bp, Triticum aestivum
  Clone ID: uC-tsro9316046h08b1
tttcttcccacgcgtccgcaagtgcaggtggcacgcatagctattgactcggagctaggtacataaccatggccatgggttctgtctgctcgagttcacaggtagtgatcgtggctctcgccacggaagtatacatgcacgctgtagctactgatgacgacacggatggccccatggactctgactccaaaaagagcagtgt

SEQ ID NO: 4964 - DNA, 440 bp, Triticum aestivum
  Clone ID: uC-tsro9316046h09b1
ttgtttttgtacacctccatttcattatccggggagctcattatctaattcacggcaacattcgcatgtttaccactactagtcatattcttgtgtggaccaacacgtagtctgctacgatacgttggctcttggctgtcaccatgatatggacatgatatgcagagcgacattgtgcatggccattttcaactgctacttcctccgttgttttagtctgcatataaaatctggtcaaagtcaaacttagtaaagtttgatcaactttgtagaaaaaaaaattaatatctataatacatcatatagtatgaaaattaatttcatgatgcatctaatattattgatttcatattgtgaatcttgatatttattttctataaatttagtcaaagttaacaaagtttaattttgacccaattttatatgcagactaaaaagaa

SEQ ID NO: 4965 - DNA, 479 bp, Triticum aestivum
  Clone ID: uC-tsro9316046h10b1
ttgttgcccacgcgtccggcgcgcggggtggccttcatggtggacaactgctcgacgacggcgcgtctggggtcgaggaagtgggcgccccgtttcgactacatcctgacccagcaggcgttcgtgacggtggacaaggacgagcccatcaaccaggacctcatcagcaacttcatgtcggaccccgtccactgcgccatcgaggtctgcgccgagctgaggcccaccgtcgacatctcggtgacggtcgacgccgacttcgtgcgccctgagcttcggcagtcctcctaggctcgccccttgcacctaagtttactaagcttgcgccgggccggtcggggccccgtaggagagttggtttttgatggatggacattcatgggactgaatggatgggtgcgactagctggattgatctctggagcagctgttgggtaaaggagtctctttgttccaaaaaataaaattggttcgccggt

SEQ ID NO: 4966 - DNA, 524 bp, Triticum aestivum
  Clone ID: uC-tsro9316046h11b1
tctgttttcgtgtattaaatgcttatgcaaggttccttgatgacacacctgagctagtgaagattgttagagtatcatgtggagagtaccatgcagcagctatatcagaaaacggggaggtgtatacatggggacttggaagcctggggcagcttgggcatcgctcgcttcagtctggagataaggagctaatcccaaggcgagttgttgcccttgaaggaatagtaattagggatgtgtcttgtggtggggttcactcttgtgctgtgacggaaggtggagccctctactgttggggaggaggacatgtgggccaactggggcttggacctcagaatggtttcttttcatgcgctcttaatggatccgacatgctactttgtaacattccagtcctggtcataccatcaggtgttcggcttggtacttgtggtcactcacacacacttatatcgatgaaagatggccgtatttatggatggggctataatagttatgtcaggcagcttatgagaaattactta

SEQ ID NO: 4967 - DNA, 528 bp, Triticum aestivum
  Clone ID: uC-tsro9316046h12b1
cgtgtattaaatgcttatgcaaggttccttgatgacacacctgagctagtgaagattgttagagtatcatgtggagagtaccatgcagcagctatatcagaaaacggggaggtgtatacatggggacttggaagcctggggcagtttgggcatagctcgctttagtctggagataaggagctaatcccaaggcgagttgttgcccttgaaggaatagtaattagggatgtgtcttgtggtggggttcactcttgtgctgtgacggaaggtggagccttctactgttggggaggaggacatgtgggccaactggggcttggacctcaaaatggtttcttttcatgcgctcttaatggatccgacatgctacttcgtacattccagacctggtcataccattaggtgtaccgcttgttacttgtggtcactcacacacacttatatcgatgaaagatggccgtatattctgatggagctaatatatgtatggtcaggcagtttatgataaatctactaatgctggtccct

SEQ ID NO: 4968 - DNA, 301 bp, Triticum aestivum
  Clone ID: uC-tsro9316047a07b1
ttttctcccacgcgtccggccggcttcatcgtggccgcggtctacgccgtgtccgccatgtgatctgatctgattggcggatcgacgcggcctcttcttcttgtcagtcagacagtagtgattccgtttgagattatatatactggggttcggggatcgaattggcgcgcatacatgtgatatgcgaatgtgatccatggccgattccatttgtaatttgttgtaccgtgacatgcatcagcttatctacttgattgattccatattataatattttttttttaacttttaattaatatat

SEQ ID NO: 4969 - DNA, 278 bp, Triticum aestivum
  Clone ID: uC-tsro9316047a08b1
ttcttcttcgccatctacgccatcaccaagtaaatcaaggcagccgccccgagtgttccggcggaatagtagtatatttccatgatgatctcgcctgtctattcctagcgtgctcgggttattgcttgtgtgggttctttgaattcttttccgtgtacgttgacgatgcgaatttctctgtggtttccatggaccgtgtgaagagatttcagcttctttatatgtactatgtatatgcactagtatcatgtatgggagtttatgcatacagtccttat

SEQ ID NO: 4970 - DNA, 470 bp, Triticum aestivum
  Clone ID: uC-tsro9316047b04b1
attttagtctgactactgacacatacacacacacacaagtgctagctagctaatcgatcaggcagccatgtcggaggagaagcaccaccacctgttacaccacatggagggcgaggacttccagcccgccgctgactgcggcgtctacacgtacgggtactcgaccgttacggtggtgaccgtcaccggcaaccacagcgagtacgagcggatcaccaaggaggagaagcaccacacgcacactgagcacctcagcgagatgggcgcagcctggggcggagccttctacctctacgagaagcacgaggcgaacaaggacccggagcacgcgcacaagcacaagatcgaggaggaggtggttgccgacatagccgtcggcgccggcggcttcgtcttccacgagcaccacgagatgaagcatgaccacatggaggccaaggaggccagcggcgagaagaagcaccaccact

SEQ ID NO: 4971 - DNA, 253 bp, Triticum aestivum
  Clone ID: uC-tsro9316047b05b1
tttccttcgcgtccgcccacgcgtccgcaaatatagatttggcggtgtgactcttgaaactttcttgatgatttgtggctttgttaccgtgtcgaaaggccctcctcccgtggtccgtgtgaccacggagggcttgctctatcatgtaatctgttctttttcttctgcccatttatatgccgggccttatgctgctgcactgcactgttcctccaagttacggttataaataattaaatgttctgtttggatt

SEQ ID NO: 4972 - DNA, 464 bp, Triticum aestivum
  Clone ID: uC-tsro9316047b06b1
ttttataaaaaaaaaaaaaaaaaaaaaaaaaaaaaaaaaaaaaaaaaaaaaaaaaaaaaaaaaaaaaaaaaaaaaaaaaaaaaaaaaaaaaaaaaaaaaaaaaaaaaaaaaaaaaaaaaaaaaaaaaaaaaaaaaaaaaaaaaaaaaaaaaaaaaaaggggggggcccttttaggggccccagttttcctccccggggacgcccccaaaattctttttttttggggcccccaaattaaaactatgggcccccttttttccaccttggggttgggaaaacccgggggttcccccacttaaatggcttggggacccccccccttttcccggggggggatatatcaaaaggggcccccccaattcccctttccaaaatttgtcccccctcttatgggttatggggcccccccttttatggggccttttagccggggggggggggtggttccccccagtggtcccctt

SEQ ID NO: 4973 - DNA, 298 bp, Triticum aestivum
  Clone ID: uC-tsro9316047b07b1
actttgtttacaccgcagatatgccacccgtgttcaccctgattaccacgagagatattttgttcgtcccgtccacctactaacggcatataaaagcagaggggatcatgaacaccattgcgatgtcattgcttatctctgacggaccccttttcatacgatgagctgtctggacggctgcggtctactggtgcacatgttggcagctgtttaagaccaccggctgcgaacgagaaactggttctccgcgtagcagatctacaagaagctcttgctcacacctaggcctaaactatgg

SEQ ID NO: 4974 - DNA, 524 bp, Triticum aestivum
  Clone ID: uC-tsro9316047b09b1
tcttttttccacgcgtccgcccacgcgtccgatggacatggggaggaacactgtgacgacagggatccgtgggacaatgggccacatagctcccgagtactttaagaccgggaggccatcagtgaagacggacatatttggatatggtgttatgttattagagattgtgacaggcgagcgtgcaattttccccgatttcctcgaaggagctggcgaggtcatgctcatcgatcaagtgaaactgttgatgcaagaagggcgattggaagaaatcgtagaccgcaatataggctgtggatatgactttcaagaactagtaaaaattatccaagtagcactcctctgcaccaatattgacccttgtcaacgccctgctatgtcggaagttgtgcatatgctggaagaaaaaattgtgccagaagatcagtgggaggagtggcagcaagctgagcttacccgtcgacagcagtacgaatataagcagcaccacatattattcaccttcagtgaggagtcactgaaca

SEQ ID NO: 4975 - DNA, 70 bp, Triticum aestivum
  Clone ID: uC-tsro9316047b10b1
tttttttggacgcgtgggcggacgcgtgggtatttttctcaagcgccgtgtatatacacgagatcaagtt

SEQ ID NO: 4976 - DNA, 52 bp, Triticum aestivum
  Clone ID: uC-tsro9316047c03b1
tttcccacgcgtccgcccacgcgtccgccacgcgtccggttctagatcgcga

SEQ ID NO: 4977 - DNA, 538 bp, Triticum aestivum
  unsure (1)..(538): unsure at all n locations
  Clone ID: uC-tsro9316047c07b1
tctttttattttcatccccccgcccgccgccgccgccgccgctagaccagctcgccagcagcaatggcccggatcaaggtgcacgagctgagggggaagaacaaggcggatctgcagggccagctcaaggacctcaaggcggagctgtccctcctccgcgtcgccaaggtcaccggcggcgcccccaataagctctccaagatcaaggtggtgcgcacctcaattgcgagggtgctcacggtgatctcgcagaagcagaaggcggcgttgagggaggcgtacaagaacaagcgtctcccgctcgacctgcgccccaagaagacccgcgccatccgcaggcgtctcaccaagcaccagctctctttgaagacggagagggagaagaagcgcgagaagtacttccccatgaggaagtatgctatcaaagcctaggttaggaggacatgttttacccgccgagtttgctcagaagtngcatgaattttatgttctgtgtggacaccgctgctatctaagtactatgtattcgatatcctgc

SEQ ID NO: 4978 - DNA, 255 bp, Triticum aestivum
  Clone ID: uC-tsro9316047c10b1
tctaaaactaaaatgcgtctagatacatccatttcctcgacaagtatttccggacggagggagtactatatagacgttgtaaagtaccgaagtctttttgtacataaaatttggcaaaagaacatcctcagaattgacgaaaaaataaacaaaaaaaaaataaaatattaaaataaaaaaaaaaaaaaaaataatataaaaaaaaaaatatacataatataaaataataaataatcatatggggggcccctttta

SEQ ID NO: 4979 - DNA, 417 bp, Triticum aestivum
  Clone ID: uC-tsro9316047c11b1
tgcctgtccacgcgtacgtccacgcgtccggtcacgcgttcgttcctcatggtgatgctggacttactggtcgcaagatcattatttacacctatggtggctggggagcacacggaggtggtgctttctctggcatggacccaactaaggttgaccgaagtggcgcctacattgccaggcaggctgccaagagcattattgctagcggtcttgcacgccgctgcattgttcagatctactacgccattggtgtgcctgagcccttatctgtctttgttgacccttatggtactggcaagatccccgatatggagatcctctagattgtgaaggagaactttgacttcaggcctgggttgatcagcattaacccttgacttgatgaatggtggtaacaggttcatcaagaccgccgtt

SEQ ID NO: 4980 - DNA, 492 bp, Triticum aestivum
  Clone ID: uC-tsro9316047d01b1
tttgtctaggcaggggcttggaaaagcaagcttgaaccagcatctagggagttgtttgacttcttgcccaaaaccattcaggagcagcttttgcttgaaagagatccccatggcaatgttcaggttgcgaaaattgaaactgagaaaatgcttattgccatggttgaaactgaattggagaagagaagagcggcggggaagtactctgcacatttcagaggccagtctcacttcttcggatatgaaggaaggtgcggcctccctaccaattttgattccagctattgctatgcattaggctatggtgctggtgctcttctccaatttggcaagacaggacttatttcgtcggttggtaacctggctgctcctgtggaagaatggactgttggaggaactgcactgactgcgttgatggatgttgagaggaggcatggcaagaacaagccagtgatcatgaaggctatggtgggacttgatgctgcgccattt

SEQ ID NO: 4981 - DNA, 497 bp, Triticum aestivum
  Clone ID: uC-tsro9316047d03b1
tttagtctcgagcagaggtagtaatcacagaagaatctgctgcccctgcgtgcttgtttggagcttggtgcctggaggcgaggctaggaagaagatgacgaggcggttcttgcctctttgcgcgctcctcatcgtgctgctctgcatggcggcgagcctcgcggaggggaggcgcggcggggggcgccccatcatcggcggcggcagcggcggggccagagggagagggtcaggcagcccgcgcggcctcagcggcggcacctgggcggcgtgcgtcggctcctcgctgctggtcgcggtggccatgctcttctagcttgcagcggcgagaagaactcaagaaggatggttgggcaatgtaaatgttctgtggattcgttggttctttactactactgtcgatttgattgttgttgtatatacgtacagatacattcgtgagcggattgatgaattcatttgacatgttctatcttgattaagtggattatgggcag

SEQ ID NO: 4982 - DNA, 489 bp, Triticum aestivum
  Clone ID: uC-tsro9316047d04b1
tttacttaacctgggcagctctctcctcgttgctccgattgccgccgggaagccaaaggccgccgtccgccgtcatggacccaagctccgagatcgtgtacgacatgcccggcttcatacgcatccacaagagtggccgcgtggagcgcttgcaaggcaccgagaccgtcccgccctccccctccggtgaccccgccaacggcgtcgcctccaaggacgtcgtccttgacccggcggccaacgtctccgcccgtctctacctccccgccgccgccgcggcggagcctggaaagaagttccccgttgtcgtctacttccacggcggcgcgttcgttgtccacacatcggcctcaccgatctaccacaagtacgccgtcttcctcgccgtcgtcgcgcccgccgtcgtcgtctccgtcgactaccgtctcgctccggagcaccccctcccggccgcctatgacgacgccttcgcggtcctccaggcgatcg

SEQ ID NO: 4983 - DNA, 483 bp, Triticum aestivum
  Clone ID: uC-tsro9316047d05b1
gcgtgggcgggtatattggagctccgatggagtggtgtcggcatcgaggactggtggaggaacgagcagttttgggttattggtggcacatctgcccatcttttcgcagtgttccagggtctgctgaaggtgttggccgggatcgacaccaacttcacggttacatcgaaggcaaacgacgaggacggcgactttgccgagctatatgtgttcaagtggacgagtctcctcatccctccgaccaccgtccttgtgattaacctggtgggcatggtggcaggcatatcatatgccatcaacagcggttaccagtcctggggtccactcttcggaaagctcttcttctcaatctgggtgattctccatctctaccccttcctcaagggtcttatggggaagcaagaccgcacgccaaccatcgtcattgtttggtccatccctctcgcctccatcttttcctgctgtgggtgaagatcgaccctt

SEQ ID NO: 4984 - DNA, 388 bp, Triticum aestivum
  Clone ID: uC-tsro9316047d09b1
ttttctggccgcagtacgtgctcctgggcgcggcggacgtgttcgccatggtcggcatgcaggagttcttctacgaccagatgcccgtggagctcaagagcctcgggctcgcgctctacctgagcgtccttggcgtcggcagcttcatcagcagcttcctcatctcggtcatcgacggcgcgacgaggaggggcggcgggacgagctggttcgccgacaacctcaacaggggccatcttgattacttctacctgctccttgctgctctcagcgcgctggagcttcttgctttcctctacttctccgcgacttacatttacaagagaaagcctgtcaatgttcactgaccgagactgatacattcgtcttatgttctactccctctgtt

SEQ ID NO: 4985 - DNA, 473 bp, Triticum aestivum
  Clone ID: uC-tsro9316047e06b1
ttctgtagctcctagccaacaccaatcaaagcctccatccaatcccaagcaacctcgaggatgtcttgctgcggaggaaactgcagctgcggcagcgcctgcaagtgcggcaacggctgcggcggctgcaacatgtacccggaggttgaggccgccggcgccaccctcctcgtctccgccaccgccacccacaaggcgagctcgggcgggatggagatggcggcggagaacggcggctgcggctgcacccagtgcaagtgcggcaccagctgcggctgctcctgctgcagctgctagatctatcatcggtcatgcatgcaccgcgcgcatcatatctatgatctatctacaatctacttaccatgtaacgccacctgatcgagggtctttgtatgtatgtaagcacctgccagcatgagcagagcaggtgcactgccatgcatgtaaaccgacccctaaataaaatcttccgt

SEQ ID NO: 4986 - DNA, 456 bp, Triticum aestivum
  Clone ID: uC-tsro9316047e08b1
ttctttttgtgagtgagcgagcgagctagtctttcttcttctgaaaccatgtgcgagtccgcctccctactagctgcagccggagaccaagacggccaccaccaccagggggtgaccaaggcagccgagatggacacgggtggcctgctggaccattccccggcagccctcggcccgagccctcttcccacgccgcctccaccgctcgtgttctaccaagacgattaccggtactactacgacgacgacagttgcctccaggaggaccaggagggcgacgacggcgcctatcaactgctccaggacgaggaggaggacgtcgccgccaccagctcgcttgctgccaggctacgtgagctcgttcgccagaagctggccgaggtgaacgcctccagcgcggtcgtcgcggggctcggcctcgtcgggagcgccgtcggcgcctactttctctggccc

SEQ ID NO: 4987 - DNA, 81 bp, Triticum aestivum
  Clone ID: uC-tsro9316047e10b1
tgcccacgcgtccggcctagttgcctggaagaaattaacaaaaaaaaaaaaagaaacacaaccaaaaaaaaaaaaaagaaa

SEQ ID NO: 4988 - DNA, 383 bp, Triticum aestivum
  Clone ID: uC-tsro9316047f04b1
ttgtttctctgtccaccggccggagggaagggagaaaagagaaagctagctgcctttgtctttgggccatggcggagttcaagcacctttgcatggccaagttcaaggaaggcgtcgtggtggaggacatcatccaggagctcaccaagctcgccgcggagctcgacaccgtcaaatactttgggtggggcaaggacgtgctgaaccaggaggcgctcacgcagggcttcacccacgtcttcgtcatgaccttcgccagcgccgaggacctggcggcgtgcatgggccacgagaagcacactgccttcgcagccaccttcatggcggcgctcgacaaggtcgtcgtcatggactttcccttagtcttcgttaagccggcgccg

SEQ ID NO: 4989 - DNA, 502 bp, Triticum aestivum
  unsure (1)..(502): unsure at all n locations
  Clone ID: uC-tsro9316047f06b1
ttttgtttgcgtgggcaggattgtgctttgtgtgaggttgctttgcaatactggtgatgatgtgaggaggatttggttgcaatcatgtagacagagttttgcgaagatgcttgctgagaagcaattcagggagacagaggagatgagggccaaggcacagatctctcatgcccagccagatgatcttattgacttctaccacctcaagagcagaaagggcatgagccagcttgagttggaggacgaggtccaagatgatttgaaggctgcaactggtggattcaccaaggaaacagatgatgcaaatagacttaatcgcattcttcagttgactgggttcagtgatcctgtatatgctgaagcatttgtgacagttcatcattatgatattgtacttgacgttactgtcgttaaccgcacataggagacacttcagaacctgtgtttggaactagctaccatgggagacctcaacttgttgaccgtnctcagaactatactt

SEQ ID NO: 4990 - DNA, 362 bp, Triticum aestivum
  Clone ID: uC-tsro9316047f07b1
ttttctgatcatccctgataccaaagctcatctgcttctccttgaaatcttattgggtccacagatttggaggatgtcttgcaactgcggatcaggctgcagctgcggctcagactgcaagtgcgggaagatgtaccctgatctgacggagcagggcagcgccgacgtcgaggtcgccgccgtggtcgttctctgcgtggcgcctgagaacaaggcgggacagttcgaggtggccgtctggcagtccggcgagggctgcagctgcggcgacaactgcaagtgcaacccctgcaactgttaagctgcatgcactcgttcgtagtacgtgtgatggtgtgagagaatacgtgattaactagcgt

SEQ ID NO: 4991 - DNA, 553 bp, Triticum aestivum
  Clone ID: uC-tsro9316047f09b1
tctttttcccacgcgtccgcccacgcgtccgatttgggatatggcatgaagggttcaagtggctattcacattggtaatctgtgatatttatactgcagaccaaatgcggaggtaaactctggtttgtggtgttctaagaagttcccaagctcgtgcatacagtgttgaccccttagtcacctgctacgtctgcatccagcacagcacacacatcaccatcaccatcaccaatgccatggcgcgcccctcttgctgcatgcggttgccacatatcatttcttctgagccttcctggttcctgttcgattggtggagcattttggactagaagcggctctttgtaaatttattgtaccgctttaagattagtaggggcatggttcttcttgatgtgtaagctatgattgtttgtgatcatttggagatgtgattgtatgttggtaaaaactaacaggttggatattgaagagcaggggaggagattgtatgggttgagaatacagagtcaagaattctagaatctgttggtgcctgagttctgttaatcatata

SEQ ID NO: 4992 - DNA, 546 bp, Triticum aestivum
  Clone ID: uC-tsro9316047f12b1
tcgtttcgcactgccccaccgcgccggccccgactccgactccgacactccccggcggcgcgcgctcgccgagctcggtcgcgctgcggttcggatcccccggaggcgtgcggcttcggcgcgggcgagggtcggcggcggtcgcgatggcatccgacgggcgcgtggagcggatcgcgtccagcatccgcgccatccccaacttccccaagccagggattttgtttcaggacatcacaaccttgcttctcgatccgcaggcattccgtgacaccactgacctctttgtcgagcggtacaaggacaaagacataactgtagttgctggtgttgaagccagaggattcatttttggtcctcccattgcattagccataggtgcaaagtttgttccaataaggaagccgaaaaaattacctggtgaggtgatatcggaagaatattctctggaatatggcactgacaaaattgaaatgcacgtaggagctgtgcagtccaatgaccgagtccttattggtgatgatctattgccacagggggaaccct

SEQ ID NO: 4993 - DNA, 492 bp, Triticum aestivum
  Clone ID: uC-tsro9316047g02b1
ttttcttctcgtccggacgaagcgctcttcggtgatccggtttctgaatttgctggtcaaaacgttggcgttgtgattgctgaaacacagaagtacgcctatatggcggcgaagcaagccgtcatcgagtatagcaccgagaatctcgagccgcccattctgacaatagaggatgccatccaacatgacagctacttccatcctcccccatttttggctcctaagccagttggggatttcgagcaagggatgtctgaagctgatcacaagattttatcaggagaggtgaaacttgaatcacagtactacttctacatggagactcagaccgtcttggccgtccccgacgaagataactgcatcaccgtctatggcctaactcagatacccgaggtcacgcagaatgtcgtcgcggactgcctcagcattccgtaccacaatgttcgcatcgtaacaagaagagttggcggcggcttcggcgggaaggcaatg

SEQ ID NO: 4994 - DNA, 275 bp, Triticum aestivum
  Clone ID: uC-tsro9316047g05b1
tgttttgcgtgggcgctcatgttaccatgtctgttccgtcagttttgagtcataagtgagacccttggaggaaccatgtttcatacccgccctagtttgttccctgacagtgttagaagaattgtttgtgtcgatctataattattgtttgatttgcactagggatcgctgcttgttaaaatttgcggagcctgctgctggattttcacactaaacagagactaaaaaagaacaggcgctacttgtggcaaagataaaagatgatactagattcg

SEQ ID NO: 4995 - DNA, 417 bp, Triticum aestivum
  Clone ID: uC-tsro9316047g06b1
tttccttcgcgtgcggggtgagaagaactcgtccggggacctgatgtccagcagcaagctggtcgcggaggccgccaagacggcctacgagaagaagagcgtcgagggcatcgacaaggaaaaggtagccgccgcctccgtcgacatcctcgactccgccgccaagtacggcaagctggaggacaagccggtggggcagcacctctagaaggctgaggggtacctgaaacagtacagctccggcggcaccgagaaggagaaaaccgacgcacctgctgccgctgacgcaccgaagccggatgcacccaaggaggcagcgcctgcgcctgcccctgccgcggaggaagagaaatcgtccgatgggttcggtctcgacgacgtcatgaaaggggctgcatcgctgtctgggaagaagag

SEQ ID NO: 4996 - DNA, 344 bp, Triticum aestivum
  Clone ID: uC-tsro9316047g08b1
ttctgtctgatgccctacatgctgctgtaccccaacacgtcggacgccggcggcgagaaagggctgggcctcaccgacatgggcatgcccaacagcgtctccatctgagctgagcgaggtcctttaatctgaacagcgtctcgttcagtagattggctggttcgtgtctcgcgtgcagggtgtattgtgttcctttaatccttctcatcattcgcttctgggtggttgccgtaattagttgcgagggatcagtggacgatggcaaatgatgatcgtagatgatgttgatcgggagagaacaatgaggcatgaataagcagtcgtgtgtgcattcctcttatctc

SEQ ID NO: 4997 - DNA, 123 bp, Triticum aestivum
  Clone ID: uC-tsro9316047g09b1
tgtctttctgcggacgtagaaggaatcatttcttgttgataatttcatcaagaccgagcaacggccattcctgacagagccggacagcccctatacctgatgaccgtggtaagaacgaacctc

SEQ ID NO: 4998 - DNA, 256 bp, Triticum aestivum
  Clone ID: uC-tsro9316047g10b1
ttgtctgtctagctaggattctccagctaggagtcattatctggttcgtcctctgaaccctgcagttgcatcgtagtgggacagccagtgtgtcggttgacgggtgagtggtatgttcctatcatggctgcgtgatagcagcgcgcataatgaataatggaatgtgctgcttagccccacgaagtctgcatcgtgccctacctccctgaatgatgtgcacttgaagtcttgagcatgcaagttcagtttaatgccc

SEQ ID NO: 4999 - DNA, 409 bp, Triticum aestivum
  Clone ID: uC-tsro9316047g11b1
ttgtttggcggcggcgcgttgcacaggagaaggagctggcggcggcggtgcccgaagaggagaagcacggcgacctagcccgagctcgcaaccatggctaggggtttgaagaagcatctgaagaggctcaatgccccgtctcattggatgcttgacaagcttggtggagcttttgcccccaagccatcatccggtcctcacaaggccagggagtgcctgcctctgatcctcatcctgaggaacagactgaaatatgctctcacctaccgtgaagtgcaatctatccttatgcagcgtcatattatggttgatggaaaggtccgcactgacaagacctaccctgctggtttcatggacatcattttcattcccaagactggtgagaactacaggcttttgtatgacacca

SEQ ID NO: 5000 - DNA, 564 bp, Triticum aestivum
  Clone ID: uC-tsro9316047g12b1
ttctgttttcggacgcgtggggcgtctcccaacttttccttccaaacagcggtgacctccaccaccacccaagagccgagcgaggagaagagaagagatcggccatggctgcggacggcgagaggtgggtgggcctggcggtggacttctcggaggggagccgcgcggcgctgcagtgggcggcggacaacctgctccgctccggcgacaacctgctcctcctgcacgtcctcaaggaccccgactacgagcagggcgagaccctcctctgggaggcctccggctcgcctttgatccccctctcggagttctctcacccttcaactgcaaagaaatatggggtgaagcctgatgctgaaacgctggacatgctcaacactatagctaagcagaaggaggtctccgtggtttcaaaagtcctgtttggagatccccgcgagaagctgtgccaagccatccatgacatgcccatcagctccctggtcattgggagcaggggccctggcaagctcaagagggtgctcttgggcagcgtcagcgattacgtcgtgaacaatgccgcct

SEQ ID NO: 5001 - DNA, 214 bp, Triticum aestivum
  Clone ID: uC-tsro9316047h03b1
tttccttcgcgtccggacgttgtgtaagactattgctgtttaatgtatggaacttctgtatcgaccgcgcttcctagctttgaatgatcctggggctagtgagccgactagataggaaagcgaggctggattaacaatttgaagccgataatgttgaaacagtgtatgactagctaactatgtacttatatatatatatacaaacaaggatgtt

SEQ ID NO: 5002 - DNA, 229 bp, Triticum aestivum
  Clone ID: uC-tsro9316047h04b1
tttctttctcgtgcggacgcttctgctgaaggtaggggtataagagtagaacgaaggatagatactgaacacactaactgaaaattaaacctaggtaaattaaatgagatagtcttaaagatccaaaagatataaaaatatgaaaccgagtaaaaagaaaatctggaagacctgattcatattgaataaaaataaaacctaacagagatgaaattctaatccaaacaaa

SEQ ID NO: 5003 - DNA, 304 bp, Triticum aestivum
  Clone ID: uC-tsro9316047h09b1
ttgttttatcacgaaagcacacgcagtccctgacacttgctccatcaataccgatcgatggccatggtagctagagccgtactactcctggccatggtggccgtggcaagcgccacctactgccccccgccgtcggcgccggtgccggtgcccctctacgggtcgtgcccccagaacgcgctcaagctgcacgtgtgagccaacgcgctgaaccaggtgaaggccaagatcggcgtgtccgcaactgagccctgctgctctcttctagacggtctcgtaaaccaggacgcctcctatcgccttt

SEQ ID NO: 5004 - DNA, 500 bp, Triticum aestivum
  Clone ID: uC-tsro9316047h10b1
tcacaaagcgcttgaggatgtgaggttttctgtttgtgtctttttttcttcttcttagattcgtttgtttcaaaatgatttatcactcgtaccgcgtgtccaaatgatgaaccgctttcacctttgtgtttctcgcgcctaggttttcaaaactcggtccactttggtaggttttgatgaacagttttctgcaaaatctatgctccaagctgtactaatccatgcttcaaaactgactaaaatgtgcttcaaactatactaaggtgtgcttcactttttttgggacgcacagtcgctttttcacatgagtagcacatgtgtgcttcacacgaaaaaccataataaaagaaccgaagatagaaaaaactgcaaattgaaaattcatttacaattaacatagatcaaaaaaatggaaattaaaaaaccaggtaccataaaaaaatctgaaattcaaagtggagaccaaaaaagctgtaataccagcttttaccctgacactt

SEQ ID NO: 5005 - DNA, 240 bp, Triticum aestivum
  Clone ID: uC-tsro9316047h11b1
tgctccctctcctcctctagcaaccaagccaagctcaagcggcatcaatggagggcaaggaggaggacgtgcgcctgggcgcgaaccgctactcggagcgccagcccatcagcacggcggcgcagggcggcggctcgtacgagaaggactacaaggagccgtccccggcgcccctcttcgaggcggaggagctcacctcctgatccttctaccgggccggcatcgccgtgttcctggcca

SEQ ID NO: 5006 - DNA, 466 bp, Triticum aestivum
  Clone ID: uC-tsro9316047h12b1
ttttctgtaactagctaaacagtaaacagagagctctccgtgaatgatgtcgaggaagaggaagaagaagaagcgtggagcacgctgctgctacctggtcgcgctctcagcagtgtgaatttccagaagcatgcttgccgtgccttcttccgggtgcaccggaggccggcatgtgagcaggggtgcttcagtgatgcagaagaaaaaaggcaagtcttattggcaagggaaggctacgcctttcttccaggtctccctctctccatctaaatccgtgtttggaggagggggctacggttagtttacccaccggtttaccgtgtccttgtgagttgtggtcattatcatgcactcgtcagttgcttgtcatgtatggtgtccttgaattttcagctacataatggtcggttgggtcagtgaatgtgagtgtgttcatgtgagtcaattagctacaagaagtgtgatg

SEQ ID NO: 5007 - DNA, 573 bp, Triticum aestivum
  Clone ID: uC-tsro9316048a03b1
tcttccagaggtgcagtggagaatggcaccgccgcagagccgaaccgcatcgttgactgccggtcataccctctataccggttcgttcgcaaggagctgggaacggtgtacttgaccggagagaagacacggtcccccggggaggaggtggacaaggtgtttgttgctatgaaccagggtaagcacatcgacgcgctgttggagtgcctcaaggagtggaacggcgagcccctgcctctctgctaatcagggagatgaagagaagatgctgtgcttcaggattctgaaggctcccgttgttctgaactgataatgctactgttgtttgatttcgtcctttctctgtttttccactcttctaaaacgttggtgcatgcaacgttctttcggagctagaggccattgccaaagattgcactctgcaatacttgtagcgcaacaacttgagcttgtgccaatgtaagcgaaagggcacaaattttcatgtaaaatgtgatgttctgctactgaatcccaacgttagacttactgatgtcatacagcacattttctggttcaaaaaaaaaataaaaa

SEQ ID NO: 5008 - DNA, 190 bp, Triticum aestivum
  Clone ID: uC-tsro9316048a08b1
cacatatccatctaaaccacaatgggcaaggccacgatgaacatcaagcggcagcgttccactagtgtcaccactgctgccctagcgtccgtgctgatgctgctcctggcggcggccggcggcgtagccgcacaaggaagaggaggaggctacggtggcggcggaggaggatatggtggtggtggcggtg

SEQ ID NO: 5009 - DNA, 428 bp, Triticum aestivum
  Clone ID: uC-tsro9316048a11b1
ttctgttcgcggacgcgtgggcggacgcgtgggcggacgcgtgggcggacgcgtgggcggacgcgtgggcggacgcgtgggccgcggccccaagggcaccggcgagtacgagtgcatcgacctctacgccgtcggcgggggccgcaaggccagcgacatgtacaactcgacggccgaggacgtgctgtacgtgctcaaggagagcagcgacgacgaccggcacgactggtactcgctgggccggtttgacgccgccgtcaacaagtggacgccgatcgacgaggagctggagctcggcgtctggctgcggtacgactggggcaagtactacgcgttcaagtccttctacgaccccgtgaagaagcggcgcgtcgtgtgggcgtacgttggcgagaccgactcggggcgcgccgacattactcaggggt

SEQ ID NO: 5010 - DNA, 407 bp, Triticum aestivum
  Clone ID: uC-tsro9316048b03b1
tttcttccacgcgtacgcagggactcgcagcctaacaggcaatcaattgggcagggaaacggaagcttgcatcaaggagcttgtcaagggattaggcatgaaaagtggatttgtatttttatttacttgtttggtttatgatgaaaaaaaaaaaaaaaaatagaaaaaaaaaaaaaaaaaaaaaaacataatgaacaaaaaaaacatataaataaatttaaaaaaaacaaaaaaagaaatagggggcgcccctttttagaggacccaaactaacttcccctcgcatgcaccaacttagtttttttatagggcccccaaaacaaaatgaacgggccggcttttaacatccccaggtctggaaaaaccctggtgatacccaattaatacgcttggaaaataactccctt

SEQ ID NO: 5011 - DNA, 479 bp, Triticum aestivum
  Clone ID: uC-tsro9316048c02b1
tcttgcagctgcaattgcctatggtcttgacaagaaggctaccagtgtcggtgagaagaatgtgcttatctttgaccttggtggtggcacttttgatgtctccctccttaccattgaggagggtatttttgaggtgaaggccacggctggtgacactcatcttggtggggaggactttgacaaccgtatggtgaaccactttgtccaagagttcaagaggaagcacaagaaggatatcagtggaaaccccaggtctttgagaaggctcaggacttcttgtgagagggcgaagaggaccctttcttccactgcccaaaccaccattgagatcgattcactctttgagggagttgatttctattccaccatcaccagggccaggtttgaggagctcaacatggacctcttcaggaagtgcatggagccagtggagaagtgcctgagggatgccaagatggacaagagcactatccatgatg

SEQ ID NO: 5012 - DNA, 492 bp, Triticum aestivum
  Clone ID: uC-tsro9316048c06b1
tgtctcttcggatttcgccgccgccgcagccgcagcagctcgccgcccacgcctcctacccgtcgacgagatgacgaagcgcaccaagaaggctggaattgtcggcaaatatggtacccgttatggtgccagtttgcgtaagcagatcaagaagatggaggtgtctcagcactccaagtacttctgtgagttctgtgggaagtttgctgtgaagaggaaagcagttggaatttggggatgcaaggactgtgggaaggtgaaggctggcggtgcttacaccatgaacactgccagtgcggtcactgtcaggagcactatccgtcgcttgagggagcagactgaagcataagttgctactagtgttttgtcctagtgaatcatctgggattttgcagtttagacgatactttggattcagttctgttggctggttagtcaaggattatctttgtacttggtgcgatgatgttctgttatgttattctctcaccc

SEQ ID NO: 5013 - DNA, 512 bp, Triticum aestivum
  Clone ID: uC-tsro9316048c08b1
ttctttcgcccacgcgtccgcccacgcgtccgctttagtgaatgtgctaatggagtcaaagggtggcaaaaagtctagcagtagtagttccctgatgtacgaagcacccctcggctacagcattgaagacgttcgacctgctggaggcgccaagaagttctctgctgcatacccgaactgcgcgaagaagccatcctgatatcgtttttggcatccccttctcgtagtttaggatttttatgcaattttattctgactcttttctcccaccaatctctctggcttgctgcttcacgataatcgaccagttctctagtctttctccctctgttcctctctgctctgctctctgactcgaactgcaacaatggctgccccgacctctgcgatcgggtttgagggctacgagaagcgcctcgagatcaccttttccgaggcatcaatctttgccgaccctcatggtcgtggcctgcgcgccctttccagggcccagattgactttgttcttgatc

SEQ ID NO: 5014 - DNA, 497 bp, Triticum aestivum
  Clone ID: uC-tsro9316048c09b1
ttcgttcggcacacaagaagctcatagccattcaaagcctctccatctccgaagctccaacccaacctcgaagatgtcttgctgcggaggaaactgcggctgcggcaccgcctgcaagtgcggcaacggctgcggcggctgcaacatgtaccccgaggttgaggccgccggcgccaccctcctcgtctccgccaccgccacccacaaggcgagctccggcgggatggagatggcggccgagaacggcggctgcggctgcacccagtgcaagtgcggcaccagctgcggctgctcctgctgcagctgctagatccatcatcgatcatgcatgcaccgtgccgtgcgtgcatcatcgatccgatcgatctactactaccataccatgtaaccgcaacctgatcgagggcctttatgtacgcacctgacctgcatcagcagtcaggtgccatgccatgattgtaaacaggcccccctaaaataaacctcccttgataact

SEQ ID NO: 5015 - DNA, 57 bp, Triticum aestivum
  Clone ID: uC-tsro9316048c11b1
ttcgtttcgcccacgcgtccgcccacgcgtccgcccacgcgtccgtctagatcgcga

SEQ ID NO: 5016 - DNA, 487 bp, Triticum aestivum
  Clone ID: uC-tsro9316048c12b1
ttctttcggttcccgttctcctctccccctgtcgcctccatagcagcagcagctccagctcgagcaagaaagaactagtttgatctgtgaaaatgttggccatcttccagaagcaggtggcgcacgcgccgcaggagctcaacagcccgcgcggcagcaccgccaagcccaagaaccccgacgagatcctccgcgacttccacgccgtccacccctccgacgccttctccacctccttcggcggcggcgccgccctcgcctgcgtcgccgcgcagccccgcaacctcgccgacggcgggtaccagaggatgttctgcgggctggacgacatctactgcgtcttcatggggacgctggacaacctgagcgcgctgatgcggcagtacggtcctacgggccgcttcaccaacgaggcgctgctggtgatcgaggactaccgcaccctgcgcgaccggggcctctaccctgctgaccaggtggtgaagga

SEQ ID NO: 5017 - DNA, 409 bp, Triticum aestivum
  Clone ID: uC-tsro9316048d03b1
tcttggacgcgtgggcggacgcgtgggctttcagcacgtcagcagtccactcctttcgacatcttgaggagatttctctgcatcgcgaagtgggcgatgaaacaaaaaataagtggaaagaagcagcaaagaatcacccaactcgtcgtcccaagatcttgttcctctagacaccatcaacacgtccaggcagtacaggctgtgacttgctaatggcacagcattctcatatgctgcttattggttgatgaccattcatcaacatgatttagtcctctttgctctcgtgtcggtttggtggcttccccgttgttcgtacttttatgttgtgtcaccactaggatttatttacttgtaacagacctaagttaatgacctattaagctgagcaaacgatttcctttgcaag

SEQ ID NO: 5018 - DNA, 274 bp, Triticum aestivum
  Clone ID: uC-tsro9316048d04b1
tttcttttgacgcctgggcggacgcgtggggtgtgagccctttgtcagttcacacctttcgacctgttgaggagacttgttagcattgcgatggggcgcgtgaaacaaagattgactggtaaggagcacgaaagattcacccagcgcggcggacgaagagctagatgatctggacaccatcgacacgtggaggcacgacaggctgcgacttgcatatggaccaggactctcatatgcctggtattggctgaggaccattcatcaacatgagtta

SEQ ID NO: 5019 - DNA, 217 bp, Triticum aestivum
  Clone ID: uC-tsro9316048d11b1
ttcgttcgcgagcttgtgcatgtcagacagctcaagagagaatccctgataggaaatgtcttgttgcttgtgaaattgtaagatctgcactactgctcattgtggatcatgaacgatgtggcttcacaacagctcctgcgtcagtttcgcacttttttttcgcgaataaatgagattttattgcttaaaaaaaaaaaaaaattaaaataaataaaaa

SEQ ID NO: 5020 - DNA, 472 bp, Triticum aestivum
  Clone ID: uC-tsro9316048e01b1
tctgtcacgacagatttctgagctgggcatttaccctgctgttgatcccttggactcgacatcaagaatgctttctccccacgttctgggtgtggatcactacaacactgcccgtggtgtccagaaggttcttcagaactacaagaatcttcaggatatcattgccattttgggtatggatgagctcagtgaagatgataagatgacggttgctcgtgcaaggaagatccagaagttcctgagccagcctttccatgttgccgaagttttcactggtgctccagggaagtatgtggacctaaaggagggtgtccaaagtttccagggtgttttggacggcaagtacgacgacatctcggagcacgcgttctacatggttggaggcatcgacgaagtcatcgccaaggcagagaagatcgccagcgagaatgcctgatgacgaggtgttaccaccgctctgtacaagttaaat

SEQ ID NO: 5021 - DNA, 240 bp, Triticum aestivum
  Clone ID: uC-tsro9316048e03b1
tgtccttccacgcgtccgtgcggctgtttttattgcaaaaaaaaaaaaaaaaaaaaaaaaaaaaaaaaaaaaaaaaaaaaaaaaaaaaaaaaaaaaaaaaaaaaaaaaaaaaaaaaaaaaaaaaaaaaaaaaaatataaataaaaaaaaaaaaaaaaaaaaataaaaacaaaaaaaaaaaaaaacaataaaaaaaggggcgcccctttctatataacaaaattaccccccccctatataa

SEQ ID NO: 5022 - DNA, 502 bp, Triticum aestivum
  unsure (1)..(502): unsure at all n locations
  Clone ID: uC-tsro9316048e05b1
tcttgctggagtcgtcgccgtcgaggtcaccggcgggcctgaggttcccttccacccggggagacaggacaagcccgagcctcctccagaaggccgtcttcctgatgccacccaaggctctgaccacctcaggcaggtgttttccactcagatgggtttgagtgaccaggacattgttgctctttctggtggtcacaccctgggaagatgccacaaggagagatccggctttgagggagcatggaccgccaatcctttgatcttcgacaactcttacttcactgagctcctgagtggagagaaggaaggccttcttcagttgccgaccgacaagacccttctgaccgacccggccttccgcccactagtggacaaatatgctgcggatgaggatgcgttctttgctgactacgctgaggcacacctcaagctctccgaatggngatttggcgaggcgggctgctgctgattcaagctcggcgcctgaaggtcggtggtaatg

SEQ ID NO: 5023 - DNA, 330 bp, Triticum aestivum
  Clone ID: uC-tsro9316048e09b1
ttcgttcgaagtcatatgcctttgctgatgatggaacaaccacaataaatgccacttccattaagtggaaggagggaatggaaattaatgggaatgccattaagaagaaaggaagcaagcgcccattggttgaagaaagtttcttcacctggttcactgatacagagcacaagagccttgctgacggggtgcaagatgaggtggcagagatcatcaaagaagatttgtggccgaacccattgaaatatttcaacaatgaggttgaagagtttgaaggagatgactaggatgaagagggatctgatggggaggatgctgaggaggatgagg

SEQ ID NO: 5024 - DNA, 434 bp, Triticum aestivum
  Clone ID: uC-tsro9316048e11b1
ttcgttcggattccgatcggaatcgcaactagctccgccgcttgattagccggcagccccgtccccatggcgtccaagcggatcctcaaggagctcaaggacctgcagagggatccccccacctcctgcagcgccggccctgtggcggaagatatgttccactggcaagcgacgatcatgggtccatcggaaagcccatatgctggtggtgtatttttggttactattcacttccccccagactacccattcaagccacccaaggttgcatttaaaacaaaggtttttcacccaaatatcaacagcaatgggagcatctgtcttgatatcttgaaggagcaatggagccctgcattgacagtttcaaaggtgcttcttttaatattgtttctactaacggacccaaaccccgaccacccgttggttccggagat

SEQ ID NO: 5025 - DNA, 399 bp, Triticum aestivum
  Clone ID: uC-tsro9316048e12b1
ttcgttcgaaaaagcatcgtctcgtctcgtctcgtcgaggaatcaacagccatgggcggcggcaacgcgcagaagtccaagatggcgagggagaggaacctcgagaagctgaagggcggcatggggagccagctcgaggccaacaagaaggccatgaacatccagtgcaagatatgcatgcagactttcatctgcaccacctctgaagcaaagtgcaaggagcatgccgaggcaaagcatccgaagagcgagctcgtccagtgcttccctcacctcaagcagtgatatctgcccaatcagacagagagagagattaaagagagagagagagagaagctgtcataatccacctactattatcatgttccgcaatgactgattgttgacctaaagcttggg

SEQ ID NO: 5026 - DNA, 514 bp, Triticum aestivum
  Clone ID: uC-tsro9316048f03b1
tcgtacgtgtacacaaacgggactgtgtgtgatctcacagatataccacggtacacagaggttaggtttgtttgttccgagcccactgtactgatcagttcgataaaggagatatcttcctgcaagtatgttttaactgtccaaagcccaatgctctgcaagaacccgttgtttcagcaggaaaagcgcaccttcttcatccactgcaacgagtcgcttgcggaagcagaagctgaggccgtcgaggacgacgactctctcccaaaagaagctcagatgtccatcgttccaaaccccgacgaattgcataactacgcagcttacgctacctgattgcccgccaatcacggtgccctcagctgatgaaagatgccgttattttggaagtacaacagcaagttggcaacatagtataactatcccctggcttgttctgtctgacgccaactagtggttacagggtactctttgagcagatatccattactgaaacagcttgagattaccttagagg

SEQ ID NO: 5027 - DNA, 515 bp, Triticum aestivum
  Clone ID: uC-tsro9316048f12b1
tttcgagcaaagctcgagcatagcaacagcactaaagctaactagagcttccagcaatggcgacctccccggtgctcttcctcctcctcgctgttttcgccgtcggtgccagcgcggccaccttcaacatcaagaacaactgtggcttcacaatttggccggcgggcatcccggtgggtgggggcttcgcgctgggctcagggcagacgtccagcatcaacgtgcccgcgggcacccaagccgggaggatatgggcccgcaccgggtgctccttcaatggcggttgtgggagctgccagaccggcgactgcggcggccagctattctgctccctctccgggcggtcaccagcaacgctggccgagtacaccatcggcggcggcagcacccaggacttctacgacatcttggtgatcgacggtttaaaccttgccatggacttttcgtgcagtaccggcgacgcgctccagtgcaaggactcctagttgctcgcgccgtaagcctaccaacacccc

SEQ ID NO: 5028 - DNA, 386 bp, Triticum aestivum
  Clone ID: uC-tsro9316048g01b1
tcttttcaacgtccccggctggtcctggcgtgccaacttcatgaccgacgacgacctccgctccttggtcaaagcccagctgaactacattctcggggacaacccgatgaagatgagctacgtggtggggtacggtatgaagtacccgaagcggctgcaccaccgcggggcgtccacgcccaagaacgggatcaagtactcgtgcaccggcggcaacaagtggcgcgactccaagaaggccgaccctcacgtgctcgtcggcgccatggtcggcggtccggacaagaacgacaagttcaaggacgcgaggatcagctacgcgcagaacgagcccacgctggtcggcaacgccgggctcgtcgccgcgctcgtcgccatcaccaaca

SEQ ID NO: 5029 - DNA, 205 bp, Triticum aestivum
  Clone ID: uC-tsro9316048g02b1
tgtctttcctgtctattcctagcgtgctcgggttattgcttgtgtgggtactttgaattcttttccgtgtacgttgacgatgcgaatttctctgtggtttccatggaccgtgtgaagagatttcagcttctttatatgtactatgtatatgcactagtatcatgtatgggagtgtatgcatacagtacttattgttgaagtttat

SEQ ID NO: 5030 - DNA, 416 bp, Triticum aestivum
  Clone ID: uC-tsro9316048g09b1
ttcgttcggccacgcgtgcggaccggctgtgtgcttcctccttgggttactcggcctcccgaacgagcagtagaagcacctgcatgggcaccgctagcactaaaggaatggcggtcgagacgttcctcttcacgttcgagtgtgtgagatgagggccatacacgaaagctctgtgaccaggcttccgacgccggctgggatgcctgcttggcgcaagatgccgacagcaaggatggctgcacgactgctaccaagaccaacatggtcatgggcttgggcgagatcaccactaaggccaccgactactacgagaagaacatgcgcgaaacctggcgaaacattggctttatctatgatgatggtgggctcgacacccaccgttgcaggtgcgtcgtacatcgagcagcagtcccctg

SEQ ID NO: 5031 - DNA, 272 bp, Triticum aestivum
  Clone ID: uC-tsro9316048g11b1
tctttcgcccacgcgtccgagatcgcgaatcatgcgcccggtcggtagatttctttgatccgtcttgtttgttcaccttgctgtatagaaagatgagagatcagtgatcggaaccgatgcattctgagttagagagtatctgttcatctgcacggggtgcaaatatcagtttctgtaccaccatggagattactatctgaaatggagtctgcttttctcaacggaaaccaaaagactaacaggtactccaatatgtataactttaatatatg

SEQ ID NO: 5032 - DNA, 55 bp, Triticum aestivum
  Clone ID: uC-tsro9316048h01b1
tcgtctatgcgtccgccgacgggtccggagcgacagtaatgagatcgacggcagc

SEQ ID NO: 5033 - DNA, 485 bp, Triticum aestivum
  Clone ID: uC-tsro9316048h02b1
tctttcacgcgtccgcccacgcgtccgggccgccagtagtgcggtcggcgggagcgccatggcgtgcctcagcgcgtgcgaggcgttcgggtccctccagtactgctgcagcggcgcgtacgggagccccagcacgtgccggcgcggggcgtactcacagttcttcaagagcgcgtgcccgtgcgcctacagctacgcgtacgacgactccacctgcaccttcacctgcgccgacggcaccaactacgccatcaccttctgcccgagcaccaccagtgggaagtacaccgacgagaacccgcaggctgccggcgtgccgcccgcgaacggcacgatggtgtaccgcggcggcgagcagttctcgacgagcggcggcgcctccactgccgcccatgcgtcgcagctgctcctcgcggcggccgtcgccgtcgcgctgctcctgtaagggcacgccggccatacgtgcaatgttggcaacgacatac

SEQ ID NO: 5034 - DNA, 134 bp, Triticum aestivum
  Clone ID: uC-tsro9316048h03b1
tgatggctaatcaccgataggccctgcccgtcgcgatgacaacaggtgcccaccctggatggcgattgggacgcgccctgatgacgcgcattctgcgcttgggtcggggcggttctcacaacgtgaccctgcac

SEQ ID NO: 5035 - DNA, 375 bp, Triticum aestivum
  Clone ID: uC-tsro9316048h07b1
ggctcgatgggtggatcaaaacaagcgtggaccattacgcagtcgtgagccatgcccttggtcaggatatttgctaacactgccagttaacaagtgctacagtcacggtcgtcgatgaactatgacagtacgtggtagcttccaggatttactagacacagaaaagcacatgaatgctctgtaagcgtcaacaagaccctgctgtcggatttgaggctgcgatggattaacgtgtgctttttgacacactcgtattggaggctctatgaggcacttggccatatttacatatgagtactgatgtattgagaacatgcaaactatgaggaatttctgcatgctgtattacagttagcagcatggtctgattcgctg

SEQ ID NO: 5036 - DNA, 395 bp, Triticum aestivum
  unsure (1)..(395): unsure at all n locations
  Clone ID: uC-tsro9316056a02b1
ttgttcagtcggtgcttccacacagacagcgatggagccgtacatggcgccgcggaggctgtggcacgtggtgcgcgccgtgctgttcatgctccgcaagggcatgtacaagcggaagctgaccatggacctgcagctcctgctccaccgcggcaagatcgtcggcaaggccctcagcaggctcatgagcgcccacagccaccacgaccaggccgcctccaggtcggtcgcggaggcacctccgccggcgtacgttgtctcgccgcacccttgaccccgcgctcgccgtctatggtccgcgcggcgccggtcgacaggtggagttcagctgcagcaacaccccgtcctacccgaccgtncaactcattctcgccaagcgccgtcgtgcgaacaac

SEQ ID NO: 5037 - DNA, 75 bp, Triticum aestivum
  Clone ID: uC-tsro9316056a03b1
tttttgacgcgtgggcggacgcgtgggcggacgcgtgggcggacgcgtgggcggacgcgtgggcggacgcctggg

SEQ ID NO: 5038 - DNA, 419 bp, Triticum aestivum
  Clone ID: uC-tsro9316056a05b1
ttgttgagcgctagctagacggaaaccatctctcccctgctcctgcttccgtctcaccaagtcagccacgatggccgtcgtcgccgacaggtcgatgctccggtcgtacgcttctctcctccgcgctgctccggcgagggcctcttcctctgcggcgcggccgtcccttcgccgcgcgctgggcgcgccccctcgtctcctcaggtagcccgtcgaggcgagcttctgcgtggagtcgctgctggcactgcacagcgccaccgcagcggcgcggatgacatctatgctggccgtgcctggccgaggcctcgggtggctcacggaagctgaaattgatggggtatgatgctgacctgccaacggagccaggagattactagtctttcaggatgagctgacacagaaaggaagcatgcttt

SEQ ID NO: 5039 - DNA, 362 bp, Triticum aestivum
  Clone ID: uC-tsro9316056a06b1
ttcgttacgcgtccgtacccaaccaaaaggatctatggtcatcatcctcaccttattaaaccaaagcccgtgcacctgatcctccagtgctgtccgcgatcacagcgtccgtgatagtgctgcgatccgctgatccttgggctggtagctcggggagcaggcgttgcgttcgtttcttgctgggagagtgggtcgagtgatcgggcgggcgggtcgcatgagcccggtgagcggaaagctgcggtggctgtagagggcgcacgcgcgggtcgttggtcgctcgcgggacttctacgtgcggagcatcactgggtgcgcgcgctacgttcacgccgacgcggaatgaggcgcctacccggtgc

SEQ ID NO: 5040 - DNA, 450 bp, Triticum aestivum
  Clone ID: uC-tsro9316056a07b1
ttggttttcggttggtatcttctgtttaccaaagcatgctatcattcctctgcacaaccatcccgggatgaccgtcttcagcaagatgctcttcggctccatgcacctcaagtcgtatgactgggctaggagtatctcggaggctggcactactgcgctcaccacctcagacggggctcgtctagcaaagatcaacacaaacaatgttgttgacgcctcagctgataccatagttctgtacccggagaacggaggcaacctgcactgcttcacggcgctgaccccttgcgctgttttcgacgtcatgggacccccttacagcagcgctgctggcagggactgcgcgtactacagtgagaccaccttctcaaacacagctggtgtggatgacgtgcggtactactggctcaaggagattcccaataccttgcggatgaagggcgtaacgat

SEQ ID NO: 5041 - DNA, 485 bp, Triticum aestivum
  Clone ID: uC-tsro9316056a09b1
ttgcccacgcgtccgggggagaataatgtggtgaagaggaagcgtgaacaagatactgaagagactcctcgctcaaggaaggacaaaggtctggatggaagtctagttggttcaaggatcaaagtatggtggccagacgatgagatgttttacaagggtgttgttgactcatttgatacccattccaaaaggcacaaggttgcatatgatgatggagatgtagaggtactgctgcttagggatgaaaaatgggatttcatcagtgaggaagaaggcaaaactcctgatgtaccatctgagcgccgtggtcgaaaagggagaggaatcacgctgctgccagtgaaggaagaaaaaattgaaacacctaatagtgacggagtggagcttgcaaagaaaaggggctcgccgaaaggttggcgccccacaatggtggcacaccgtgtacaactcccagtaaatcaaaggggaaaactgctgtaaggatg

SEQ ID NO: 5042 - DNA, 291 bp, Triticum aestivum
  Clone ID: uC-tsro9316056a10b1
ttggtggccatcaccatccccaagcgctgcaacatggccgaccgccctgtcggctacaagtgcggagattacacgctgccttgatggcccagctctggtgctgatgaagatgaatgctgtggaagatatggtcgtgtgggaataagcgagtggtgcatgtaccacttaagtggggcactagtgactgcatggtgcctacatgtgatgtgtgcttgtgggaatatttctataagcatgtaatgtttcgtctgtgttaacgtgaacacacgtgtccgtgtgatttctattgtc

SEQ ID NO: 5043 - DNA, 256 bp, Triticum aestivum
  Clone ID: uC-tsro9316056a11b1
aggactcgtggggccgagaccaggtgtagggttccccaactcttgttttccacgcaagccagcgagagcctaccaccagtacagatggaggctgcagtgccagcggacgcgaaggcagcggctgccacgagggaccttctctcggacgacaaccagttcgtggagttcgagctcggcgagtaatgcgatcacacggaagatcgcgacgaagctggccagcaaggggaggatgactgggattatgacaacgtcaacg

SEQ ID NO: 5044 - DNA, 443 bp, Triticum aestivum
  unsure (1)..(443): unsure at all n locations
  Clone ID: uC-tsro9316056a12b1
tcgcggacgcgtggggccgcgcccaggtctagggttccccctttcttcttctccacgcgaatcagctagatactagcaccagcatcgatggcggtggcagcgccggcggacgcgaaggcggtggccgccaatatggacctcctcgaggacgacgacgagttcgaggagttcgagatcgaccaagaatgggatgacaaggaagatggcaacgaagctgtccagcaatgggaggatgactgggatgatgacgacgtgaacgatgatttctcactgcagctgaggaaagagctggagggaggcaacactcagaagagctgaactatttcccatccatatcaaagctgtcgtaaactttatcttcgatcaggcactgtgtggccgttgctctctggacctgcgatactttcctagncatatcaagctctgatacttatcttcggttc

SEQ ID NO: 5045 - DNA, 321 bp, Triticum aestivum
  Clone ID: uC-tsro9316056b01b1
ttgttgaacatgtggcaggagcccttgaaccccggcaactggaaggaagagcactttgtgctaaccagcttagcgatgtggggcgctattatatatggtggattgaaggcgtctggcgggaaaaatgaagtgaaaaccgaggcggggtcagtgccagcagcagcaccggcacattaaacttcatgagagctttattttcttaccacaatcggttttaagtatgttgttgacgataaatcgagaccaagttggctggcaaggttaaggagctgcgctgcccagccaccatgaataatctgaacgtggtgtaacttttgatgc

SEQ ID NO: 5046 - DNA, 392 bp, Triticum aestivum
  Clone ID: uC-tsro9316056b02b1
ttgttgaatacgagcccagaccaaaaccaagaagacacactgtaggatgcatcagtctgtcctctaactgattcgaccaaccaagactatgatgagctacggagaagatgagcaagctgtggaccatgctgagccacctgcacaccctcgaagggcctggcgtgatgctgctgttcccgctgtatgcgtgggtgcttgcgatggcgagcccgtcgaagctggacgactagcagaggctggcctactggatcctctactcctgtgtcaggcttgtgctgatggtcctcgagtacttcatctactggataccgacctggtacgcgctgaagatactgatcgtggcgtggctggcgactgtcaacttaagggagcggtcttatatacgacaggtt

SEQ ID NO: 5047 - DNA, 360 bp, Triticum aestivum
  Clone ID: uC-tsro9316056b03b1
tttgttcctcctccccgttgagagtccccttgggttcaccggctactatctatttctgctccggcggcgccgctgcttggagtggggatgagaggggcgcttgggctgatcatgtctatagtagtagtaggtgtaggtgtgccgttttagtggtgataggacttgtgccgtggattggcgtcatgccgtgggggagttggtcaccggagcttgcaagcagcttctgctgatcaccgttggagccttctgctctgcctccatggaggaggcctaaggaaggagccgcatctggcgaatccccccataataagatagctgggccactggaacaaacctggtggacatactatacttcctacc

SEQ ID NO: 5048 - DNA, 95 bp, Triticum aestivum
  Clone ID: uC-tsro9316056b04b1
ttgattctattaacattaaggggaaaaaaaggagaaaaaaaaaaaaaaataaaaacaaaaaaaaaaaaaaaaatgaaaaaaatgaggatgagtcg

SEQ ID NO: 5049 - DNA, 413 bp, Triticum aestivum
  Clone ID: uC-tsro9316056b07b1
tcgcgtagctctcttgtgaaggatactccttttcacggcaaacgttgtctgcagtttccagccgaagaggatactgaggggttcgacaatggaacacagagaatgatatggttgagtcgacctccataggatcgccaccaataagctcatgcaatccttatcagtgatgatgcaagttttggacaaggatcttcattcattcgaagcactgatgatgatttaagttagatgtgtgtcagacgtgctttaaaaccatcatgcttattctgcgtgtaatgttgtttaatgcatattgatccttctagttgtgtatctatgccatgttagcatcggatatgtcagtaatatgatttaaaaccatcgtacttattctaatatgcatattgatccttcagttcaggccagtaaaaatg

SEQ ID NO: 5050 - DNA, 239 bp, Triticum aestivum
  unsure (1)..(239): unsure at all n locations
  Clone ID: uC-tsro9316056b08b1
ttggcgcggtgctgggggccagctaccacgtggtggtgatcagggtcatcgcttttaagagccgtgactggtccttccaggagctgcgaatggaatctgatcgctgttcatcgtcggtcgatcgattatgtggtggtggaggtggctgctgctgcgcgcgtacgtggatcatctgtctgtcgcgcacgctgtaatatttctncatccgccgtgcatgatctatgatacgtgtgtgtgcc

SEQ ID NO: 5051 - DNA, 498 bp, Triticum aestivum
  Clone ID: uC-tsro9316056b11b1
tttttgcgatttcgattggaatcggagccagctccgctgcctgattagccggccggccccggccccgtctccgttcccatggcgtccaagcggatcctcaaggagctcaaggacctgcagagggatccccccacctcctgcagcgccggccctgtggcagaagatatgttccactggcaagcaacgatcatgggcccatcggaaagcccatatgctggtggtgtatttatggttactattcacttccccccagactacccattcaaaccaccgaaggttgcatttaaaacaaaggttttccacccaaatatcaacagcaatgggagcatatgccttgatatcttgaaggaacaatggagccctgcattgacagtttcaaaggtgctcctttcaatctgctctctactaacagacccgaaccccgacgacccgttggttccggagattgcacacatgtacaagagtgatcgtgcgaagtatgagtccacagcgaggagc

SEQ ID NO: 5052 - DNA, 301 bp, Triticum aestivum
  Clone ID: uC-tsro9316056c01b1
tcgttcacgcgtccgaaaaaaaaaaaaaagagagagaaaatatataagagaaaaaatactagaaataaaggtgaaagaagcacaaaacagcatacatcttgcacatgggatggaacgttcggtctcagctgaagcgtgcactgagaaaatataagcaggccatcaaaaaaggggggggcgcctttcagggttccagggttcaccatgtcgctcggtaagggaattcattttttttagggtggccctgtttatattcacgggggcgtgtttcaaacagctgggtaccggaaaaccatcgctg

SEQ ID NO: 5053 - DNA, 506 bp, Triticum aestivum
  Clone ID: uC-tsro9316056c04b1
tcgctcacgcgtccgcgtgcgtgcgtgctccatggtgaggtcgcttccgtctgtttcgatggaggggaggaggctgcaggaggaggagcaggagcaggagcagcgggaggtgctgctcatccacagccaggtgcggaggatcaagcgggaggacgaggagacccggaggcaccttctcaagctgcagctgctggagacgaggccggccgccgggcaggaggcctcgccgccagcctcccgctcgctgtcgccgctgcggcgtgccgggagcgccataccggtcggcgactgggcctagtcacctcgcctgcccggccaggcagcgtatacagtcgtatagatataggagagcgagcgagctatatatttgagagccttagtacggtcgatcgatgcctgtccatgctctctgcgtgcatggaaccagagcttatagctgatcgatctagctgctctacatgctctgtttcagtcgactattcttcttcttgttgaaatataccgag

SEQ ID NO: 5054 - DNA, 284 bp, Triticum aestivum
  Clone ID: uC-tsro9316056c06b1
tgcggtccaggtcgctggtgcgctcttcccgatcacccgcaccgtgctcaagtcggagtcggccgtgatcacggacgagatgaaggaggagagcgtcttcgccaagctccgtgttgcccgtgccgatgcccgcatcgtcggcaagcagaagaagcgccttgccgacaaggccgccgccgtcgaataagcgaccgttgcgctgagccgaagcgagtgtcactaggaacttctaacacaccaagctcaatgtggaacaactgttgggtttaaaaaacaacgggtct

SEQ ID NO: 5055 - DNA, 334 bp, Triticum aestivum
  Clone ID: uC-tsro9316056c07b1
gaaactttgggcgaccacgggctatccgccgcgtgagatgactaggattgacgcagtactgctgatgctggtggctgacgctgacgagctcgtgctcgcacatgggccgtaactatggacctagagcaccatggccaaggctgtggaggacttcatgacgaaagagcaactaatggccctacaccgtttgctggctcaacaactcaacctggaaggccggcacgccgggacaaatgacgatggtggctctcacggtggccaacctcaacgaggtgcttgatcgacacacaggcctaagcttggcagtgctcatgtggtgacaacactcctactg

SEQ ID NO: 5056 - DNA, 212 bp, Triticum aestivum
  Clone ID: uC-tsro9316056c08b1
tcgcgcattcatcagcgccaattctgctgatgtgtaaagaatgatctgtcgttatagtgtgcgttgggaggatattatgtgattgtacaattatgatgtaagttgtaggcaaagaaacgaccactggatcttgattcttgttctgacctgtacttgatttatcgttgtaccggccagtgtatcatggatatagccgcccattctcacaaaaa

SEQ ID NO: 5057 - DNA, 537 bp, Triticum aestivum
  Clone ID: uC-tsro9316056c09b1
ttgcccacgcgtccgcggacgcgtgggtctcgcgccgtttctccctcacaacacaaaccccgagcgaagccgtcgacgtgccgtcgtggtctccgtggccatggtcattcccgagctacgacaagatgcctagaggcaccgccgtcctcttctacgtcgacttcaaccatcggagcaagctgggagggcctcgcgcgtcaccatcgagctcatctgcgcctctgcatctagacgctcgccgtcttggattcggtctcaccggagcctccccaagcccgctttgctcatctacaggctcaacatgctggagtccaggagccagacgccactgtcgacgacgactcctactacacctgaggtgcctactactacgtgcagcccgctgatgacgaccaggagtagtttaggaggatcccaggcaggaggcctgcgcctctttcgatctgtaccccagttggtgctagccttcttaagacaaacttgtttaacttatgtctgtactcagatattggtgcttccgatgactcgtctatgatc

SEQ ID NO: 5058 - DNA, 489 bp, Triticum aestivum
  Clone ID: uC-tsro9316056c10b1
ttgattgtctcgaccggtgagtcacctgaatgggacgaggcctttgcatgggcttttgacagccctcccaagggccagaagcttcatatctcttgcaaaaacaacagcaaattcggaaagaaatcgtttggcaaggtgacgatccagatcgaccgggtcgtcatgctggggtcagtcgccggagagtacaccctgctgccggagagcaagagtggtccgaataggaacctggaaatcgagttccaatggtcgaacaaatgacagcatctacagaattaggcgcccgtgtaagttaaaatatataaagttaagagtggttttcttgtttcacatcctctgctaaatgttaccctgtttgtgcatcagtgtaaatagccggcagagaaagtcgttttttggttgttgttgttgtactttcttctgtgagataaaaacagatgagatcagtctgcttttgtactgattgtaatggaccgaccgattcattat

SEQ ID NO: 5059 - DNA, 423 bp, Triticum aestivum
  Clone ID: uC-tsro9316056c11b1
tcgctttcttaacatgtctctttggggtacatcaatgattgtcacatatgagctaataaaaagactttctgtgaaacctgagcaatgaaccttctggcttctgctccgcctatctggtcatcatttccgttttggccatctagtgaattccttttggtacagggattggcatgtaacactggttggaaattcttgatgcaagtccccttataaagtctgacatgtttctgtacggaactaccctgtaaatacctccaagtgcaagggtgtctcgtttcagatgagagccagaggattgatctgggtactggagcgccttgtagttgttgagcaaaaatttccctgtaagtgctgaagggcgctcgtttcaggatgagagccataggctggatctgggtactgagcaccttgtagttgttcagc

SEQ ID NO: 5060 - DNA, 339 bp, Triticum aestivum
  Clone ID: uC-tsro9316056d01b1
tcgcgccaccggcaaggtgaccaggctcaggaaggagtgccccaacgccgactgcggcgccggcaccttcatggccaaccacttcgaccgccactactgcggcaagtgcggcctcacctacgtctacaaccagaaggcttagaggtggctcgcgtttgctctgctctttttacctacctatcgagaatcgaactcatttagatgtgtcccgtttgtcttttaaactgaaaccttgagtatcatgtttcctgaatatttcatcgcatactgctgtagtgcgatgcgtgcttaaattttggtgctccgtatgctaacgaaaagactgggaaaaccctggcg

SEQ ID NO: 5061 - DNA, 443 bp, Triticum aestivum
  Clone ID: uC-tsro9316056d03b1
tcgcccacgcgtccgcgtgcgtgcgtgctccatggtgaggtcgattccgtctgtttcgatggaggggaggaggctgcaggaggcggagcatgagcaggagcagcgggaggtgctgctcattcacaggcaggtgcggaggatcatgcaggaggactaggagaccaacaggcaccttctgaagctgcagctgatggagacgaggacggccgccgggcacgaggccttgtcgccagcctcccgctcgctgtcgacgctgtagcgtgccggcagcgccataccggtcggtgactgggcctagatcgctacgctgcccggtcaggcagagtatacagtcgtatagatataggtgagcgagcgagctatatatctgagagccttagcacggtcgatcgatgctctgccatgctctctgcgtgcatggcaccagagcttatagttgatcg

SEQ ID NO: 5062 - DNA, 196 bp, Triticum aestivum
  Clone ID: uC-tsro9316056d04b1
ttgtctcacgcgttcggcgagtggtgcatgtaccacttaagtggggcactagtgactgcatggtgcctacatgtgatgtgtgcttgtgggaatatttctataagcatgtaatgtttcgtctgtgttaacgtgaacacacgtctccgtgtgatttctattgtcaaaaaaaaaaaaaaaaaaaaatagcatgaggaac

SEQ ID NO: 5063 - DNA, 396 bp, Triticum aestivum
  Clone ID: uC-tsro9316056d05b1
atgctgctcctgctggtactgccgctgaagtattggcgggtcccacgcgtcttttgggcaccactggttatcctgttcgtgtggaccccatggaggagccagaaccaaacaccctgtgagcaaccccacgattggatagactagagcaggttgtacatgccgggactgccaggccacaatctcatgatggaggagctgactgccttggataaactgagtaaacgtctgtccgtggggggtgcgcaacatgacgcgtcattagaatagccccgtagggaatcgaatttgtcgggcttctaggcgataagcctttggaggggttttcttataggcgacaggggctaggcactggccgtgtaaccaatggcgcggtctgagggaacattggcgcctccc

SEQ ID NO: 5064 - DNA, 461 bp, Triticum aestivum
  unsure (1)..(461): unsure at all n locations
  Clone ID: uC-tsro9316056d06b1
ttgttgacgcgtgggctttggggaggtggcggaggaggacgagggcgaggtcgtcgacgacgtcgaccgccccgccgtcgttctgaagccgtccgtccacgccttcgtcaccgacctgcgcgtggtcggcacaaacccacgtggaacgctcttcctggacgacagcgagaggaacattgccgtggggaaagcactcggtcttcgcacagtcctggttggcaagagggctaggagcaaggaggcggactacgcgctggagaccgtcggcggccttcggtgagccatcccggagatctggggcggtgcggaggacgacggcgagctgcaggccgaccacaacgtggagaagaacaagagcatgagggccgagctggactgcgtcatccagcccacccncatccaggcttgatcgatcgatcgcgtccagatgatctccaatccagacgctgcttgtgcatact

SEQ ID NO: 5065 - DNA, 448 bp, Triticum aestivum
  Clone ID: uC-tsro9316056d07b1
tcgcccacgcgtccgcttgtcgttgggctctgggtcctgctcctgctttctctcctggccgtctcctccggcgaggaattcgatgtcttctaccttggtcagcaatggcctgggtccttctgtgacacgaagaaggggtgctgcttcccggacaccggctagccggcgacggacttcggcatccacgggctgtggcccaactacgccaagtgcaagacccgcggcgagctcgacggcgccctggagatggtgaccaagcgcaagaagaagtgctggccggagaactgcaacagcgagcgcctcaagctctgggagatcaaggacctggtgacggagctggacgccaactggccgacgctggcgtgcaagggcggcaagagcatcgagttctggacccacgagtgggagaagcacggcacctgctccaacctggaccagcacggatact

SEQ ID NO: 5066 - DNA, 362 bp, Triticum aestivum
  Clone ID: uC-tsro9316056d08b1
tcggccacccctatggtgcaaattatggtctgggaggtgatcgtggtctaaatcatgcgcgagatcggcgccgaggaagtcgatgctcttgtaccttgacaagatatggccggggttgttgttggtcaccatgaaggacaggtgggactcgcacacgtacaagcagatgacggacttgggctgcgacgggctggggatcaactacttcaagggcaagatccgcggggagatcgtcgaggccctgctggtggtgaccgtgcacaagatgaacggctacccggagaactgagcagtgagggccacatgctatgcgcgagcatggtcatgatgacggtgtttgacaccaaatgtccatcgctaaa

SEQ ID NO: 5067 - DNA, 180 bp, Triticum aestivum
  Clone ID: uC-tsro9316056d09b1
tccgctcatacgggggatcataggtaggcctgcttggttgacagattggttggcacactgctcggatcattacgcgggttatcataatgattcagccacagaacgaaatcatgaaccgaattatagccagagacgaagacctagacggaatcctagcttgaaacaaaaggacggaccatc

SEQ ID NO: 5068 - DNA, 341 bp, Triticum aestivum
  unsure (1)..(341): unsure at all n locations
  Clone ID: uC-tsro9316056d11b1
tcgggccgcccttttttttttttttttgtgaacccaagttaggagcgagatccaaacacctaattagcaactccacgactggaagtactagatcatatatatacatgccaaacacgccacggctcgatctaattattcagcaactgacacgattgagaaaactatggatcggacggacggcaaggcgaccggcggatgaggcatcatcaccctagccccctaggacttgctcttgccggaggcggaggcggtaggcntccggccccggctcccttgctggcgacgaggtcgtggtcttggttcgtgtagccgtcggcgccctcccaggtgaacttgccgtc

SEQ ID NO: 5069 - DNA, 389 bp, Triticum aestivum
  Clone ID: uC-tsro9316056d12b1
tcgggcacgccttcgaacaattatactgcgaaccgacacgaggagtgagttccaaaaacaaaattagtaacgccacgaaaaggatgtgctacatcatgctatatacatgtccggcacaccagggggtaggctaactattgaggacccgagaccattggcaaaactctaaggcccacggccaccgagtcaacccggagctgaggcatgagaaggatagccaggtactacttgatattaccggcagcaaaggcggacgcgccacacagggggccctcgacggcaagaagaacaacgtccttggccagagatagccaatgggatccgttatgtgaacctgatgatgtggacagtatatatgatgcaagattactgtgccatgcgtgcgagct

SEQ ID NO: 5070 - DNA, 436 bp, Triticum aestivum
  Clone ID: uC-tsro9316056e03b1
tcgctcacgtctgcagctttgttgttgaggcatacaacaatgtactgttcacccactatcttgttgagcacactgagctagatggactgcttgaaactgaggccatgtatgacaaatgacgccgttgtcttgacattgggggcccaacatacaccagacctaatgggttcgctcctcaggtcatttgatgcactactggttccctgtggtccgatggcgctctcaatgtaaaatagagcgagttgtataccaacctggtacgctacccttggatacactatatgctatactagtatctgccagtgatctcatctgacaaggcttacgatgagcagatatgtgtcgatgtgatcaccaacaacgacttcagcccttgctccatgatggtcaagagtgacacttgccaccgcatgcacatggcctgctgcctcatgta

SEQ ID NO: 5071 - DNA, 395 bp, Triticum aestivum
  Clone ID: uC-tsro9316056e07b1
tgggggatgctgccccgcctggaggtactgttgacgaatttcctgggtcgccccacgttttttgatgaatagcggcgacagtcgtcacgtggccagtattcatcaatagccagcaatcatgctgatggataggagggatgaggtttgctccccacaagagtcgttatcatcgtactttgggaagatgcctattttgccgaggatgtcatgaagcacgatgaacttgatgttcttcatcgttctcttgggcaacatctccgccatgatggcggcccgggggccagaaacgaacaaccggtgcatgctgggtcgcaccgtcaggagcatcttgatggacagactgatctagatcgttaattgccgtttacacacaatgggctgattgagaaaaccgt

SEQ ID NO: 5072 - DNA, 235 bp, Triticum aestivum
  Clone ID: uC-tsro9316056e08b1
tcgataacaaaaaaaaaaaaaaaaaggagagcacataataaaagcaataaagacacagaatgcagagagacaagaacagatgaggttactagcgaacaagaggcgtcatcatgcgggctccggggtgactacttttttgctgaggagcccacgccgtacgctgacctgattgccctgcggcgctttcttggttaacaagtcggctatgtatgccatgccgtccgggacgatcgaa

SEQ ID NO: 5073 - DNA, 358 bp, Triticum aestivum
  Clone ID: uC-tsro9316056e09b1
tgttcgggcgctcgggctggcgcagatggtgggggggctggccggcggcctccactactacgccgcggtgttgcaccgtgccggcgccggcgaggacccgtgcgcgaactggcgcgtctacgccgtgtacgccgcgtgctgagtcatcatctgcgcgtgcgcgcgagctgagaagaggaagaaggtctacctcgccggctgccgaggagtggaagaagagctgagggatgaaagctttttttaggggcttatgtgcaaacattaaatatagtgaaagccaaagggcttggctataagatgggaggagggggtaattagaagatcatggagtacaagaagagaaaggaaaactattctt

SEQ ID NO: 5074 - DNA, 92 bp, Triticum aestivum
  Clone ID: uC-tsro9316056e10b1
tcgcccacgcgtccgaaaaaaaaaaaaaaaaaaaaaaaaaaaaaaaaaaaaaaaaaaaaagaaaaaaaaaaaaaaaaaaaaaaaaaaacaaa

SEQ ID NO: 5075 - DNA, 369 bp, Triticum aestivum
  Clone ID: uC-tsro9316056f04b1
ttgtttatacgtccgggtgaccggaggcggggtgggtgcggttacttcgactcgcccacaagatcgggcccatcggcctttcctccaagaagatcagggaggacatcgtcaaggagacggacaaggactggaagggcctccgcgtcaccgcacaagctgaccgtacagaaccgtgaggccaaggtgtccgtcgtcccttcagtcgcggtgctcgtcatcagagtgcctcaaggagcccgctagggacaggaagaaggtgaagaacatcaagcacaacggcaacatcagcctggacgacactcatcgagatcagcaagatcatgaagtccaggtccatgggcaacgagatggccgggactgtcaaggaga

SEQ ID NO: 5076 - DNA, 291 bp, Triticum aestivum
  Clone ID: uC-tsro9316056f05b1
tcgttaagatcgacaggtgatccggtagggggctggatgctctatccaagttcacgtacaacggtgacggtcgtctcggctagatgatagcgaccacgaccatggttgtggtgaccttcggcacccaccgtcctgttgggcaataccctgtgcgtgacaagagacaaacggttgctgttcgtgccattaagggcctgtagaagaatgaccacaccggcgccaaggataccaaggctgatctgatgaacaaattggctggctattgagccgcatgttgcagtggaccatcat

SEQ ID NO: 5077 - DNA, 370 bp, Triticum aestivum
  Clone ID: uC-tsro9316056f06b1
gtgctttgcctacatcgtgacgctgggcatggggggggcatacatggtcgggctcaacaggtggcggacggccatgaccaccgacatcgcgctcgtcgatggttactgtggccacgccgagccatgcttcgttagggcgttctactgggtgctagattagacatacggcatgtgcatgacggagagtgggttcaacaagacggggctgccgggcgccatctggtactaaaggtcgccctactacaaggtgggcagcgtactgagcataatggtgctctccgccatcatcgctcttgtcgccaacctctccttcaacgtgccagcagtgctactgatggggaacgaggtggggaccgctgtggctctgatc

SEQ ID NO: 5078 - DNA, 294 bp, Triticum aestivum
  Clone ID: uC-tsro9316056f08b1
ttgtttgtgactactggcgaaccgtcacaggagaacattattggccaagcaggacggcgtgggtcgagaggaagcgctgatggatgaggctgcgatcaacgtaggtaatcatcgtggtgaaagctcatccttgttttactgcgccagtctggagggatgacgaggtgtttgggctcctgatatgtctgggttgaactgatgctttggggatgcccaccctcgtaacatgaagaacattatctgcttttcttgaaggttggatattcggtttatgaagacatatcgtctattctt

SEQ ID NO: 5079 - DNA, 369 bp, Triticum aestivum
  Clone ID: uC-tsro9316056f10b1
tcggctgcgggaggtgctgcagttctcgaacgcttgcggcgccatctgcaccaccaagaagggagccatcccggcgctgaccaccaccggcaccgacctggagctcatcagcaagggcagtaactagagactcattgtgtcgcgccatcggggttgaatcttaggagttttagctgcacttttattattattattagggatgaattgagtttagttcgtgagtcaagtgtgtgtgacctcgtgggcgcttaataaaaagcaagcatgtgtggtgattttggttgcggtctttgtgtaaggaggctactgattgttgtagccttcacccaaactttatcagagtctttaatgaatggacaagttcatcaa

SEQ ID NO: 5080 - DNA, 167 bp, Triticum aestivum
  Clone ID: uC-tsro9316056g01b1
ttggtggacacccagagtcggatgtgtgggtggaagaggctggactcgcctcctaatatagtttgaaccgaccctatatagatatatctgtgtcaggtaagaaagatcatggaaagatagggtcatcacggttgtggggtggatccgatgacgaaagaagagctgat

SEQ ID NO: 5081 - DNA, 504 bp, Triticum aestivum
  unsure (1)..(504): unsure at all n locations
  Clone ID: uC-tsro9316056g02b1
tgttgagagagagagagaaagagtacacagcggcggaggcgatggcgaagggcgggaaggggttgaacgcgacgggcgagtttttccggcgccgtgacgagtggaggaggcaccctatggtggggaaccagctgcgccacgccactccggggctaggcatcgccatcgtcgcctttgggatctaccttgtcggcgaggccgcctacaaccgactctaccgncccgccggagacaaccaccactagatctcccccagaggtaaagtagatggagcaaactttaccgaagcaccaatgactgatcttttccggattgatctcataaggtctgcatgaccaccttgtaattcgcgatcaggagacgtgctgttggttcaactagttttcctggaacgcgtgtcctttaaatctgatactattttgtggatatactcggcatctggacatggcattngttttttttctttttgaccctaggacgtggcattgtggttcttacattact

SEQ ID NO: 5082 - DNA, 160 bp, Triticum aestivum
  Clone ID: uC-tsro9316056g05b1
gcgcttgcaaagtcaaagaccgcgtaaatcttatcgatatgtcttacaaaattcggtgtcacatcactgtgtttctcatttacgtcagcaaatcaaaagtctgttcttgttgggcactagattattaaactctctgtcatgtgaatgtggttgttgctgc

SEQ ID NO: 5083 - DNA, 487 bp, Triticum aestivum
  Clone ID: uC-tsro9316056g07b1
tcgcaaaccctatcttgccgccccggggagcacgagcccgccgaccatggccgacaaggagaacgcggcccccgccgcggcggcgggcccccggctcacccgtgccgcggccaagcgcgccgccacctgctccgcgggcccctccggcggcgccaagcggaagcgggtggcgctcagcgagctccccatcgtctccaacgcgggggtcgtcctccgccagccctcgaagcccgccaagcccgcggctgcggccgagggggaggagcagcacgggggcttgagcaggggcgcgtccacctcgccgacccccgtcgggagggaggtcagcggcggcggcggcataacccagctcagcgggtcctacgcctgcgacatctacacctacctgcgcactatggaggtggaggcgcctcgccggccggcggcagactacatcgaggcggtccagacggacgtgacggccaacatgcgggctatcctaatcgac

SEQ ID NO: 5084 - DNA, 321 bp, Triticum aestivum
  Clone ID: uC-tsro9316056g10b1
cgagctgccggcatggcgaggccgtccatctccctccacctctgcctggccgtcctggccatggccgccgccgagtccgaggccgggttctacgaccagttcgacgtggtcggctccggcaacaacgtgcgcgtgaacgactatggcctggcccagcaggtggcgctcacgctcgaccagggcaacggcggctccggcttcagctccaaggacaagtacctctacggagagttcagcgtccagatgaagctcatcggcggcaactctcgcggcaccgtcacctacttctacctgacgtctggggagggcgacggccatgac

SEQ ID NO: 5085 - DNA, 391 bp, Triticum aestivum
  Clone ID: uC-tsro9316056g11b1
tcggtaacaactagaaacccacacgcgcgagaggaccataaaacaaacataaccagaagtcacatggccacgtccatgatgaccgacagaacgcacaacttaccgggtcggcggctctcagggttcctagattccttgcgctggagtgcatggctaatagctgaactatagggccacctctaacaaatgcacggacagcggtacccagcaatacggctgggaaagccatggggtgaccaaacttaaatggtttgccatctatccgaggatctccatttcgcgagaactcatataggccatacacgatcgtcttaaccaacattggcacggcaaaaccggggattggaacaccccttgtcgagggacatataccccgtccgtcaggtgggtt

SEQ ID NO: 5086 - DNA, 197 bp, Triticum aestivum
  Clone ID: uC-tsro9316056h01b1
ttggtgagcgagagagagcaagtgtgcgcgttggcgaaggcgaaggcgaatgctaatatggtgttgaccgcaactggggaggtctttttagagcatccaaagtgacggacgcacgcttgggacgtcatccatctgctatagggtactctaagtcaaatgaactgcttggctgtctcaactatctagacttggcaaaa

SEQ ID NO: 5087 - DNA, 462 bp, Triticum aestivum
  Clone ID: uC-tsro9316056h04b1
ttgctccaatcccctccaatcccaccttcggaacagcagccagcaagcgtagccagccatgtcgggccgcggcaagggaggcaagggcctgggaaagggcggggcgaatcggcacaggaaggtgctgtgcgacaacatccaggggatcacgaagccggcgatccggcggctggcgcggcggggcggtgtgaagcgcatctccgggctcatctactaggagacccgcggcgtgctcaagatcttcctcgagaacgtcatccgcgacgccgtcacctacacggagcacgcccggcgatgaccgtcaccgtatggacgtcgtctacgcgctcaagcgccagggccgcaccctctacggcttcggcggctgagcgcggttcgtgcctcgcgtgggatttagatgtggttaggcgggtcgtcgttctgaggtgtgctatgcctgtgtgtgcgtgtgcagctgcgtgc

SEQ ID NO: 5088 - DNA, 485 bp, Triticum aestivum
  Clone ID: uC-tsro9316056h05b1
ttgtggacgcgtgggcacgaaccaacccaggcgctcatacatagtcagtcagcctttgcaaccatgaggccacacgtgctgctcgccgcgctggccgacgtggtcatactaacagcagctgttgccctcgcccacgggcaaggggcgaccccaagcgcctcgccgtgctgcaacaactgtggcacctgcaccaggaacatcccggccaggtgcacgtgcatggacccgtagacaagcggctgctacccggcctgcaagacctgcgacaagttcaccgtcgccggccaagacagctttcagtgcaaggaccgtgtagccaacttctggcagcacagctgcactaacgccgcgtgactcgacctgttgataccagaataatgccagttagcttgagcttttactgtgcttctcgcagtatttgagagaaccctctgcatctcgctatggtagctagatgcagagacgatatggagttggatgcatgc

SEQ ID NO: 5089 - DNA, 296 bp, Triticum aestivum
  Clone ID: uC-tsro9316056h07b1
ttgaaaagtttcatttttaaatttgtgcttctggaactgtttgggaatggagacttgattgttgttccctgtaatgcgtggcttatttctgtcaaaaacagtgcaaagtattcatgtgaatgaaggatgatagtctgtactgcataaaaacaaaagaactgactggccgcctacactcgctggaaaggaaaaaagatgcagcttgataaactaattgagacgaaagaaagaacaaccttttctaaatggagaaagggggggggggttttgaggaacccaggtttactaacgggggt

SEQ ID NO: 5090 - DNA, 413 bp, Triticum aestivum
  Clone ID: uC-tsro9316056h08b1
tcgcgtcgcgctcgccactcagagaagatgagggagatcctgcacattcagggtgggctgtgtggtaaccagattggttccaagttctgggaggtggtgtgtgatgagcatggcatcgaccccaccgggcggtatgtcggcacctctgacctgcagctggagcgtgtcaacgtctactacaatgaggcctcatgtggtcgctttgtgccccgtgctgtccttatggatcttgagccgggcaccatggacagtgtccgtactggaccgtacgggcagatcttccgccctgacaactttgtgtttgggcagtctggtgctggtaacaactgggccaagggtcactacaccgagggtgctgagctcattgactacgttcttgacgttgtcaggaaagaggctgagaactgtgactg

SEQ ID NO: 5091 - DNA, 389 bp, Triticum aestivum
  Clone ID: uC-tsro9316056h09b1
gacgaacccgacaggtatgttattctgggcaaccatcatgatgcgtggacatttgtggcagctgacccaaacaggggaacggccgccttgcttgagctagcatagaggttgtctgagctacaaaacatgggttggagaccttgtcgaaccatgattttgtgtaattgggatgctgaatagtacggcttgataggttccacataatgggttgaagagaacagggcaatgctaactctcagaactgatgcttacctgaatgtagatgttggcgcgggtgcttctggagttgacgcatcaggcactcatcaacttgatgagttgctcaagcaggcgagtaaaaaggatcaaaatccggataatggaacagttagtctgtatgactcgtggat

SEQ ID NO: 5092 - DNA, 538 bp, Triticum aestivum
  Clone ID: uC-tsro9316057a02b1
tctgacgcgtggggtgcaaagcggggaattgtgacaaagttgattgtttcatgggcccctgacgtatatgatcctcctgttacttctgactcacacacagtgaagccgcaccagagaagttcaaggaagagccactacaaatacaagcccccaaagggcagcagcagcagcagcagcagccgcactagcagtggcagcaaaaaggacaagaagcattctcaccacagcagcagcagcagcaaaagagataagaaaccttcccatcgcagtagcaatggtggcagcagcagaattgacactagtgatcctcaacatcggaaggcatatggcagcatcactagcagcagaactgacactagtgttcctgaatatcataagttatcaccgtggcagccaccggctagtgccgcagtggaagaagccatacctaccgtacctgtactgaaggccatggaacagatcaaacgtagttccagctgctgcaaggagccgtcgataagcatgaaggccatggaacagatcaagcgtagctccagct

SEQ ID NO: 5093 - DNA, 342 bp, Triticum aestivum
  Clone ID: uC-tsro9316057a03b1
tcccacgcgtccgcgccgcaacgcgccgctgctgggccttgggggcatgtccgacgacgacctccgcgggatgctcgccgagggcgacttcgacggcgacggcgcgctctcccagatggagttctgcgtcctcatggtcaggctcagccccgacctcatggaccagccccgccggtggctcgacgacgccgtcgcccaggcctcccacttcctcttcaccagctagattccggccggataggaaaattaatcttcttcttcttcgttgttgtttcttctctcccccgctgttcatagagtcaggattcgagaaaagaaaaggcactgtcgattggttgaatg

SEQ ID NO: 5094 - DNA, 236 bp, Triticum aestivum
  Clone ID: uC-tsro9316057a04b1
tctcttatgccaccactccatatcgctgcgagtgggagccatgagacaaacagccacgtgctggctggtgggggaccctgatgagcatatgcacatacaagtggcgcatgatggatcactgggggcgttgataaatactctacgtcctcttccaaatgaatgacatgactggcggctagtcttcatattatggcaacttaaccgaaaattactgctgaccgggtcagaaagaagaa

SEQ ID NO: 5095 - DNA, 86 bp, Triticum aestivum
  Clone ID: uC-tsro9316057a05b1
acgcgtccgcccacgcgtccggtgtgctctcggcgcaatcacgtcgcgtgcgctgttacccgctcgcctcgcttatgagtcgcttg

SEQ ID NO: 5096 - DNA, 251 bp, Triticum aestivum
  Clone ID: uC-tsro9316057a06b1
ttgtttcctccacaatcagagcaagcgagcgaccaagaaaccatcacagcgaccatcatcttctctgcctccatggcggcgcaccagcagcagcaaccgcagcaggcggtggggttcgaggactacctgccggtgatggcggagcggctgggggaggagggcctgatggaggagctggcggcggcgttccgactgctcatggacccggcgtcggacctcatcaccttgcacaggctccgtcgcaacgcgcc

SEQ ID NO: 5097 - DNA, 365 bp, Triticum aestivum
  Clone ID: uC-tsro9316057a07b1
ttgctcacccagtcgacacagagcgagtcctcaaccatggcaagcacgccagacgagctgctggagggtcggcgtgagatcgccatgtgattccatggggcctgattatggatggtggccgatgttgccgtggttgagcccagtcactgactaatgaatatctttcagcgctctcttgggcgccatcacaacaatgtcatcgtgacgggggcctgaaccggacgaacgaagcaagctcgctcgcacggcctctacctgtaggactggatagactgcactcggtcttcaacttgcccttccactcactgggacactacagcgtctggtgctctgcagcggcgtcgcaacatattcaccacatgcaa

SEQ ID NO: 5098 - DNA, 462 bp, Triticum aestivum
  Clone ID: uC-tsro9316057a08b1
tcggatgttcagtcatcgggtgctagttcttttatacctatgtataatcgaactttttgtagattgaatcggttgttctatacgaacaatcctggagatgctttggtctcacgtgctcctgatattgcaaaatttcaactggaaatagatagttcatctggcaactttggtgcaacatcttctctccatagatgtgcatctgatgacttccatttctcgttttggttaggagttcccacgatgggatggttacaaacttaaagtccaagtgactataaaagaaacaacaaaaacatagtaaaatgtataaaattacgcagctttccccccaccactggtggggggttttggagctgaccccttaggaaaacaattcttcgattgtttgctagatacgttatgagacggacctgtttaaggggccgttccatttctgaagctaacaaactgtaagtcgttgat

SEQ ID NO: 5099 - DNA, 260 bp, Triticum aestivum
  Clone ID: uC-tsro9316057a11b1
ttttgccggctgcgtcataaccgacgagtgcgcccagcaggtgtccacagagtcggtgtggacggtggtcttctccggcgaggacacggtcggcctgcccgaggcctgcgcgggcttcatcgacgccggggacgttgagggcgacggcggacccggcagcgtattcaccatgacgctcagctcggtggcagaagagctcgcacgctcgggcgtgatgaggagccacctggaggaactcgacaaccccgccgggtgctaaa

SEQ ID NO: 5100 - DNA, 272 bp, Triticum aestivum
  Clone ID: uC-tsro9316057a12b1
ttcttaaaaacaaaaaaaaaaaaaaagtgagaaaaaaatgattaaaacaacaccgataattctgaatgaatgaacctgatgagtttgtgttcgttacaactggcgtaagtatggtctttaggggccattgatactttgagggggggggcctgttttagggataccatgtttgccccccttcgcttgctgggtgaacatctttttttggggtgcccaacttaaaatgacgggggcggtttttgtcatccttgtggtggggaaaacccgggggg

SEQ ID NO: 5101 - DNA, 494 bp, Triticum aestivum
  Clone ID: uC-tsro9316057b01b1
tcggtggccagaaggcaacaacaaagtgcgcgtgagaaataagcggtgcttgccaagcagagagagagagagagagagagatggcggcggcggcgacggcgacgactacagcggcggcgacggcggcggcggtggggccgggggaggtgatctccgaccacagcctggagcagtggaccatgcagatcgaggaggccaacgccgccaagaagctggtggtgactgacttcactgcatcatggtgcggaccatgccgcatcatggctccaatttttgctgatctcgccaagaagttcccagctgctgttttcctcaaggtcgacgttgatgaactgaagcccattgctgagcaattcagcgtcgaggccatgccaaccttcctgttcatgaaggaaggagacgtcaaggacagggttgtcggagctatcaaggaggagctgacgaccaaggatgggctacacgcggctgcctagtaatcacctagcggagtagta

SEQ ID NO: 5102 - DNA, 388 bp, Triticum aestivum
  Clone ID: uC-tsro9316057b04b1
tgttgacgccgccttacaagatgttcaaccagacgctgctggatctgggactgcaggtcactcctgtcaacgactatctgtacgagacggtgcatagcctgcacgaaaaggggcacctgccggtgcaccggaaagatgtcctcccagaggcactggacagccaacagcgcgaaggtgctggagcaacaacgcgggtcacgttaagctgtatcgctgcgggacatcgaacgtggtccgtctggggatacattctatctaatatagtgttgtttaagtgaactacacaaattggttatgtgtcggcttagatggacggcacttaaaagtgagctctcgcaaactattcattggctttgttgccaggacttcttttttattgatgcagtgt

SEQ ID NO: 5103 - DNA, 462 bp, Triticum aestivum
  Clone ID: uC-tsro9316057b05b1
ttgctatcctccacaatcagagcaagcgagcgaccaagaaaccatcacagcgaccatcatcttctctgcctccatggcggggcaccagcagcagcaaccgcagcaggcggtggggttcgaggactacctgccggtgatggcggagcggctgggggaggagggcctgatggaggagctggcggcggggttacgactgctcatggacccggcgtcgggcctcatcaccttacacagcctccgccgcaacgcgccgatgctgggcctgggcgccatgtccgacgacgacctccgcggaatgctcgccgagggcgacttagacggcgacggtgcactgtcccagatggagttctgagtcctcatggtcaggctcagccccgacctcatggaccagacccgtcggtggctcgacgacgccgtcgcccaggccttccactttctcttcaccagctaggcggagcatct

SEQ ID NO: 5104 - DNA, 238 bp, Triticum aestivum
  Clone ID: uC-tsro9316057b06b1
tcttttccctactagcggccgcggcggcgggttcatgaagatggctcaggggttcatgaagtacaagtctggtttctgcatctacatgcatgtagctctcgctaagtatgtgcgctgcgtgctactgtataacgttgtgggtgtgcttaattatgttagctggtgatatctggctctgttaagtttaaagttccttaagtcatgtatgtctgtatgatgatcaataatgcagatgagc

SEQ ID NO: 5105 - DNA, 381 bp, Triticum aestivum
  Clone ID: uC-tsro9316057b07b1
tcggcggcccaggcatagccggctcgtgcgttcatacctatgcataatccacctctgtggctactgaatcgcctgttctatacgaacaatcctcgagatgcttaggcatgacctgctcctgatattgcaaaattgcaactgagaatatatcgatcaactgacagcttgggcgcatcatcttgtttgcatagctgcgcaactgatgacttacatctgtcgttacgaatagaagattccacgatgggatggctacaaacttaaggtccacttgactataagagacacaacatagacattgtacaatgtataacattgcccagattgcccaacaccactggtggggggacttggagctgaccccttacgaaaacatttcttcga

SEQ ID NO: 5106 - DNA, 448 bp, Triticum aestivum
  Clone ID: uC-tsro9316057b09b1
tcgccgaggtgtcttcgccagggcatccggtgactacgccatcgtcatcagccacaaccccgacaacggcaccttaaggatcaagctcccctctggtgccaagaagattgtcccaagcagctgccgtgccatgattggtcaggttgctggtggtggcaggactgagaagccaatgctcaaggctggtaacgcctaccacaagtaccgtgtgaagaggaactcgtggactaaggtgcgtggtgtggccatgaaccctgtggagcatccccacggaggaggtcaccaccagcatattggtcacgctttcactgtacgccgtgatgcaccacctggccagaaggttggtctcatcgctgctaggaggactggtcgtctcagaggccaggctgccgtctatgatgccaaggccgacacggccacttagagctatcattgctgtttatctatg

SEQ ID NO: 5107 - DNA, 325 bp, Triticum aestivum
  Clone ID: uC-tsro9316057b10b1
tcgcccacgcgtccgttcgacttccgccggccgcagcaaccgaagccaagtttcgaagtcgccgccgaggaggagcaggcgaccagacgccatggcccgtaccaagcagaccgcccgcaggtccaccggcggcatggcgccccgtacgcagctcgccaccaaggcggacaggaagttggcgcctaccaccggcggcgtgaagaagccccaccgctgcaggcccgggaccgtcgtcctgcgggagatccgcaagtaccagaagagcacggagctgctgatccgcacgctgccctttcagcgcctggtgagggagatcgcccaagac

SEQ ID NO: 5108 - DNA, 126 bp, Triticum aestivum
  Clone ID: uC-tsro9316057b12b1
atgccacgcactccaatcgctctgagggggggtgttgggacaaaaatccatgtgctgcatcgtgtggtgctctgacgagcacattcatacacatgttgtgcctgtatttataactggatgcgttga

SEQ ID NO: 5109 - DNA, 328 bp, Triticum aestivum
  Clone ID: uC-tsro9316057c01b1
tcggtgaccaccgggtggcctcaacgtgagcgtaccatgtttcaggcggtagcgatgctgctgctgactgacccagataagttgctgttcgtacaactggcgggactacggcccttgggggccatggtttatttgcgccggagtacatgatcaaagatgaactgatggaccccctaatcaagctgattgaacagctgaacccagatgtgagactggcggagactgactgaagaactagcatcttcctgtggcagaacaatcataggatgctagatgacgcgatgactaaaataggcactaaccttcggtttacaacatagtgactgat

SEQ ID NO: 5110 - DNA, 405 bp, Triticum aestivum
  Clone ID: uC-tsro9316057c02b1
ttcatctgcagctacagctcctcttcagcacaaccctttcttcaggacacagatcaatccagatacacatacaccacctgccgagtgccgacgtctagctgctagcttactttcagaatccagatacacacacacctgccggcgtccgttgctgcatatttcgatggagtgcgagaacgcacacgttgccgccaacggcgatggcttgtgcgtggcgcagccggcgcgggccgacccactcaactgggggaaggcggcggaggagctctcgggtagccatttggaggcggtgaagcggatggtggaggagtacccgaagccggtcgtgacgatggagggcgccagcctgaccatcgcgatggtcgccgcggtggctgccggcagcgacaccagagtggagctgga

SEQ ID NO: 5111 - DNA, 163 bp, Triticum aestivum
  Clone ID: uC-tsro9316057c05b1
tttttcacgcgttcgtccacgcgtccggatgtggtcaagtgcaaacctatttcaagcattcagcaatggtgtcgcgtccataattcagaggatatcatagagtacctcatattgaaagaaccatgtgatgtttgatggcttgctatatatgtgatggatgatg

SEQ ID NO: 5112 - DNA, 477 bp, Triticum aestivum
  Clone ID: uC-tsro9316057c06b1
ttttatccccaaatcgcaagatcaaaccctagactcgccccacagtttcttctaggtcgtcccaaatcggagaagatagaagcctaggtatcgaagatggcagatccagtagcggatccagctgctctgccaatcgtgccttgtccggattgcggcaggaacgtggtgacctacgttgctaggcgtgggcagaacgccggtcagcgtttctacaagtgccggaatcacaacccttcagcgggcggatgcgatttctacaggtggcagcaaggctatgtggcgcatctcgccaatcttgaaggaggagaagctgctgtgggtcaaatcggtccgggtcagacgcagggtgggcaagcggtccaagctcaagttgtgcaggcgctacacggccagcccgtgcagcaaaatgggccgccggaggcgtcgcaggctgcatcgtttgcaagtgctgtcgcaggatatatgctcgcggctgct

SEQ ID NO: 5113 - DNA, 381 bp, Triticum aestivum
  Clone ID: uC-tsro9316057c07b1
tttctctccatctcactcactctctgcctccgccgctggtgcagcgtcctccccgcgactccgatggccagcaagtgggtcaggcccgaggtgtacccgctgttggtggcgacgggcagtggccatcggcatctgcgcctttagcctctcttggcaacatcaccggcgacccagaagtcatgatcaacaagatggggagggcagcgggagtgcttgagaaccatgaggagggcaggcgctacgcctagcacggactaagagcctatgtgcaggacaagacctgcgagatcatgccaggaatcaacatgttctctaccaggccagagtgaagcactttagtggtgctgtgactgctaattagtaactggtgtgggcaagtgc

SEQ ID NO: 5114 - DNA, 382 bp, Triticum aestivum
  Clone ID: uC-tsro9316057c08b1
ttgaaacagtaaacagagagctcgctctccgtgaatgatgtcgaggaagaggaggaagaagaagaagtgtggagcacgctgctgctacctggtcacgctctcagcagtgtgaattcccagaagcatgcttgccgtgccttgttacgggtgcaccggatgctggcatgtgagcagggatgcttcagtgatgcaaaacaaaaaaggcaagtcttatcggcaagggaaggctacgcacttcttccaggtctccctgtcttcatctaaatctgtgattggaggagggggctacgggtagcttacccaccggtttactgcgtccttgtgagttgtgatcattatcatgcactcgtcagttgcttgtcatgtatggtgttcttgaatt

SEQ ID NO: 5115 - DNA, 440 bp, Triticum aestivum
  Clone ID: uC-tsro9316057c09b1
ttgcccacgcgtacgtgttaatctcatttttgttggaatgctagtaaccggaatgtacagtttgaagtacataaatgttgccatggtgacgatattgaagaacatgacaaacattttaacggctgtaggggagatatatgttttcaggaagtgtcagaacaaacaggtttgggctgccttatgcatgatgattatattagctggcagcggtggtatgacagatctttctttccatttaatcggttacgcgtggcagattttgaattgctttctgacagcagactattacgttacactgagacgcctgatggacacagtcaaacaatcaactgaattgggttttgtcaatgaagtttctatggtgttacttaacaatggggtctacatccctttcgaggacattttgattattgtcttgaaccagtgggaatacgtgtacc

SEQ ID NO: 5116 - DNA, 414 bp, Triticum aestivum
  Clone ID: uC-tsro9316057c10b1
gtcacatccaaagatttccttcaaccaacaggttatcatatggtgggcaggtctcatgagaggagcagtttcaattgcacttgcttataacaagtttacaacatctggtcatactgctgtgcgagttaatgctgtcatgatcaccagcacaatcattgttgttctgttcagcacaatggttttcggcttgctgactaagcctctgattaatctcctcatcccaccaagacctggcaccgcagctgatatctcaagccagtcattcctagacccacttacggcgagcttgttggggtcggacttcgatgtaagccagctcaccctccaaacaaaccttcagtatcttctcaccatgccaactcgctcggatcatcgtgtatggcgcacgttcgatgatcagttcatgcccccatg

SEQ ID NO: 5117 - DNA, 353 bp, Triticum aestivum
  Clone ID: uC-tsro9316057c12b1
gggaaacacgaatttttgggcgaccacaggcaagacggacagagagagcactaagaagcaggcagcaccgcagaagcggccggacgacacggaggagtaaagcggccgaacaaccggagaaaagagggcacccccgaggccaatggaaaacagaggaggagagcgggacaaaagaagcacagagcgcccgcctccagaagaagggggaacaacagaaccgagaagacacgactgacggcgacgaaagaagaacgggagcgccgagaggcagacccgaaagaggagcacgaagacacgaggacaaagcaaggcacgggccggaagcagacaacgacacgagagagaaaacccag

SEQ ID NO: 5118 - DNA, 285 bp, Triticum aestivum
  Clone ID: uC-tsro9316057d01b1
ttcatatcaaaatacgcgcggtctggactacagccgttgctccaaggcgcatgtaaatgaatattcacgtacacgatctgccgggagtcggccttgagcggctaacggacgatcagtggccggatacgcacactggggacgaagaacggagcacaatactacatgcgagtgggatggcgcacacgtagtcggcagctgataccgtctggacgtggaacagccgatacggaccgaccgattcaactgagcgatcactgacatggagcttatctgtatctatttgga

SEQ ID NO: 5119 - DNA, 353 bp, Triticum aestivum
  Clone ID: uC-tsro9316057d02b1
atctgcagctacagctcctcttgagcacagccctttcttcaggacacagatcaattcatatacacatacaccacctgccgagtgccgacgtctagctgctaactgactttcagaagccagagacacacacacctggcggcgtccgttgctgcatatttcaatggagtgcgagaacgcacacgttgccgacaacggcgatggcttgtgcgtggcgcagccggcgcggaccgacccactcaactgggggaaggctgaggaggagctctcgggtagccatttggaggcggtgaagcggatggtggaggaacaccgtaagccggtcgagactatggagggcgccagcctgaccatcg

SEQ ID NO: 5120 - DNA, 300 bp, Triticum aestivum
  Clone ID: uC-tsro9316057d03b1
ttgtttacgagcagtgcgcctcgctctgctgcggagactgttcatcaagctgtggcgtttctgctgccagacaggcttgagaagtagcgttagaacctccggccatatggtggctgcttcgatggcgatcaataggagcaaggacgagaagacgaacgagtacgaccagaggctctctcagcttgttgggggaaacaccaaggcgcgtattaccgacgacgacgacgaaagaacaaatgatcctcaggggagccgcaagggacgaggaggctgatgcaacgagctcatgggcaagaacat

SEQ ID NO: 5121 - DNA, 429 bp, Triticum aestivum
  Clone ID: uC-tsro9316057d05b1
ttggtctcctccgaacgtcacgctccgtccgtgcgcgttcaaggccatcaacgccatccgcgcgctcctgcagagggcgtgcggtgggcccgtggtctactgcgccgacatcggcgcgctcgccgtccgcgactcctgccacctggccggtgggccaaggtacgccgtaccgctcggtcgccgcgacgggctaacccccgcgtccctggacaccatcttgggcgcgctaacgccgacgacctccaaggtccacgtgctcctcagcttcctggccaagatcggactcgacgcctacgacctggtggcgctgtccggtgcgcacacgctggggatcgcgcactgcggctccttcgaggagcggctgtctcccaaggaggaccccaccatgaacaagtgggtgcgacggccacctcaagctcacctgcccgc

SEQ ID NO: 5122 - DNA, 249 bp, Triticum aestivum
  Clone ID: uC-tsro9316057d06b1
ttgttttcctccgaacgtcacgctccgcccgtgcgcgttcaaggccatcaacgccctctgcccgctcctgcagagggcgtgcggtgggcctgcggtctgctgggcccacatcggcgctctggtggtctgccactcctgccacgtgggccatgggccaagatccgctggaccgatgggtctccgcgaggggctaacacccgcatccctggacaccatttgtgggcgcgctaacgccgacgacctccaagg

SEQ ID NO: 5123 - DNA, 267 bp, Triticum aestivum
  Clone ID: uC-tsro9316057d07b1
tgttctaaaccgcgaacagagagctcgctcgacgtgaatgatgtcgaggcagaggcggacgatgaagaagagaggggcacgctgctgctacctggtcacgctctcagcagcgtgaattaccagatgccatgcttgccgggcctttttccgggtgcaccgcacgctgccatgagagcagggttgctctagagacgcacaaaaaaaaaggcaagtatgatacacaagggaaggctactgctttattccaagtgtaaatggatgcatata

SEQ ID NO: 5124 - DNA, 497 bp, Triticum aestivum
  Clone ID: uC-tsro9316057e01b1
gacgtggtcgcgcttctcgaccacctccgcctccccaaggtggtggtggtggggcacgactggggcgcgcaggtggcgtggcatttctgcttgttccggccggaccgggtgcgcgccgtcgtcgcgctggggatcccgttcttcccccgctcccctcgttcgatggcggagatgttcgcggcgcgcggcgatgggttctacatcacgcagttccaggagcctggaagagctgaaaaggcatttgctcggtacgacgttgcgactgtcctaaagaagttctactccattgaattagatgaccttgctgctcctcctggagtagagattatagattttttcgatgtgtcatcatccccacttacttggatgaccgaggaagaactgggccagtatgctgagaagtttcagaagtctggcttcaccggacccctcaactactaccgtaacatggacacgaactgaggcttactgcaccctggcacgctgcatagatcaca

SEQ ID NO: 5125 - DNA, 467 bp, Triticum aestivum
  Clone ID: uC-tsro9316057e03b1
tctttccttactttttttttttggaaagaaaccaagcaacaaagcatttctcattgccaacacacgcacacgcatacactctcgaccgatcgatccagctctccaacaaattttacagggtcgtgatttaactagcggatgctctccttttcggagtacgtacgtagtaagactagtagtagcagagtgatcctgattatacttgagctagctgccgcatggcatttctcatcacggtgcgcgccaaaaagaagaagaagcagctggaacgaatgagcatcacacatctgagcgccatgcgtcgcggccgatcgaaatttcgcgggaacgtgggcgtgggggcgagcagaacagagcgggaacagaggagccaccgacgggctggctcacatgaatctcgggccggccgatgtggtggccgccgcggtggtcgacaccatcatcatgcgcgcgaagtcctggaagcc

SEQ ID NO: 5126 - DNA, 434 bp, Triticum aestivum
  Clone ID: uC-tsro9316057e04b1
tcgttcacgcgtccgcatacacggtgtactattgccacaccgtcaaccctacctccgcgtacacggtcacccttgagagcgtggatggcgcaatggcgccagaggtgatggaggctctagccgtgtgccaccttgacacgctgcggaggagcccgaagaacccgatctttgagctgcacaccctgaagccgggggatgtcgacgtgagccattagcttactaagctcaacatcatctgggtgcgtgcaggtgagcagggtgacacacatgcgggaggccattagaagaggatacacgtgcacctgtgtgggctgattgtgtgagccgtgacacatacatcggaccatgatatgggtgaatctatgctaactgcgtgatgatgttatgaaataagtggtgtgtgtgagttgtcgtatgaactacataatatgtga

SEQ ID NO: 5127 - DNA, 160 bp, Triticum aestivum
  Clone ID: uC-tsro9316057e05b1
ccctctttttctatatatgtacacaaacatatccacggggtggtttgactacagtctgcttgcagtgcatgcactcctgtgtgctggtactggactacttcttctgtgcagccgttgatggcgcatgagtatagttgtaacttgtgaatgcgcgaacttc

SEQ ID NO: 5128 - DNA, 451 bp, Triticum aestivum
  Clone ID: uC-tsro9316057e07b1
ttctctctaactaaacagtaaacagagagctcgctctccgtgaatgatgtcgtggaagaggtggaagaagaagaagtgtggagcacgctgctgctacctggtcacgctctcagcagtgtgaattcccagatgcatgcttgccgtgccttcttccgggtgcaccggaggctggcatgtgagcagggatgcttcagtgatgcagaagaaaaaaggcatgtcttatcggcaagggaaggctacgcctttcttccaggtctacctctctccatctaaatctgtgtttggaggagggggctacggttagtttacccaccggtttactgcgtccttgagagttgtgatcattatcatgcactcgtcagttgcttgacatgtatggtgttcttgaattttcagctacataatggtcggttgtgtgagtgaatgataaggtgttcttgaatgctcatgt

SEQ ID NO: 5129 - DNA, 395 bp, Triticum aestivum
  Clone ID: uC-tsro9316057e08b1
tttcccacgcgtccgcccacgcgtccgcgtcccgtcttcccgccgcctcctcctcctccgcgtcgcaaaccctcgttcaaatccgccgaatcccgcgacccaggaaccaaggtagatcgatggcgaagagctcgttcaagctggagcacccgctcgagaggaggcaggcagaggctaaccgcataagggagaagtactctgacagaattcctgtgatcgttgagaaggctgggaagagtgctattcctgacattgacaagaaaaagtacctcgtccctgctgatcttacagttggacagttcgtgtatgtcgtacggaagcggatcaagctcagtggtgagaaggcgatcttcatctttgtgaagaacactcttgcacctacagctgccctgatg

SEQ ID NO: 5130 - DNA, 418 bp, Triticum aestivum
  Clone ID: uC-tsro9316057e09b1
ttgctgacgcgtgggcagacgcgtgggcggacgcctgggccgcaatctacgtttgatactacgtccaccccaagtgccccaggggctgtgtcggcgtgccgagtggtgtctacgagccccggaatgtggcgctgcgcggatatgaaattcaccgtcgacggcacctgcggtgggccctgcatgaagtactgacaggctcatgccagcatgatatgtaccgcctaaaatgaaataaaagctcacacgagaagagcagcgtcatggtgcctatgcgtgtgtgagtggtcaacaaatatgtataccagtatgccgtgtctttgtagatgtgtcatctatctcgagaaaaagttggtgttgcttgctgttcacatatccggaatatacttcgtgaataagttatgattgtacgtgggcggcc

SEQ ID NO: 5131 - DNA, 287 bp, Triticum aestivum
  Clone ID: uC-tsro9316057f02b1
catccatccgcccctcgctgccgctgcgtctcgtctccaccaccccacttgcccccggactcaggaggatcgtcggagatgtcggacaccgatgagcaccacttcgagtccaaggccgactccggcgcctccaagacctacccgcagcaggccggcgccatccgcaagggtggacacatcgtcatcaaggcccgtccctgcaaggttgttgaggtctccacctccaagactgggaagcatggtcacgcaaagtgtcactttgttgccattgacatttttaatgggaa

SEQ ID NO: 5132 - DNA, 227 bp, Triticum aestivum
  Clone ID: uC-tsro9316057f06b1
ttttgaccacggctgggaccaacagtcaggactggttttctgggaactttgggtttgggtcccccgggatgccagcaaatgggtccacacccggacgtgctaacaagagcgcatgcacccttacctcttttaccatggcctcttaatcaagcaaagagtacgaatttgcctcattaacgcaaggaatgtagtcgaagcgatgaatggctttgaatacttggagatgg

SEQ ID NO: 5133 - DNA, 258 bp, Triticum aestivum
  Clone ID: uC-tsro9316057f07b1
ttttgtttccaccggccctcgatggcgttggatcgctgggtctcaacagtacttgccgctgcactcaggaggaacctgctgagataccagacagccatcatgaccactgagggggcgttgatggacatcgattttctaagacgtactcgctgaagatcgatcgcatgaccaggggtggacacttgattatcaaacaacttccctgtaatgttgtagtggaatcaacgaacaaaaatgtgaagcttctgctcgcattgt

SEQ ID NO: 5134 - DNA, 504 bp, Triticum aestivum
  unsure (1)..(504): unsure at all n locations
  Clone ID: uC-tsro9316057f10b1
tcggcaacgagggcgagtacgagcggatcaccaaggaggagaagcaccacaagcacaaggagcacctcggcgagatgggcgccgccgccgccggagccttcgccctctacgagaagcacgaggcgaagaaggacccggagcacgcgcacaagcacaagatcgaggaggaggtggccgccgccgcagccgtcggcgccggcggcttcgtcttccacgagcaccacgagaagaagcaggaccacaaggaggccaaggaggccagcggcgagaagaagcaccaccacttcggctagatcgtcgttgacgtgcggtggccggcctcgccgacggccgtgcgtgtgcttacgttacgtgtgttccataaagtgagagaggctgggacgcgggcccggtctcgtgctcgcccgtgcgtgattttctctgcgtgctaagcttacgcgtgcctgaataagtggggttgctgttcatgcagtggctcccacacctcatgcgtcngtgtgtgtc

SEQ ID NO: 5135 - DNA, 497 bp, Triticum aestivum
  Clone ID: uC-tsro9316057f11b1
gccaaggctgggaacaacaatcaggacttcttttctgggaacttcggttttggttcgcccggcatgccagcaaatgggtccacaaccgcaggtgctaacaagagcgcatccacccctacctcttctaccctgccctctcaatcaggcaaagagtacgatttttcctcattaacgcaaggaatgttctcgaagcgatgaatggcttgaaatacttggagatggatgaggcctccattgggcgcagatttagggagaacgttggggggcgcttgtacactgttttaccgaggcagctttgccagttgtggatacatagttacatcaccttgtgggtcaacaagtgcggatatggcagaaaactgctcatgttgtttcctacagctgaatagtctcattgttacagtgatgccaaagaacttaaaacagaggattcccttgtgggcctgttgaactattctcttgttcagggtgtagttgcaataccacatatcgattac

SEQ ID NO: 5136 - DNA, 390 bp, Triticum aestivum
  Clone ID: uC-tsro9316057f12b1
cccacgcgtgcgcccacgcgtccgcccacgcgttcggggacgcgtgggctccggcacgtgctgaaaataatgagcctatactgacattgccaaaacagacacctcaacggcacaatggagctggttcacagggccaccacaactataggggccgtggaaggggtagaggcagcgcgtggtctgaagcgtcaacaaaatatactgaagagtacgattatatggacatgaatgagaaggttaacaaagatgaagtatggggccatcttggtcggaaatcccagtctagagacacagatggtgagcaaggagatgatgtattcgatgaacacctcgagtacgaggaaacagacaatccagagctagatgtcgagcctgtctacagcaaggatg

SEQ ID NO: 5137 - DNA, 318 bp, Triticum aestivum
  Clone ID: uC-tsro9316057g02b1
gttcgtactctcaagcaggtggctgctgcagctaagcaagtttacgaccaagtcctattatgtgagactgaaaacagctgcccaggttgtcgtccttccttccgccattgacggtgtaatcagtgagcaaatgttcatgaatggtgcttgtctacacagcgcaatctttctgtaaagcaaacatctatagttcctgtccatttgtgtctgcaactaaatggggtggatattcatttgctccatgtaataatggcttgtagactacatacatggctgtggagcaattgtcctgatccatgtcacaatatttgccctgat

SEQ ID NO: 5138 - DNA, 338 bp, Triticum aestivum
  Clone ID: uC-tsro9316057g03b1
aaagctggtgcgcctgctggtgccgctccgccataactgccgggtcccacgcctccttttacgcactcgaatacgcgtaacactgcaaccaaaccctgagtgtgaaagctgtctaatcccaacacgtgcttgtccagatcgaacagacctgcaggtgattccacgcggtagcgcctgcgaccccaaatcaactaacctctgggacccctttttctgctaccacttgggctcctgcggcggcaccggcctctttccctaaatacagtgcatcacgcttccggaccgaaagaaaaaaccaacgcgcggaccgactggaaggaaacacctaacgttcacgt

SEQ ID NO: 5139 - DNA, 465 bp, Triticum aestivum
  Clone ID: uC-tsro9316057g04b1
ttcacgcgtccggccacgcgtccgaaagcatccatccgctgagttggagagcttgctaatcgcagttcgtcctcgcccaaatcgagcagccatgtcgctgattccccgcggcaacgccttcgaccccttctcccctgacctctgggaccccttcgacggcttacccttcggctccggcggcagcagcagcctcttcccctcgttcccgcgcatcagctgcgagaccgcggccttcgccggcgcgcggatcgactggaaggagacgcccgaggcgcacgtgttcaaggcggacgtgccggggctgaagaaggaggaagtgaaggtggaggtggaggacggcaacgtgctccagatcagcggcgagcggaacatggagcaggaggagaagactgacacctggcaccgtgtggagcgcagcagcggcaagttcctgcgccggttcaggctcctcgaggacgccaaggc

SEQ ID NO: 5140 - DNA, 481 bp, Triticum aestivum
  unsure (1)..(481): unsure at all n locations
  Clone ID: uC-tsro9316057g05b1
cgcaaatcctaggctaggccaccggcgcccgagatggcggcggccttggcggcgggcgtcggcgtgctgctgccgttcccgttctactgggcgctgtggacgcgcccgcagcggtgggtggacctgtgcggccggggcgccgacccgtgccgccgcatggcgcaggtctcccacgtcctcaaggcgctccagctcctcgccctcgcctccgtcgcctgcttctgctggccccctcctctctgcgccctccccctactcgccttcggccagtacctcaacttcaaggtgtaccagctgctgggcgagtcgggtacctactatggcgtccggttcgggaagaagatcccgtgggtgacggagttcccctttggctacatcaaggacccgcagtatgtggggagcatcctgagcctcgtggcgctgctgtgctgggttcccttccagtatattgtgtngtggtgcctcngatatgttttcatga

SEQ ID NO: 5141 - DNA, 160 bp, Triticum aestivum
  Clone ID: uC-tsro9316057g08b1
tttgctatctccattgttgcgaaaactccaacagagtcgggatcatgaatgtaatttcttacaactcgattaatgtttgttccagaataagttgattgcagcagcagcatgtagccatgaatcggatggttaaacaatgttatggcatgcatatttcttc

SEQ ID NO: 5142 - DNA, 444 bp, Triticum aestivum
  Clone ID: uC-tsro9316057g11b1
gtgggtctctctctcgcggcggcgcaggcgtctctctccttctcctccggcggcggcaaggcattttggcatctgagcccaacagctagcagatggcaggcggcagagttgcacatgcgaccctcaaggggccgagcgtggtgaaggagatcttcattggactcacccttgggctggttgctggtggtatgtggaagatgcatcactggaacgagcagaggaagacgcgatccttctacgacatgcttgagaaggggcagatcagcgtcgttgtcgaggagtagttctgaagtgctgaaccagaagttctacatctcgaagtcttttgtcattttggttttgccagtaatttctgaaactctctggagagcatgacagagtgattgctgtggagattgtcatgaaaataagcacaccaccatttgagaacatcgaaccattttg

SEQ ID NO: 5143 - DNA, 386 bp, Triticum aestivum
  Clone ID: uC-tsro9316057g12b1
tgggtgaccaccgctcttccggcgcggcaggcgactatgttctactcatcaccggtggtgctggtggctggccctgtggagccaacatctggccaacgggaggcatcatggtcctacatgccaacctcaagggtgcggacgtggtcatggcgaacgataaagtgctcgcccttctgctgtcggttggtgaacagctgaacacgcatgactggcacacgcaggacgaaggaacaactgttctctcacatggctagagactgggcgaggacacttgatgacacgaggactaagcttggactgctcgccataaacatccatctggctgggaaaacccagtcgggactccaacagaaacgtcttgcactacatgcagagcatgacagatg

SEQ ID NO: 5144 - DNA, 228 bp, Triticum aestivum
  Clone ID: uC-tsro9316057h01b1
tcggttgaatcgagaagctcatggcatgctatcgatgtgcttcagtcaatatctcgttggcgtctgttggaattactctcaaattgcttgcctgacagatttacccattcgaacgaaactaatctttgtgctcttgaaagcatgaaggaggatattgtaactggaattgcaccacactttattaggccgatctataggtggccgatctttgccttctagggaggagcc

SEQ ID NO: 5145 - DNA, 126 bp, Triticum aestivum
  Clone ID: uC-tsro9316057h03b1
gttaccacgcgtgcgcccacgcgtccggtgattgcgagggggacaaaacgggatgtgttatcagttacataaatgtgaggtgcacgcttgctctgagtaaaagatgaggtctttctctgcagttgt

SEQ ID NO: 5146 - DNA, 386 bp, Triticum aestivum
  Clone ID: uC-tsro9316057h05b1
tttttcacaccgggacttcgacagcggacctggccttgctctaggactcacactccgatctgcgggcatggccgcggagcgccctggtttcgctgcagccagacggctggcactgtccaggcttctactactgggcgacgggctactcgcggcctgatcgtcggttagcgcccttcggttcgatctggggtccggccacacgaagtgcatctccgacgagatcaagggtggctctatggaccacgggaagtacagttgagggcgaacgcgaccccccctaccccgtcgcacagctacccgaggcgcaccgtgtattcctcaagggggcgttctcttacgggaacagaatgcactactgcgagaacgtgcattcggcgtacttttgc

SEQ ID NO: 5147 - DNA, 255 bp, Triticum aestivum
  Clone ID: uC-tsro9316057h07b1
gtgtccacgcgtacggtcggtggtcatttggaggctggagactgaacccttcctgttcattgattgcgagtactgtcactatgtaatcgcaatacgtttcggttcgagaactgtgttgcaaattctcccatctgcggactatagtctgtttatgacccccatttcatggttatatgtttcactgtttcttgcttgaccacgatcgtagcctgcaaggggggacgaaagaaatgactcatgctaaggaacaacatg

SEQ ID NO: 5148 - DNA, 170 bp, Triticum aestivum
  Clone ID: uC-tsro9316057h08b1
ttttccacgcgtacgcccacgcgtccggtgattgcgtgggggacaaaaagggatgtattattagttgcataaatgttacgtgcacgcttgctctggataaaagatgagttctgtgtctacagtgctgctatatgtagactatagtcaggatagaagaactaattgatggc

SEQ ID NO: 5149 - DNA, 288 bp, Triticum aestivum
  Clone ID: uC-tsro9316057h10b1
agctgtttttacaccagaagtcagccgccagagagggcgacgatctaccacacccagtcgatgctgcggactggcccgggggagctgtggttgcccaactgccggacggcatggcccctgcaggccacctgtgtatcatctgccgagtgcacgaggaacagactgaactgcccgcccgcccccggtcgccgtcaggtcaacggacacctcctgttggccggacatggacgatgaagaaactgggggctgcggcagcacaagctggagaggagcctgttgacgctaggc

SEQ ID NO: 5150 - DNA, 466 bp, Triticum aestivum
  Clone ID: uC-tsro9316057h12b1
tttggaggttgacatggtaatggtaccggctacaactggcctgatgggtattttgccaggccatgtttccacaattgcagagctcaagcctggtgttatgtctgtacacgagggaaatgatgttacaaagtactttgtgagcagtggctttgcattcatccatgcaaactccattactgatgttgtggctgttgaggctgtcccccttgatcagattgaccaaagcttggtccagaaaggtcttgctgaattcactgccaagcttggatcagcctcgactgacctagagaaggcggaagctcatatcggagtggatgttcacagtgcgctcaatgctgcattgactggttgatgatgacatcttacatttttatgtccttttcatccgcatctttagaatgtgagttgaagtccgcaaactcatgaatgaggatggatggaattatcttaaataaattatactcca

SEQ ID NO: 5151 - DNA, 486 bp, Triticum aestivum
  unsure (1)..(486): unsure at all n locations
  Clone ID: uC-tsro9316061a01b1
ctcgcgttattcttgcatggtttgttgctccacacgttgtcaagagagcggctgcgatccttcttcacatgcttctgggaggcctttgctcgttgacgatgataatctcgctgagatttgacttcccaagaatccagtttgggtcgatgcgatactgggggatcctgctcgtgtcctggttcctcgtgtttggagtgcgggcctcgcgaacccgcaccatccgccgtaattcatgatgattacatcgagtgtgccctcagtcaggcgttatgaggatttaggaccgnggcgtccaagggtcgcgtccaccacagagttaggtattgcacccctgtgtatattcgccgctagctataccatggacgtgctattttttttagctggagtatgtgagacgtacatgtttggccaagacgacatggctagagtactgctactgttcagtgttgctaaacgaatacagtgatgtctatctttagcattttt

SEQ ID NO: 5152 - DNA, 521 bp, Triticum aestivum
  Clone ID: uC-tsro9316061a02b1
ctctcccacgcgtccggcgagtgggagtccggccatggcgccgtcgcagcccaagtcagggctcttcgagggcatcaacaagggccacgtcgtcaccaagcgcgagctgccgcctcgcccgtccgaccgcaaggggaaaggtacaaagagggtgcattttgtcaggaacttgatcagggaggttgctggatttgctccctatgagaagcgtatcactgagcttcttaaggttggaaaggacaagcgtgcactcaaggtcgccaagagaaagcttggtactcacaagagagcaaagaagaagagagaggagatgtcaagtgtccttaggaagatgaggtctgctggtggcggtgctggtgacaagacgaaatagaacttggctagctggtgaattttatccggcagcaaagtcctgtattaccagtccgtacctatagagctatggccattgtgttgacactatctttagcccgtggtttctattttgagaagaccaatcctcctaagatgtttatacatga

SEQ ID NO: 5153 - DNA, 440 bp, Triticum aestivum
  Clone ID: uC-tsro9316061a03b1
tgttgggggcggcccgcgcatcggaggcgaatcagcgtttgaaccaagccggcgccgccaccatgggtatctcgcgtgactccatgcacaagcgccgggccaccgacgggaagcacacggctctgaggaagaagcgaaagtatgagctcggccgccagccaaccaacactaagctttcaagcaacatgacagcgaggagggtccgtgttcgatgcggtacacgtgaagcggagggctctccggcttgacactggtgacttgtatagggtagtgaggactcgacccagaagacccggccctggatgtggatacagttcgtcaaacaatgagcttgtgaggactcaaacccttgacaagaatgccattgagcaagttgatgctgaccccttaagcagtgggacctgactcattatggagtcgaaatcggtaggcagaagaaa

SEQ ID NO: 5154 - DNA, 470 bp, Triticum aestivum
  Clone ID: uC-tsro9316061a05b1
tctttgcagggcttgtgagaacatccccatggggctgtgtggcaacaaggttgatgtgaagaacaggcaggttaaggccaagcaggtgacattccacaggaagaagaacctccagtactatgaaatctctgccaagagcaactacaactatgagaagcccttactttaccttgctaggaagctggctggtgatcccaacatccacttggtcgaagcagtggcccttaagcctacggaagtgaccttcgacttggccatgcagcagcagcactaggctgagcttgcggctgcagcggcacagccactgcctgatgacgatgacgatctgatcgagtagagagaggaccatgagtctgtcttatcaatcaatactttgagagccagagactatgcgagtcggttttaggttgaaggcttgattggagtagtcaaccggatgttttcctgtctgcttgcttgtctgtgggctg

SEQ ID NO: 5155 - DNA, 523 bp, Triticum aestivum
  Clone ID: uC-tsro9316061a06b1
tttgtgcagggtttgtgagaacatccccattgtgctgtgtggcaacaaggttgatgtgaagaacaggcaggttaaggccaagcaggtgacattccacaggaagaagaacctccagtactatgaaatctctgccaagagcaactacaactttgagaagcccttcctttaccttgctaggaagctggctggtgatcccaacatccacttcgtcgaagcagtggcccttaagcctccggaagtgaccttcgacttggccatgcagcaacagcacgaggctgagcttgcggctgcagcggcacagccactgcctgatgacgatgacgatctgttcgagtagagagaggatcatgagtctgtcttataatcaatactttgagagccagagactatgcgagtcggttttaggttgaaggcttgattggagtagtcaaccggatgttttcctgtctgcttgcctgtctggtggctgcaactgttgtggacatgatctacatatgtgctgcatgattgtgtcgcacctgat

SEQ ID NO: 5156 - DNA, 274 bp, Triticum aestivum
  Clone ID: uC-tsro9316061a08b1
tctcggtgactataaaagaaacaacaaaaacatagtaaaatgtataaaattacgcagctttccccccaccactggtggggggttttggagctgaccccttaggaaaacaattcttcgattgtttgctagatacgttatgagacggacctgtttaaggggccgttccatttctgaagctaacaaactttaagtcgttgatttgcctgcgatttgaagacgtcgtagctgcatctgctctggttattcccagtgcatttgcggctggttttattgc

SEQ ID NO: 5157 - DNA, 365 bp, Triticum aestivum
  Clone ID: uC-tsro9316061a09b1
tttttgctcaacctcgccgccggagacctcaagaagttctaccaggggcggagcgggcggcggacggcgagcgtgaacgtgaaggggaacaaggtgccgctgtacggcagcgggccgacgctgatggcgcagccggcggggggcaagggcggcgccggcaaggtgatcccggtgccgatggtgctgcggacgacggtgcggtcgcaggcgtacgtgctgggggcgctggtgaagccccggttcaccaaggaggtggagtgcaaggtggtgatgaacccctacaagctcaacaagcccgtctcgctggagaaggcctgcaaatactcatgatttgctcactcatgatccgtccatggttggttgat

SEQ ID NO: 5158 - DNA, 329 bp, Triticum aestivum
  Clone ID: uC-tsro9316061a12b1
ccttttaaggatgacccccctgcaggtaccgccgcggcggtcctgggtggaccccccccgctgtcgcgtggcaaagtgcggacatcccaatagggctgttgtgccgcaaggttggtgggatatacacgcgatgtccagtctggcaggtgacattgcacaggaagaagaacctccagtcctatgaaatctctgccaagagcaagctacaactttgagaagcccttcctttaccttgctaggaagctggctgggggtcccaacatccacttggtcgaagcttaggcccttaagccctcgagaagtgaccttctacttgggcatgcaaaaac

SEQ ID NO: 5159 - DNA, 94 bp, Triticum aestivum
  Clone ID: uC-tsro9316061b01b1
actctcgcggacgcgtggggcaatacctgctatgttctccattgtgtatccagacctcttgtgttttatgtgaacttgtgtcctccctggtgtt

SEQ ID NO: 5160 - DNA, 181 bp, Triticum aestivum
  Clone ID: uC-tsro9316061b02b1
tgctctcggacgcgtgggttcaaatgagaactttgaaggccgaaaaggagacaggtaacttgccatctgagatgcccttaattcagtttgacaacgtggtgaactttctgaaactgctatatatatgctaccttgataaatacaaaaaataggactccaaaggcaatgtatggaaaaattg

SEQ ID NO: 5161 - DNA, 283 bp, Triticum aestivum
  Clone ID: uC-tsro9316061b03b1
tttcccgttctggctggatggtggccggagctcgcggaggactcgagatatgcatgtggcggcaccgagcatgaggcaacaactgcattacttgcggggaaggcgcaagtaggacacctgcattacttgcaaacaaggcgcaagtaagacactgaaatgtagtataattcttcatctcaatatgtataaccttaacgggtctgatcgtgacaccaagctattgttccacgactgaccattttcggcatgtattactgagtgttaacgagaatctcgttggact

SEQ ID NO: 5162 - DNA, 330 bp, Triticum aestivum
  Clone ID: uC-tsro9316061b05b1
tgtctcggacgcgtgggcggacgcgtgggttcggagctggtgccgccactaatgctcgtcgagatgcggctggagatggacgacggcgacggcgaggttcaagtgtttggttgggaccagttgagggtggagctaggggatgtagtaagagcttggcatagctgtgaagatttggaacaagttcagtaactttcttattcagaagaagttattttgcagcttagctagttaatggagagtgtaaacaggtactctaaaatgtcaatatatgtgaatctaacacgagggctaagcttggcactgggccggcttttacaacctttagaatgg

SEQ ID NO: 5163 - DNA, 432 bp, Triticum aestivum
  Clone ID: uC-tsro9316061b06b1
actgcccacgcgtccgcgacgagcatgtcgacgtccgcgggcgccacgcctgttctgacgaatagctccacgatggcctcgtcgaagaaggcgtccatctcgtcgagcgcgtcccggtgggtgagcgagtcctcgcggcactcgaggatgctgcgcaggccgtagctgtgctctcgatgccggagcgcacgatgacgcggaggaggaaccggagctcgggaggccgaggtgcttgttgcgcaggatcacctcgtcgtcgctctggtggagttcatacagctcaacatctacggctccatgaccacagagagtcatcatctctgctcatgggcagccacgggacatgcatcacgacgtgcttcacaaggaccacgacggagtgagcggagtctgaatcagcaatgtaagcagcgaagagccagctccctgtta

SEQ ID NO: 5164 - DNA, 475 bp, Triticum aestivum
  unsure (1)..(475): unsure at all n locations
  Clone ID: uC-tsro9316061b07b1
ttttcggtggccaccgagcgaaccctagccgagattagactaccatccccaatctagcggaggaggacgaggacgacgccgacgagatgctgagggttgcggggaggaggctctcgtcttcgctctcctggcgccccgtggcgaccgtcggagccaggggcccgctcgccggcgccggcggccctgggagagacgacgacgacggttcggcctaccagcggcggttcgccatcgagtcccccttcttcaccgccgcgagagggctcttcttcggctgaaacacttgttccacggaaccaagatgcttgggttggctgaactcccagccacttgntgctgcactgaaagaaccccaactcaaaaatcctntatgaccagtacaaccatgaaagatatcctcctggagatcccagcagcgtgcctatgcctactctgtctgagtggtggagattcgtatatgcatcactgctgcgtc

SEQ ID NO: 5165 - DNA, 491 bp, Triticum aestivum
  unsure (1)..(491): unsure at all n locations
  Clone ID: uC-tsro9316061b08b1
ttttcggaaggctttctttaatcgaattacttggacgacggcaactctaccaggccctttaagttcattttctgttactccatctttcttttccgttccatattcttcaataccatttggtgccacatccgttgttaattcaatagataggactccagtggcatttttggcaaaattgtttagatattggagggggtcaattgaagtgactattaaagttgtgaagacagaatttcatactggtagacttattttgtccttttcgccccaattagctcagactactattacaaattctaatacaaactatgttcatcgtgagatagtcgatctacgtgatggctctgagtttgtgattaaagtgccttattgctacaactctatgtacatggatactgaccaagctcaaaatgatttattcatgatgatgcaggtcaatgtattaaatgaatnggtagctccagacacttgcgcaccaagcgtagaaattt

SEQ ID NO: 5166 - DNA, 360 bp, Triticum aestivum
  Clone ID: uC-tsro9316061b12b1
ccgggttgccccacgcgtattgggacccccaccggaccagcgcgagggggggccatttagaaacaattgccgttactaccgccggcaggacggcctgaggagagaaggcgaccacagcgggaagcacggcccggcgggggagcgagtgctctggggaggcgaggatgacgagcgaggaacagctgggctcgcgacgccggaggggaggacaacacgaaggaggaagcggagctcgggaggccaaggaggaagtggcgcatgatcacggtagagctgatagaggaggaggaagacaccaggacaaagactggtacaggaccacagagaagaacaacctgacggcaaggacagccacgggac

SEQ ID NO: 5167 - DNA, 446 bp, Triticum aestivum
  Clone ID: uC-tsro9316061c02b1
tgttggggatttgcgatcggtaatggtctcacagatccagcaatccaatacaaggcctacacagactatgcattggacatgaaccttattcagaaagctgactatgaaaggatcaacaaattcatcccaccatgtgaatttgcaatcaaactttgtggtacagatgggaaagcatcttgcatggcagcatatatggtctgcaattccatcttcaactctatcatgaagcttgttggtaccaagaattattacgacgttaggaaggagtgcgaagggaaactctgctacgacttctcaaacttggagaagttcttcggtgataaagcagtcagacaggcaattggagtaggtgacattgaattcgtctcatgcagcacttcggtttatcaagcaatgctcacagactggatgaggaacttggaagtccgcatcccagctctacttga

SEQ ID NO: 5168 - DNA, 396 bp, Triticum aestivum
  Clone ID: uC-tsro9316061c03b1
tttgaggaattaagccccaagagttggaggcgatgtcgtggtggaggtccaagccgcacttcagcgccgacagccaggactcgagctccaacgacgcgtaccgcggaggcaaggaccgctcgccgtcgcgtcgcaagaagtccgacgacgacgaggaggagtaccgcccatacgcaggctacggcgccaacaccaaccgcggcggggccaacgaaggcggtggcggcggcggcggctacaacggtggttacggcggcgggggcggcggctacaacaacggctacggcggcggtggctcgtacagcaacggcaacggcggtatcacgccctacaacggcggcggcggtggctacaaagcaactctttctacggaacagcggtggtgggtacaacaac

SEQ ID NO: 5169 - DNA, 391 bp, Triticum aestivum
  Clone ID: uC-tsro9316061c04b1
atcgctctcgtcgtgtcttggtcaatgtgtgttctctctcgcgaaaataaacagaaataaaaacaaaaaaaaaggagaaagcctgcagctttccgactgggaaaaccctggaagaacacaagaaaatacccttgaaaagaaataacactacaaacaaataataacaggggggggggcccctttggggtcccaggtttccgccccggggctggcccgaccgtggtttttttttggggcccccaaattccattacacgggccgggtttttccacctccgggccggggaacccctggggttgccccactttaatcgcctgggagaaaatccccttttccccggttggggtattgcagagggggccggcccggttggcccttcctaagagtgggc

SEQ ID NO: 5170 - DNA, 344 bp, Triticum aestivum
  Clone ID: uC-tsro9316061c05b1
tctcgcgagcgccgccctttttttttttttttaaccaaaaaataccaagaaatttcaagaaaaaaataaggagggaaacaaacaggctgatgcaattcgcattcccgttccgtctctggtttacggccacataaataataacactactactagtactacttgagaactctggttgttcttctttatcctacgctgatgttgtacagcagccccatcagagcaagccaatctgtctagagactagctcaatcgagcggctcgatcagtagctccagagcgggacctcgccggcgccgtacccaccgctgtcgttgcaatcgtggtcggctccgtccatgtgcgag

SEQ ID NO: 5171 - DNA, 455 bp, Triticum aestivum
  Clone ID: uC-tsro9316061c06b1
tttcgcgagcgccgccctttttttttttttttaaccaaaaaataccaagaaatttcaagaaaaaaataaggagggaaacaaacaggctgatgcaattcgcattcccgttccctctctgctttacggccacataaataataacactactactagtactacttgagaactctgcttcttcttctttatcctacgctgatgttgtacagcagccccatcggagcaagccaatcgggctagagactagctcaatcgagcggctcgatcagtagctccagagcgggacctcgccggcgccgtaccaccgctgtcgttgcagtcgtcgtcggctccgtccatgtgcgagccgctctgccagtcgccgccggcggcgctcatcccgtcgtagtagtaggaatcctggtccaagtccccaatgccgccgtacccgtactgcatcgggtagtcgtcgtagtgca

SEQ ID NO: 5172 - DNA, 197 bp, Triticum aestivum
  unsure (1)..(197): unsure at all n locations
  Clone ID: uC-tsro9316061c09b1
ttctcgcggacgcgtgggcggacgcgtgggattagatcttctttaccctgttgctcgccagaaatgacattgtcctattgccgcagtaattttgatgccatgcccacagggtttgtgaacctgcctagtttgattgtcaagggatgtatgtgttactttcaaaaaaaaaaatacaaaagctaccannccaacaccaa

SEQ ID NO: 5173 - DNA, 320 bp, Triticum aestivum
  Clone ID: uC-tsro9316061c11b1
tcgcccacgcgtccgggctgcctggttgagagaatccggcaccatcaacacgatactcgtcagcgacgagcgtgcgcagcgtgcaagcccatccaatctggtgccgaggctggaggcgctgcagttgtagcccgtaaagcaccgcataccctgtagcagccttgtctgtaagctctcccccgcctctccttagtttgtcttctgcctttcagaagactgtgtggtgtattataggctcgccgaataggagcttgttttgttgttgaatcctgttgttaattggcagtgtgcctttcaagttccaactcctctcatcaagg

SEQ ID NO: 5174 - DNA, 454 bp, Triticum aestivum
  Clone ID: uC-tsro9316061c12b1
tgctctcgggactatcccgacaggccaccgactgttaggtttcactcaagaatcaacatgacctgtgtgaatgccgagactggattggtggaccaaaggaagtttagcctgctgtccaactggcgccgtgagtacacaatggagaacatcttgatacagcttaagaaagagatggcgacatcacacaaccggaaactagtgcagcctccggaggggaccttctactgaaggagcacttgccgtgtcgcacgtgtcattcccaagaaccctcgcggttcccattttagatatcgcataagatcgcaacatttggtgcaaacgattatgtataactttgacggtgtccttcacatggctcttgtgtgtctagtctcgttatatctgctgggtacgcctgtgttgtaatgatacgctggagcttagctattgtttctaaagtaccattacgttgctt

SEQ ID NO: 5175 - DNA, 319 bp, Triticum aestivum
  Clone ID: uC-tsro9316061d01b1
ctcgctgcccaccggcgctacgaaagggtgagggaagctttaaacagtcaacgcggatgctccaaaaagcaggccgcgctaggtgcggatccttacaacggaggtaaatatggccacaaagagaacttggggtgtccctgggggggtccacgattaaggacgtcctgcttgcccacctacacttgttgtttgagcaccttaaccccgattgcaggctgtcggttacccaagacgaactgggggaaccccgggggagaacccacagaatagcttgtggacacaaggcctattatcgcgactggcgataaatctaaaaggc

SEQ ID NO: 5176 - DNA, 297 bp, Triticum aestivum
  Clone ID: uC-tsro9316061d02b1
ctcggtgttatctgagacttgaggctgtggcggctattgttctgcttccgcgtggtcggagttattccgtgcgagttgcaacattcgtggtcgcggatcaagggttatgatgtctcacgactacgtatattattagtttggtggtcaaacaagcagaaaaaaaaagaaagcaaactaacatggaataaaagacataataaagctcgagtcaaaacacctatggaccaattaaagggattgcgcaatgcctgacccgtctgtacaacatgatggccgaaactagcacacgccttacca

SEQ ID NO: 5177 - DNA, 289 bp, Triticum aestivum
  Clone ID: uC-tsro9316061d03b1
ctcgctgtccgcccgtcttggtcaatgtgttttctctctcgagaaaataaaaaaaataacaaaaaaaaaaaaaccaaaaaaaaaaaaaaggggcggccgttaaaaggaacacaagcttccaaccccgggcatgcaacaaaataactttataatagagaaaccaaaattgggtcccctgcccagaattacccaacttccctaacctggaaaaaccctggcattacccacttaaagggcctgcaaaaaaatacccttttggccagttgtcaaaaaagcaaaaaggggaaaa

SEQ ID NO: 5178 - DNA, 400 bp, Triticum aestivum
  unsure (1)..(400): unsure at all n locations
  Clone ID: uC-tsro9316061d04b1
ttgaacaatatgcaaagcaaactgcttaatgcgccattgcctggctgtactggaagtgtccgcgagatccaaatagatacgacgacgggaaggaggctcgtgaagaaggagaagattcaggtctcaggtgagatcgatggttaagatggctcgcaacacgattatatctgggaatttagaattgtagtttaccctgctgctttcttttcttttttgtgggtagatctgatgtctctacatataatagataccgagtgtatgctgctggttctttccattcttttgggttcgtgggtgccatgtaaatgttggcggattccttatgtttatgccttctgcggtaaataaaaagctaatgcagattcgtggtcaaattacaaaattnccttataaccaaaaa

SEQ ID NO: 5179 - DNA, 162 bp, Triticum aestivum
  Clone ID: uC-tsro9316061d06b1
caccaccatctcctaatcacaagagatcttttttacacggttagagaaagtgaggacgagagatcagcagctgctcgagtagctcgcgtggaggtgtccaaggtgggagacccaagcccaggctagctagccgaccaactgctccaccggagccgatggctg

SEQ ID NO: 5180 - DNA, 202 bp, Triticum aestivum
  Clone ID: uC-tsro9316061d07b1
cctcgatcgagctgcgttggctgactcgcgcgagcctcggtgaactggttggcactaataagcatgtcacgctaggtgtggtgggctcgtgggtcttgaaatgtgttgtcaagatcacttgctttcgtgttggggcgtggtccttgacagtgtattactcttgctgtcttacatggcatgttttacatgattctgttcgtgt

SEQ ID NO: 5181 - DNA, 532 bp, Triticum aestivum
  Clone ID: uC-tsro9316061d08b1
ttttcgctcccccgccgccgccgccgctccactcccccgcaccgtcgtctccaggtaaggagggcgagatggtgaagcacaacaacgtcatccccaacggccacttcaagaagcactggcagaactatgtcaagacgtggttcaaccagcccgcccgcaagcagaggcgccgcatcgctcgccagaagaaggctgtgaagatcttccctcgccccacctctggacctcttcgccccattgtgcaatgccagacccgcaagtacaacatgaaggccagggctggcagaggctttacccttgaggagcttaagtccgctggcatcccaaagaagctcgctcctaccattggcatttctgtggaccatcgccgcaggaacaggtcgcttgagggtatgcagtccaatatccagaggcttaagacctacaaggccaagcttgttatcttccaaggcgtgctcgcaaggtcaaggctggtgactctccctcggaggagcttgcccacgcccacaggtccagggcgactacatgccca

SEQ ID NO: 5182 - DNA, 186 bp, Triticum aestivum
  Clone ID: uC-tsro9316061d09b1
ggccgccctttttttttttttttttttatacatattaataatagcacatatgctacggacatgggatatggatggaggtgtatactacatccaccgaactaatcgacgctttacaacggtttgactgggaaaacggagtctttaccgaagataaaaaaatcttgcaggacatgccccttgtcaaca

SEQ ID NO: 5183 - DNA, 448 bp, Triticum aestivum
  unsure (1)..(448): unsure at all n locations
  Clone ID: uC-tsro9316061d11b1
tttctcgcaccaccatctcctaatcacaagtcatcttgcatacacggagagagaaagagaggacgagagatcagcagctgctcgagtagctcgcgtggaggtgtccaaggtgggagacccaagcccaggctagctagccgaccaactgctccaccggagccgatggctggcgccgacgtcgacgtcgggacggagctcaagctcgggctgcccgggggcggcgccgaggcggccaaggccgggaagaggggctatgaggacaccattgacttgaagctcacgcttcccaccggcggcatgcaggaagactccgcaggcaagccggagccggccgccgacaaggccaagaggcccgcagaggccgcggctgccgaccccgagaagccacctgctcccaggcacangctgtgggttggccactcagtccgtcgtaccgcaggacgccatg

SEQ ID NO: 5184 - DNA, 494 bp, Triticum aestivum
  unsure (1)..(494): unsure at all n locations
  Clone ID: uC-tsro9316061e02b1
tgtctgggcgacgtccacccaatcggagtgaggggctgctacgatgagggtaagcgtgttgctgagacactgatgttcgactaccacaggcagcatggcattgagatccgtattgccaggattttcaacacctactgacctaggatgaacattgatgatggccgtgttgttagtaacttcattgctcatgccattcgaggtgaagcactgactgtccagaagcctgcaacacagactaggagcttctgctacgtcgctgatatggacaatggtcttatgaagctgatgaatggagacaacaccggacccattaacattgggaacccaggtgaattcaccatgctggaacttgccgagaatgtgaaggagtttgatcaacccacaagtgacagtgacgatgactgagaacactcctgatgaccctcgacagaggaagcctgacatcaccaaggccaangaggatctcgactgtgagcccaagtcgtcctgcgcga

SEQ ID NO: 5185 - DNA, 539 bp, Triticum aestivum
  unsure (1)..(539): unsure at all n locations
  Clone ID: uC-tsro9316061e03b1
atctcccacgcgtccgccgacccccccgatctggttgaatccgtccaatccaaggagcactcgcaatcgcaccggcggcggagatgggcggcgaccatggcggccacggcccgagcggcggcgacttccggcagaaggtgtggagcatgacgggcgggccctattgccggcccgtccactggcgccgcaacaccgccatcgccatggtcggcatctttctcgtctgcatacccatcgccatgaaatccgccgagctcgagcaacgcccgcaccacccagtccggccaatcccatcccagctttggtgcaagaactttggcaagaaggagtactgcaggatgtgccgactatcacagagaaagtcattcttttacctttgtgccttcttttgtcataaccggtcctcagcgatcgaagctggaagaagtacgcgaccatagcgttatgtaactctggtgacttcttattatcacatacaaggagtgcctgtttgtttgcgatnaaataaactcgcgatgcatgagcgcctctatggatct

SEQ ID NO: 5186 - DNA, 463 bp, Triticum aestivum
  Clone ID: uC-tsro9316061e05b1
atctgattcgggcactggttcttcttcgaggtgttcttttcagttggtgaatattgcagcctttccactgttgccaattgttcggcatccactagtggagtacacctgttgcatccgatgaacgctccagaggaattgttctgattttgtttgccgtccctgacctgagctttgcaacgatgcaggggatactaccgctgcacgcaccgcaaattccaagggatgcgcggcgacgaagcaggtgcagcgcgccgacgaggacccggcgctcttcgacgtgatctaccacggcgagcacacctgcgtccataagacggtggcgaccgcggcggcggccatggcgcagccggcggaggagaacccggatgcgcgtaggcatctgcagaacctgagcacgagcctgacggtgaacaccgagggactcacggcgacggcgggtcatcagggctgcggcaccaccacg

SEQ ID NO: 5187 - DNA, 522 bp, Triticum aestivum
  Clone ID: uC-tsro9316061e09b1
tcccggccccccgacccgaggaaagaggaagttagagcagagtccacacggcagaggccaaaggcgggaggaggggcgggatgccgatcctgtacgcggtggtggcgcggggcgcgacggtgctggcggagcacagcgcggcggcgaccaacgcgggcgccgtcgcgcgccaggtgctcgagcgcctccccggcggcggcgccgacagccacgtctcctacacccaggaccgctacgtcttccacgccaagcgcaccgacggcatcaccgccctctgcatggccgacgacgccgccggacgacgtatcccatttgctttccttgaggatatccatggaaagtttgtcaagacatatggccgtgctgcactgacagctcttgcttatgcaatgaatgacgaattctcaagggttctcagtcagcaaatggattactattcaaatgaccctagtgcagatcaaatcaaccgtatgagaggcgaaatcagtcaggtgaggagtgctatgatggatatattgataa

SEQ ID NO: 5188 - DNA, 292 bp, Triticum aestivum
  Clone ID: uC-tsro9316061e10b1
ttttcgcccacgcgtccgcccacgcgtccgcccacgcgtccgcccacgcgtccgcccacgcgtccgcccacgcgtccgcaaagccaaaggctacgtacgtggatgggaagaaggaacgtactatggcgaacctgtggctgtggagcattgttgcgccacatgttgtgttctaattaaccgcccttctttttgtggggatgtataccgtacctaccgattatgcatgcatgtaaattacctttgtccacgtacaaggggaggaaccatggaataaagaaagagcaacctgagt

SEQ ID NO: 5189 - DNA, 474 bp, Triticum aestivum
  unsure (1)..(474): unsure at all n locations
  Clone ID: uC-tsro9316061f01b1
ctctgggcaatgttaacccaattggagtcaggagctgctacgatgagggtaagcgtgtagctgagacactgatgttcgactaccacaggcagcatggcattgagatccgtattgccaggattttcaacacctacggacctaggatgaacattgatgatggccgtgttgttagtaacttcattgctcaggccattcgtggtgaagcactgactgtccagaagcctggaacacagactaggagcttctgctacgtcgctgatatggtcaatggtcttatgaagctgatgaatggagacaacaccggacccattaacattgggaacccaggtgaattcaccatgctggaacttgccgagaatgtgaagggagttgatcaacccagaagtgacagtgacgatgactgagaacactcctgatgaccctcgccagaggaagcctgacatcaccaangccaangaggttctcgactgggag

SEQ ID NO: 5190 - DNA, 256 bp, Triticum aestivum
  Clone ID: uC-tsro9316061f02b1
ctcggaaccatcgttctctgcattggtaccggcggtgtctaggcactattatgtagtggtagcaagagaggatggttcagaacatcaacggaaatgttggagacaaaggagtgtggggaggcggggacagcggctcaaagcccctccattataatggggtggggatttgtgtgtagttgcagctagatgattgcaaggaagttcaaataagagttctagttctgaaaaaaaagaatgagttggttcggactgataa

SEQ ID NO: 5191 - DNA, 134 bp, Triticum aestivum
  Clone ID: uC-tsro9316061f05b1
tgttggccacgcgtccggaaacaaaaaaaagagagagaacttttaaaaaaattaaacaaaaataccaaaaaatgaagccaacttgtgagcttgtgcctgcacaaggggcgatcttgtatccgttgcgcgctctt

SEQ ID NO: 5192 - DNA, 539 bp, Triticum aestivum
  Clone ID: uC-tsro9316061f07b1
tgctatcgccaagggtaaggggtatgaaggcgttgtcactcgctggggtgtgacccgccttccccgcaagacccacaggggtctccgaaaggttgcctgtatcggtgcctggcatcctgctagggtttcctacactgttgctcgtgctggtcagaatggttaccaccaccgcacagagatgaacaaaaagatttacaagatgggcaagtctggacaggagtctcacgaggcctgcactgagtttgacaggactgagaaggacatcaccccgatgggtggcttccctcactatgtgtggtgaagggtgactacctcatgatcaagggctgctgtgtgggccccaagagagagtggtgaccctccgccagtccctgttaaagcagacgtcgcggttggcccttgaggagatcaagctcaagttcatcgacacctcatcaaagtttgggcatggcccgttccagaccaccgacgagaagcagaagttctacggccagctcaaggcttaggccgcgacagatcttatcccatagtgttaccag

SEQ ID NO: 5193 - DNA, 490 bp, Triticum aestivum
  Clone ID: uC-tsro9316061f08b1
tcgcaaaggtgctgttttctatggccctcctggctgtggtaaaaccttgttggccaaggcaattgcaaatgagtgccaggcgaacttcatcagtatcaagggacctgagctgcttaccatgtggtttggtgagagtgaggctaatgtgcgtgagatctttgacaaggctagggggtcagcaccatgtgtcctcttctttgatgagcttgactccattgctacccagagaggaagcagtgttggggatgctggaggtgcagctgatagagtgctgaaccagctgctgactgagatggatggcatgaacgccaagaaaactgtcttcatcattggtgctaccaacaggccggacatcatagaccctgccttgcttaggccagggcgtcttgatcagcttatctacataccgtttgctgatgtcgagtcgaggcaccagatcttcaaagcctgcctcaagaagtctcctttggccaaagatattgatctgagt

SEQ ID NO: 5194 - DNA, 292 bp, Triticum aestivum
  Clone ID: uC-tsro9316061f09b1
ttttcggccacgcgtccgcccacgcgtccggccacgcgtacgcccacgcgtgcgcccacgcgtccgcccacgcgtccgcaaagccaaaggctacgtacgtggatgggaagaaggaacgtactatggcgaacctgtggctgtggagcattgttgcgccacatgttgtgttctaattaaccgcccttctttttgtggggatgtataccgtacctaccgattatgcatgcatgtaaattacctttgtccacgtacaaggggaggaaccatggaataaagaaagagcaacctgagt

SEQ ID NO: 5195 - DNA, 354 bp, Triticum aestivum
  Clone ID: uC-tsro9316061f12b1
tctcgggcctgagtgggctccatctgggggagcaaacattgatgctcaaagcatgtgtgactgagaacacatacagtctatcttaactggctgctgggagacctgcgctgtgagcattcaggaggagaatttctacgtgtctagggggctcgacggaggcctccataccagcttctgccaagacgaagttgcggacgacacgggccgggggtgcgaccaagcgggtgattggtagcacggggcccgtgctcgacggtaaggctttcttgatgagggtgatagtggaccactgcatcgtgcatggctacgcgatgggcgggaagaccacgatgacacccagcgtgtacccgatgg

SEQ ID NO: 5196 - DNA, 185 bp, Triticum aestivum
  Clone ID: uC-tsro9316061g02b1
gggcggaaaatccggggggagacacacgctcgggccggcagaggccagccgaccctctgcgggtctcccacactatctcagaccctcccctccccaccagccgactgacagagggagtcaaacaaaggagcatgtgcgagggaaaagaatgctccaaggagcgcaatggggggaccaagggggac

SEQ ID NO: 5197 - DNA, 488 bp, Triticum aestivum
  Clone ID: uC-tsro9316061g05b1
ctctcttcgagggagttgatttctattccaccatcaccagggccaggtttgaggagctcaacatggacctcttcaggaagtgcatggagccagtggagaagtgcctgagggatgccaagatggacaagagcaccatccatgatgtcgtgcttgttggtggttccaccagaatccccagagttcagcagctgttgcaggacttcttcaacgggaaggagctctgcaagagcatcaaccctgatgaagccgttgcctacggtgctgccgtccaggctgcaatcctcattggtgaggggaacgaagaaggtgcaggaccttctcctccttgatgtcaccccactgtctcttggtcttgagactgctggaggagtcatgactgtgctcatcacccggaacaccaccatccccaccaagaaggagcaggtcttctccacctactccgacaaccagcctggtgtgctcatccaggtatctgagggtgagaggac

SEQ ID NO: 5198 - DNA, 95 bp, Triticum aestivum
  Clone ID: uC-tsro9316061g06b1
tgtctcccacgcgtccgtacaaactaaaacagatagaaaaaaagaagaaaataacaaacttaagcatgaaaaaaccaatgcaacctacagggtct

SEQ ID NO: 5199 - DNA, 266 bp, Triticum aestivum
  Clone ID: uC-tsro9316061g07b1
gcgtacgtgtgatggtgtgagagtattcttgaataacgagcgtctgatctgatggagtcgagcaagggagcgtgtgcgtgtgatttgcttgctcgctctccgcctatgctctgcccatggtgtccttgtgtgtatgtgtgtgcgcatgtctccctgtgattgcttcatctatctgcactatggatggagtgatgaatatgtaagaatgaaagatttacctccaaagacaaataggatgagcaacaacatgaactggttaggccagt

SEQ ID NO: 5200 - DNA, 189 bp, Triticum aestivum
  Clone ID: uC-tsro9316061g08b1
gcgtacttttgatgatgtcagagtatacttgcatcacgagcgtatgatctgatggagtcacgcacgggtgcctgtgctagggatttgcatgctccatatccgcctatgctctgcccaaggtgtcctatgtgagactctgtgtgcgcatgactgcctgtgattgctaaatctatttacagtatagacggt

SEQ ID NO: 5201 - DNA, 440 bp, Triticum aestivum
  unsure (1)..(440): unsure at all n locations
  Clone ID: uC-tsro9316061g10b1
tgttcgcccgttcccgcgccgcggcctgccggcctccgtgctccggaccctccccgtcgccgtctacggcggcggcgcctcgcccaagacgcccggcggccaggggaggaggagcagccgcgacgcgctcgagtgcgcggtgtgcctctcggaggtggccgacggcgagaaggtgcggacgctgcccaagtgcgaccaccgcttccacgtcgactgcatcgacatgtggttccactcccacgacacctgcccgctctgccgcgcccccgtcggcgccgacgcggacgagcccgccgccgaggggctcctccgcgtgccgcgcgaggaccacgccacgncggagttccccatgttccccaacaacgtnctcttctggggcacccacgacgacgtcaccaacggcgggctcggagggatgccgccggcgccggccccggcac

SEQ ID NO: 5202 - DNA, 364 bp, Triticum aestivum
  Clone ID: uC-tsro9316061g12b1
tgcttgtcggctcttagtgggctcgatcagggcaatcaaacaatgatcatcaaggcatgtgtgagtgagaaacaattatccatttgaattggctgaattgaacctgagctgcgtgcattcggaaggagaatttatacgtgtctagggggctcgacggaggcctacataccagcttctgccaagacgagttgaaggacgtcacgggccgggggtgtgactaagcggatgaaaggtagcacgcggccagtgctagacggtaaggcttttttgatgagggtgaatttgaaccactgcatcgtgcatggacaacgcgatgggcgggaagaccacgatgacacccaagttattcccgttggaggcctat

SEQ ID NO: 5203 - DNA, 184 bp, Triticum aestivum
  Clone ID: uC-tsro9316061h06b1
tgctcggtcctgctctgatccaaacttttactggtagatcaaagtgttcatgtgaacgtggcgaatatctgtgccattgtgacatacaccttatctgaaaaggaaaaattgccctttttcttcaacaaaaagacaaaaaacaaaaaaaaaattacccaacataaacatcttgaaacacaaaact

SEQ ID NO: 5204 - DNA, 348 bp, Triticum aestivum
  Clone ID: uC-tsro9316061h07b1
tccgggccaccgctgaaaccaacctctggtgcttgcttatgaagagtacagatcctttgcggatatccagcccactcagacatagggcgacactcatgaggatctatcgcgcttagggttcctccatggtgcctatctgagtcatcggttgatacagtagatattgttttggtaccaggacaggtgtggcaaacgaaagctccaacctaatctgcgcttgttacaagatcgctagattatatatcttgcagcacagtcgaataggctgagcggcaacacgaactggttaggcccctgaaaccctttgtttaagtgatatattgaaagtatgtggacattctgcatgac

SEQ ID NO: 5205 - DNA, 344 bp, Triticum aestivum
  Clone ID: uC-tsro9316061h08b1
agctactgcgtcaaccaacctctggtgcatgaatttgaagagtacagacgatgtgcagtatttcagctgacgcagagggagggagacactcatgaatctctatcccggagaggtatgctccaaggtgcctatctgcgtccttggtggatgcagttgatattcttttggtgccaggacaactgtgtcaagcgaaatctatatccgagtctgagttcattgcaggatcgctatcttatatatcttatagcaccgtcggataggactagcagcaccgagactggttaggccgctagaaccatctgtataggtgatatattgaaagtatggaggcattctgcatgcac

SEQ ID NO: 5206 - DNA, 379 bp, Triticum aestivum
  Clone ID: uC-tsro9316061h09b1
tgttcgcgccgcagcagaaaagcatcggctgtggtctcgtcgagggatcaacaaccatgggcggtggcaacgcgcagaagtccaagatggcgcgggcgaggaacctcgtgaagctgaagggcggccaggggagccagctcgaggcctacaagaaggccatgaacattcagtgcaagatatgcatgctgactttcatctgcaccacctctgaagcatagtgcaaggagcactccaaggctaagcatcctaagagcgacctcgtacagtgctttccccacctcaagccgtgatatctgccagatcggactgtgagagagataaaagagagagagagaagctgccgtaatccacctagtattatcatgttccgcaatgactg

SEQ ID NO: 5207 - DNA, 388 bp, Triticum aestivum
  unsure (1)..(388): unsure at all n locations
  Clone ID: uC-tsro9316061h10b1
tttcgcccgttcccgcgccgcggcctgccgggctccgtgctccggaccctccccgttgccgtctacggcggcggcgcctcgcccaagacgcccggcggccagcggaggaggagcagccgcgacgcgctcgagtgcgctgtgggcctctaggaggtggccgacggcgagaaggtgcggacgcttgccaagtgcgaccaccgcttccacggaagctgcatcgacgtgtggctccactgccacgacacctgaccgctctgtcgcgcccccctcggcgccgacccggacgagcccgccgcccaggggctccgccgagagccgcgcgaggaccacgccacgcccgagttacccatgtagcccatcaacgtnctgttctgggtgacccacgacg

SEQ ID NO: 5208 - DNA, 484 bp, Triticum aestivum
  unsure (1)..(484): unsure at all n locations
  Clone ID: uC-tsro9316061h11b1
tgttcggggagcatcaagatcggcaaatgatggtgagtttgctattattggtgggacaggtgacttcgcaatggcacgtggtatcctaacgaaacgactagttgtggacgtagctggtagtaaaatattcgagcttactgtggatggattttgccacatgaacattccggtccctgcacctacgaagatgggaccgtggggtgcaaaggatgccccccttcgtgaaatggaaagaaaatcccaacgtctagaggagtgtcacaatatactttacagcgtaataagtgcgattcagttttactacattgntgaagacgggcgaatctgcaactcatggtcttggggtactactggatgtactaattcacnctgtactattgaaacattaagttatgcccaatgagtttgtagagcagataactggcacagttggtgacccagactatttgtctcaccttaagattgtcacacacattaaaacgta

SEQ ID NO: 5209 - DNA, 490 bp, Triticum aestivum
  Clone ID: uC-tsro9316061h12b1
ttctcgagcctctcaagaagtgacacgggagaggagcagggcggcgcaagccatggccatggcggagcagcggatcgagcacagccacctcgacatcagaggcctgaacctccacgtagcgcaagcaggcacaggccagctcgggacggtgctgatcctgcacggcttcccggagatatggtactcgtggcgccaccagatgctggccgtggccgccgccgggtaccgtgccatcgcgccggactggcggaggtatggactatacgaccagccaccggagccagaggcggtggcgtacagcgacctgacagaggatctcctagccctactggatgcgctctccgtcctcaaggcttacctagtggcaaaggattttggagccatgctagcttatgattctgctctttgtcaccccagccgcacatgcggtgttatgtgcctaggcatcccttctctccacagtggctcctccttcactgccatgcccgag

SEQ ID NO: 5210 - DNA, 361 bp, Triticum aestivum
  Clone ID: uC-tsro9316072a02b1
cttacgcgtccgctcttcctccggtacgactccttcgacgtccaggtcggctcctcgccgctggggtcgtcggtcaccatcacctcgctcaagaaggccaccttctgaggcatcgccacgtgtacttagtttttcctctgcttttctcgatcgatgccagtactacactatgcatgtgatacacttgcatggagtgatgaggatttgtgtaacaaaattttcttttcctagtaaagatgagaccggtttttcccagggaccctcggtgtattgggatgtttttgccaatttgtcagtgagatgaaaggggacatgtacttctactaccttactgatcaagctggttatccaccgtgggttg

SEQ ID NO: 5211 - DNA, 506 bp, Triticum aestivum
  unsure (1)..(506): unsure at all n locations
  Clone ID: uC-tsro9316072a04b1
atctggttgggttgccttgggagttttagtaggcagatgtactgaagtctgacgagggtggcccaaagtaaagcgaagccaccaagtgacagtcatatatcatcaccaacaggattgttgattacaatattacatggaggtctctggaaggagcagttctgtttcaccatcaggctacaaatgcagcatgctttctgattgacagatcaagtagtggcaacctaagtatcgttggtgggaactgtcgagagtcaggagcttctctccgttaactatcagctgacggcttgaagatttgaaggatatcagactctggtattaacttgcttgagttgcaggcacacatctttcttcattctgctgcttgtcatcagcgctgtactaccatcacagatacctaccacctgaagagttggacttgtagtgttgagatgacaggcaccaaactagcaatacttttataatngaatatatagataaaatctgattccctggcaggcattgtt

SEQ ID NO: 5212 - DNA, 543 bp, Triticum aestivum
  Clone ID: uC-tsro9316072a05b1
gtgaatcacagattcaagtatagtggtcttctctttgggagccaacaatcctagcaatggctgacgctagacttgccctagcctccctctttgtctccattctgatgctttccatggcccatcccttctttgcatgtcccactcgttgtgaaagtgagataaaaatgcagatgtatttgcaccaggtggtgtccggaccaacccataaccaagaagttgtgtttaagtctactcccactatagagtttggtaggacggttgcttttgattatactctacttgatgcacctacaccggacgccaaaattattggtcgtgccaaaggaacccatgtccaggctgaccaggtcaatgctggagatttctcccatttcagtatgatattccagcagggacggtttactggttcaacatttcaagttatggggatgactccttcaaatggaggttgggcaattgttggcgggaccaatgaactagcgatggcacaaggtatcattcagtttgcaatagtcaaagggacttccaacgtggagagcttta

SEQ ID NO: 5213 - DNA, 266 bp, Triticum aestivum
  Clone ID: uC-tsro9316072a07b1
tcgtctatgcgtccgctcttcctccggtacgactccttcgacgttcaggtcggttcctcgccgctggggtcgtccgtcaccattaccttgctcaagatggccaccttctgaggcatcgccacgtgtacttaagttttcctctgctttttctcgatcgatgcccgtactacactatgcactgtgatacacttgcatggagtgatgaggatttttcgttcaaattttcccttttctagacaagatgagaccggtttctctccatggtc

SEQ ID NO: 5214 - DNA, 351 bp, Triticum aestivum
  Clone ID: uC-tsro9316072a08b1
tttgatggtatcttcagatgcgttggaactaacggacctcctccattgcgagataactatatggtcaaaacctttggatgcttcaagtggacaagggtcatgtgacatcaaaatcaatgatgatttctgcgcagctactatagtacctctttcgctacagaacggtgtcctcaggacaaactgcatagactgcttagaccgcacaaatgtggcacagcttgcatacggattagctgctttagggcgtcaacttcatgtgttgaagctcactgaagaacctagaattgatctgcatgagcctttggccgatcatctgatggatttttatgaaaggatgggtgattcattaac

SEQ ID NO: 5215 - DNA, 341 bp, Triticum aestivum
  Clone ID: uC-tsro9316072a09b1
tgcttggtagctccagatgtgatggaactaacggtcctcctacattgggagacaactatatcatcaaaacctttggatgctccaagtggacaagggtcatgtgacatcaaaatcaatgatgatttctgcgcagttacgatggtacctcttttgctacagaagggtgtgctcaggacaaactgcatagactgcttaaaccgcacaaatgtcgcacagtttgcatacggattagctgctttagggcgtcaactgcatgtgttgaagctcactgaagaacctaaaattggtctggatgatcctttggccgatgatctgatggaattctatgaaaggatgggtga

SEQ ID NO: 5216 - DNA, 407 bp, Triticum aestivum
  Clone ID: uC-tsro9316072a10b1
ggtacggctccggccggacttgctgggccgacccatgcgttttgtttgggtctgcatgtgagattgcggggccgatgttcttgttggctgacgaggttgctcaaaatttaaattacgacgctatgggacagacatatatcatgaccaactggatagccgatgacaactttatatggatgtatatggatggagcacctgtgtgttaccataatgatgcagaatgcacgaagtgatctgattgacggaacacgtggttgtgatcctaagaaaccctgttgggaactggtgggagtcaagagcatttttgcggtaactatgaaaacactgtttgtacagtgggaggctataagactctgggatagacttgagtgagtaggaggcacacatgttgaattgtactgatgctg

SEQ ID NO: 5217 - DNA, 367 bp, Triticum aestivum
  Clone ID: uC-tsro9316072b02b1
gttagctcatggcatcttccaagagtagtcttgcaatgtttgcactggccatagtcatggccgtggtggctgacgtctcggcgcagaacaccccgcaggacttcgtcaacctgcacaaccgcgcccgcgccgtggacggcgtcggccccgtggcatgggacaacaacgtggccaggtttgcgcaggactgggcggcgcagcgcgccggcgattgccggctgcagcactccggcgggccgttcggcgagaacatcttctggggttccgggcagtcgtggacggccgccgacgcggtgaagctgtgggtggacgagaagcaaactaccatcttgacagcaacacctgcgacgccggcaaggtgtgcggg

SEQ ID NO: 5218 - DNA, 247 bp, Triticum aestivum
  Clone ID: uC-tsro9316072b04b1
acggttattttctccaaaacaagaccgagctactcactgacgctctttcgtcggacgcgacggctgtccccataaaggcggatgataacggtgcgaacacatacaactagcatgctttcttgtgagtgaagagccgacagttaattctcggtttcaagaccaacaccaagacgctgggcagccccctggcgatgccaatcatactcgggatacaagtggattcgcctctggaagtctgcgatcgagt

SEQ ID NO: 5219 - DNA, 186 bp, Triticum aestivum
  Clone ID: uC-tsro9316072b07b1
ttgttacgcgtgctgccaagcagaacgcctacctgtgcttctgccaatgctggtcatgcaagtacttactttgcttctggtctacaggaagttgccagaatcatgctaacattaaatgcacttgatgtacctgctaagaatctaaatcttaggatcttagaggagcctactgtgtggtaattttgt

SEQ ID NO: 5220 - DNA, 248 bp, Triticum aestivum
  Clone ID: uC-tsro9316072b08b1
tccggcctttgcgggtggaccgacgcactgggttagcaatggcatttcgcagcatgagtctagcattgtttgcactgcacctagtgatctgctggctgaccctcatgagttcgcataacaccaagtgggacttttatggccttcacaggccttcgtgtttctgggacggagtccatcacgaaagatgaaccagacagcccggctttgtttgctgaggactgaactgaacagtgcggccgcgattgccg

SEQ ID NO: 5221 - DNA, 298 bp, Triticum aestivum
  Clone ID: uC-tsro9316072b10b1
tttgtcttgggctgagctagctgccatgccggctgctcctggactgctcgtgtgtgatcaggtcatgcttgccaaaatttgttcatgctgctccgatccatctaaaattgggatcttgagcttgtaaatagcacgatacagggaggaattcatgcatgtgtaatctgcttgtttcgttttactctcggctatgctttaaaaatcatgggttccatgatcattctctaaaaaaaaaaaaaatataatactcataattaatctatttctttcatcatcttatatcatacaaattattagg

SEQ ID NO: 5222 - DNA, 289 bp, Triticum aestivum
  Clone ID: uC-tsro9316072b12b1
tttggttggccagggcttggggaggtttagctggggtgataaacagaggtttgacatgggatgtccagagtgaagataaactgctgtgtgacagtcctagatgagtactagcacgatagacgattacatggttctagggtgggattgattacgtgctctgatgcatcaccattaaggtacaaatgatgactgatttctgattgacagatcaagtagtggcaacctaagtatcgttggtgggaactgtcaaggggcgggagcttttgtgggttcactattacctgcccgt

SEQ ID NO: 5223 - DNA, 404 bp, Triticum aestivum
  Clone ID: uC-tsro9316072c08b1
cctacgcgtccgcccacgcgtccgcccacgcgtccgcccacgcgtccggccaagttgttgaactcagtggagaaaacatcaacatcacatacaaacatgatggcactcacatagctgttggaaataaggaggatgagctaaccatagtggatgttcggaagctaaaacccgtccacaaacagaagttcccttacgagattaatgagattgcatggaataaaactggagatttattcttcataactactgggcttggatttgttgaggtggtcaactatccttcccttgatgttgtctgcaaattaaatgcccatacagcagggtgctattgcatagcaatggatccccttgataggtattttgctgttggaagtgcagattcacttggcagtctttggaaatgt

SEQ ID NO: 5224 - DNA, 440 bp, Triticum aestivum
  Clone ID: uC-tsro9316072c09b1
ttgtctacgcgtccgcccacgcgtccgcccacgcgttcgttcacgcgtccggccaagttgttgaactcagtggagaaaacatcaacatcacatacaaacatgatggcactcacatagctgttggaaataaggaggatgagctaaccatagtggatgttcggaagctaaaacccgtccacaaacagaagttcccttacgagattaatgagattgcatggaataaaactggagatttattcttcataactactgggcttggatttgttgaggtggtcaactatcctttccttgatgttgtctggaaattaaatgcccatacagcagggtgcctattggatagcaatggatcctcttggtaggtattttgctgttcgaagtggcaattcacttgtcaagctttggaatgtcaaaaagctgctttgcattaaaacctttcaaaa

SEQ ID NO: 5225 - DNA, 397 bp, Triticum aestivum
  Clone ID: uC-tsro9316072c10b1
atcacattggatgttggtacaaataatgaggagcttctgaatgatgaattttacattggcttgaggcaaagaagggtcactggccaggagtatgctgattttctgcatgaatttatggctgctgtgaagcaaaactatggggagaaagttctcattcagttcgaggattttgcaaaccacaatgcctttgatctccttgcaagatacggaacaacccaccttgtattcaatgatgacattcagggaacagcttcggtggtccttgctgggcttgttgcagcactgaaattagttggtggtacattagcagagcacacctacctgttcttgggagctggagaggctgggacagggattgcagaacttatagcttttgagatggcaagacagacaaaaa

SEQ ID NO: 5226 - DNA, 416 bp, Triticum aestivum
  Clone ID: uC-tsro9316072c11b1
tcgtttcaacgtccatcctggcgaggatcccctctcctcccaccagcatgcggcccgtcgccacgggcttccccgtgcatccctcgcggcagtcctcctctcttctcgcctttactgcgagcagtgcagtgcagtcctcggcgtcggaagaacggcggcctactccggcggcatgggatgcaatacttgggcacgcgatgtgcggtccgcagttgcggttcgtcggacgtttgtgtgtggctcgcactaaccagcaaggtgatgaagactaccctgggtcaacgctattctgcctcctctgttgcgtgcagtttgctgcctgctgcaccgtcggagattgcctcgcagtccatatttcaagcctgtgcagcttacagactacctatgtgcggtggtacaaaagccagcgagaaaag

SEQ ID NO: 5227 - DNA, 349 bp, Triticum aestivum
  unsure (1)..(349): unsure at all n locations
  Clone ID: uC-tsro9316072d02b1
cttcaagacccttcccgcttccccgaggcggcggcgcgagcgagcgagcgagcaaccggcggcgatgggtaaggcggctaagagctcgcggaaagggaagaaggcgtggcggtccaacatcagcaccgacgacatcgacgagttctacgagaagcagacgcgcgacgcccacgccggcgccgccgccattccctccctcccgtccggctccctcttcttcgtcgacaagcccgccttcgcgtccaccttcttcgncgncaacgcatncgacccggcccccaaagatgttcctgtcaaaaggaagattgagaaaaacagggagaaggttcttcaccatgagagtgtgttg

SEQ ID NO: 5228 - DNA, 342 bp, Triticum aestivum
  Clone ID: uC-tsro9316072d05b1
ctttagtaacctcgccgagctaaggtccgcggcggcagcggcggccatggatgattactacgagttcgaccacttcgatgacggaagacagtacggtggcctagagcatgccatgaagcacaagaagaggaggtccgtcctacgcaagttcggagacttgtttaggaggagaagcctgctgcacaagtcagacgactttgctccggttctagctagtaggtagtactccctctctgtaccataatatttgtggggagtactaaatatttgtgtgattcttgcattgtgtgtttgctggataagaatactatgaaatacacgcagaaataaattgagccctgc

SEQ ID NO: 5229 - DNA, 245 bp, Triticum aestivum
  Clone ID: uC-tsro9316072d06b1
ctcacgcgtccgcccacgcttccgtacatctcacttatcgttctaaaaaagatcctagccgatggggacgacggacaccatcacctcgctcaagaaggccaccttctgaggcatcgccacgtgtactaagatgggcctctgcttttatagatcgaagcctgaactacactatgcatgagatacacttgcatggagtgatgaggattaagagtaacaaaattggccttttctagacaagatgagac

SEQ ID NO: 5230 - DNA, 237 bp, Triticum aestivum
  Clone ID: uC-tsro9316072d08b1
ttatttaaaaaaaaaaaaaacaaaaaaaaaccatgatatattaaaaaacaaataaagctgaacaatgaaaaagaaaagaaaaaagaacataaaaatgaagggggggccgttttaaaggacccaagttcacctacccctgcttgcaacacaaaagctttactatagtgccccctaaatctaattaactggacccctttttacaactttgggactggaaaaaccctgggaagacccaat

SEQ ID NO: 5231 - DNA, 93 bp, Triticum aestivum
  Clone ID: uC-tsro9316072d09b1
ttgtttaaaaaaaaaaaaaaaaaaaaaaaaaaaaaaaaaaaaaaaaaaaaaaaaaaaaaaaaaaaaaaaaaaaaaaaaaaaaaaaaacaaaaa

SEQ ID NO: 5232 - DNA, 126 bp, Triticum aestivum
  Clone ID: uC-tsro9316072d10b1
cccctgcgggttccgcgcctgtgttcgcggcccgacccacgcgttttgttccaggcatgcggatcgcgggtggacgatggtttaggtcaggatcgtgacccatggtgcatcaccctgatgagttca

SEQ ID NO: 5233 - DNA, 392 bp, Triticum aestivum
  Clone ID: uC-tsro9316072d11b1
ttgcctcacgcgtccgcccacgcgtccggtcaaaattagactcaaaggacatcaaaagaggataaccggattggccttctccaacagcttgcatatacttgtttcttctggcgctgatgcacagttatgtgtgtgggccaccgattcttgggaaaagaagaaatcggtcgctatacaaatgccagctgggaagactccatcaggagacacaagggttcagtttaattctgaccaaaatcgcttgttagtagtccatgagactcagatagctatttatgatgcgttcaagatggagagaatctaccagtggataccctagggcactttgtcagctgccatatcacacgcatcgtacttcgtgcaatagccaactagtttttgcttgcttttac

SEQ ID NO: 5234 - DNA, 341 bp, Triticum aestivum
  Clone ID: uC-tsro9316072d12b1
gttgatcgctcttgggaaattgcccgaacggtctgtgtcaatgaatggatggggccttgctttccgagcctgtggtgaccggctgattgtcattggaggcccaaggacttctattggtggcatcattgagcttaattcatgggttcccgatgggcaaccgcctgtgtggaatttggttgccacacggcaatccgggaacttcgtgtataactgcgccgtgatgggttgctgagtccactgaataaagattggatgcagtggatatttatgaaggatgatagtatgcacaaaggcagcccgttcaattgcttcagccctgattcttcgaagcgatttatgcc

SEQ ID NO: 5235 - DNA, 145 bp, Triticum aestivum
  Clone ID: uC-tsro9316072e01b1
agacggttttttgtcatggaccacccagcgcgtgagcatgatatgatttattctagctgcggtgacgaaaatgcatgaatccgaggctggtggaggaaactctgctttgaggagttcacggacatggatgaaggcttttttgatg

SEQ ID NO: 5236 - DNA, 228 bp, Triticum aestivum
  Clone ID: uC-tsro9316072e02b1
tcgttggatgaaaattaataaaacctcaacaccagaaaacgcaacagacacgggaatgtacagtgcctagcctacaccaagcccgttacagagcccagctgtaagcctgcgacgacctcacgctaagcaaaagtcacgatggccggggggatgcaggggccgccgtcgagggcaagcacgacccgttgcgcaaccggtttgggatgggccggaagcttcaacttctta

SEQ ID NO: 5237 - DNA, 318 bp, Triticum aestivum
  Clone ID: uC-tsro9316072e05b1
gttgtacttgactggggagaagacacggtctcctggggaagaggtggacaaggtgtttgtcgccatgaaccagggcaagcacatcgacgcgctgctggagtgcctaaaagagtggaacggtgagcccttgcctctctgctgaacagaggatcaagaaactgaagagaagactgtgtgcagaaggctttggatcttttaaatgataaatgataatatttttccaattgtattttcttaaatattgatgttttgtgggatggaacatcctttcggagctgccatgttgtttccaaaaattgcaactgcataacttgtagt

SEQ ID NO: 5238 - DNA, 393 bp, Triticum aestivum
  Clone ID: uC-tsro9316072e06b1
ctttctcgtccgctcttcctccggtgcgactccttcgacgtgcaggtcggcttcttgtcgttggggtcgttggtcaccatcacctcgctcaagaaggccaccttctgaggcatcgccacgtgtacttagtttttcctctgcttttctcgatcgatgccagtactacactatgcatgtgatacacttgcatggagtgatgaggatttgtgtaacaaaattttcttttcctagtaaagatgagaccggtttttcccagggaccctcggtgtattgggatgtttttgccaattagtcagtgagatgaaaggggacatgttctcctactaccttactgatcaagctggttatccaccgtgggttggtggcactttctacaaggaccgatcaagatct

SEQ ID NO: 5239 - DNA, 133 bp, Triticum aestivum
  Clone ID: uC-tsro9316072e08b1
tgcgttgatgcatgcaacgttctaccggagctagaggccattgccaaagattgcactctctaatacttgtcaatgtaagcgaaagggcacaaattttcatgtcaaaaaaaaaaaaaaaaaaaagatttaatag

SEQ ID NO: 5240 - DNA, 140 bp, Triticum aestivum
  Clone ID: uC-tsro9316072e10b1
agggcccgggcctgaacgcctgggtcggcccacccatacacttacttaccaccggacacccggccgactgagctgcagccatagatgacagtacgagcactccgtttgatagcacgctggggatgacccatgagagagat

SEQ ID NO: 5241 - DNA, 223 bp, Triticum aestivum
  Clone ID: uC-tsro9316072f01b1
gttattgttacgcagcagccaaaaagctagctaaacatagcccttcggcatgggttccaacaagaagcgcagcaggagtgctgcggctccctggtgtgtagtcctaggcatactcctgcttgtcgtcggggcggtggccaaggaccttggcaacatcttccaggactgcgaatttgattgccaagattttgatccatcctccgactcctacttcatgtgcatg

SEQ ID NO: 5242 - DNA, 200 bp, Triticum aestivum
  Clone ID: uC-tsro9316072f02b1
gttgccgcaatcatcgccctccttgccgtcgccaccgccgcgcagggccccatgccggcgcccaggatggccccactaccggcgcctccggcgaggtccccggccactgcccctgcgcctgtcgccacctcgcccaccgccgcgtcgccgtccccgatggcctctcccccggccccgcccaccgacgcgccgactgacgc

SEQ ID NO: 5243 - DNA, 253 bp, Triticum aestivum
  Clone ID: uC-tsro9316072f03b1
gttgactatgtcggcagggagcgagcgctcgaacgccgtctacgcgaccccggcggccgtcctggcggacttctcgcgcggatccggcccgtccgtctccggcggcgccgcgggtaccggcaccggcagcgggaggagccaggcggagggcggggcgaggaagaagccccctctccgcctcgcggcggacgacaccaagcccgtgctccgcgacccgatctcgcggtccgaccccatggagactgagcaggcc

SEQ ID NO: 5244 - DNA, 300 bp, Triticum aestivum
  Clone ID: uC-tsro9316072f06b1
cttcagttccccgatgagagtcgagagagttacaccgctctcggaccgatcccttatcttctccgacggcctcgccgggcggagcggacacgggagaggtgcatggcgtagccctatgtatatagaatctaggcataggttgaggacgagtagtgcccatgtggcgtatggctggatgccgatgaggagagcgccggcgccatgtactagcagcggttggtgagctacggtggctgcgactcaggcaaggctggctagtggccaagacctgccgaggggcgtgcctgtggctcattcacc

SEQ ID NO: 5245 - DNA, 234 bp, Triticum aestivum
  Clone ID: uC-tsro9316072f08b1
tgcttgactgaggtgaagaaggggaagaaagctgtggactacattggcggcggtggaactatgaaggcatgtggtggatcttccagggatgattactagggtggaggatctgggaggtctccgcattaacttcaaaagacgagggcgttgaggtatttgctgtgcacactcattttctgcaattgttcatggactcagagcattttcaaatattatcctgaaggatttctttgg

SEQ ID NO: 5246 - DNA, 359 bp, Triticum aestivum
  Clone ID: uC-tsro9316072f09b1
ttgtttgactgaggtgaagaaggggaagaaagctgtggacaagattggtggcggtggaactatgaaggcaagtggtggatcttcgagggatgattacgagggtggaggatctgggaggtctcgcattaacttcgaaagaggagggcgttgaggtatttgctgtgcacatttatcttctgcaattttcatgtcctcagtgcattttcaaatatcatcctgaaggatttctttggagaatatgatccttcttacacaaggaagcaaatatcatcctgaagtattactttggagaatatgaacttttttacaaaaggaagaacctgatggtttagttgctgggataaggctgcttggtctat

SEQ ID NO: 5247 - DNA, 218 bp, Triticum aestivum
  Clone ID: uC-tsro9316072f10b1
tgattttagtctctctgtgactcgctattagcaactgttgtggtcaagtgcaaacctatttcaagcattcagtactgttgttgcggccatcactcagaggatgtcataaagtacctcttattgaaagaaccatgtgatgtttgatggcttgctaaaaaaactttttgtatcatgagaacctgagttttgtataactaggatctttgtcttctgttatt

SEQ ID NO: 5248 - DNA, 353 bp, Triticum aestivum
  Clone ID: uC-tsro9316072f12b1
ttctgtttcaacgaataaggttcacttcatcctgaagcacaagaaccccaagactggcaaatatgttgaacatcacctcaagtccccaccctctgtcccatatgacaagctctctcatgtctacacggctatcttgaagccggataacgaggtcagaattttggttgatggggaggagaagagcaaagcaaacttcctttccgctgatgattttgagccagcacttattccatcaaagactattcctgaccctgacgacaagaagccagaggactgggacgagagagctaaaatccctgacccacctgcagtgaagcctgatgactgggatgaggatgccccaacagaaattt

SEQ ID NO: 5249 - DNA, 277 bp, Triticum aestivum
  Clone ID: uC-tsro9316072g01b1
ctgtatcatactgttggatgataacatggggccgataatcgccaatttcggtctctccagactctttggtcaagaacaaacacggatgaacacacagaatgttgttgggtcatatggatacatagctccggaatatctatacagaggtgaaatcttcacgaagtcagacatatacagtttaggcctactaatcatggagactaccacgggagagaagaattgtccaggcaaagaaccgttttgaggtgaattcaataaaaatgttcctgaaaactgg

SEQ ID NO: 5250 - DNA, 351 bp, Triticum aestivum
  Clone ID: uC-tsro9316072g02b1
cctacttgtccggggggacgaccgatccatgggggccgttgattaaatgaggccagcagatcgcggtgcgccccccgtctccgtcttcgtcgccgcccccgtctccgttgcggtcttcgtctccttcttcgtcgccgccgccgacgtcgtcgtcttccccgaggttgcattcagcttccaattattgccgtgatccccaggaagagagagtacttggggcactctcctatgcttctccgagactcgctcatttttttccttgcaagggaaccagaccgtcgcatggcgggaaacttggggaatttgcctcatgcaacttgaataatgaagtcctttggcttttaaggttcc

SEQ ID NO: 5251 - DNA, 320 bp, Triticum aestivum
  Clone ID: uC-tsro9316072g06b1
aatacttgtacgaacaggtggttctacaccaagtttcgtttgtaggcatgcatgccgtccgtgctgggcgttcctgtggcgctactacctgaacacgattacattgttagctgcttgctcttggaatccgcccctggtttggtaattgcccatgaagactctgtgtgtagcgtggatcttatgagatatgatggtgtctcatgtgatgaaccatgcgaagaataaatgttagtgggaataatggtacacgttattacttggggagatatgctgactgatgtagacaaatattattgccttgaaatgattctggtataatc

SEQ ID NO: 5252 - DNA, 212 bp, Triticum aestivum
  Clone ID: uC-tsro9316072g08b1
tttctttgatcggcatgctctccaaggcctgacgctacgcttgcacacacttgcatatgtatgacgcagtgcgtgctaataaatcgttctggttttcggttgtttcagctacctgtagtagccacgcaatggcgtttgtaagtaaacctcagtatgaaggttgccatggaataaagcatgtatacatgctgcggaaggtaagcttttgcaac

SEQ ID NO: 5253 - DNA, 244 bp, Triticum aestivum
  Clone ID: uC-tsro9316072g09b1
tttgttgatcggcatgctctccaaggcctgacgctacgcttgcacacacttgcatatgtatgacgcagtgcgtgctaataaatcgttctggttttcggttgtttcagctacctgtagtagccacgcaatggcgtttgtaagtaaacctcagtatgaaggttgccatggaataaagcatgtatacatgctgcggaaggtaagcttttgcaacctataaaaaaaaaaataattaataattctccta

SEQ ID NO: 5254 - DNA, 178 bp, Triticum aestivum
  Clone ID: uC-tsro9316072g10b1
cggcaccggcccggccttacttcctggacccacccacccgttttcttcgccaggccacactccgggacccggggatccactccgggtatccattagctgacccacgactttcagttgcaccgaaccatgctatgacgccgacgaagagagcatgacccactctaaccagggaggcgag

SEQ ID NO: 5255 - DNA, 260 bp, Triticum aestivum
  Clone ID: uC-tsro9316072g11b1
tggtcacgcgtccggtcggagaacacccaccacaatggctacgcccgaggcttactccctcggcgaaaccctagcgaccggagcgctcggtggcggcagacatggccgacgacgactacaatgaagtcgacatggggtactaggatgagcctacagaggctgatattgaggaaggggctgaagaagaccctgagaacaacgaggatgcccctgatgacgtgggagggggtgaaggtcaagaaaaggaacagcgaaagact

SEQ ID NO: 5256 - DNA, 185 bp, Triticum aestivum
  Clone ID: uC-tsro9316072g12b1
tgctttacgcgtccgaccacgcgtacgtccactgcgtattatttttcaagctgcacgttttaccttctggcatgactacgtaccctatgtgggcttttagaaatgctgtatcttcctattacaaatggagaaaaacaagaaattctgcgtctattatagaaactttctgtagtatgagaactggg

SEQ ID NO: 5257 - DNA, 228 bp, Triticum aestivum
  Clone ID: uC-tsro9316072h01b1
catagattgcccagagcagagcgagagcggccatggtgttgtcgagcttcaaggtgacgcggatctcggagggcgcggtgaagccggtgttggagacccccgaccatacgctgccgttggcgtgggtggaccggtacccgacccaccgtggcctggtggagtcgatgcacattttccggtccggcgccgactcggtccctgtcgtgattcgtcaggcgctgggcaagg

SEQ ID NO: 5258 - DNA, 259 bp, Triticum aestivum
  Clone ID: uC-tsro9316072h02b1
aatagatctgccctctctctctctctcgtccgcggcgatacgatccgagatggcgatgagggcgtggaggaggagcgcggcggcgagggccccggcgcacctgtgcctgtggctggcgctcgtggccgacaccctggtgctcgcccagggtaagaagtcgaacctgtcggaggtgacgcacaaggtctacttggacattgagatcgacggcaagcccggaggaagggttgtcatgggacttttcggcaaggctgttcct

SEQ ID NO: 5259 - DNA, 269 bp, Triticum aestivum
  Clone ID: uC-tsro9316072h04b1
gtcactacaagcacagagggagaagaagaagggatggcgcctatgaaggtgtacggctgggcggtgtcgccatggatggcgcgggtcctcgtctgcctggaggaggccggcgccgagtacgagctcgtgcccatgagccgcaacggcggcgaccaccgccgcccggagcacctcgccagaaaccccttcggcgagatcccggtgctggaggacggcgatctgacgctctaccaatcccgtgccatcgcaaggcatattctgcgcaaatg

SEQ ID NO: 5260 - DNA, 307 bp, Triticum aestivum
  Clone ID: uC-tsro9316072h06b1
cctactcgtccgcgcaccttggcagactacaacatttattaaggagtcaacccttcacttggtgctccgtctccgaggtggccagtaagctcgtgaccatggagctgcttctgttatctgggttcacatgtctcggtgtcttcggttcctccaatggagtctggtctgtgtctgtcgttgcctgaactgtctttgtttctatatatatataccatactgtgatgcagtgttattgtttgtaagtgcaaacttctgctggtgtgcagcaacttttgatgaactttaaagaataaagtgagccctgaat

SEQ ID NO: 5261 - DNA, 250 bp, Triticum aestivum
  Clone ID: uC-tsro9316072h07b1
tgcacggaccgggcactgactttctggatcgacccacgcgtatagttatgacctatatatataatatagaacgtgtgtgattctatccaagatggcgatgaagggccttgaggaagaacacagataaaaagacccaaagaacacacttagggggcggctgttttaaagaatcaaaattctggtgctcgtccagggaaagaaatagttcttttttagggtaacctaaattgattaaattggccgtgtttat

SEQ ID NO: 5262 - DNA, 203 bp, Triticum aestivum
  Clone ID: uC-tsro9316072h08b1
atagttatggctgccatgtctatcaacgaccatgttttgctacacatcctgattacgatggctgttccggacgatcttatagacgctggcccatatacaccggggcctgacgtgggcgatgccctaacccacgcctatactcccaccgagaaagacgtcgaacctgtgagtgtgaaacaccaagcatatactgctgcatacca

SEQ ID NO: 5263 - DNA, 236 bp, Triticum aestivum
  Clone ID: uC-tsro9316072h09b1
tcgtttaattgctgccaagaatatcaacgaacatgtcctgcttcagatccttattcccatggctgttctggacgcccttacaaaggctggcagaaatagttggggggaagacctgggccatgccataaccactgcctatactcccatctatgaaaccatcgaatatatgagtgtgaaaaccgagcatagcgcgctggataccatgaaccggatcaaaagcgcactggaaggatggc

SEQ ID NO: 5264 - DNA, 203 bp, Triticum aestivum
  Clone ID: uC-tsro9316072h10b1
tgcttgcgtgtgatctgatggagtcaagcaggtttgcttgtgcgtgtgcgtgcggtttgctcgctcgctctcccatgctctgcccattgtgtccttgtgtgtatgtgcgtgtgcatgtgcccctgtaattgctttatctatccccactatggatggagtgatgaatatgtaagaatgaaagatttacctaattaactactcct

SEQ ID NO: 5265 - DNA, 316 bp, Triticum aestivum
  Clone ID: uC-tsro9316072h11b1
tggtttagtcggagaagggctgacctgaggacgagtgatggaacgcgacggcgccggccgctcggtcggagccagcgagccgtcggacggcgactaaggagccggcgttggtgtccatgtccgcctcgccccttggcgccggcgtctctgccacctctacctcccgctactcgtcgctatccgcgcgacggcgggggtccatgcgccggccggagctccaatttttgcggcggatcccgagggaggcagaagaggaaaaggagggaaggggctcgaggtttggcggccgtctctttcgtccgttggttaattggtt

SEQ ID NO: 5266 - DNA, 340 bp, Triticum aestivum
  Clone ID: uC-tsro9316073a03b1
tttgggaatgggatatttgattgggtagaatggacgacatctataccggagaagtagtaatctgttagtatcctccagaaaatcatagagaaggacgccacggtctcaacagatggacggcctgccgtcaagttggacagcagaatcatagaactctacaaagtgtatgggttgactgaaaggtgagatgaggggttgtcaacaacatctatgaaatacctggttaattaatcctacatttcagtatcaaccaacatttgttccttcctgagctctcaaccctagtctcatcgatgatgcagcctgcgcatcacttgttctcagttgcttggtaagtact

SEQ ID NO: 5267 - DNA, 178 bp, Triticum aestivum
  Clone ID: uC-tsro9316073a04b1
ccggccggattcctggttgacccacgcgttcgtctcttttgtgcaaggatggcaaacgcgccttgtttgttatttccatcaatatactgtcttatcgtgaaaaaaccaaaaaaagccaggtcgtgtgaggccccttctcaaaataaagcccccatctctagctttaaatacaccgcag

SEQ ID NO: 5268 - DNA, 224 bp, Triticum aestivum
  Clone ID: uC-tsro9316073a05b1
ttttcttgtgggcgcgccacgcgcgtgtgcgtacgttagcttatcgcctgagctggtggttctgtgtagtgatgctgtgagcgtggtgtgtgtgacgacccagtacaaaataaagcctacagctcgtactatatgtaccgagcaagattgcgttcactctaacagtcacgtgctctgtggtgtaactggcgtgtggacaattctgaacgagagtttttacgcat

SEQ ID NO: 5269 - DNA, 371 bp, Triticum aestivum
  Clone ID: uC-tsro9316073a09b1
aggaggagggagagggacgcggaggcggagctcaacctgccccccggcttccgcttacaccccaccgacgacgagctggtggagcactacctgtgccgcaaggcggccgggcagcgcctcccggtccccatcatcgccgaggtcgacctctaccgcttcgacccgtgggcgctccccgaccgcgcccttttcggcacccgcgagtggtacttttttaccccgtgcgaccgcaagtaccccaacgggtcgcgccccaaccgcgccgccggcaacggctactggaaggccaccggtgccgacaagcccgtcgggccccacggagggcgcaccatggggatcaagaagcgccggtggtttatgccgggaaggct

SEQ ID NO: 5270 - DNA, 432 bp, Triticum aestivum
  Clone ID: uC-tsro9316073a10b1
cccacgcgcttttgtttaagctatgtactgctttcaccattactgtggatgctaaagaaggcacaacgactggggtatctgcaaaggatagggcaaagacagtcatgactcttgcatctccttactcaaagcctgaagatttcaatcggcctggccatattttccctctgaagtacagagatgggggtgttctcaaacgagctggacacactgaagcatctgttgatcttgctgtgctggctgggttacctcctgttggagtactctgtgagattgtggatgaggatggttccatggctcgcttacccaagctgcgcgtgtttgctgaaaagaataatttgaagatcgtatcgattgctgacttgattagatattggagaaaaagagaccgactaattgaacgtgcatctgttgcacgcttacctttgagat

SEQ ID NO: 5271 - DNA, 443 bp, Triticum aestivum
  Clone ID: uC-tsro9316073b05b1
gttgacccacgcgtccgttttttttcttctgtctcgcccttgccccccgttcccttgttggtgcccgatctaagtcaagatgagtcgtggcgggagtgctggtggtggtcaaagttctctgggttacctgtttggagatggtgagcctgcaaagcccgctgcagcaccagctgcgaagcccgcacctgctgagaaaccagcaccggcagctgctgatgtagccaagcagattccagctggcattccaggtagccgggcgaacaactactaccgtgcagatggccagaacacgggcaacttccttacggaccgttcttcaaccaaggttcatgctgctcctggcggtggctccttcctgggctacttgtttggcggaaagtgatgttaatgatgctgcttaatgaacgaacgatgaattgggcctgtttctctgttatccatgt

SEQ ID NO: 5272 - DNA, 246 bp, Triticum aestivum
  Clone ID: uC-tsro9316073b06b1
ggatgaatgtgtggatagtcagtctctatgtgacattaatatctttgtatcctgcatgcgcctaatctatttgatcagattcaactactattttattttgtgtttctagttggaaaagtataaagggcatgcacgttcaatctcacgagtgttgtaagctacttgtttgtcaagtttcgcttgaccattgcgtgcttgttgtcgatgttgtgattgtcttccccaggaaaattggtgtaacacttt

SEQ ID NO: 5273 - DNA, 504 bp, Triticum aestivum
  unsure (1)..(504): unsure at all n locations
  Clone ID: uC-tsro9316073b08b1
aggccgccangcatggtttacctgtaattgcaacaaaaaatggagctcctgttgaaattcaccaggtgttggacaacggcctgcttgttgatccccacgatcagcatgcaattgcagatgcactctataagcttctttctgacaagcaactctggtcaagatgtagagaaaatgggctgaaaaatatacaccggttttcttggcctgaacattgcaagaattacttgtcgaggatattaactcttagcccaagataccctgcttttccgggcaatgaagaccagattaaggcacctatcaaggaaaggaagtgtatcatcgttattgctgtagactctgccagcaagaaagatctggtctgtatcataaaaaattctattgaggctacacgtaaagaaacgttgtcaggttcaacaggttttgtgttgtcgactttcctgacaatgtcagagatacattccctattaatatctgcaggcatggctcctacagattttgatgctt

SEQ ID NO: 5274 - DNA, 451 bp, Triticum aestivum
  Clone ID: uC-tsro9316073b09b1
ggcggagtccatgatggacaagatcttcgacaagttccacggcggggacttctcgtcgtcctcctcggactcggacgacgacaagaaggggccggcggcgggcgagaaggccaagatctaccgccttttcggccgcgagaagcccgtccacgccgttcttggcggcggcaagcctgctgatcttgatcttatggaggaacaagatggtcttcggaggggtgcttgctggcgctacggccatttggctgttgttctaggtcatggagaaccatctgctcactttggtgggccactgccttattcttttcctggtaacacttttccttttcttcaatgtctgcatttttatttcacaagttcttcctaaatcattcctgaggtgtaatttcagaggtcatggacctgtaactttgcactatcactggggcatgagaacaaccggggctttttt

SEQ ID NO: 5275 - DNA, 347 bp, Triticum aestivum
  Clone ID: uC-tsro9316073b10b1
tttctataaaaatgaatcctgaatacgatcacttatataaacgtttgttaattggagattctggtgttggaaaatcatgtcttttgttaagatttgctgatgatacttacactgaaagttatatttcaactattggagttgatttcaagattagaactattcaattagatggaaaaactattaaattacaaatttgggatactgcaggacaagaaagatttagaactattacttcttcttattatcgtggtgctaatggtattattgttgtatatgatgttactgatcaagtttcattcaacaatgttaaacaatggcttcaagaaaattgatagatatgcttgcga

SEQ ID NO: 5276 - DNA, 166 bp, Triticum aestivum
  Clone ID: uC-tsro9316073b12b1
gaaccaggtctcgtgtgggagaggctaagatgtaattccccatttctagtcaagaatgaacccttgctatgtacggcatgacggggtatttcccctcttgatctacctcttgtatccataattcctccatgaaatccaacttaattttctgaattctaaacaaaaa

SEQ ID NO: 5277 - DNA, 438 bp, Triticum aestivum
  Clone ID: uC-tsro9316073c02b1
ctctcatcgtatcttaccgggggtcacctgagatcacatacacaatggtgaaggctgtggctgtgcttaccggcagtgagggtgtcaagggcaccatcttcttcacccaggagggagatggcccgaccaccgtgacgggaagcgtcactggactcaaggaagggctccacggcttccacgtgcacgctcttggtgacaccaccaacggctgcatgtcaactggaccacacttcaaccctgctggtcatgtgcatggggcaccagaagatgaaatccgccatgctggtgatcttggaaatgtgacagctggagcggatggtgttgctaacattaatgttactgactgccatatcctccttactggaccaaattcaattgttggccgtgctgttgtcgtcaccgtgaccctgatgatcttggcaagggtggacatgagct

SEQ ID NO: 5278 - DNA, 427 bp, Triticum aestivum
  Clone ID: uC-tsro9316073c05b1
aaccaccaccacaagtgagtgaacgtcggagcaaggaaaggcagggagagatggcaatgaggccgctcgtcgtcctggctctggccgtggcgctggccggggtggcgctgcgagggggcgccgcggagggggccggcgagtgcgggaggtcctcccccgaccggatggccctgcgcatggccccgtgcatctcggcggcggacgagccggactcggcgccctccagcagctgctgctcggcggtgcacaccctagggaagagccccagctgcctgtgcgccgtcatgctgtccggcaccgccaagatggccgggatcaagcccgaggtggccatcaccatccccaagcgctgcaacatggccgaccgccccgtcggttacaagtgcggagaatacacgctgccttgatggcccagctctggtgctga

SEQ ID NO: 5279 - DNA, 248 bp, Triticum aestivum
  Clone ID: uC-tsro9316073c09b1
gacctcgccgccgccgccgaggcctactgccggctggcgctgagcggcctccccgccgcgtaccacgaggtggagtgggacctcgtcatggaggacgcgcccacggggtgggtgcccgaggcgcccgggaggatgggtgccatctacaccgacggcatggtggcgcgcgcgcggcggtccggcgacagtaccaccgacgtgttcgagcacgacgtggaccggacggaggaagacaaggtctccaagga

SEQ ID NO: 5280 - DNA, 190 bp, Triticum aestivum
  Clone ID: uC-tsro9316073c12b1
tttttaaagccaggaaattaatggtgagttacctatcatgtaaaaggcaacatgtgtaaaatacaggcaattttgctgtaaatttcataataaaaataaaaatattaaaaaaaattaaaaaaaaaagtaaaacaaattaaataaaaaaaaaaaaaaatatattaatataatatatatatattatataatt

SEQ ID NO: 5281 - DNA, 336 bp, Triticum aestivum
  Clone ID: uC-tsro9316073d01b1
agatccacccaccctcccaacatctgtcctcctcgtgtcccggccccggggtgggttgatgatgcatgcggtgcaaatggcaagagcccggaggtatagtatacatgtactgagccgtatatacatgtgctcatcttgtcgtacgtactacgtatctgtcggtgtgtgaaagtgtgtgctgccacgcatgtcccctcttggcagtgactgtgtccgtgtgtaacattgccactacttcaaatgtgtgcactttagtacatgtgtatgtggtttctgtaaacaatctacttcggggttaattaacccaccgacagaactacagctatcttatcgctt

SEQ ID NO: 5282 - DNA, 317 bp, Triticum aestivum
  Clone ID: uC-tsro9316073d02b1
ttcttatttccatccatcccccaccgccatgagagattgaaatcgattcaaaaaattccagcaagtgtacgtcgtcgtgtcatcatcagtaagccagtttagtttcattctctctccctctctctcacgtgtctttgagaaattcagggtaaacagtgtgagtcagtcagtcaggaataatctcttgtcttggtgtatgtcctcaattatgaatgcttctattccatggtcaagattgatgtttgtaaatcaaaaaattattcttaactattacccatttatcttcctttcctctcactcttcaattactaccctag

SEQ ID NO: 5283 - DNA, 410 bp, Triticum aestivum
  Clone ID: uC-tsro9316073d03b1
caacatcatttctaagggcgacgccgctgaggcccctggcaccggcggagaagcagcttgagcgacgccaagctcaaggagatgagcggcagcatcatcttcgccgtcggctaggcgccggcccgggacttcctcggcggcattcgcaagccccccggcggcgagagcagcatcgcgctggtctaacagcgacgacgacatcccctgatggacaggacaggacagacatagcctacaacattcttcgttcttcacctttaccccctcgccgtctcgatctaggagtgattgattttctagggagctttttttttttcgtcgtcttctttggtgggactgatctgcgaatgaccttttggtttggttttccccctttaaaaaaaaaataaaaggggcgccgttttagagga

SEQ ID NO: 5284 - DNA, 389 bp, Triticum aestivum
  Clone ID: uC-tsro9316073d04b1
atcaagttttgttttgttgatcccccacctaagagcagtgatggcgcagtcaggcaacaacgacgccgccccgatcagcacccagcccgcggcggaggaggtgacggtggagaggacgcccgaggaggaggaggccaggctgaggtacctcgtgttcgtgcagcaggcggcggcgcaggcggtcgtgctggccgccgcggtctacgcctacgccaagcagggcgcaggcccgcttcgcctcggcgttgaccacgtcgaggggaccgtcaaggccgtcgtcggtcccgtctacgaccgctaccacgccgtgccgtttgaccttctcaagttccttgaccgcaaggttgatgagtctgtccaggagcttgattcttgtgttccaaccgttg

SEQ ID NO: 5285 - DNA, 340 bp, Triticum aestivum
  Clone ID: uC-tsro9316073d05b1
acacactcaatcttgccgtttgtctatttttgttatcctcctcaaggctgagccccaccgccttcgacgagtggccgttcccgccgggggcgggggagagcctgtggagctaccacgatccctagtgagtagtatattgcattggctcaagacatgatgaccggtgagctggttggtacgtgctccagtactataccagttactaaacctagttaatccggagtcgatacatggaccccggccgttgcggggcattcgtcctctatctggtatatatgcgtgtgccatgataggggtattattgggtgctggcctgccatattatagccgttacctagaa

SEQ ID NO: 5286 - DNA, 449 bp, Triticum aestivum
  Clone ID: uC-tsro9316073d06b1
cgtctgtctttcttctcggcggaggcgaacgacgaaccctagccgcccgaggaacgccaagatccccaaggccggcgacgatggccgcggttcggtgcgcggcgaggaggctcggcggctctctgctccagcgaacgcaggcggcggtcgcggaggagggacgcctgctcgcgccaagcaggctcatgcgctcccgccagctctccaccaaggtctccggcgagcgatcgcaggtggcggagcgacacctcctcgagccaggcagcctcatgcgctcccgccagctctccggcgagcatgctcgcaacattcagaagaaagaggatgactgctgggcggggttcaatgagacgctaaagaggttggacgagcttcataaaaagaagaaaccaagtgtctttcagcagcgcatgatattcatcgaccgtgcgttgaagagtttgtctatg

SEQ ID NO: 5287 - DNA, 468 bp, Triticum aestivum
  Clone ID: uC-tsro9316073d08b1
ggatacatcgcagtgcgagattatctggatacattgcgcaattatgttgttaatataagcagggatgatcccatcattgtgaagcagggttctctcatcgacatggctggccctaagcgagggatagatttgatttccactattctagtggaatatgacatgcggatcaaggtaggtgaggaagaaagggatgattaccagctgattgatggtgtaacagacatagacgacctgggcccatggaattgtgcattgaaaaatcgcatccaaggcgactgtggtgcggttgacttaaccatagcacgtgtcgatgacgcagtcatggcgaatattgaagttgttgtgttagaggtgcagagcagctttgatctatgcttgcgttgttatatcggtgattataacgaaggaattcggctgttcaatggtacaattggcgagtaacgtatttaaagaggtctgtggttgctg

SEQ ID NO: 5288 - DNA, 355 bp, Triticum aestivum
  Clone ID: uC-tsro9316073d10b1
gaaggggaagtcgttagaatgagccgttgtgccaccatttctgtgccttgaacaccacctgcaagcacagttttccccatcatagtgcctcaaatcccagactccgttgcactggatgctcagatcttttccgggtctgcaaatgcaatgcagtacactgccaccagcattgcggttgtcgaaaaaccagtgcagaacagaatcgaggtctgcatgggcggcaaatgcaagaaggcgggctcgctcgtcgtcctgcaggagtttgagacggtagttggcacccacggcatggtggtcggttgcaaatgcttggggaaatgtgggcttagcccaaagtgcggttgtaagcgagggc

SEQ ID NO: 5289 - DNA, 311 bp, Triticum aestivum
  Clone ID: uC-tsro9316073d11b1
caaggctagctccgtgtactctttgagtcgccattagttaccccggacctgatcagcctttgtgcgttgtttccctgaattatttatgccgtagcaggttagtcaggtacaaactcgcgcagtaggccatatcttgttgttaacttagttggaaggattactactgctttacatatcttattagttggggaggctctgtgttctttcaacacctttctttattgtttcactgaattgctattatctcctgtaagaatgagaaagattctgaaacaccagcgatgaatttcaaagtaataggaatgcttttt

SEQ ID NO: 5290 - DNA, 237 bp, Triticum aestivum
  Clone ID: uC-tsro9316073d12b1
atgatgctggacaagctgtgggacgacgtggtggtcgggcctcgcccggagacgggccttgacaagctccgtcgtgccgtcgtcacccaaccccttgccatcaatacagttgcaggggaggcgattaaagcagtctccgtcgatgcctacgaccccgaccacgtcggagacgccgtctttcgttacgccgtcgtgtggtggaagctttgtggcggagcgtttttcaccccgggagca

SEQ ID NO: 5291 - DNA, 462 bp, Triticum aestivum
  Clone ID: uC-tsro9316073e02b1
gctgcgccggaggggccagggcgtcgggatcctcgtctccaagcaccccaaggacaccagcgcctccttctcgctgcaggagccggccgaggtcatggagttcctgctccgcctcgtcgagtggaagcagctctccagggcgcgcctcaggctgcggcgtcaggccgacgcctgatccaacggccggactaattaattcactacgtgtagcttaattagctagttaatgaatcccctgctcatccgaacaaagccaaaggctacgtacgtggatgggaagaaggaacgtactatggcgaacctgtggctgtggagcattgttgcgccacatgttgtgttctaattaaccgcccttctctttgtggggatgtataccgtacctaccgattatgcatgcatgtaaattacctttggtcacgtacaaggggaggaaccatggaataaagaaagagcaacctgagt

SEQ ID NO: 5292 - DNA, 428 bp, Triticum aestivum
  Clone ID: uC-tsro9316073e06b1
tccttctatactaatagctcatgagtcatatgcattttggcctcttgttgccaaagatctcaactcactggtcaacttctactctgctgttactggacaagaaccagttgcatatcttggtccacggaagtggaacacaaccgaaagaagcacacagtatgtgaagctttggaatggttcagtcagcgaatcagtgaagagcgagccctacctagcattcagcatcctctttattttcctaaggatattctcgttcttcttcccaaagttcttcgcctgcatcaaaggcttgtgggctcaatacttccggcacgccaactttggagtccctgccaaattgacgcagctgctcgaatgtgtgccccatgccgtggatgtaaggaagatgtggagcaaatgaggcttatgtttggagccataacatgaga

SEQ ID NO: 5293 - DNA, 387 bp, Triticum aestivum
  Clone ID: uC-tsro9316073e07b1
gggcggtgccaagcgccaccggaaggtactgcgcgacaacatccagggcatcaccaagccggcgatccggcggctggcgcggaggggcggcgtgaagcgcatataggggctcatctacgaggagacccgcggcgtgctcaagatcttcctcgagaacgttatccgtgacgccgtcacctacaccgagcacgcccgccgcaagaccgtcaccgccatggacgtagtctacgcgctcaagcgccagggccgcaccctctacggattcggcggttaggccgccaccagatcagtagctagactgtcgttgtttggtagtaccagcagtgctcgtggtcctcttgtgtaatggcagaatctcgctgctcgtaaacccttgtagattggatg

SEQ ID NO: 5294 - DNA, 227 bp, Triticum aestivum
  Clone ID: uC-tsro9316073e09b1
gatactccctaaatttctatttcgaacaagttaggatcggagcccatcacacatttctagtctcttcattttactgttccatgacaacagcgtttcattttattcatagggttttcactaggcgttttctaaaaaagggctcccagattctagtggaagaactaagtagttagtggcgcaatccactaacatgtaatcgctacctacgaatatgtaatgttacgatt

SEQ ID NO: 5295 - DNA, 472 bp, Triticum aestivum
  Clone ID: uC-tsro9316073e10b1
cgtctggggaagaaggtgcgcgtcaagtgcaacgaggacgacaccatcggcgacctcaagaagctcgtggcggtgcagaccgggaccagggccgagaagatccgtattcagaagtggtacaccatctacaaggaccacatcaccctcggcgactactagatccacgacggcatgggcctcgagctctactacaactagccttcggccattgcaggttggtcacctattgttgcctgtgatgatagttttggttgcattccagtcccagtgttttcagagctcaatgtgtgggctgaactttaacgagctactatataagtagtgcattattgtacccatgatgatttattgacagcctgaacatactttttctgtgatccacctgcgaaattaatgtgcttgatactgtgaagtttataaattacataaactggttttacttgggtttggataaaaaaaaaaaaaataaaag

SEQ ID NO: 5296 - DNA, 197 bp, Triticum aestivum
  Clone ID: uC-tsro9316073e11b1
ctggagcttggagatgctttctttacctgctgataagacgtcttgttatctaataaaaataatttgtacaaataaatttaaacaaaaaaaactgcagaaatagacaaaaattactaaaaaaaacttgaattccggaatttatctcagacacaaaacctcttaaattaaaggggggccccttttaaaggaaccaattt

SEQ ID NO: 5297 - DNA, 210 bp, Triticum aestivum
  Clone ID: uC-tsro9316073e12b1
atcttttttattttaccacagaaacatccgtaaagcgtgcggggatgcccttgcagctctgagtttcagttatgtagttctgctgtcaggcactcgggctatgttgtggcgtcgccggtccaggactaagctgaattttgtttgttcgttgcaacagaagcttatctgtaaatagctgaactaactactgcttacaggacatcacagttt

SEQ ID NO: 5298 - DNA, 407 bp, Triticum aestivum
  Clone ID: uC-tsro9316073f02b1
ctttttattttcttcattccctctctattttttttttttttttttttcggggacaaacattttcttcattatgcggaagcaacagagatggccataaaaaaaattgaacatgttcacttacagcagcacagttaactacttcaaccgaagctaaaaatatccatccctccattgggccccctcattttgattagggtacaacacatactgggcaactaagcccacggaacaattatttcggagcccaaatccaaaaatcccggtcaccccttggagcttaccaccgttgcaaccaccgcgagatacacaaaccggaagggattaatacccaggtctcacacccccaccttgggggggcccccacggcccctcttggcaggagcggtgcccgcccccgggacccgaaa

SEQ ID NO: 5299 - DNA, 501 bp, Triticum aestivum
  Clone ID: uC-tsro9316073f04b1
aaattattagttacttggccatcgctttgatataggtttttgcccctgcccttcctatggttgcagattgttctttagcccaggcctagctccccatggttgttatctgtactcttgatccctgtgctctctaggtcttctgtgagtgtgggttggcaagatataatagttaggagtttgggcccaaaccgctctgtacatggagtcaggtcagattcttgtagacagtctgtttgtttaatttgttatggtctctacaatttagcttgcaggactggatcttgatctggtctggaaatgaagcttcatatggtgtgtgaacatatggcgaagggtacttgaggcaggtcagtttcccatgtttggtcacattgatttgctggattccttatctgtgcttggtgacctcagatttgagtggctttaccctaattccttgatttatgtttggctgatggctgtttgggagccttcttctggatggggaaattttttgacccc

SEQ ID NO: 5300 - DNA, 463 bp, Triticum aestivum
  Clone ID: uC-tsro9316073f06b1
cccaattaaaccgcccacgcgcagccgcagctataaccccgcatcgtccaagatccggccggcggcacaagaagcggcagcagcggagacaatggcggcggtgaagcgcgcctacctcgccgtctacaactgggccgtcttcttcggatgggcgcaggtgctctacttcgccgtggaggcgctgctccggtcggggcacgaggacgtgtacgccgccgtcgagaggccgctccagctcgcgcagaccgccgtcgtcctcgagatcctccacggcctcgtcggcctggtgaggtcgccggtgtcggccacgctgccgcagatcgggtcgcgcctcttcgtcacctggggcatcctttggagctttcccgagaccaggacacacatcctggtgagcttcttggtcattagctggtccatcaccgagattattaggtactcttttttcggcacaaaagagctgttt

SEQ ID NO: 5301 - DNA, 205 bp, Triticum aestivum
  Clone ID: uC-tsro9316073f07b1
ttatttgtaatcatacaccctctcagtaagtcattaagacgtcttaaatacttgtgtatttattatcattttgcttagttcttctgttgtttttgtagctaagtagcctgttcggcgatccaatgcattggaatacttcaattttgtagcttggctgtaaagtgtatacacttttattcattgtttaataccaatgtgatgaagt

SEQ ID NO: 5302 - DNA, 292 bp, Triticum aestivum
  Clone ID: uC-tsro9316073f08b1
caatccctgcgatattggaaattccatccaaggaccatccatatgatccagcgagtgactcggtcctttctcgtgtgaagtatctgttttctgctgactcggttgcttctgataggcgttgagtagcaaccttgttgataactggggcatcacactttgattgagttcttcgtggacttgctccgtgtatctgtattaaattattcataccattctgttgtgggcgcaccaataaggagtaaacaatttggattgcaccaacgggttaatgtaataaattcttacttttttt

SEQ ID NO: 5303 - DNA, 302 bp, Triticum aestivum
  Clone ID: uC-tsro9316073f09b1
aagcaaaacatcatcctaaaggagccgctaggatgagatgttcgtgtactacaaccgcgccagatatagtacactctcatgacttatattaccagctggattaaataagtggcgtgttgtacccaccaccatcaagtcattccatgctatataatgtcaagatcaatcaagattagggtatgacgcccatgtaaatcttgtggttgtcctgacttacttttctagcttctatggaggataagtatgtgtgtgctggttgtactatgattgtgtaatgatatatattaaaattcctactttgt

SEQ ID NO: 5304 - DNA, 91 bp, Triticum aestivum
  Clone ID: uC-tsro9316073f11b1
tttggtttcggacttgccatggcaagggaatgttgcaactgcttggttcgattcgtaatcatgaaccctttgtggtgtcctgtgtttgtcc

SEQ ID NO: 5305 - DNA, 309 bp, Triticum aestivum
  Clone ID: uC-tsro9316073f12b1
gagattgagcgggagctaagcccacccagtaaagccgatgctaatgctttcttggtgagtgatcaatgagcaccgagcacaaacgtacttggacctcgggatgttgtctctgccttctatgtagttcctgaaataagggagccgcaaggtcgtctgacgccattcaaaccggccggtgctcagggtggagtggcacccagtaaagctcagctatctcttgatacatctcacaattaaagagcttatgtgctattgctccaggaggtgctagattaaggcttgcttgtagttcttggatcggatgttttc

SEQ ID NO: 5306 - DNA, 366 bp, Triticum aestivum
  Clone ID: uC-tsro9316073g03b1
tgaagaaccagaggcagggcagaaggcatcacctaaaaagcataatatcttatctggtgtcggatcaaaggtaaagcaccaactagcaaaagtgaagaaagctatcataggcaagcctgggcacacaaaatctgaattaccaaaagcttgagactgcattcaccttagtgtgtgtatatttttgttactatttgtacatttgtatgctgtttacttgaggtgtagtatgaccgtgatggtactagtaaacatcaaggtttcgctatggccattgcattgaaatgttgtgtgattgaagaacgatttgtaaattaaaaaaataaaaaaaaaaactcattctaaatataataaaaaaaataatacatg

SEQ ID NO: 5307 - DNA, 243 bp, Triticum aestivum
  Clone ID: uC-tsro9316073g05b1
aaacataatgtatggaataaatcatcttattgagcatgttcttgcatcacaaaaaaaaaaaaaaaaaaaaaaaaaaaaaaaaaaaaaaaaaaaaaaaaaaaaaaaaaaagaatgaaattgataaaaaaaaaaataataaacagaacaaaagcaaggagaataataaaaattaaaaaaaataaagcttattcaaaatcataaagtgggggggtctgttcaaagggggataaaattcattccccg

SEQ ID NO: 5308 - DNA, 338 bp, Triticum aestivum
  Clone ID: uC-tsro9316073g08b1
ccacgcgttcttttcgcgtacgcccacgcgtacgcccacgcgtgcgaagacgcttaattcgttcgtgcatgttcttcttcttcagttcctatcgccttttgcctttcgttgttcgtgcgttggtgttgatcgacgtgtggccttgttgttaattgtgtagctgctctgccgcagctttacctaaagatattattgtcgttgtattttggggtgaatcatgctaatactatgtggttctttttttgcttgtattattactgtcctagtaaaaaaaaaaaaaaaaaaaaaaataaaaccaaaaaataaattaaaaaaatataataaatatataacccagg

SEQ ID NO: 5309 - DNA, 399 bp, Triticum aestivum
  Clone ID: uC-tsro9316073g09b1
tttcatatgggatcgagagtctttctcgccgcggccgtggtggccgtggccgtggcggcggcgggggcggacgtggcggcggacgtggcggcggaccgggcggagtgctcggacaagctggtggcgctggcgacgtgcctgacgttcgtacaggggcaggggcaggcgccgactccggactgctgcggggggctgaagacggtgctgcagaccagccccaagtgcctgtgcgtgctcgtcaaggaccgtgacgaccccggtctggacttgaagctcaacgtcaccagggcgctcggtcttcccgccgtctgcggcgcgcccgccaacatctacgactgcccaaggctactgaacctgccgcccaatttcaaggacgcggaggtcttcgagcagtttgcc

SEQ ID NO: 5310 - DNA, 406 bp, Triticum aestivum
  Clone ID: uC-tsro9316073g12b1
atcgcccacgcaccagcacaaccgatcgctgatctcagatcacctgcttctctccttgctccgtttggtctgctctgatcggcatggcgacccagatggacgcgtacgtgatgttccgccgcgccgcggagatgatgatggtggcgccgcccagggccgcctacgacgagcaggacgaggacatcggctccgcgtccgactccgagtgcacgtcgcggagctcgacgtcctcttgctccgacctcgccgacgacgccagctcctcgtcctcctcgagctccggtgaccacttcgagatgtccgccctcatgacgcagctccccatcaagaggggattgtccttgttctttgacggcaagtcgcagtcgttcgcgtcgctggcggccgtggccttcctggaggacct

SEQ ID NO: 5311 - DNA, 538 bp, Triticum aestivum
  Clone ID: uC-tsro9316073h01b1
cttacgcgtccgcggcctcatctcctcccggaagaccgctgtggccattgacatattgaagctcatgtcctcgacattcttggtcgccttgtgccaggccatcgacctccgccatcttgaggagaatataaaggaagccgtcaagagttgtgtgaagatggcagccaggaaaacactgagcaccaacaacaatggccatctccacaacgcacgcttctgcgagaaggacctgctgctcacgattgaccgcgaggcggtgttcgcgtatgcagatgacccttgcagcgctaactacccactaatgcagaagatgcgtgcggttctcgtggagcacgccttggccaatggtgaggccgagcgcaacgtggagacatctgtatttgccaagcttgccgcgtttgagcaggagcttcgtgcagtgctaccaaaggaggttgaggctgcctcgacctccgtggagaacgggacccgcgcgcaacagaaccgatcaccgaatgccggtcgtacccactctacaggttggtgcgcaaggagcttg

SEQ ID NO: 5312 - DNA, 303 bp, Triticum aestivum
  Clone ID: uC-tsro9316073h11b1
ggggtagccgcccctgacatggatggcacggactccgtggtcgatggaccagctcccgcgcctgcctctggcgcgtcagctgccgccccagctgttgccatggcgtccctgaccgcgctcgtcttcggctacttcttctgaggccatgtccttgtgcgcgcagttatttgggatttttctttggttcgtctcgtgttcatacatgatatgagtacatattgtaaattacatgttcttttctatttaaatagaaaaattgttgggtacacacatttgtttatttgataaaggatgctttttagt

SEQ ID NO: 5313 - DNA, 79 bp, Triticum aestivum
  Clone ID: uC-tsro9316074a01b1
gttgttattacctagcgtgtgtgacgaatctcaagagttggttgtcatttggataaggggaaataaaacaaacaaaagc

SEQ ID NO: 5314 - DNA, 283 bp, Triticum aestivum
  Clone ID: uC-tsro9316074a02b1
cccattctatcgcccacgcgtccgcccacgcgtccggaagcgtcagtctgggttgacgatcatacccggtcgagtagtcggcacgattaaccttatggttgtttgtcatatatggctactgttaggatgggcactagtataacttggtataattgttaaaaatgactatcgcctatctagtgttgattgcctcgtggtatatttgaagtaaactaacgacttggagcggacatttctcaagtttggcccaaaaaaaagaaacataggtggctgtgctaaatac

SEQ ID NO: 5315 - DNA, 366 bp, Triticum aestivum
  Clone ID: uC-tsro9316074a03b1
cccattctaccgcccacgcgtccgcccacacgtccggcggcgctttttgagagggccggcctttttttttctttttgattgaaacacataaacttgttttaatcaacatgaacagaaaataatcttaggctctaactttggccatttggcatttgcgtgctaactagagacaaaggggattaaggaggtggtcgtgcatatatgtaggcattctcggacttgggattctacttgtgattacatcacgccggtccatggacacatcgctggctgtgctcattccatacagccgtcgtcagagcccacgggctacgaacaccataccgccggccacacagtaaaaccgagccagaggccttgctgcgc

SEQ ID NO: 5316 - DNA, 116 bp, Triticum aestivum
  Clone ID: uC-tsro9316074a04b1
ccctcatactctacctaatgtgctcattctctcccggtggtattttttatactttcatggggtgcttttatcctcctctcaaaaacatccattcgtctgttgtaatccttatactc

SEQ ID NO: 5317 - DNA, 314 bp, Triticum aestivum
  Clone ID: uC-tsro9316074a05b1
ccctaatatccaaccaaacacctcatcactgaccgtggggggttttattacactaggggtgtctacacagcccaagcccaatgtgaggcgaaggaccagccctaccaagaatcacagggcctagatggacctcatgccaagctacgacgaagatttagaccttccttcataaagcagataacaggcatcagttcttttaaaagtagaacactgaagtcattcaccactcaacatggccttccactctaataaatcatgctgcacgcccgcgtgcatgcgaaaatctaaacattatattatgcactcaactactt

SEQ ID NO: 5318 - DNA, 422 bp, Triticum aestivum
  Clone ID: uC-tsro9316074a06b1
cacaatcataatccacatccttacaaaaaaaaccaagagagcatatatacaaacttaggtgaataacatccaccagcactttgaaaataacaaggcgggatacgccgagaataacaagaacaatgctgcactcatccacactgataccgcagagtatatagctataatcaaagcaaagaaatggcaagagctcctcaaaggcgaggatatttacaccaactacccggccacctgacactatgccaagaaagacataggatgcttccgggcctaaagtaaaaacctttctaattcacaaatgcatcaagattcaatgaagtgttcatccctggctgcttgcttagttacttcttactttcatccctcccaagtgagtagtgtaccttttttgtaaaggcatccaatctctatatacacataca

SEQ ID NO: 5319 - DNA, 246 bp, Triticum aestivum
  Clone ID: uC-tsro9316074a08b1
ttagtggaggccgaccaacgcaccatgctccagggggggattttttgagcttatgtggggttaaccacacctatgcacgatataccgtccacatgatggaacaatgcattctcatctttatcacgatttgttgctagttactactataactgcctagattggggaactgcaccattgtatatgcctattcgatggccagtgcatcagatatcacggagtgaacaccacacttaaattcattcaccc

SEQ ID NO: 5320 - DNA, 501 bp, Triticum aestivum
  Clone ID: uC-tsro9316074a09b1
cttatgcgtccggtcgacgagtggggaggaaagggtggtcatcttgacaaccaactaggaggagcgtctcgacccggcactcctgcggcctggcaggatggacatgcacatacacatggggtactgcaccacggaggccttccggatccttgccaacaactaccattccgtcgactaccatgccacctatccagagatcgaggcgctgatccaggaggtgacggtgacgcctgcagaggtcgccgaggttctgatgaggaacgacgacactgatgttgccctccatgatcttgtcaagctcctagagttaaagaagaaagaggccactgagatcaagactgaaagtaagcaggcggaggagcagaaagacggcactgagaagatcaatactgaaagtaagcaggcggaagagaagaaagatggcgatgagatcaagactgaaagtgtgcaagtggaggagaaaaaagatgacaacgaggtggtgctgaagaatgagttgac

SEQ ID NO: 5321 - DNA, 480 bp, Triticum aestivum
  unsure (1)..(480): unsure at all n locations
  Clone ID: uC-tsro9316074a10b1
tttatgcttccggaggaagaggaggagtactgggtggttgtatctgcagtatttgaggggaaaaaaacctccaccctgacatctgaatcgagcaacggtgatagatcaacttccgaccttccaatctctactcccttgagtgatcccatcaacaacaaggtccatttgctcaggacaatgcttcaatgggaggagcaagtacgccgtctagcatcggtagcggagagaagtctcggctcgctgaccgatccaattcttcgtgaggtggccatcatctgctggccgtatgggaagataatgaggatgagtactggcagcacagctgctgacgccngtagaagacatggtgtngattggaagctgctttgggtgaatggccaacttgtgctgcctcaaaccgagctcaangatggagatatagtggaagtgaggacgtagtaattctcagggtaattgatcagattggctcattgatacata

SEQ ID NO: 5322 - DNA, 420 bp, Triticum aestivum
  Clone ID: uC-tsro9316074a12b1
aaaatgcacagatgcaagggatagtcttcatgttattccagcatttgcagccagatatcctaataatgtactcgtaccatacaaacatttcctgagttttacaacttacaacaacaggcgggtggatcagcggcatatatccctcttaggtgcagaaacttcaagccagaccaaaatttaggggcggctgtctgcaccgacagtccggcgggctcattcaacgtgatcgtctactacggcttggttgttcgagaacaatgtctcccttttcttggggaaaccagggggctccatacctgggcctcggtacttcagctctggagtggctcctctaagcccaggctcggccgaaacaggtcgatacggaaataccgcttgcccagcatacctagtaggggacacataccttctcggagcact

SEQ ID NO: 5323 - DNA, 479 bp, Triticum aestivum
  Clone ID: uC-tsro9316074b02b1
cttttcattgcgaaaggtatcccggcggcgatggcggcggctgcggcaaggtccggatcccggcgcttgttctccatatccgccctggtgccaccgaagccaccgagccctcccccgaaggcagatcccttcgccagcctctttgttcccgggttaagcaagcgaacagtagctgatggacttaggggagcttttgcaaagtctggtgaagtcgtgcatggttctcttttgacaaaccttccagcatcatctgtaaaaaaatcaaggtggtatatgatcaatgcaaaccgttcaggtcctttgacagtgcgtaaagaataccgcaaagtacttccttctttcataaggccatctgcatcttactccacacaagcttcagaaaaaagaccaaaacaggagagaacagacttgacgactgttgaagatccctttaatgcgcctacctacaatatacctgagaagccagtgacatttgtcga

SEQ ID NO: 5324 - DNA, 413 bp, Triticum aestivum
  Clone ID: uC-tsro9316074b03b1
ccctttctatcgcccacgcgtccgcccacgcgtccggctgtttggttttgttgtgcagctgtgatggaaacagaagggtttaattacctggaggagacttgcccatccttgctgtctgatttgttagcaaccgtcgcagtagtggatgatgatccttcatctgttaaccggaaaaggggagtttgtatcaacgaagatgtgaatcccgttgaaagcgttgaggctagtgacaggcgcacccgcaggagggtttaggcggaggctgtcaactaatgtagctatttgctgtctcccatgaattttactatggctggagttatgtcaagtgctctgtgacaggaactttgatttgggtgagagcaacttgtgaataatctccagcattgacggctttctgtggcattagttgcaac

SEQ ID NO: 5325 - DNA, 225 bp, Triticum aestivum
  Clone ID: uC-tsro9316074b04b1
ctccctagctgtatccattttcccaaagaaatatgaggtggccttttacaggcctgtggagaatgagtgatatgtaactacaatgcatgtgttcctttgcaactgaatttggaatcttccaaagataaaactgtcatggagatttcgccagtagtctgtttagtgggtatctaagaaatatttgtaaattcttggtcgtgaaaaaaaaaaaagggtgcgcgatct

SEQ ID NO: 5326 - DNA, 558 bp, Triticum aestivum
  unsure (1)..(558): unsure at all n locations
  Clone ID: uC-tsro9316074b05b1
ctcatactcgccccgacaaatggcatctacggtgggggtgctcttcgtggccgcgctggcgtgcgtgctcggcggcgccgacgcgaagctcggcaggctcgtcgtcagcggcgtcatgccgtgcaacaccggcagcctcatagacatcgccacctcccccgtgttcccgaacgcggaggtggagctgcggtgcgcggggcaggtggtggccggcgcgacgaccaacaccaacggctccttcacgatggaggcggacctgacaagcgcgctggcggcgttcatcggccggtgctcgctggtggtggacacgccgctcatcaagtgcgacgcgcagctgccgccggcggagaagctggtctcctacctgcagggcccgctcaccaggctgctcggcggcatcttccacctcttacccgcgggcttctccttccacagccgatgagattagtagttcactgtgtcgtcggtccaaccatctcagcatactgagatctggctaattacctcttctatctntagtttggttngaaatgaaatgcaaggcangttacaggagct

SEQ ID NO: 5327 - DNA, 460 bp, Triticum aestivum
  Clone ID: uC-tsro9316074b06b1
gaatatggctcgtcgccgacgtcggcaaaacggccggggggaggttgaagagcttgagggagtgggagaaggccccctacgtggccaaggccaacaagctcaagggcgagtacaacaaggccattgccgcctacaacaagggcgagagtgctgctgctgctgccccaaagaaggcggcggccaaggaggtagaggaggacgatgaggaggaatccgacaagtccaagtcggagatcaatgatgacgatgacgatgagggtagcgacgaggacgaggacgatgacgagtgaagctgacaatgcgggagctgctgtgcgagaagcgacctgagctgtgtgcggtggtgtcataaggagcctatccatctccactagaattatcccaagtttcacttcacatcgtgatgctgttttaccttatttcttgtcattgacctgctataacggatagcgctccctgt

SEQ ID NO: 5328 - DNA, 538 bp, Triticum aestivum
  Clone ID: uC-tsro9316074b08b1
ttattgggtggctgccattgctctccacaccatccaagctcgagctcccatttcatcaccactctgctagcccgagtctccctcttgacccaccgtcggtttcaggcctcgaaatcctcgtcccagtctctttctcctttcaagaagaatttctttgggttgagggagctgctgttcttggtaggacaggctaggccagatctgggggagagggtgggtctgttgttccgcttgaaatctctgggttttgttgcgctggaggttcttgctggccatggtttgtccaggcatgctgaggcgcaatctctgagctttatgaagatcgccactcacctgcgccggtgctgcttcctacagtccttctccgacgtcttcctctactacttttatgtgatctcataattgcccctctacaatccgccgtcgctagcagtaaactatattcctccttttcttgttcttcttgcttcctttttctgcgtcaacaagtgataaataagaaccgtagcagcagcatcatcagcagcagcagtagtag

SEQ ID NO: 5329 - DNA, 220 bp, Triticum aestivum
  Clone ID: uC-tsro9316074b11b1
tgtaatgtactgtagtatctaggatggggcattctgtcattcaggaacacgcgaaagtgtgcaatccttttttcttttccttattactatgcgaaatgttcgttccataatttgcatggaactcgattcgattcaatgagaaaaatcaaagtcaccgcacattctcagttcaaagctgaagagcgcggagcaagtggtggccgacgcgacgaccaacacc

SEQ ID NO: 5330 - DNA, 489 bp, Triticum aestivum
  Clone ID: uC-tsro9316074b12b1
cttttctcccagacgaggcgacaccggaccaagggggggcggtctgcggcgatggggggcggcagaagcgcgcacggcggcacgacctacaagggctacaccatcccccacaacaagcgctggcacaccatcgccggcaagggcctctgcgccaccatgtggttttggattttctacagggctaagcaggatggcgctgtgctcttgggtatgcgtcatccttgggatggccatgatgatcacgcgcatggtcatggacatgcacacgagcatgaggcttcgtcgtcgtcatcgccgtcccattgagctcgacgctgaaagcggctgacagagaccctgacgcgtcgcatgtttcgacgcaagtctctgctaataaaaaacaatcacaactatcattattcacccctgttgtttgcaagtattttttttagcacacaaactggccttgttgtgtattttggtttggagctgtggcgtcccgtggaatgc

SEQ ID NO: 5331 - DNA, 140 bp, Triticum aestivum
  Clone ID: uC-tsro9316074c01b1
cccttgcttcctaaaaaaaaaaaaaaaaaaaaaaaagagggattttttaaaaaaaagggggtgttttaaaaaaaaaaaaaaataaagataataaaaagttacctcaaaaataccaattcaactttgtggggcgtcctttt

SEQ ID NO: 5332 - DNA, 485 bp, Triticum aestivum
  Clone ID: uC-tsro9316074c03b1
aggttgttcgtctcaaacttccttgtccagggtctggagaaggtgttcagctacagcgagatcctcaaagacctcaagaaagagttttgctgcaatggtacagttgtccaggacacagaacttggacaggtcattcaactccagggtgatcagaggaagaacgtctcaaacttccttgtccaggccggcattgtgaagaaggaacacatcaagattcatggtttctgagcaactgccagctccatatcagagtctacatgcaaagcagctatatattggtggtgcagtatatttagttgtgtgctagcgctagcaggcgttaccagcttgcgcgctctgagtatacagaaaatctagcatagcccacctttctgcgtgtatgcttggtaccgttgtgttgaaactttgtaaggagcaccgtctttagatggcttgttaccctcttccatcaaggttgaataatatatgcttttgtaagcgtgggt

SEQ ID NO: 5333 - DNA, 540 bp, Triticum aestivum
  Clone ID: uC-tsro9316074c04b1
gtcttgttcagggtcaggttcagcgtccaaggatgggggggggcggtgggcaagaagggctcagaagcgagaggctgccgacaaggcggctgcagagaagcacctcaagcttctgcagaggctgggccgcgggaaaactcccgaagcgccacctgaagcactggaatcactggaggttggtcctcctgtgatcgagtgatccatcagcctctgtagataacgctgctgcggggaacgctgcagcccctgggagccccctccaataatcctcccggtgcgaagaagaggaaaccgggccttgtatcctggcaactttgtcgcgttgtacagtaatttagcttcgagtcactcgttaggtcggtcatcggagctgctacccagtctgctccagatgcagcaatgaggtcggtcggtcggtttatcccacactgatagttgtttaattcaaaaaggtcatgtactcgtgtcgtattaggggcacaaaaattgcttgctgtgctaattttcctgcaatgtggcaactgtggaggttgttcatcc

SEQ ID NO: 5334 - DNA, 533 bp, Triticum aestivum
  unsure (1)..(533): unsure at all n locations
  Clone ID: uC-tsro9316074c05b1
gaatttttgtgaattttcgcgggtgtcgtgtgatcagaggtcttgagtcggaatgggggtggagatggcaagccagcacggggcgctgctgaaggtggggctgttcgtgctggtgcangcgctggtgtacctcatcctcgcccagtcctcctccgtcttctccaccaccaagaccctggggctcccgccggcgcgctccctcagcgcccgccgcatggtcgcactgctctccgacctgccgctcggcggcgaaccctcgccccgcgccgtctccgtggagccgtcgtcgcccgtgcccgtgcacgcccaccagaagaaggattagttgacagagctgggaggtggctactgtctagcgagcgagcgtatgcacgttgttggttccgtgccaatggttggtgcctgccgtgggagtttgctagctattcacgccattctttggtggttcattgattggtcggtttggtctttgagattgcatatatgtaaactgcacgccgttttggattgacaaatgaccgtctaagattggg

SEQ ID NO: 5335 - DNA, 536 bp, Triticum aestivum
  unsure (1)..(536): unsure at all n locations
  Clone ID: uC-tsro9316074c07b1
tttattctttgacggtttacggcgatggcaagcggaggaggagtttccaatacgttggtgatttggttgaggggttgatgaggctgatggaaggtgaccacatagggccattcaacttgggtaaccctggtgagttcaccatgctggagctggccaaggttgtccaggacaccatcgacccgaatgcacggatcgagttccgtgagaacacccaggacgacccgcacaagcgcaagccagacatcaccaaggccaaggagcagctcgggtgggagccgaagatcgccctccgtgacggtcttcccctcatggtcactgacttccgcaagcggatcttcggcgaccaagatagcgccaccaccgccaccgaaggccagtaaagagtagaccggagtactatactttgaaattttggtggcctgcttctagcttgcttcttggttaatccccccactgacagagctatggccacgtagtcgtcgtcgagagttttactgctaaataccttngttgttgatgtaatgttattcattttt

SEQ ID NO: 5336 - DNA, 288 bp, Triticum aestivum
  unsure (1)..(288): unsure at all n locations
  Clone ID: uC-tsro9316074c08b1
ggactagcatcgcctgaagaagaatggttgcgagggtatggtcgtttaattttgctatatacatactatccataagaccttgtaagaggtacccaggccccctgggccatcacgatgggtatctcgtaaaactctgaagtgtgtatgtatggtgtgagggttgtcagacactcgtttggataagtgaacttctgattgtnaaaaaaaaaaaaaaaaaaaaaaaaaaaaaaaaaaaaaaaaaaaaaaaaaaaaaaaaaaaaaaaaaaaatataaaaaataaaccaaaaa

SEQ ID NO: 5337 - DNA, 465 bp, Triticum aestivum
  unsure (1)..(465): unsure at all n locations
  Clone ID: uC-tsro9316074c09b1
gtgaggagctgacgctggtgggatactggtcgagcccgttcgcgctgcgcgcgcgcttcgccctcaacctcaagggcctcccctacgcgtacgtggaggaggtgggcctcttcgacggcaagagcccgctcctcctcgcctccaaccccgtgcacaagagggtgccggtgctcatccacaacggcaagcccgtccccgagtcgcagctcatcgtgcagtacgtcgaagaggctttcccggccagctccccgcgctttctccctcccgacccgcacgagcgcgccgtcgctcgcttctgggcctcctacgtcgacggcgagctgctcaacgcgtggctgcccgtctacggcggacgcaccggcgaggagagggcacaagcggcggngcgggtcggcgccgccctggagacactggagcgagcgttctgggagtgctccaaggggaagggcttcttcggcggggaca

SEQ ID NO: 5338 - DNA, 498 bp, Triticum aestivum
  Clone ID: uC-tsro9316074c10b1
gccttcgccaaactcgcggaccaatcgaaggctgggggggagcgacaatggcccggcgctgcggctgctccgtcggcgccacgctcctcgccctctccctcgccgtcctcctcgccgcctaggcggtccccggggccgccgggttccacctcggcggcgacgagagcggcctcgtgcggggcatgctcgccgccgtccgcgagcgggccgaggccgaggacgctgcgcgcttcgccgtcgccgagcacaacaggaagcaggggtctgcattggagttacacgggttgcgaacgcgaaaaggcaagcggttgctgggaccttgcatgacctgatggtggaggtagcggattctggaaagaaaagtatgtacaaggcaaaggtatggccgaagccatggcaaaatttcaaggcagttgtcgagattcgccatgctggggacttgcagaatgagtcttctggtggctctgatggtagcactgtgcaagctatcctcaagct

SEQ ID NO: 5339 - DNA, 495 bp, Triticum aestivum
  Clone ID: uC-tsro9316074c11b1
cgtccgcccacgcgtccgaaagctgcgggggcgctctcataggaggggggtgagcatcggaaccaagccgccgacgccaccatgggtatctcgcgtgactccatgcacaagcgccgggccaccggagggaagcagaaggcttggaggaagaagcgaaagtatgagctcggccgtcagccagccaacactaagctttcaagcaacaagacagtgaggagggttcgtgttcgcggaggtaacgtgaagtggagggctctccgtcttgacactggtaacttctcatggggtagtgaggctgtgacccgcaagacccgtctcctggatgtggtttacaattcgtcaaacaatgagcttgtgaggactcagacccttgtcaagaatgccattgtgcaagctgatgctgcccccttcaagcagtggtacctgactcattatggagtcgaaatcggtaggaagaagaaagctgctgcagctgccaagaaggaacctgctgag

SEQ ID NO: 5340 - DNA, 573 bp, Triticum aestivum
  Clone ID: uC-tsro9316074c12b1
ttgtttgcaaagacaatcctcaacagagacacaggacacactcacgccatgtcgtggacatcgtccaagccgaagagaggaggtggcctccggggccccaggccgcagccgctgagcctgtcggcacggccgtccaagaagccgcgcgtcggcggccacgccggaccagctgccgggcccgtgatcgtgtacgagcgcacgccgacggtcgtccacgccgacccacacgagttcatggccgtcgtgcagaggctcacgggcaattgcaagcagcggccgtcgacggcggcgatgacgttgccaccagaggcgacgtccggatccggagctagggacggcagggcctcgacgtggacagcagcggacgctttggttctcaggcttggccagcagcagcgtgcgccgtgtggtgctcatcatccggcaccttctgcttccccggctgctgcatcatcaccgctgctgtcctcgagcagcttcttttttccccgaccaccatgcaggcgatacgggagctcatcagctgagagtcagcttgtgaaatttgaagatcgatccggcctggtgtgatca

SEQ ID NO: 5341 - DNA, 557 bp, Triticum aestivum
  Clone ID: uC-tsro9316074d01b1
cccttgttatcgtccacgcgtccgggcaaggtccgggggggtatgttccaggccaggaggggtaatatctgcgccaatcacctagtgatctcgaccacgaagatgcaggaacacgccggcagcgacaagtcctgtgtctggcacgcggcagactctgctgacggagaacttaaggatgagatgtttgccatccggtttggcaccgttgagaattgcaagaagtttaaagacttagttgatgagatcgctgagtcgcttgcaaagaatgaaggcggtgaaagcgaagaaggttcttccgcagctggactgctggagaaacttagtgtaagcgaaagcaaacctgaggaaagcgcatctaaggaggaatcaactgatgctagcaaggagacagaaaccaaagccgcgacagccccctcagagtagtgggcagagcaacgcccgtcacaatggtaccgctgagcatagctcggtggcaagagtcagtttgtcggtccttcctgttgacggaagttggtagtcgttgaccatgaaatatgctgagaactttttgagacagt

SEQ ID NO: 5342 - DNA, 432 bp, Triticum aestivum
  Clone ID: uC-tsro9316074d02b1
ccctcgcttccggtttattcgaagcgatatggagcggtgggtatcatgtctgatgttgatagttatggaatgatggttctcgagatggttggtgcaagggataagaatatcagtccaaatactgaatctagcagccaatatttccctcaatggatttatgaacatctagatgaatattgtgttagtgcttctgagattaatggagaaatcacggaggttgtgaggaagatgatagtggttgggctgtggtgcattcagttacgttctacagatcgtccaacaatgactagagtcgtcgagatgcttgaagggagcacaactggccttgaattgccaccaaaagtgctcttgagttgataggtttatattgttctcgccaacttactccagtattgcctaatctgtaaacagactgaaaattttaaattttca

SEQ ID NO: 5343 - DNA, 180 bp, Triticum aestivum
  Clone ID: uC-tsro9316074d03b1
gccttcgtcaccaccgcacggcgcggcgccatggatccatgatgattacgacaagaagctgcccattgatgccgctgctgctaagaataactagtagtaccgctggagggatttctccagttcctgcctctcattttattcggatgaatttgatcgattttgaatgaaattctcattttt

SEQ ID NO: 5344 - DNA, 423 bp, Triticum aestivum
  unsure (1)..(423): unsure at all n locations
  Clone ID: uC-tsro9316074d04b1
ccttagtcattcacgaaactcagcgtactcnctaanggaagattgtatgcttatgcgggcgcctatataaaggtttctcttgaagagcttgcacctaaaaagggccatgattacgtctctcagctaaccccaactgatattgctgtcgaggccctgcaaaagattaagaattttgtcactgagcattccatggccagtggcccattccacgacttataaattggtgccatgagacgaacgatgcaatccttgtaggatttctgcccaattttgtttgcaccgtgtatcttcatttttgtatcgctcaacattattgattcattctttatactgaaaaaggagctgtgctgaagcatgctctgaaacaataaaaaaatagcggattgagctaatgttaagagctccatggttattagatcattg

SEQ ID NO: 5345 - DNA, 463 bp, Triticum aestivum
  Clone ID: uC-tsro9316074d05b1
cccatgcttccgggctagtggtagctccagtgtctggagaacttagacgacctgcggggtgcttgaccaagcacctcaaatcacattaagtgaaaatgcggagctctctaatcaggcgaccacctatgatgatgttcagtcatcgggtgctagttcttttatacctatgtataatcgaactttttgtagattgaatcgggtgttctatacgaacaatcctggagatgctttggtctcacgtgctcctgatattgcaaaatttcaactggaaatagatagttcatctggcaactttggtgcaacatcttctctccatagatgtgcatctgatgacttccatttctcgttttggttaggagttcccacgatgggatggttacaaacttaaagtccaagtgactataaaagaaacaacaaagacatagtaaaatgtataaaattactcagctttccccccaccact

SEQ ID NO: 5346 - DNA, 439 bp, Triticum aestivum
  Clone ID: uC-tsro9316074d06b1
cgcttcttgaccccgcaccaaccagcgcccagccgggggcggttaaggagacggagcagcctcagccatgggtcgcgtccgcaccaagaccgtgaagaagacctcccgccaggtcatcgagaagtactactctcggatgaccctcgacttccacaccaacaagaaggtgctcgaggaggtctccatcctccagtcgaagcgcctccgcaacaaggtggccggcttcaccacccatctgatgcgccgcatccagcgcggccccgtgcgcggcatctccctcaagctgcaggaggaggagcgtgagcgccgcatggacttcgtgccggagaagtcggcgctcgaggtcgacgagatccgcgtcgacaaggagaccatggacatgctggcgttcctcggcatggccgacctccccggcgttgagcgcgcccccgaggccacc

SEQ ID NO: 5347 - DNA, 524 bp, Triticum aestivum
  Clone ID: uC-tsro9316074d07b1
ttttcatggtgggattaggaaaggaagcggttgcaggtattgttgcagtacaggggcggcttcaaaaattgacattacaacgcctgattgcgatggttgaggccgagagaacttatcatcagaaagtcctggagatccttgaccatttggaagaagaaatggtgtctgagcgccaaaaaatcgaagcacctccaccccctgcagcagagagttttatgtcaccgccaccaccatcatatgacgaagttaatggcatgtttgcctccacttctgctgatcaggcagttaactctgtcgacttcttcctgggagaggcgctcgattccttcgaggctgagagtgagtttgagcttaacttatcagttggcgacatcgttatcgtccggaagatatcaagcaacggttgggcggaaggtgaatgcaagggaaaagcaggatggttcccacatgcttatgtcgaaagacgcgagcgtgttctggcgagcaaggtccctcatattttctaggggttttgaggaggaaca

SEQ ID NO: 5348 - DNA, 488 bp, Triticum aestivum
  Clone ID: uC-tsro9316074d08b1
ttctctcgtccgggggttggcttctcctcccggtcgggttcgttttctggttcgggtcgggttcggttcgagagagaggccgagtagctagcctagtctagggtttcggtagagaggaagggagatccatggcggagacggagtaccgctgcttcgtgggcggcctcgcctgggccaccgacgacaacaacctccagcaggccttcagccagtacggcgagatcctcgacgccaagatcatcaacgaccgcgagacggggaggtcccgtgggttcggcttcgtcacgttcggcagcgaggagtcgatgcgccaggccatcgaggagatgaacggcaaggagctcgacgggcgcaacatcaccgtcaacgaggcccagtcccgccgctccggcggtgggggcggcggcggcggctaccgcggccagcgcggcggtggcggaggctaccgcggcggcggtggcggctaccgcggccagggcggcggcggc

SEQ ID NO: 5349 - DNA, 370 bp, Triticum aestivum
  unsure (1)..(370): unsure at all n locations
  Clone ID: uC-tsro9316074d10b1
gatagacctccaagaataaatgacactntggtagtttatctcactgaagggggctgtcgcacaagaggtgagattcttcttgggtacaattcagggccaccttctactgtgtcgagacttagtacttacgaggtacaaacatcataacaattgaaccattatcttttcctgttcgcaaatcagcctttctatttctgtaacctaagtatattccgatatttctgtgatgattcagaactggacctatgtatcttattgtactgggggtgccataatgcaactgtcatgcccaaacatcaactgcttttgaagtgttatctgcaggttactcacatttctcgttttggttaggagttcccacaatgggatg

SEQ ID NO: 5350 - DNA, 335 bp, Triticum aestivum
  Clone ID: uC-tsro9316074d11b1
gttcttatcttctgcagaagaaacagtggaaggatgggctccttaggttaaaggagaggtagaagagaggcaagtctgatatggatgcttatggctatgctagtatcgcaggtgaaaatgatcaggatcctcctccagaaaatgtttcagttcccttgcctgacatggtgctgcctccttcatttgattgtgacaatccgacataccgttaccgatttctggaaccaacctctactgtccttgcaaggcctgttctagatgcgcatgggtgggatcatgactgtggctatgatggtgtaagcgcataagagtcgctcgctctccttaacaaatac

SEQ ID NO: 5351 - DNA, 581 bp, Triticum aestivum
  unsure (1)..(581): unsure at all n locations
  Clone ID: uC-tsro9316074d12b1
attttgatccgttggcctcctgttcatccgctcgcccctcccgccgccgcctccagcctagggtttcctcccgccgtccgccacacccgccgccatggctcgccgcagcggaggaggaagatcttcccgccctgctccacgtgctgctccagtgagaaacccaccagcgccagcccgtcaagctcctccacctgctactacccagagcagcggtggtggtatcatgagcggaattgggtccactattgctcagggcatggcttttggtactggcagtgctatggcgcacagggctgttgatgctgtgatgggtccccgtaccattcagcatgagactgttgtcggtgaggctgctgcatctatgactccaatggacaacgctgctgatgacaagtgtggcaacccttccaaggccttccaagattgcatcaaccactacggcagcgacatcagcaagtgccagttctacctcgacatgctgaacgagtgccgccgtggaggagcaggagctggtgcaactctttaagctactatctttgcttgatggngcttaatggtcngaacctgtttcagtcatgatg

SEQ ID NO: 5352 - DNA, 317 bp, Triticum aestivum
  Clone ID: uC-tsro9316074e01b1
gcctgcttatgatgtcataaccaagagccttattggggggtattttactttgctggatgtggattgttctgccttgaatcactgctgagcataggtgtcactcagcaagtgtacatgtacttccgtggaagtggaaaatcccaggagttgaaacaacaggcagcacgtggtgccctgagctctgcgttctgatgaagaaaatcagcagccagagttgtatccagggtagtgagtggacagagacaggatgtgtgccgattggaaattgtaggactgcgcatagatgcaccatgcggattctgatcgatgcaatcata

SEQ ID NO: 5353 - DNA, 384 bp, Triticum aestivum
  Clone ID: uC-tsro9316074e02b1
ggatgctgcgtggccactcggaagtgccatcgaggggggatcttcattataggcaggaggcggtgtagcatcagaaacatcaacgtgggagcatgggcatgaccaccgtagaagaagttttggattcaggggtctacatttagccggttctgagtgtgcttccccctgaagtcactcattttgtctgccggacagctcgaccagcctcccctcccatacagtatcggatgatacactaggacatgaggattacggcaccaattgtactgcagccagacgccattggaaggcgcattattatttttgtactgatgatgagagtagacgagagcattccattctttctgacttccacttgagatgggcataaacacattgttcact

SEQ ID NO: 5354 - DNA, 450 bp, Triticum aestivum
  unsure (1)..(450): unsure at all n locations
  Clone ID: uC-tsro9316074e04b1
actttctatcatggttgtcnaagaaatatttcctgtagttttacaaatttgaggggacagggtttacaggagggcttaactactacagatgcatggacttgaattgggagctttctgcaccatggactggagaaccaataaaagtagcaacaaaattcatcgatggggaccttgacgttacatacaatgtaccgggagtgaaagactacattcacaagggtggcttgaaagcgagcgtgccgaatctggaggatgtggttgtcatggagggagtgagtcacttctgcaaccaggagaagcctaatgaggtttcagattacatctgcgagttcttcagcaagttctgattatatcaagagagtcttggcgaacctacttgtttcggtgctgtttatgtacttataagttggcgattacacatggcatgatactgaattatctctaaataaa

SEQ ID NO: 5355 - DNA, 67 bp, Triticum aestivum
  Clone ID: uC-tsro9316074e06b1
aaataataatataaaaaaaaaaaaaaaaaaaaaaaaaaagaaggattttaaaaaaaaaagggggttt

SEQ ID NO: 5356 - DNA, 289 bp, Triticum aestivum
  Clone ID: uC-tsro9316074e07b1
gattttatcacatgttcaattttctgtaatacaacgggatagttcatgggcacaaggggttattcgaccttgcagtaaattacacaatggtacaggtacactacatgggatacaccaacaacgggtggtaaataaaaacttctagcagaaacaccacaaaccagatctaacttattgctggcaacaaatcaaattgtctactgataagtctgatctatattaagggtttgtaatcacagatatgtagtcacacttgagcaaaacctgcaagactagttctagatcgcga

SEQ ID NO: 5357 - DNA, 142 bp, Triticum aestivum
  Clone ID: uC-tsro9316074e10b1
tttagcttcatctatctccactatggatggagggatgaatatgtaagaatgaatgggttacctaattaaaaaaaaaaaaaaaaacaacaaaaaaaaaaaaacatagccctacagagccattgtttctctatggaagaatccg

SEQ ID NO: 5358 - DNA, 469 bp, Triticum aestivum
  Clone ID: uC-tsro9316074e11b1
tgatgaggacgacgacgaagtcgacgaggagggggagccttaggaggagctaggagactgaatatctggtgcagccgcttggccgtgctgaagacgaagagcattccagtgactttgagccagaagaaaatggtgatggtgctgaggacgaggagactgaggatgatgatgctgaggatggtgaggattctgtcaaggcgcaatcctcttcgaagaggaagaggtctggcgcggaggatgaagatgatgatgacggtgatgatgatggtgatgatgatgaaaagcctccatcaaagcgatagtcactttgttcttgctgatctggcatcttttctgcttgggccaagaaggaaaataatcctcacggagagggctgctggtaaatgctgtagctttaggacatctgtggtaggtgtagcaactcgaacttgagtctacgcatgttagttgttagtgcatactgctgatg

SEQ ID NO: 5359 - DNA, 450 bp, Triticum aestivum
  Clone ID: uC-tsro9316074e12b1
ttcattcgtccgtccctgcctccagcaaactcgggcgtctcaccaccggagctgccaaccccacccgaagcggcagccatggcccccaaggcagacaagaagcccgtcgccgagaacatggtcgagaaggcggcggagaagacccccgcgggcaagaagcccaaggccgagaagcggctgccggcgggcaagacggcgtccaaggaggccggcggcgaggggaagacccggggcaggaagaagggcagcaaggccaagaagggcgtggagacgtacaagatctacatcttcaaggtgctgaagcaggtccaccccgacatcggcatctcctccaaggccatgtccatcatgaactccttcatcaacgacatcttcgagaagctcgccggcgagtccgccaagctcgcgaggtacaacaagaagcccaccatcacctcccgggagatccag

SEQ ID NO: 5360 - DNA, 164 bp, Triticum aestivum
  Clone ID: uC-tsro9316074f02b1
cccacactaccgaagcaagcggatatgaaatacagccagagtgctttttataaactgaaaaagggggttaacaaaccacacaaaacaaacaaacacacaaaaagaaaaaaaaacacccaaacaaaaacaaggcctcaacgaaaaccaatccctaaataaaaacg

SEQ ID NO: 5361 - DNA, 245 bp, Triticum aestivum
  unsure (1)..(245): unsure at all n locations
  Clone ID: uC-tsro9316074f03b1
ggactccaccgcgtgccgtacttttttattccccccaccactggttgggggttgnnggggctgtccttaaangaaaagcgtgggttccactactcgctanatacgttatgagacggacctgtttaaggggccgttccatttctgaagctaacaaactttaagtcgttgatttgcctgcgatttgaagacgtcgtagctgcatctggtgtgggtaatttcagggcatttgcggctggttttattgc

SEQ ID NO: 5362 - DNA, 412 bp, Triticum aestivum
  Clone ID: uC-tsro9316074f04b1
caattcttatcagaaatctcaagcttagcacagcagcggggcttcttaacagaccttggggatgatcaaacctgatggcgtccagaggggcctcatcggtgaggtcatcatccgcttcgagaagaagggcttctacctcaaaggtctgaagctccataacgtggagaagtcgatcttcgagcaggactacaccgatctgtcctccaagcccttcttcgctgggctcgtggagtacatcttctccggccctgtcgtcgctattgtctgggagggcaagagcgtcgtctccactggacgcacgataattggcgccaccaaccccctggcctttgagcccggcaccatccagggtgacttttccgtctacatctgcaggaacgtcatccatggaagcgactcagttgagagtgcg

SEQ ID NO: 5363 - DNA, 240 bp, Triticum aestivum
  Clone ID: uC-tsro9316074f05b1
gcgttcttgtccagtgcttcccccacctcaagcaggggggtctttccaatcagatggggagagagataaaagagagagagaagctgtcataatccacctagtattatcatgttccgcaatgactgattgttgacctaagcttgggtctgaactctggtgtgctgctgtcccagctgctttggttgtgtgcccatctactatgtaatcgtcctctatcagcctgttgtgctacaatatctt

SEQ ID NO: 5364 - DNA, 514 bp, Triticum aestivum
  unsure (1)..(514): unsure at all n locations
  Clone ID: uC-tsro9316074f06b1
gggccagcactcaccctcccatccctgggctcctgtcgcaaccccaccggcgccgccatggtgaagtactcgagggatccgtccaacccgaccaagtcggccaaggcctgtggcaaggatctcagggtccacttcaagaacacacgcgagacagcgtttgctcttcgcaggatgcctttgggcaaggctaagaggtaccttgaggatgttctcgcccacaagcaagcgattcccttccggagatactgcagaggtgtgggtcgtactgcgcaagtaaagaaccgccagccaaatgggcagggtcgctggcctgcaaagtcagcccagttcgtgttggatttgctgaagaatgctgagagtaacgctgaggttaaaggcttggacgtcgacaacctctacatttcacacatncaggtgaaccaagcccaaaagcagaggcgccgtacataccgtgctcatggacgcatcaatccttacatgtccaacccctgccacattgagctgatcttgtcag

SEQ ID NO: 5365 - DNA, 74 bp, Triticum aestivum
  Clone ID: uC-tsro9316074f09b1
acataattaagaaacctgttgtattcagaggaggtgggggtacataaattataactaccttgtcgctttgcaat

SEQ ID NO: 5366 - DNA, 469 bp, Triticum aestivum
  Clone ID: uC-tsro9316074f10b1
cggtcggtcaagaacaattctctcctagggcgccttgttgacctcctttggtgggggtgaatcctatcttggattggtcatacagggatgtttggtctttcctcttaacctgtcaggtcaaatactgcagcctttatgatgaggggtatacatccattgggagcatatatgatactgttccaaatgcacttcttagtgattcatctactgggaacagctttagaccggcatacatgctatcagatggaagacttgaaatagctgggagagcgaataacactagcaacaaaacggaaactaattctgttgcaagcaatggcatgaacaatgctgagggagagcaaatgatctcacgttcggcttcagttattgtagttggtgatgaaatattgtttggcacagctgaggataaatttggcgcagccttgtgcaagaagcttcatgaaattggcgtgcgagtttctcatgt

SEQ ID NO: 5367 - DNA, 390 bp, Triticum aestivum
  unsure (1)..(390): unsure at all n locations
  Clone ID: uC-tsro9316074g01b1
gacacctgcggggccggccgaattccggtcacccacctccgggctcatagggcccgacctccgagccggcgatcgggggggcctggtttaaaccctcgggagggttccaccaccggctactcgatggcctcgtcgttggagaacacgggaagctcttcctcggaggagttccagatcgacgacagcttctggtcggagacactggcgatgtcggcggacagctccggttccgggatggaatccagcgacaccttcggcgtagatagtggagcaccgtcttcgagcaacgatgagatggacttctgggtcacactgttcatgcaagctagtgacatacagagtttgtcacagatttaacttttaatgagaagattgggctattttcgtnct

SEQ ID NO: 5368 - DNA, 133 bp, Triticum aestivum
  Clone ID: uC-tsro9316074g02b1
cggttctcttgtgcggacgcatgggcagactcatgggcgggcgcgttttaaaaaaaaaaagggtttcaaacaacaaaaaaaaaaaaaaaaacccaaaactaacaaaacaaaacaacaccacccccaaaaacgg

SEQ ID NO: 5369 - DNA, 391 bp, Triticum aestivum
  Clone ID: uC-tsro9316074g03b1
cccatgctatcgaaaatgtggaagcaaacatcatccgaggggatccttttaggatgagatgttggtgtactacaaccgcgccagatatagtacactctcatgacttatattaccagctggattaaataagtggcgtgttgtacccaccaccatcaagtcattccatgctatataatgtcaagatcaatcaagattagggtatgatgcccatgtaaatcttgtggttgtcctgacttacttttctagcttctatggaggataagtatgtgtgtgctggttgtactatgattgtgtaatgatatatattaaaatttctactttgtacctttcaaaaataaatattgaccgacaaagatttttcgggtttgccccgccgtaaaaaaatatgttg

SEQ ID NO: 5370 - DNA, 410 bp, Triticum aestivum
  unsure (1)..(410): unsure at all n locations
  Clone ID: uC-tsro9316074g04b1
ctgttttttgtgtgctctccggctatgatcagctcgggggcctttttttaggcaagaagtagggctcaagcggtgcctagacgggaagaaatgatgacgaacaagagaagtctgttcccagtcctgcccttcgaggatctggcgaacttttatctttttaacgttggaaggcaataatttctgtagagggtggattttcccaacattcgttcttggtggaggcatcgaactccagaggttgtcgtaggttggcggcagcgttctcaaaacatttactatcataggggttgagtttgagtccgagtatgtgccctgaatcgttactgggcaattttccttaaatacattgtcctcgaatccgactgagattattatggtccaagtttnaaaaanaaaaaaaaaatagaaaa

SEQ ID NO: 5371 - DNA, 489 bp, Triticum aestivum
  unsure (1)..(489): unsure at all n locations
  Clone ID: uC-tsro9316074g05b1
gtgactacaggggtgagaaggcgatgcanctgctggagagttttctgaaggtgaaggagtacgagctgctcaggaggaacttcagcgacaccggatgctttggcttcggtatccaggagcacatcgatctcggcatgaagtacgatccatctaccggcatctacggtatggacttctttgtggtgctcgagcgtgctgggtaccgcgtctcccgccgccgcaggtgcaaggcccgcgtcggtatccaccagagggtcaccaaggaggacgccatgaagtggttccaggtcaagtacgagggtgtcatcctcaacaagtcccatgcgagctaagaaggacgtagctctctttagaccttgagttaatgaagttcacctggttgctggatatgtatgttacctagaaaccgaaatgctttgtcagttttgcctgtactcaagctggatgatttctgtttgatctgcactttcgtctaagaggctcactact

SEQ ID NO: 5372 - DNA, 166 bp, Triticum aestivum
  Clone ID: uC-tsro9316074g06b1
ccctgcgctgaatgactttgctttgttgctgtgcgctcatgaactttgtttcagtagaccctgcttgagtagttgggaacatgaatgtaaaacttttgtattcaccttctagacagtgctttgtgacggttgactgtacaattgtatatagacctgtcttcgtatc

SEQ ID NO: 5373 - DNA, 400 bp, Triticum aestivum
  unsure (1)..(400): unsure at all n locations
  Clone ID: uC-tsro9316074g07b1
aagctggtacgcctagggtccggtccgaattcccggctgaccaatgcgccatcatgcgttcggataacccaaaggttgatgagctgggcgaaatggaaacaaccaaggggtccccactctcgcctgtgcgggcggacgacaagcggcgcgcgccggcggcgtcagtggtgctcaaggtgcaggacagctccncggccgaggcgtacgagcagtacctgcggctgccggagctgtccangctgtggaaggccgcgtgctgcccgggctggcccgacgagggcctggtcaagcccgcgctgcaggcgctggagatcaccttccgattcgtctccgtcgcgctctccgacccacggggctacgccagccaacccgagctcgcgcggcggctcgagtcgctcgc

SEQ ID NO: 5374 - DNA, 581 bp, Triticum aestivum
  unsure (1)..(581): unsure at all n locations
  Clone ID: uC-tsro9316074g09b1
tccattcgtccgcttgctctgaatcgcgagagagagggggggatagagagagagagaggtgttaggtgcagctagctaggagcaagcaagcagatccaggaggagcggagatggcggactgggggccggtggtggtcgcgacggtgctgttcgtgctgctgacgccggggctgctgttccagctgccggcgcagggccggatcgtggccttcggcagcatgcacaccggcggcctcgccatcctcgtccacgccgtcatctacttcgccctcatcaccatcttcctcatcgccatcggggtccacatctacgccggctagaccccccccactcttcttcgccgcacatcgcttctcggctctgccgcgcgttattaagctttgttgcctgccgagcttgtctgtctcttactactattattngtgatgtactgtgtgtgtagtagcttctgttgtcttctttggttgatcggagaaacaatcggaagctagtagtatatggtttggtggtcggctggggtttcgtttgagatggctcttgtctctgggatgaaattttatccagaatgggccggtgtgtgc

SEQ ID NO: 5375 - DNA, 343 bp, Triticum aestivum
  Clone ID: uC-tsro9316074g10b1
ttcatgcgtccgcccacgcgtccgggcaccctggccggaatacttaacgtgtcatggttgactctaaataaggggagtgctgacattggcgcttccacatgggatttatgacagtgcggtgagctgtgtaactgtgattattacaatttacccttcttttgatgattattgactattgctggatggtcagcggttggcatcttatgtacaatttatacagcggttatgtgtcctttccccttgtttcaaaagggacaccaaagaggacgccatgaagtggatccaggtcaagtacgagggtgtcatcctcaacaagtaccatgcgagctaagaaggacgtagc

SEQ ID NO: 5376 - DNA, 393 bp, Triticum aestivum
  Clone ID: uC-tsro9316074g11b1
tcttctcgtccgcccacgcgtccgatcgtcggtgaggggtggttaaacaggcataatagaaggatttcctcccaaggagagagatgatgatgttgtatcatgcttccaactttttgattccgatttgccgtttctcggtcttggcgccacctgagccgagacattagttaattagcagacgctaatgtcttcccctttgttttgacagtgacaccaatgtattccctaattatgctggtgggcaccatgttttagcctgacatatgtgtgtacatgatatacgtagcaacaaagtggcaaaagctcagtctgtttaagaacaatgcaagctaaaaaagaacgtaactatatttaaaccttgagttaatgaagatcacctggttgctggatatg

SEQ ID NO: 5377 - DNA, 108 bp, Triticum aestivum
  Clone ID: uC-tsro9316074g12b1
atcgcacactccctatactttcgggattagtgggggacctaaaataaatgtcattgagtgttaacaaaccaaaaaaaaaaaaaaaaaacacaaaaaaaaaaaaacaac

SEQ ID NO: 5378 - DNA, 98 bp, Triticum aestivum
  Clone ID: uC-tsro9316074h03b1
cggacgcttgggcggacgcccggggattgacacgcgggtggcttccaaaaaaaaaagggggggttaaaaaccacaaaaacaaccaaaaaacaaaccaa

SEQ ID NO: 5379 - DNA, 544 bp, Triticum aestivum
  unsure (1)..(544): unsure at all n locations
  Clone ID: uC-tsro9316074h04b1
gaagttttctcctcgaatcttcactttccatctcgggggggcgttatctgaaacaaagcggggatcttgccagccagccagcggccatgtcgtcctcgtcggacaaccccaacacggtcaccgaccgcggcctcttcagcaagagcagcaaggacgacggcgccgacaagaagaagaagcaggaggagaagaaagaggatggggaggagggcggcagcggcttcatcgacaaggtcaaggacttcatccacgacatcggggagaagatcgaggaggcggtggggttcggcaagcccagcgccgacgtggcccggatccacgtgccccacattggcctccaccgcgccgacctcgtcgtcgacgtgctcatcaagaaccccaacccggtgcccatcccgctcgacgacatcgactacctcatcgacagcgaccgccggaagctcgtcgcggngctcatcccggacgcccgcaccatccgcgcgcacggngaggagacggtcaaggtgcccatcacgctcgacttcgacgacatccggagcaccta

SEQ ID NO: 5380 - DNA, 523 bp, Triticum aestivum
  unsure (1)..(523): unsure at all n locations
  Clone ID: uC-tsro9316074h05b1
acatgccgacgaggtcgttgaggaaaggagttctgttgatgaaataattgtgggtgaaaggcacaaagaacacaagtgcggtttccattatactcagaggagcaaatgacttcatgctagacgagattgaacggtctttgcacgatgcactctgcattgtgaagagaactttggaatccaatacggtagttgctggtggtggtgctgtagaaactgcattatctgtgtacctggagaatcttgctacaactcttggatccagggaacaactggcaattgctgaatttgcagaatctttgttgatcataccaaaggtccttgctgttaatgccgcanaagatgcaactgaccttgttgcaaagcttaagtcatgtcatcataaagctcaaacaaatgctgataagcagcacttatcaagcatgggtcttgatctgacaaaaggtgtaatccgcaacaacctgaaacatgcgtcatcgagccagcaatgagcaaagtgaagatcattcagtttgccacagaagca

SEQ ID NO: 5381 - DNA, 369 bp, Triticum aestivum
  Clone ID: uC-tsro9316074h06b1
gccgtctctgaacccatccccttccccccctctctgggtgtccatcatatccccgacggagccaaccaaccaacaatggaagttgctgcgcccaagcaactcctccccatggcgccgcgggaccccaactccccgtgctcctgcacctactactcctcgccgtcttgcgccgcgtggccctccagccaccggcccagcccgctgccgccgtccccgaggcccgtgccccgcaccatcgacaccacccccttccccaccaccttcgtgcaggccgacaccgcctccttcaagcaggtcgtccagatgctcaccggcgccgacatgcctccgccgtcctcgcagccgcaggcccagagccagaggcccccc

SEQ ID NO: 5382 - DNA, 412 bp, Triticum aestivum
  unsure (1)..(412): unsure at all n locations
  Clone ID: uC-tsro9316074h07b1
ttatttagtaaacagagagctcgctctccntgaatggtgtcttttaagaggaggagggagaataaaaatggagcaccctgctgctacctggtcacgctctcagcagtgtgaattcccagaagcatgcttgccgtgccttctatccggtgcaccggaggctggcatgtgagcagggatgcttcaatgatgcagaagaaaaaaggcaagtcttatcggcaagggaagggtacgcctttcttccaggtctccctctctccatctaaatctgtgtttggaggagggggctacngttagtttacccaccggtttactgcgtccttgtgagttgtgatcattatcatgcactcntcagttgcttgtcatgtatggtgttcttgaattttcagctacantaatgtccggtgtgtgagtg

SEQ ID NO: 5383 - DNA, 329 bp, Triticum aestivum
  unsure (1)..(329): unsure at all n locations
  Clone ID: uC-tsro9316074h08b1
gtccttaactccagatcagctacttgatcattggaggggtgcttagtgatcactcggcagctaatggcaggaaagacatccatcgcgctgtttctcgccgtgaacctggtcgtgttctccgtggccagcgcgtgcggnggaaactgcccgaccccgtccacgcccaccccatcgacgcccaccccgaccccagcctcgctccgcaggtgcccacgcgacgcgctgaaggtgggcgcatgtgtcaacgcgctgaacctggtcaaggcgcaggtgggcaggccgaccgcgttgccgtgctgcccgctgctggatgggctcgtcgacctgga

SEQ ID NO: 5384 - DNA, 358 bp, Triticum aestivum
  Clone ID: uC-tsro9316074h10b1
cgaggagaaaggtggaatcaagaccggggggtttttctaaacaagtgtccggggagtgtatgccgtcagcgacgtggccaccttcccgatgaagatctacaacgacgagaggcgagtggagcacgtcgaccattccaggaagtccgcggagcaggctgtgaaggcaatcaaggggaaagaggcggggtctgccgtggaggagtacgactacctggcctacttctactcgcggtcgatcgacctgtcgtggcaggtctacagggacaacgtcggcgacgccatcctgttcggcgacaccgaccccagctcggacaagcccaagttctggtcgtactgggtcaaggactgcaagttgcgt

SEQ ID NO: 5385 - DNA, 482 bp, Triticum aestivum
  Clone ID: uC-tsro9316074h11b1
ttttctgcgcgacgaggcgcagcgggcgcacgtgggccggatgaaggagcggtgcgagcgcaccaaggcggcctgggcgctcccgctccgcccctacggcttctggaccttcgaccgcttcaactcccagctctcctgggacccccagatcagccaggccgccggccgccgcgacccctacgacgacctcctcgcccgccacgccggccccgccccgccctcctcctcctgagaaccgaatccggcatcaaccgcgaggaagtgtggttgccccggatctacgcgggcagcaataaggaactcatttccctcaaaatgactgtgattgcattcccttctggttcatttttatccttgaactgccccagttggttcatctgctgagtggttactttgacaaacttcctgttcggcaagatacctgaaatgctttgtatctgttgattttcagtctttgtaccatgaaagctatcaataatctc

SEQ ID NO: 5386 - DNA, 550 bp, Triticum aestivum
  Clone ID: uC-tsro9316074h12b1
tttatgcgtccgcccacgcgtccggtctacttcggcgcgtggtgtgcgctgaacgtgatcttcaacatatacaataagaaggtgctgaatgcgttcccgtacccgtggctcacgtcgaccttgtccctggcagccggctccgccatcatgctcgtgtcctgggccaccaggatcgccgaggcgccccagacggacctcgatttctggaaggctctctctccggtggcgattgcgcacacgatcgggcacgtggcggcgacggtgagcatggcgaaggtggccgtgtcgttcacgcacatcatcaagagcgcggagccggcgttcagcgttttcgtctcaaggttcttcctcggcgagcacttcccgttgccggtctacttctccctcctcccgatcataggtggatgcgctctcgcggccgtcaccgagctcaatttcaacatgattggattcatgggggcgatgatctccaacctggcgttcgtgttccggaacatattctccaagaggggatgaagggcaagtcgtgagcgggatgactactatgcct

SEQ ID NO: 5387 - DNA, 383 bp, Triticum aestivum
  Clone ID: uC-tsro9316075a02b1
cttacgcgtccggggtgctacagtgggtgatgcggctaagaagattttcatgttgggcctgttcacaagagggctaccccttcgtatcgtcatgattggtactcttaccggtgctcagtggggaatctatgacgcgttcaaggtcatggttggactcccgaccaccggcggtgctccaccagttgctccggtggaggaagcagcgaaagccagcgcttgattgatttttcctactacgacgatgacgatgtattccgggatgatgtggtattggtggatggggactgtatcaattacttgagtttagcaaccgaaatcatttgttattgtagcagatggttattgtgtcatcattttgatgagaggaactcattaagcaggcg

SEQ ID NO: 5388 - DNA, 352 bp, Triticum aestivum
  Clone ID: uC-tsro9316075a03b1
acggtttgcgtttcctgcgacgttcgagctcccgcggcgcgggcacacttagtctccggccatggggttccccctggtgtgctactgcgttgccatccccaagccggtcatcgacttctgcaagctcgtcgccgccgtcagggacgccttcctcctgctgctctccctcgtcggcctctgccgctccccgcgccgctccgtggacgacgccccgctgcccgaggaggtcaaggagcgcctcccggccgtcgagttctccttgctggcgcgtacggcaaagcatgggtgccacgactgggactacgacgtcgccgccgcggcggtcacgtgcatcgtgtgcctggagaggctg

SEQ ID NO: 5389 - DNA, 504 bp, Triticum aestivum
  unsure (1)..(504): unsure at all n locations
  Clone ID: uC-tsro9316075a04b1
cttacccatacagaaatctcaagcttagcacaggaccagggcgtttgagcagaccttggtgattatcaagcctgatggcgtccagaggggcctgatcggtgaggtcatcatccgcttcgagaagaagggcttctacctcaaaggtgcgaagctccagaacgtggagacgtagttcgccgagcagcactacgccgatctgtcctccaagcccttcttagctgggctcgtggagtacatcgtctccggccctgtcgtcgctatggtctgggagggcaagagcgtcgtctccactggacgcaagataattggcgccaccaaccccctggcctctgagcccggcaccatccgtggtgactttgccgcctacatcggcaggaacgtcatccatggaagcgacttanttgagagtgcgaggaaggagatcgccctgtggttccctgagggcattgcagagtggaggagcagccagcacacttgatctatgaggcctaagatgtgtcatga

SEQ ID NO: 5390 - DNA, 280 bp, Triticum aestivum
  Clone ID: uC-tsro9316075a06b1
gatccccacgcacagggcgaacccaatacccggtttgacccacacctacaatctggcgtctccactaaagatactgcccgtaatgatatgatactatagtcaacaccttatgcttctaaacatctgaccctgcataaattgttaggcacacacaggcaataccactgcacatggatcaccttgccaatatttcctacagaatcgaagctgagtgtctcgaacattccttcttacgttagcatgtatagcaacttatcccctagcaactattttgcaaaac

SEQ ID NO: 5391 - DNA, 225 bp, Triticum aestivum
  Clone ID: uC-tsro9316075a09b1
tttcggttacgcgtgcggtagttgtagctggggggggggttacctttagttacccggcgggattggcatccttcatacagtactgtcaggcagatcaccaagccaagaaacggaccaacagcttgctaatcggcgccgatactggtcatgggcgccgtgagggtcatcaaggcgcccggcggacagaatcccaggctggcaatccacgctccggggaggggggcc

SEQ ID NO: 5392 - DNA, 261 bp, Triticum aestivum
  Clone ID: uC-tsro9316075a10b1
cttacgcgtggggccaagatccaggagggggagggcatctttccggaccaggagcgcctgatctttgccatacagcacttcgaggatggccgcaccctcgcggaatacaacatccagaaggagatcaccctccactcggtgctcaggctccgtgggggcatgcaaatatctgtgaagaccctcaccgagaatagcattacactctaggtggaggcatctcacaccatccacaacgctaatgcgaagatccaatacaaggag

SEQ ID NO: 5393 - DNA, 508 bp, Triticum aestivum
  unsure (1)..(508): unsure at all n locations
  Clone ID: uC-tsro9316075b05b1
attcacattgaattgttcacaaggtcctggtttaaggggggaagaaatgaaaatttgttcttctaagcaaatgctagcaaaagatgggcaacctcagactagcctgaagcgcaagtgcgtcacttcctccttaccaaattataatgagcagaatgcaaatgatgaggaaaagagtaatcaagttctagagcctctcaacaagaagagggtaccagagaaaggggaagtggagcaagatgacagtaaggtcaaactcgccaacggtgaaagcaatcggtaaatactcgtttttcttgtgattctcggttttatactagtcttgtattctgatggtgttctatttggttcaccttgccttgaaggcctgcccagcagtcgatgaacgacatgctcctcaagatccgtgccgtgaaggatagtttgagggacaaacctggcaagtttgaggagtcgatgataaacgccgcgatcctctacgtncatgccgtgaaggatagcttcagggaca

SEQ ID NO: 5394 - DNA, 451 bp, Triticum aestivum
  Clone ID: uC-tsro9316075b07b1
tttcgtttacgcgtccggctttatccaaacaagcaatcagtatcactattggcgggtgtatctccccaatttccacctatggtggcacacactatgacatcgatattttagtttggaaggaccgagcggggggcaattggtggctgcaagtgggaggtgattatgtggggtattggccatcatccatcttatcctacttggaagatagtgcttctaccatcatgtggggcggtgaggtattttcacccgatgccggacaaacttccacacatatgggtagtggacacttccccaatgaagggttcggcaaggcgagtcacatcaagaacattcaagtggtagattcgaccaactgtctcaatcccccaagtaatgcgggcttgataaccgagcagaacaactattataatgtgcaaagtgacacctatggcgactggagcacttacatcta

SEQ ID NO: 5395 - DNA, 247 bp, Triticum aestivum
  Clone ID: uC-tsro9316075b08b1
ttcgatctgcactactcacggtaagagccacatccaccacaagtgagtgaccatcggagcaaggaaagaccaggagagatggcaatgaggccgcttgtcgtcctggccctggccgtggcgctcgccggcgtggcactgggagggggcgcgactgaaggggccggctagtgcggtaggtcctccaccgaccggatggccctgcgcatggccccgtgcatatcggctgcggacgagccggactcggctc

SEQ ID NO: 5396 - DNA, 247 bp, Triticum aestivum
  Clone ID: uC-tsro9316075b09b1
tttcggttgcagctgcagctgtggaggctagagagggggataacacactctggaggctgcgttttcactagcccgcgtgtagggatcgacaggaagatgggacacatcctgctcctgtgcgcatttctactcggcctgatcaatgaggacagcctcacggaggtaaccgaatggatgggccgatgcacatcacaccggggatgaaaccccagcccgcgcggcctcagaactggcacctgggtggcgt

SEQ ID NO: 5397 - DNA, 302 bp, Triticum aestivum
  Clone ID: uC-tsro9316075b10b1
tttcgattatccccgataccaaagcccatcttcttgtggttgaaatctttttgggttcacagatttggaggatgtcttgcaactgtggatccggttgcagctgcggctcagactgcaagtgcgggaagatgtaccctgatctgacagagcagggcagcgccgccgcccaggtcgccgccgtggtcgtgctcggcgtggctcctgagaacaaggcggggcagttcgaggtggccgacgggcagtccggcgagggctgcagctgcagcgacaactgcaagtgcaacccctgcaactgttaagct

SEQ ID NO: 5398 - DNA, 70 bp, Triticum aestivum
  Clone ID: uC-tsro9316075b11b1
gttagcagtccatcaaacaggcgatgaggaatggacttctacatgcattcgacgtgaacaacctacacgt

SEQ ID NO: 5399 - DNA, 340 bp, Triticum aestivum
  Clone ID: uC-tsro9316075b12b1
tttctcttgaaagggggatccctgctggtcttggtgttttgggaacaaaaagggttccataccccagtagatcgttcgaattagcccactgttctcgttgcaggattgattggcttcagagagatggaattcttatgcttgaactggacagattactcaggcctggaggttattttgcttattcatctcctgaggcatacgcacaggatgaggaggaccgtagaatctggaaagaaatgagttcccttgcagaaaggatgtgctggaaaattgcagagaaaaaaaaccagacagttattttgggtcaagcctctgaacaatgattgctacaggagccggc

SEQ ID NO: 5400 - DNA, 424 bp, Triticum aestivum
  Clone ID: uC-tsro9316075c01b1
ctttagcttacgaaggcggcgccgcggcgacctcatctccggccaagggaaatgactaccgttccggggtctctggtgtgggagctcgtgaagaaaaacaactgcttcttgatcaagcagttcggcaacagcaacgccaaggtgcagttcagcaaggagccaaacaacctctacaatgtccactcctacaagttctctggcttggcgaacagcaagaccgtggcggtccagccatcagcgggagaggacaaggctgtcgtcctgtccacgaccaagaccaagaagcagaacacccctgccaagctccagcacaagactctgatgcgcaaggagttccgcaagatggccaagtccgtcaagaaccaggtctgcgacaactactacaggcctgatctgaccaagccggcccttgcaaggctgagtg

SEQ ID NO: 5401 - DNA, 557 bp, Triticum aestivum
  unsure (1)..(557): unsure at all n locations
  Clone ID: uC-tsro9316075c02b1
acggtcagcttctaacgagtgccccgcgagcacgacctgctgctgcatctacgagtacggcaaggagtgcttcgcctggggctgttgcccactcgagggtgctacctgctgcgatgatcactacagctgctgccctcataactatcccatctgcaacacccagcagggaacctgccttgcggccaaggacagtccactgtcagtgaaggctcagaggcgtaccctggccaagcctatcggtgctttctctgtcattgcaactgacggcaagaaaagtagcgcgtaaacatttgcatcaccacaatcctacagccaacggccatggtggttaacttctgcaaatgatcacctggtgacccacgatagaaggcgcagcatggcaatagctgtgctctcaagtatcttctttatagtagatgctnctgtacataatccctaaatcgggttcgggtggtcacagaccgncacanttgcttttgcatatgtatatgtaaattcagcacattccaagcagtttggggctgctatttgtatatggaattcatcaagaacaagat

SEQ ID NO: 5402 - DNA, 471 bp, Triticum aestivum
  unsure (1)..(471): unsure at all n locations
  Clone ID: uC-tsro9316075c03b1
cttagcttcagatcagctacttgatctgtgcttactgagcactcggcagcaatggctggcaaggcatcgatcgcgctgttcctcgccgtgaacctggtcgtcttctccgtggccagcgcgtgcgggggaaactgcccgaccccgtcgacgcccaccccatcgacgcccaccccgaccccgggctcgctcggcaggtgcccacgcgacgcgctgaaggtgggcgcgtgcgtcaacgcgctgaacctggtcaaggtccaggtgggcaggccgaccgcgttgccgtgctgcccgctggtggatgggctcgtcgacgtcgaggcggccctgtgcctctgcacggtgatcaatgccagcgtcctcagcatcgtcaagctcaacctccccatcaacctcagcctcatcctcaaccactgcggcaagaaagcngcccaccggtttatgtgctaagcgatctagcaaggtgtgacatgc

SEQ ID NO: 5403 - DNA, 507 bp, Triticum aestivum
  unsure (1)..(507): unsure at all n locations
  Clone ID: uC-tsro9316075c05b1
acgcttacgctctcgcccacgcgtccgcatcttcttactgggggcaacttgctgctcctcccggatccgaagctcagtcccgtggccacgcagattatctccggaaaatcatagtgcagggtcgatcctccaagtcaaccaaagttgtagatatcatgaccgaagagaacaagctgatcacggtgaaacctgaaaccagagtcctgaaagcaatgcagctgatgacagacaagcgtatcaggcacatcccggagatcagcggcaccgagatgatggggatggtctccatcggcgacgtggtgcgcgcggtggtcagcgagcacaaggaggagctgaaccggctcaacgcctacatccagggtgggtactaggaccccgccgttttgcagggcgtccctttgagtgaactctacaataacgaccagngtgatgatgacgaaataggccgtgtttcttcgcggacaatggccgttgaactngaatntgcgtgtgtgatgttttcctgct

SEQ ID NO: 5404 - DNA, 186 bp, Triticum aestivum
  Clone ID: uC-tsro9316075c06b1
acgcttacgcttccgatgtggtgtgctgatcttccggagaaggggaaccatgcactctttgtggatttctcaacttacagcatggttactctatccaaaaaacacacaaaatctaaaaagcataaaagaaaaaaaaaaaaaaaaaaaaaaacaaaaaaacaaaaaaaaaaaaaaaaaaacaaaagc

SEQ ID NO: 5405 - DNA, 389 bp, Triticum aestivum
  Clone ID: uC-tsro9316075c07b1
tttaattgctctgcaaaatcgttggcataaaggcagagggagaagcacgggcacaaaggaaggcccaggtgcgccgagttcagaatcttgttgagacctttgacaagctgaaggcaaggaatgccaacccttctcagtgatagcgccaaatctgtttcggtgtctaccgagtgggagacgtttgaaaactgtgtgggcagcttgaatgctccaccgggccgattttcttctgacgcaaaatgacactgactgggagcagttcgactagcatgagaatgagcattctcgatgtattattatgtaactcgcgaccaatgctactgagtacatgtatgaagaatggtgcctcttgccactacactgcctgtgagattgtcgccagatgatgc

SEQ ID NO: 5406 - DNA, 424 bp, Triticum aestivum
  Clone ID: uC-tsro9316075c08b1
gtctgtgcgaagaggactgactagaagcggtgcctctgatggtctggtcttttgtctacggcggtgcatatctgagtatctgacgaccgcccgccgccggcgatgggctgctggtgggagcgcctcgtgctgccggtgcgaagggcgtggctcggcgtcgcctcccgcttcggtgtgcgccagtccggtaaggccgcccgccgctagctcaccgttcagccacatgctgcagaggcttccctcgtcggtccacctagtcctgggctgactccggcgtcgctggttgcttttttggttgcagggctgtggaggctccggcaggaggtgagcacgtgcgagtacgaggacgtgcgcgtgatgtgggagatgctgagccgaccgcgtcggcgccgccggcgccggcgaccaggcgccacagcaggtt

SEQ ID NO: 5407 - DNA, 268 bp, Triticum aestivum
  Clone ID: uC-tsro9316075c10b1
gtaaatattgctcattgcagaaaaaaaacaagggagaacttagaaagaaacaaggggaaacaaaacacaaaccaaaaaacacacaaacaacaggcggcagcccagcccgccgggcccatcctcccaggcagcccgagctgcagaccccaggcccccagaccgccccccgaccaccgcggggcccgcaaccagacccctaaatgcaatgcacccgcccacagacaaccccatcacgcacgtcccagccctccccggccccaccttgatg

SEQ ID NO: 5408 - DNA, 298 bp, Triticum aestivum
  Clone ID: uC-tsro9316075d01b1
ttcacgctttcgcccacgcgtccgactagttctagatcgctagcagcgccagccgccgccggcgggtgaccgtgtcattcgagtatagctatagcacacgaacttggtgcgatgactgatgaggtgtacatatgattcctgtaatttgttttttttttcggtggcgagttttctttcctctgcccctgctcgcgtattttaagagcagggatgggcatgacataatgcaaaattgtacataaaaaaaaaaaaaaaaaaaaaaaaaaaaaaaaaaaaaaaaaaaaaaaaataaataaaa

SEQ ID NO: 5409 - DNA, 241 bp, Triticum aestivum
  Clone ID: uC-tsro9316075d03b1
acgctttcctttcgacccctgcttgtctttggattagatctgtttcactgataccaattttgtgcttgcctaagcgaatatcaacaagtattttatctttctagtcttgtcttgaacagaaatcatgggagcaatggaactgcattttctgtttaaaaaaaaaaaaacagaataaaaaagggaaggatgaaaaaaaacaaaaacagaaggataagagcgctgaacaacaacaatataaaaa

SEQ ID NO: 5410 - DNA, 462 bp, Triticum aestivum
  unsure (1)..(462): unsure at all n locations
  Clone ID: uC-tsro9316075d05b1
acggtttgcattctgtttgctgtggattgcagccgtgttccagtcgcttctgtacgaggtggcggggcgaacgatcaacccggtgagcggcgcggtggggctgctctgggcgggaagctggcacctgtgcgaggcggcggtccagaccgtgctccggggcggcgccatccgcccgctgccggagctcgcgggcggcgtcccggaaggcggagtcggtggaagcgatctgttcgcctcctcttccaggcgggccgtggtggggtgctccacgtattcggcggcgaagcgggtgacgccgaggaagacatgggcgccggaggcagcgtcccaccaccaggagccctcgtgcgacctgnggcttttcctcacccccggatcggccgcggcggcagagggggagcgactggcgaggcgggcccgcacgccgtcgatgagctccgacggctccgtgaccactagcgc

SEQ ID NO: 5411 - DNA, 421 bp, Triticum aestivum
  unsure (1)..(421): unsure at all n locations
  Clone ID: uC-tsro9316075d06b1
gttaaggtttctcgcaaacccttcgatgaagcaggccgtgctgttcccccagccagctcaagcaggagatgcattccatcagatactgaacgggctcgctcgcaagcttccgcatggcgaagatgtcttcttgaagcccggccaggtccgtctgaactggaccgctggcccggtgggtgacctgaagccgtggtagcatctctcgcatcgcggtttggagatgtataaaaacctttttgaaaataaacattttcagacctgatatactttgcgcctttataccaccatggttgcacagtgctgaccataagtcaaatgtacatctttttcatcttctttgctgatagcttgtncaaaaaaaacaaaaaagacaattaccacaaattaaaaaaaaaaaaaaaaagacaaaccaaaataaata

SEQ ID NO: 5412 - DNA, 201 bp, Triticum aestivum
  Clone ID: uC-tsro9316075d07b1
ttacgtttaaacttgttgttcctacacatatggtttcctgatttgaaccaagcttattttaaatttcgagggtatgtgcatgtgtcgtacggatgtgattatttggaataatacgattttaatgaaaaaaaaagaaaaaaaaaaaaaaaaaaaaaaataaaaaaaaaaaaaaaaaaaaaaaaaaaaaaataaaaaataaaa

SEQ ID NO: 5413 - DNA, 484 bp, Triticum aestivum
  Clone ID: uC-tsro9316075d08b1
tggcactccctaagctcctcctgcttctcttcgtcggcggtgcactgtcactcaccttcttctccggttcagaggccggcgaggtgggcgtgtgctacgggatgatgggcgacaacctgccgcagccgccggcggtggtgcagctgctgaagcagcacggcatcacgatggtgaggctgtacgacgccgacgccggagggctgcgcgcgctggccaacaccggcatcaaggtggagggtgtccctgcccaacgacaacataccggacgcggcgagcagcatgtcgtacgcggtgcggtgggtgcagagcaacgtgcaggcgtacccgggcacgtggatcgacagcgtggccgtcgggaacgaggtgttccaccaggcgccatggctgacccaccagctcctcccggccatgaagaacatccaggcggcgctggccggggcccgcctgggcgacgcggtgaaggtggtgacgccgatcgcgctgg

SEQ ID NO: 5414 - DNA, 455 bp, Triticum aestivum
  Clone ID: uC-tsro9316075d09b1
tttcgtttcagaagagaggacaagagaagaggatccattgaacgagccggcggctatggcgtggcgggcgagcctatcccggaacgtgaaggagatccgcttcctcttgtgccagtcttcccctgccagcggccccgcccgggagttcgtgaagaagaactacagtgacatcaagacccgcataccccaccctccccgtcctcatccgcgagtgctcccgcgtccagcctcagctctgggcgcgctgccatatgtgcgtggagaggcacgtgcgcttggacgggttgacagaagcccagatcgacaagaagctggaggagctagccaaggcaggagctgcgaaaagctaaaaactgtcaggctagccaagttatctcgcgttaaagcttcacaaataacagaacagttctcatgaggtgatacgttatcttgatttcagtaccatgactgcactc

SEQ ID NO: 5415 - DNA, 392 bp, Triticum aestivum
  unsure (1)..(392): unsure at all n locations
  Clone ID: uC-tsro9316075d10b1
tttcgctcgacccggcgaccaaccccgcgatccggcgagcccgatatggggttcctggcgacctccgccatcttcttcctcgccggcttcatcgcatgcctcttctcgctcctctgctgcaaccgcggcgcctccaccaacatattccatttgaccctggtcattaccgctacagtttgttgttggatgatgtgggcaatcgtgtacctcgcccagatgaagcctttgatcaaccccatcctgagcggcgagtgagccccgatctgccccgaagacaacttaagatccactgttgatgtatcattattcggttgagaacctctattcattttgttgccataactgaaataaacnagaaaaaatccccccttcatagccggcaaaaaacaatg

SEQ ID NO: 5416 - DNA, 458 bp, Triticum aestivum
  unsure (1)..(458): unsure at all n locations
  Clone ID: uC-tsro9316075d11b1
ctcggtcgtggctgctgctggcgtgggtgagcggggtggctggcaacctttcgctgctggggtcggcggcgaacctgatcgtgtgcgagcaggcgcgccgggcgccgcgcaacgcctacgagctcaccttctggaaccacctcatcttcggcgtgccctccaccctcatcgtcaccggcgtcggcatccccctcatcggaaagatgtagccaccctatccatctaccaacatcgccctcgccaccgtcgaccgacgatccaactatatgcaatatacactttccttatatataccagcagcctgtacatatgtacgtgcatacacaagcgcatatacgggcactntgtacgtacgtacgtataggtcatagcctccgttttcgtatgtgtgttaattgctgtgtgcgttgctgattaattagtatatgtatgtatgtaatggtgagacgagacggaga

SEQ ID NO: 5417 - DNA, 70 bp, Triticum aestivum
  Clone ID: uC-tsro9316075e01b1
agcgcccgccggagaacacggaagaccaatacaccgagcggagacacacaacgcaggcccagaaaaaccc

SEQ ID NO: 5418 - DNA, 459 bp, Triticum aestivum
  Clone ID: uC-tsro9316075e02b1
cttacgctctcgaggacgcgagggccgacacggggggggttggattgggactgccttgtggataacaagactgctgccagcaacaaagagaactcctgcaaaggggagaggcaagcacagtgggctaccgtacagataacactgcatgagcttcaagccccagagccagtctcccacacactggagaacgacaagagcagctaccgagagctctctgagatcgatgagcaggcacagagacctagctgtgatggccaggctgctggaggtaaacacactcaatggccacgtttaatccgaggtggagctcaaggggcccgacatcaacaccatgaaaccagagctacacccagtgaggaaatgggacattgaaccaacaaacatgacatacgtgtcggagctagaccggaatggcactccgcgtgaagattgttgcggcgaatgaaagaaacaaacatg

SEQ ID NO: 5419 - DNA, 275 bp, Triticum aestivum
  Clone ID: uC-tsro9316075e04b1
acctacgcttgtcctttaatgcttcacccgccggatcttcaagtggtcgggtacactaggcgcagaggcgcttattcctgcgcttaagacagcagacttcatagaatgtgaacctgctgctcgagaggcaggactatgcatttcgatatagagcgtgcgctaactgctaggtgggaccatctccggcaaagcactacactgaagctactacaggtgcttcgacagctctctatacatactcagcatcttatggttacctctgacctactgcaggt

SEQ ID NO: 5420 - DNA, 179 bp, Triticum aestivum
  Clone ID: uC-tsro9316075e05b1
acggttatgttttgaggtcctgaaatgaagttggtttgttcatgaatctccaaggactgttagtgtgaccatccgtttctagtatgtaatcttcagggctatattaaccaacaagtctatgcattatccagtttaaaacttccaaaaaaaaaaaaaaaaaaggacgccaaaaaagcacc

SEQ ID NO: 5421 - DNA, 505 bp, Triticum aestivum
  Clone ID: uC-tsro9316075e07b1
gtatgatggaggcaccggccgctttgggtgcgggacagatctgttcccaattgatcatgggctgtgcttgccggagaacttggaggacccttatttcgagtggatacactgggcgcaggcgtcaattccgttctccgaggaagagctcgagtacataagcaaacttgatccgatgagggatgctgcaatgctgcggggagaactgcccatgatacgggaggcttgcctccgagtccttatcctgtgcacaatcttcctcaaggaagctgctgctttcgggctttgcttggcagagataggggagatgatgaccagggaattcagaggaatggaggaggaacccagcaaactggaggttgtgtgcatggaagccaggaggaaagtagacgaatgggaacccttctcccctagtgttgaagaggacatggatttccagttctcgatggatgtgttaggagggtacagtgatgtgattcgatcgccaagattcaattgctcgggcctg

SEQ ID NO: 5422 - DNA, 532 bp, Triticum aestivum
  Clone ID: uC-tsro9316075e08b1
tgttgttatcagatcagctctgaacatcgacaagtctgaagcagatctcaccaatggaaccatgacagttagcaggaaaagtttagatacctcctctggcttcttgtcatgcattggcaatgttcttgggtataaggacgatggaattgaagtacaatgggctagtggtgtgatatccaaggcgcagcattttgaaataattggattagaaagacttctagatagttcactaggatctgtgaatgaggtgcatacttctgtcgacgacgaggctgagcaggaaacaattcgccatgagagtactaagaatgccctggaagagtctggtgaagactgcactggttcattgcgcaatgctttctacttctccaaaacagcttttaattttctgacgaatgtggcttctagtttctctggtgctcatgattctacatcatctagctcaattactgcagttcctcagtatcaaattgtgaagtcagcagatctacattcgtctgcagaagaaatttcgttgtggagttggtgatgc

SEQ ID NO: 5423 - DNA, 555 bp, Triticum aestivum
  Clone ID: uC-tsro9316075e11b1
tttcgtttatcgatagcacagcacagcacagcagaagcaactcgtagccagaggacatacctgatggagaacaacaggagcaaccagcaggctcctccaccaccgccagggtacccgacggcggctgcggagcaggaccaggtcggcgggaagaaggggcgccgggcgagcaccaaatccaggggcgagaagggcttcatcgagggatgcctcgccgcactgtgctgctgctggatctgcgagatgtgctgcgactaaccggccggccggcgaggccgctgctggctggcacaagacctcggtgctatagtacccacgaggaggaggagcgtatgcgtatacagagagagaattgttcttaatttcagtgcccgttgttttaggttctatacagtatatactcctaagttgatgcatgcatgatcagtaccagtgtgagatatcgattcatgtatccgtgttgggtgcgatattcatgcacctcgtcgtgtgtaattaatcggtgtgtacgagacccacgaatatacttacaagtactgtctactgtgattgagt

SEQ ID NO: 5424 - DNA, 205 bp, Triticum aestivum
  Clone ID: uC-tsro9316075f01b1
acggttggttttacattgtagcctagctagtgtaaggcaattgcaaaggatggcgcgagttggttgtgcactccgaacaaaattatcaaaaaaataatcgccaaaaaaaaaacaactgaagacaagtacgatgaaaagcaccaagaaaatatactggaaagaattaactgagacaaacgatggatttaacgtaaaaaacaataac

SEQ ID NO: 5425 - DNA, 457 bp, Triticum aestivum
  Clone ID: uC-tsro9316075f02b1
ttacgcttccggcccccaatcgagccgagctcctcgcgattcccaatccccgcacgcctcctcgccctcctcctccggccccgccgccgccgccgcctcgccacaggctcacggttattcaagatggaacacaaggaggcgggttgccagcagccggagggcccaatcctatgcgttaataactgtggcttctttggcagtgcggcgaccatgaacatgtgctccaagtgccacaaggagatggtcatgaagcaggaacaggccaagctggctgcctcctccttcgatagcatcgtcaacggtggcgacggtgggaaagcacctgttgttgcggctgtagccgcgagcgcagaggtggtggttgctcaagttgacgtgaaggcgctcgttgtgcaaactgctgctgatgttgcaagcaccagcgaagctgttgccgtgagccccaagaggaggaggg

SEQ ID NO: 5426 - DNA, 438 bp, Triticum aestivum
  Clone ID: uC-tsro9316075f03b1
acggcttgctttccgcgacgtcactcttgcaggagcgccaaagcttgccgcaacgcccgagcttattgttggcaccgtcacagcagaaccagagcttccagtccaaggagtcattgtccgagcagcaacggagctcgcagtccacgatgctgccgttacaacaccaccaggacttgcggcaacatcagcagcagctgaggctccagttgagggaggagttgtcgcatcaggaacagaactcgcagtccgcggtgcatcgccgcagcagcgccggtgcttgaggcggcaacacccagattctcagcccgcgaacttacatcagcaccagagttcgcagcccgcactatcaccgtggcagcagcacaagagctctcagccagcgatgtcgctgtctcagcggcaccagagcttgcagagctcgcagtatgtgctaccacc

SEQ ID NO: 5427 - DNA, 217 bp, Triticum aestivum
  Clone ID: uC-tsro9316075f06b1
acgtttcgttccagcgatcttcgaggggctccagggggagggtgcactcacgcctgcttgggttattcacgtgctggtgacctaacagttgtacagcatcaagggcacggccgaaatcgagaacctcggagagctggacagctggctcgagatccgtccttgcgctatgttgctcaaagtcgtaacctggcactccgacaggggcttacgcaactag

SEQ ID NO: 5428 - DNA, 402 bp, Triticum aestivum
  Clone ID: uC-tsro9316075f07b1
gtctaacacagcaaatcatactagacagtgtatttttccacataatatatctggtccggactgtaattgggcgtcttgcaactgcagatcaggctgcaagaatgcagatcaaactgcaagagcggacagatgtaccctgatctgacagagcagggcagcgccaacgactaggtcgacaacgaggtcgtcctcggcatggcgcctgggatcaaggtttgacagaaccaggtgtccggcgggcagttcggcgaggactgcatctgctgtgacaactgcaagtgcaacccctgcgactgttaatgcaacatgcactcaaacggaaaaccgtgtgatggtccagagagtatacgtgaataacgagcgtctgatctgatggagtcgagcaagtgtgagagggcctgt

SEQ ID NO: 5429 - DNA, 484 bp, Triticum aestivum
  Clone ID: uC-tsro9316075f08b1
ttttaaccgcaccttggccgaccacaacatctggaaggagtccaccattctccttgtcctccgcccgtgtagtacaataggaggtacgatgcccatcttcgtgaagacactattaggaaagacccacactcttgaggttgggagcttggacaccatcgagagtgtcaaggtgaagatctatgagaaggagggcactcgcccgatacagcagcgcctcatctttgctggcaagcagctggaggacgggcgcacgctggcagactacaacattcagagggagtctacccttcatttggtgctctgcctttgtggttgctgagatgcatggccattcaacaaccagttttattttgctgcagtcctccttgcagtagttgtgtgttgccaataaaactatcattctagtactactctgaattaagaatccctggctctgccttggcatcatttgattgagaaatacagcgcgggtgcagcttctttc

SEQ ID NO: 5430 - DNA, 58 bp, Triticum aestivum
  Clone ID: uC-tsro9316075f10b1
tcgtttagcttcaaaaaaaaaaaaaaaaaaagaaaagttaaaataaaaaaaaaattag

SEQ ID NO: 5431 - DNA, 296 bp, Triticum aestivum
  Clone ID: uC-tsro9316075f11b1
aaagctggtgcgccggccggtaccgaaccccaattcccacccacacccacgctttcgatcaaacccccagcgcgcggccccagggggagattgaaaccaacccggggttgggaacacacaagccgacgacaggacaccctagacaacaatcaagtgactgccgaaaagacaacaccatgactggcatggcaagtgtgtcacaaatgctagcctgcccgccacacatcaaagccggcaccagcgcagcgcggtcgccaagagaggccgcacagcagcgacctgaccaacagtggcat

SEQ ID NO: 5432 - DNA, 507 bp, Triticum aestivum
  Clone ID: uC-tsro9316075f12b1
ttagctgcatcatttctggatcttcagggattgggtacaatctgtacagattttattatttctgagctttggacatcaaactttttacaatatcagttgtttgcggaaagccaagactatggtagtcatggagagcgtgtcagaaatgcttgctggggttatctttgtcaaagtgctacactggaactacgagaggtgcttccaaaactttcttcacaaactttgcatgctctccttacgtctgacgaactgtgggtacctaatgaggagaaacggtttgaactagcattatttgcactactggcaaaggtcactgtttctgatgtagaagttggtggaaacgaaaatttggaccttatggcaagctcatcaactgttgattgttccatgggaaagggaaagagtctgatgaatgaaactgctgagaagcagctaatggaatctgaactacaagagttgaagttgcatgataacatgcagaataaagctgccaatacattattgatg

SEQ ID NO: 5433 - DNA, 534 bp, Triticum aestivum
  unsure (1)..(534): unsure at all n locations
  Clone ID: uC-tsro9316075g01b1
acggtttcgtttaggcgcatgacgggatgacggagctggcgatgagagacgagctgtacaagatgctgcccgtgaccatacgcgcggcagtgaatgagaagctgagggagaggctgagaggagggcaggtggacgaggaggccgccgcgacagcgatggacgccgtggacggagtgctgcggtggttggggccaatggcgcatgacacgctgcggtggcaggacgagaggagcatggagcggaagcaacggttcagcatgcagccgcgcgcgccgatggtgcagacgctgcatttcgcggaccgtcggaaggcggacgctgccatcgtcgaggtgctcgttggtctcagcagtatgtgctggtacgacgatcaacggtggcggccggctgactggaacgagtagccggcctggtcaacgacgatgcgcagctcatcatgtgtaaatgtgtagatactgtatacgtgtaggaaagtcatttgtatacatncacaagatcattgatggcacgtgttgttgtgtcaatatatttttc

SEQ ID NO: 5434 - DNA, 513 bp, Triticum aestivum
  Clone ID: uC-tsro9316075g02b1
acgcgtacgctttcgcgcgcctcccctgacccgccgcagcagcggcgccagagcgatcggccgccatgagcggcggtggcgccggcgacacgctggacaagctggtggtgttcctggcgaagcgcgacggcatcgacaagctggtgaagacgtaccagtacgtgtcgaagctggcgcactgggcggcggagacgtctcacccggggctggccgggcgggccaagagctgggagacggcggccgggctgagccgcaaggtgttccggtcggggcggtccctcacgggcttcaacgcgctgcggcggtccccgggggagttcggcgcgctggccgtgctggccaacgccggcgagatggtctacttcttcttcgaccacttcacgtggctgtcccgcgtgggcgtgctggagccctggctggcgcgccgcgccagcttcgtgtcggcgttcggcgagtgcgtcggctacgtcttcttcatcgtcatggacttcatcatgatcaggcgcgggatca

SEQ ID NO: 5435 - DNA, 373 bp, Triticum aestivum
  Clone ID: uC-tsro9316075g03b1
tactaagggaagctggtgcgcgtccggtccggatcgagttcgtgcagacccacgcttacgctacgcgcgcgcgcccgcgaggagggaggcgggctcgccgagacggtagtagctgaagacccaaagccaaacaggaagtatacgttactgagcacaggaggacacactgagggaaagactgtgacaatgagctaggagcaagtcatgacagaggcctcatgtgacagccgagcactcaaggcaagagaacggacgcggacggatcgtcagtggtcgtggtgccgagtcaaactccatggcatgaacaagtcacaggtgcagctgagtccacctcccatgataaactatgaaccaccctgtacaaaatgtcaac

SEQ ID NO: 5436 - DNA, 474 bp, Triticum aestivum
  Clone ID: uC-tsro9316075g05b1
ccacgcttcggtttgaggcaaaaattgcaggaccccgggtacatcatgatctgcgacagaggtgcatcagtggagcgacatgctcggcgcgcccgagggcgcccgtaccttcaagctccccgaccccatgtactacatcggctaggccggttgctgccaccttagattgctcctcggtcctgatccacgagtgaataaactccatgctcttaatcatatgcatgcttcgtcaataatcgcccccccccctcccctccctgttgttgtttggttaatttccattgttgagaacttgagatcaattattatgtacccctccactaatgggccaattttgacccgttggaggaagggatcgtaattggcggaccaccaaacaacggtcgggagagtcaaccaagtgcccacatagaggaacgagaagttgtgcccactgatagtgtacaagtgacgattacgaaattgttcctttgg

SEQ ID NO: 5437 - DNA, 543 bp, Triticum aestivum
  unsure (1)..(543): unsure at all n locations
  Clone ID: uC-tsro9316075g06b1
tgttgagttgaaggcagctggcgcttcatggattcagtgtgatgagcccacccttgttcaggaccttgaatcccaccaattatctgcattctctgcagcttacgcagaacttgagtccgcactttctggattgaacgttcttgttgagacctacttcgctgacgttcccgcagactcgtacaagactcttacatcattgagcagtgtgactgcttatggttttgaccttgaacgtggaaccaagactcttgagcttgtcaagagtggtttccctgctggaaagtacctctttgctggtgtcgcagatggacgcaacatttgggctgatgaccttgctgcatctctcgccactcttcagtctcttgaggctgttgctgggaaggacaagcttgacgtatcgacttcctgctcactcatgcacactgctgtggaccttgtaaatgagaccaagcttgatgatgagattaagtcatggctcgcatttgccgnccaaaaggtcgttgaggtgaacgccctgccaagcattgcttgtcaaaagatgag

SEQ ID NO: 5438 - DNA, 469 bp, Triticum aestivum
  unsure (1)..(469): unsure at all n locations
  Clone ID: uC-tsro9316075g08b1
gttacttgcgcctaccactgaggagtgaggctgccacgcccattcgctagctagctagagacccatagtacaaacaataatagagcaactgagcacaccaggacacagtcggtgaagtactgtgacagtgagctaggttcaggtcatcacaaacgcctcatctccaagccgagcaccctcgccatgagcacggacgcggacgccgtgccggtggccgtggcgccggcgaagcgccctcccatcaacaagtacgccttcgcctgcgccctcctcgcctccatgaactccgtcctcctcggatacgacatctcggtgatgagcggcgcgcagctgttcatgaaggaggacctgaagatcacggacacacagatcgagatcctggccggcatcatcagcatctactcgctgctgggctcgctcatggcggggctcacgtncgactggctgggccggcgctacaccatggtgc

SEQ ID NO: 5439 - DNA, 466 bp, Triticum aestivum
  Clone ID: uC-tsro9316075g09b1
tttcgtttacgcgtgggcggacgcgtgggtggaactgtgcctgttggccgtgttgagactggtgtcatcaagcctggtatggttgttacctttggtcccactggtctgacaactgaggtcaagtccgttgagatgcaccatgagtctctcctggaggcgcttcctggtgacaacgttggcttcaacgtcaagaacgttgccgtgaaggatctgaagcgtgggtttgttgcatccaactccaaggatgaccctgccaaggaggcagccaacttcacctcccaggtcatcatcatgaaccaccctggtcagattggcaacggctacgccccagtgctggactgccacacctcacacattgctgtcaagtttgctgagctggtgaccaagatcgacaggcggtctggtaaggagctggaagcccttgccaagttcctcaagaatggtgatgctggcatagtgaagatga

SEQ ID NO: 5440 - DNA, 439 bp, Triticum aestivum
  unsure (1)..(439): unsure at all n locations
  Clone ID: uC-tsro9316075g10b1
ttctaggctgagcaaggacgacattgagaagatggtccaggatgcagagaagtacaagtctgaggatgaggagcacaagaagaaggttgatgccaagaactccctggagaactacgcctacaacatgaggaacaccatccaggacgagaagattgcctccaagctgcctgctgacgacaagaagaagattgaggatgctgtcgacgccgcgatccagtggcttgacgccaaccagcttggtgaggttgacgagtttgaggacaagatgaaggagctggagggcctctgcaaccccatcatcgccaagatgtaccagggtgccggtgctgacatgcccggaggcatggacgaggacgcgccggctgccagcggcggtgctggccccaagatcgaggaggtcgactaaggtattctctctgatatagngagaaaatacact

SEQ ID NO: 5441 - DNA, 263 bp, Triticum aestivum
  Clone ID: uC-tsro9316075g11b1
gtagattgttgtttcagaagacccatgtaaaattctgatttgtgtatgatctgcatacaggctcaaacaagatgttcaatgtttagttcccgtttttgttctggttatgagttgagattgtacaagctctgtttggtcctgtttgtattgtaatatactgatgtgttaatatagtttgtgccgtttattacccttgtggacttaagcatttccaaaaaaaaaaaaaaaaaaaaaccaaaaaaaaaaaaaaagaaaaaagaaaa

SEQ ID NO: 5442 - DNA, 431 bp, Triticum aestivum
  Clone ID: uC-tsro9316075g12b1
tcggttgataggagctgtagcacacacgatcggggacgatcatagactcgttcaggacgaggttgctgatcggcgtcatggaggcttcaatggctgcgcggccatacatggcagattcctcaatttgatctgaagacggacctgcggaagatggcggcgaccacacaccagtgcctctgacctgattatgccccacaccaggcatgtggctcgactggggcttccacatgtgtccaagattccggctattgatgttaggattacgcgagttggctgggtcgtggcccgggtagctctctatcatcatatcggataggattagtggcatatgttgccaatatgatggattcaggcacattggggtgatactttgaatggccatcgtgaataatcaataaagtggccgtatgcatcttccagatgcagaggcc

SEQ ID NO: 5443 - DNA, 204 bp, Triticum aestivum
  unsure (1)..(204): unsure at all n locations
  Clone ID: uC-tsro9316075h01b1
ctttatcgcgggcggccgcctgccttcgcgccggtgccatgatttattagttgtctctcattatgatgttcccctttttgtgatcagaaacttgacaagttactgtgtgtagaagaacaacatcaccgtggggtctttgtagcgcttttgtagtccaatttttaccggaagggaactttatagtcgttaaacgagccnnanntt

SEQ ID NO: 5444 - DNA, 326 bp, Triticum aestivum
  Clone ID: uC-tsro9316075h02b1
taggtaaagctggtgcgcgtgccggtcccgaatcgccatttcctcccactcccacgtgtccgctttcccgtccgaatcgcctgctgcaggggcgggttcagttacagaccgggcccaagtcccctgcaaaggggcgcctgggagggtgagagccccgtacggcccggaccctgtctccccacgaggcgccgtcaaccagtcaggttgtttgggaatgcagccgaactcgggctgtagactccgtccaaggctaaatacatgccagagaccgatagcgaacaagtaccgcaggagccaacatcttaaaacatgatgctcgcacctac

SEQ ID NO: 5445 - DNA, 257 bp, Triticum aestivum
  Clone ID: uC-tsro9316075h03b1
acgcttatcgcttacgcccacgcgtccgcccacgcaggggcatgtgtccataaggatctccacagggaaaggcatccaagcacactgatctcacaatctgtttgtccgggcacatctaatgagccacacattcatgaacaactggagcgaaacaaaagcctatggtccctttgtgcctgctaagatgcaacagcagcttcaatacaggcttacagggatgcccccgcctacggaaaacatgatgcccccaccggaaa

SEQ ID NO: 5446 - DNA, 469 bp, Triticum aestivum
  Clone ID: uC-tsro9316075h04b1
acgcttacgctttcgagtgactacaaacttttgaagaaactgggagctctaggtgtctttgacgtctacccgtgagacaggcccaaaaatacgtattataatttgtggtttggttcacaagatgtgctctatgggggttgtcttactttgtcaggtacgtttcaaggagaatacaaggtacgagcgagcatacggagtgttatgcatatgggtgtcatgcattcttggtaactttccggtccgtaaaatttccattcggttaagtactaaagcacacggtgtgcttttctgtgtatcatgttcacggttactacaaccagaatgtgatgtttgttgatgtgggtaccatgtaattgtctcatgttaactatcgcttatgatgtctaatatgttgagtttgtgttgaatacatgtatatgttggagtaatccaatggcgtttgataggagttgggtcgttttcccacacc

SEQ ID NO: 5447 - DNA, 356 bp, Triticum aestivum
  Clone ID: uC-tsro9316075h05b1
acgatttctcttcttcaccgtccgcccgtgaaggaaggaggggatcggccatggggaagatgtgctgcagccaggaggaggacgaggcggggttcaacctgctgccgctggtgatggccgacttcgtcatcatgctgctcttcgtcgtctgctcgccgccgccccggcgcaggcgctgcgtcgtcgtaccgtgctactgacctgacctgacctcatggtggccgggtggtgggagcctcgatcggcggcgctgcaggcaggcaagtggctggtgctgtggtaggcgtttgtttggtaggtgtctgaattttctgactgatgcctgttgggcggaagaataaatctaatttctgctg

SEQ ID NO: 5448 - DNA, 535 bp, Triticum aestivum
  Clone ID: uC-tsro9316075h06b1
acggttacgctttcattcagggaacaagccgtcctgctcattgtcacgttctatgggacgagaacaaattcactgctgatgagttgcaaactctaacaaacaacttgtgctacacgtatgctaggtgcacccgctctgtatcaattgtgcccccggcatattatgctcatttggcagccttccgggctcggttttacatggaaccggatacctctgacagtgggtccatggcaagcggtgcccgtggccctacacagggtggacgcaataccaggccgtttgggaacgttgctgtcaggcccctccccgccctgaaagaaaacgtgaagcgggtcatgttttactgttaaggtcggatggtcattgtttacactattatgcaaacctgaagatattcgactgagtttgggtgtgttaaaagtatccgcactgcattggtggcactgggagatctccgccatgcaaaaactttaagtggtgcgcaatgtgaaactctgtaaccgactacctatctgtggtcgtatttgaactaccc

SEQ ID NO: 5449 - DNA, 306 bp, Triticum aestivum
  Clone ID: uC-tsro9316075h07b1
ctgtatcatccgaaaggtgtgctctaggggcggctttatatacggaccgggcccaagatacccaggaaaggggcgcctgggagggtgagagccccgtccggcccggaccctgtcgccccacgaggcgccgacaacaaatcaaaaggggtggaaattctggcggacccaaactttataccccgttcacgcgccaatacaggcttagaaaagggtcccctacatggaccccaagggccaattttttacaacccttttacggggaaacccctggggaaacccaattgaatccccttgcaaaacaccccc

SEQ ID NO: 5450 - DNA, 443 bp, Triticum aestivum
  unsure (1)..(443): unsure at all n locations
  Clone ID: uC-tsro9316075h08b1
cttacgcgtccggtgcacctgtgccacgggcttgtgccaatgggaatgtcccaggacagatgcaacatgtcagaccgccgccgccacctgttggtcaataccctcccatgcagatgcatggacagcctgcctggcctggtcctccacagaatatgcaacaagtaccacctccgatgcaacagcagcttcaatacaggcttccagggatgcccccgccgccgcaaaacatgatgcccccaccgcaaaacatgatgccgccacctcatcacatggccaggccgncgccgacacctaccaatatgcaagctccacctatgtggaggccacccccacccccacaacaaggtggtggaatgccgccacctccaatgtccatgccacctactccaccgncaccttatggttaaaaatacaaatgggtgtcttccatgggttaatttggc

SEQ ID NO: 5451 - DNA, 177 bp, Triticum aestivum
  Clone ID: uC-tsro9316075h09b1
tttcgtgtctggtgatgccatctgtactagtggcccaggacagagtcttgaacggcgaaaagaagaccaagaccatacacgcggaagagaatgagaagctgagggcgaggctgagaggagggcaagtggacaaggaggccgccagagacagagattgacggggggggccgttttctg

SEQ ID NO: 5452 - DNA, 382 bp, Triticum aestivum
  Clone ID: uC-tsro9316075h10b1
ttacggtatctcgccacggcggcggtcaccagggcgggggtcaactagatgcaggcttcgcagctcgccgaggcacgccgcaacgccaccaggctgaggagggaggtcgagcgccatatccgcgccaacgtcgcgctagccgtgccgaccaccagggccaaggtgcatgcggccatggaccgagcgctcgcgctggactgcatctacccgatgccgatgcttcgggacatgcccgagaagatacccaaggccgtcgagcccactcactagcggacgcgccgttccgccttgtaggagcccaacaacttaaagagctacgggcgtgcgtgaggcacatcctgcaacggatgggcccaagatcaccaggacgagatgcgaggca

SEQ ID NO: 5453 - DNA, 485 bp, Triticum aestivum
  Clone ID: uC-tsro9316075h11b1
cttacgcgtccggacacatcgccccaaagtaggtcgaatctaagcgatggcgtctcgtctgcttgcggcggcctcctcctcctcctcgtcttcctcccccctcgctcgcctcatctccagccgccgtatggccggcgccgcagatcaccacggatcgacaaaggtgaacatgtggcaggagcccttgaaccccggcaactggaaggaagagcactttgtgctaaccagcttagcgatgtggggcgctattatatatggtggattgaaggtgtttggcgggaaaaaagaagtgaaaaccgaggcggggtcagcgccagcagcagcaccggcacattaaacttcatccgagctttattttcttaccgcaatctgttttaagtatgttgttgacgataaattgagaccaagtttgtaaggctggcaaggttaaggagctgcgctgcccagccaccatgaataatctgaacgtggtgtaactttcatcc

SEQ ID NO: 5454 - DNA, 62 bp, Triticum aestivum
  Clone ID: uC-tsro9316075h12b1
tttcgcttacgcgtccggaaaaagaaaaaaagaaaaaggtaacaaataaaagagacgaggac

SEQ ID NO: 5455 - DNA, 303 bp, Triticum aestivum
  Clone ID: uC-tsro9316076a02b1
gtttatctttatgatacatgctacaacactggactgtgtgaacattgtacaccatttcccaccctcatagaacagaagcatatatcataaggatgaacacgaacagtttgaaataaatgtgctctcatgtttggagaagttgttcatgtatagcagctgctacgaaaatttgtgcatgtatagcaactgcttggaagtcgtaatgtacaatttgtcatttgcccgttccaaaaaacattcggtactgaaaaaaagaaaaagaaaaaaaaaagacaaatgaaaaaaataaggaacacaagaaag

SEQ ID NO: 5456 - DNA, 324 bp, Triticum aestivum
  Clone ID: uC-tsro9316076a04b1
ggcctacgcttcgcgtctcgacaacattcaggtcgaccatgcgaagggtgcaactgagacctacaatgtgccttgtcagaacgttcgcagaggacgaaagggtgtgatggctacccgcgccaccaggctgctcctggcacttgtcggggtctacgctggactccgctccgactgccggcaaggcatcactgacgcttccggcgatgctatattggagcctgtgctcgtcgcgacacctgagcggtgtctgcctgcgccatgatctgaagaaagcacaagagtaagcgtcgggctgtctatacgtactcgaggttatgttcctgc

SEQ ID NO: 5457 - DNA, 397 bp, Triticum aestivum
  Clone ID: uC-tsro9316076a05b1
cacccgtctgaatttggtcttcggaaggcacttccagatggacagggtacaagtaaagtgacgtccgtgaagttcgcagctagagcaaagtatgtcggtagagggatcctggaccaccaccgggacgggtcacgactacctggagatgagcaactggaggaggcaaaattagagtcagcggggcaatgagtagatggtacatatctccgattatgctcaggatgcatgaaccattttgacgatggtagtccacgtaaccaaggatacgcttgaaagaggaatatgcatgcccctgaactgaagcaggccggcggtccaagtggtccatcaaacctgtggggcgagccacatgtttttatgtaattcgacgacgtttgcactcgacgaaatatctatc

SEQ ID NO: 5458 - DNA, 418 bp, Triticum aestivum
  Clone ID: uC-tsro9316076a08b1
ttctcctcgcgtccggcctacgcatccagagctgcaagccctatgtgaggcgaggcgtggtgggtgaggccatggatcccgattcggtctcgaaggcgttcgtgcagcactactaccacacgttcgactccaaccgcgccgcgctggtggggctgtaccaggacggctccatgctcaccttcgagggcgagaagttcggcgggcccgccgtcatcgtcggcaagctcggatctctctccttcagcagtgccagcacaagatcgacaccgtcgactgccagccctcggggccccagggcggcgtactagtcttcgtctccggcaccatcaccaccggcccaggcgagcaccccctcaagttcttacagatgttccatctgctgccagctggagggagcttctacgtgcagaacgacatg

SEQ ID NO: 5459 - DNA, 385 bp, Triticum aestivum
  Clone ID: uC-tsro9316076a09b1
tttccctcgcgtccgcgcacccgcacagcccatgggcggcctcgctggagaagagagaagatggtgagagatggaggcggcggcggcggcggccggcgtgcagctgggcacctcgaagccgcagatcgcgacccaggcggagatggcggaggcgcgcctgccgatcccctaccgcgaccagtgcgcgcacctcctcatcccgctcaacaagtgccgcgtcgccgagttctacctcccctggaagggcgagcccgagcgccactcctacgagaagtgccagtacgagctcgtcatggagcggatgctccagatgcagaagatccgcgaggcgcatgcgggcgccaaggtcaagggcagcgtcaccatcggcgtgcccccttgcccc

SEQ ID NO: 5460 - DNA, 512 bp, Triticum aestivum
  unsure (1)..(512): unsure at all n locations
  Clone ID: uC-tsro9316076a10b1
tcgctttctcgcagaacaatctcctcgacgccgcgaagcctgcaacagagccctacaactttcctcgccagcatctccgcgaaggacgaaagggtgtgatggctccccgcgccgccgtgctgctcctggccatggccgtggcctccgtcttcttcgcctccgcgtcggcgcagggcatcatggcgccttcgtcggctccttcatcggcgccggcgcccgcgccagacaccggagcggcagctggcctcgccccggtctccgccgtggcccgtggtcgcctccgcgcttggtgtccctgctcgcggcgatgctcctgcagtagagatgatggctgcgcttcgcctgngtgatcggtttctatacataccgtcttcgttagtgctaggctagatcggtggtggtttgatgagtctctgttgcagagtttggtcgatcggctgatctgttaggcattctttctctctgtcatacatatatccgctacattatactgctgtgtgccctgatttata

SEQ ID NO: 5461 - DNA, 437 bp, Triticum aestivum
  Clone ID: uC-tsro9316076a11b1
ttgatttaggcctccggaaggcacttccagatggacaggggtgaagtaatcgatggtccttgcagctcgcagctagatcacggcgtggcggtagtgggatactggtccgacaaggggaagggtcacgactacatgatgatgaggaactcgtggagtgaggagtggggccagacgggctatatcaggatgaagaggggcaccagcatcggtgagggcctatgcggcatcaacaagatggtcttctacccaaccaaggacaagtaatgttccagcctcaaatgctgcatccacaggattgaagatttgaaccatacttgagagtccttgctcctgatctttgcatttccctgcatttctttcacgttttttttctttctcaaagggttcttttcgttaaaatggaccaacatggactgaaataataaaatttatttcca

SEQ ID NO: 5462 - DNA, 449 bp, Triticum aestivum
  unsure (1)..(449): unsure at all n locations
  Clone ID: uC-tsro9316076b01b1
cattaattctgctcagaggaagctcctcgatgagcggggcatcccggctgaagatgtgcctgttgaccagttcacccctctcggtcggatgctttacaaggcaccatctgatgggaaatggggcgaacatgagctggactacctgctgttcatcgtgcgcgacgtgaagctggtcccgaacccggacgaagtggctgacgtgaagtacgtgagccgggagcaactgcgggagctcattcagcaggcggacaccggctagggcggcgtgaagctgtccccctggttcaggctggtggtggacaacttcctcatgggctggtgggagcacttggagaaaggcacgctcgcggaggcggtggacatggaaaccatncacaagctcaagtgaggacgccatctcttgatagctgattgtgtgctgaaaaagaacttattcacaggcagctaga

SEQ ID NO: 5463 - DNA, 423 bp, Triticum aestivum
  Clone ID: uC-tsro9316076b04b1
cttttcagttaacagagagctctccgtgaatgatggcgaggatgaggaagaagaagaagtgtggagcacgctgctgctacctggtcgcgctctcagcagtgtgaatttccagaagcatgcttgccgtgccttcttccgggtgcaccggaggccggcatgtgagcaggggtgcttcagtgatgcagaagaaaaaaggcaagtcttattggcatgggaaggctacgcctttattccaggtctgcctctctccatctaaatccgtgtttggaggagggggctacggttagtttacccaccggtttaccgtgtccttgtgagttgcggtcattatcatgcactcgtcagttgcttgtcatgtatggtgtccttgaattttcagctacataatggtcggttgtgtcagtgaatgggagtgtgttcatg

SEQ ID NO: 5464 - DNA, 420 bp, Triticum aestivum
  Clone ID: uC-tsro9316076b05b1
gtttggtcttggacctggctgcctccgcgcgctgcgccagacagagcgccccggtgctcccccacctccgctagactgctgcgccgccgctctgagcgccggcccctctctaactccggccctgctcgactgcgtacgttccggtgctcccccgcctgtattagtctgctgcgccgccgccctgggcgccggctcctctcgacctgctgcgctgcccgcgattctgcgagcttgccattaacaggtcacgataagcaggggcacaagtggttttacgcaatgggtcatttcaagaacaggtacatggtgatggaggtcttcatcgacgctagcagaggagaggctgatcctgtcatcctcacccagttcaacataaccaaagtgatcagagacagcatccagctcaactctggggaatgc

SEQ ID NO: 5465 - DNA, 467 bp, Triticum aestivum
  Clone ID: uC-tsro9316076b08b1
tgccctcgcgtccgcccacgcgtgcgcccacgggtccgcccacgcgtccgcttcccttcttcctcctcgtcctccaagccaagccaagaaactcctcgtctctccaccctccgtccgtgaaggaaggaggcaatcgggtatggggaagatgtgctgcagccaggaggaggacgaggcggggttcaacctgctgccgctggtgatggccgccttcgtcatcatgctgctgctcgtcgtctgctcgccgcagccccggcgcaggcgctgcgacgccggcccgtgctactgacctgacctggcatcatggcggtgcggtggtgggagcctctaccacgatcggcggctctgaaggcaggcaagtggctctgtggtggtaggcgtttggtaggtgtctgaattttatgactgatgcgtgttgggtggaagaataatctcaatgtctgctgaattcgatcggactgttaagc

SEQ ID NO: 5466 - DNA, 340 bp, Triticum aestivum
  Clone ID: uC-tsro9316076c03b1
gggcaaattcctagagcttttctcgccgctgctccagcgtgcttcactcagcaccggtgctggttcggggtatctctaccacggtcgtggtcgcccaactggtcgaaagatggcccgtctgggcctgtgtttctttgcggatgaggccatgacacaaggggtggtcccaaggacgttccgatcgaggtgggaacagagatgatgttatggatggctgacagggacataggaaacactggcgagctttttagccgggttacacatggatgttgtgagaagtgcatttaaaaaaggcattaagaaggtgaactcaatatgggagagaacagaagcattgatc

SEQ ID NO: 5467 - DNA, 387 bp, Triticum aestivum
  Clone ID: uC-tsro9316076c12b1
ttggtttcctgctagggttttggtccttcgttttcggcggttcatgatgggggagagggtcatgggaaccgtgaagtggttcaacgtcaccaaggggttcggcttcatctccccggacgacggcggcgaggaccttttcgtccaccagtccgccatcaagtccgacggctaccgcagcctcaacgagaacgacgccgtcgagttcgagataatcaccggcgacgacggacgcaccaaggcctccgacgtcaccgcaccaggaggaggggcgctctccggcggctcccgccctggcgaaggcggctggtgaccgcgggggccgcggcggctatggaggcggcggcggtggctactgcggtggcggtggtggctactgaggcggtggtg

SEQ ID NO: 5468 - DNA, 478 bp, Triticum aestivum
  Clone ID: uC-tsro9316076d01b1
cctttgttttgctcatagtccttttcttctctttgggtgtacttagatacttgtgtcgagatatacatcaagatggacaacccttcgagtacgcaggacatgtcctactatgatcatgttcagaagcgccatgaggagaaaggctgcttatatgcatgcctgtttacactgtgctgttgcttctgctgctacaagacctgcgagtgctgcatggagtccttgtgctgctgcggctaattttagctgcacatttctgctgttgcatggagatctggcaggctgggctgtactgtggaaacccatatcgtttcgcctcggtgagatgatgaacaggcatatgtgcttgttcgaataaaaactgtagttacgtctctattgtcatgtatattgttggtcgccaaaaataagagagtatgctgttgggtgtgtgttgcctttgacgattgtcatgtatagtgctgtcatgtctatggggata

SEQ ID NO: 5469 - DNA, 389 bp, Triticum aestivum
  Clone ID: uC-tsro9316076d04b1
ccttcgctatcgcccacgcgtccgcccacgcgtgcgggggtcttcttcccactcaggcctgggttcccggcccggttcggttcgttagggtttagtagtggggaagaggaggaagaatggcggacgtcgagtaccgttgcttcgtcggcggtctcgactgggccaccgacgaccagtccctccagaacgccttctacaagtacggcgacatgatcgactccaagatcatcactgacagggagacgggccgttcccgcgggttcgggttcgtcaccttcgcgtcggacgaggtgatgcgccaggcgatcgaggccatgaacggccaggacctggacggacgcaacatcaccgttaacgaggaccattcccgccgctccggcggaggcggc

SEQ ID NO: 5470 - DNA, 416 bp, Triticum aestivum
  Clone ID: uC-tsro9316076d06b1
ctctcgcgttcgaccacgcgtccgtcaacgcgtcggccaaggcgtccgccaacgcgtccgtggacttaaaaaaaaaaaaaaaaaaaaaaaaaaaaaaaaaaaagaaaaaaataaaaaataaaaaaaaaaaaaaaaaaaaaggggggggcccttttaaaggatcaaagtttacgacccggggaaggcaaagcaatagttttttaatggggaaactaaaattaaattaatgggccgcggtttaaaaacgtgggaatgggaaaaacccgggggtaaccaaattaaatggcttggaagaaaatccccttttggcaagtgggattaataacaaaaaggcccgaacggatggcctttccaaaaatttgacaaacttaaagggcaaagggaacccccctttaaagggcctttaaagggggggg

SEQ ID NO: 5471 - DNA, 57 bp, Triticum aestivum
  Clone ID: uC-tsro9316076d07b1
tcggataaactgtacctggagctgagtttttgtcacccctacttttttggcccctcc

SEQ ID NO: 5472 - DNA, 471 bp, Triticum aestivum
  Clone ID: uC-tsro9316076d08b1
ttggtttatgctccagcctgagaagtttggattctacaagcagttacctagggcatgctgtggggctcctgggtccgttgccaaagccgcttacaacttcaacgtgacagccaaatgcggggagcctggtgccactgcttgtgctgacccaacgacccattggagctgggacggtattcacttgacggaggctgcttacggtcatatcgccaggggttggctatatggccctttcgcagaccaaccgattgttcagtcctcgtgagcattccacctctgctgttgcacttgtagagcgtctgagaatagcacactaaactggagaagggaaagtagttcttccatatagttccaatggttcatacgtgtatattttcatttgattgaattcattgcaagtggggtaaaaaaaagataccctttctaaaaaacaaaaaaaaggtttcggcaccttaaccgaaccaaactttc

SEQ ID NO: 5473 - DNA, 216 bp, Triticum aestivum
  Clone ID: uC-tsro9316076d09b1
ctttacatcgtgatgttgttttacctttggggtgtcattgtcctgctataacggatagcgctccctgttggcgccgccgccggcggggatgccctagtggtggagggtgtatgtcctcttccgcggggtgcccctgcttgtacctagatggttactctttccgtccattgtcaccggctaacattgtgataatatcagtctgggtaatgttagatt

SEQ ID NO: 5474 - DNA, 383 bp, Triticum aestivum
  Clone ID: uC-tsro9316076d10b1
tttcgttcgcgtgggcggacgcgtgggcggacgggtgggttgactcgtgggcggacgcgtgggttgttgggttcatggcgagtctggtaaagtctgcggggatacggaaactccgttgatctttggtgaaagttacctaaaaaaaaaaaaagaaaaaaagaatgaaaaaaaacaataaaataaagaaaaaaaataaaaaaaaaatgtaaaaataataaaaacaaaagaagaaaatgaaaataagaatggaaaaaataaaaaaaggggggggccgttttgagggctcaaattttccctggccggggttgcacaacatttttttttttatagggccccctaatttaaatctttgggcccctgttaaaacaacctctaatgggaaa

SEQ ID NO: 5475 - DNA, 529 bp, Triticum aestivum
  Clone ID: uC-tsro9316076d11b1
ttgcttttgcgtccgcccacgcgtccgcaaaagggcacactgcaccaccgcacacagatctaaccgaaacccacccccaccggcggcgagccgccgacgagccagccatccaagatgcagtacaacaacctgggacgggcgggcctccgcgttagccagctctcctacggcgcgtgggtgaccttcggcaaccagctcgacgtcaaggaggcgaaatccctcctccaggcctgccgggacgcgggggtcaacttcttcgacaacgcggaggtgtacgccaacgggcgcgccgaggagatcatggggcaggcgatccgggacctggggtggcgccgtgccgacgtggtcatctccaccaagctcttctggggcggccaggggcccaacgacaagggcctctcccgcaagcacgttgtcgagggcctgaaagcctcgctcaagcggcttgacatggagtacgtcgacgtggtctactgtcaccggcccgacgccaccacgcccatcgaggagacggtgcgggccacgaact

SEQ ID NO: 5476 - DNA, 407 bp, Triticum aestivum
  Clone ID: uC-tsro9316076e02b1
attttgatcggtgccctttttttttttttttaacgcaaaccggttaggataccgatcgatcataggtggaactgacactgtgacacacaccgtaacaaggctccagctaagcagacgcagactcaggccggcgagagtgggactgcgtacctcgctgttgaccgacactgggcgtatacccgacccgacaacacttttatttagcccacgtgacgcgaccccgcgcatagcactcccactccacacctagtaaaaagtatcattccactccactccactggctgactcagcatcacgccgtgccacgtaggagcacacggtcgccgccgtggaagctgacccggccagatgctcctccgcgcgcgccggagcctcacacgctgacgctggccaccgcggcggtcggc

SEQ ID NO: 5477 - DNA, 441 bp, Triticum aestivum
  Clone ID: uC-tsro9316076e05b1
ccctcgcgtccgcccacgcgtccgggcttcctacggactaaacagtaaacagagagcttgctctccgtgaatgatgtcgaggaagaagaggaagacgaagaagcagtgtggagcacgctgctgctacctggtcatgctctcagcagtgtgaatctccagaagcatgcttgccgtgccttcttccgggtgcaccggaggctggcatgtgagcaggggtgcttcagcgatgcagaagaaaaaaggcaagtcttatcggcatgggaaggctacgcctttcttccaggtctccctctctacatctaaatctgtgtttggaggagggggctacagttagttcacccaccggattactgtgtccttgcgagttgtgatcattatcatgcactcggtagttgcttgacatgtctggcggtacctcttgaattatcagctacatataat

SEQ ID NO: 5478 - DNA, 200 bp, Triticum aestivum
  Clone ID: uC-tsro9316076e07b1
ttgagtttatcagccacaactcctctccactgtttggggtgatataaggcacgaccctttttgttttgtatgatgagatatgcagcttatgtgtgtaaacagtctagcacttggacatcagctggttgaacttgtataatattatgtcgtggaattgccggccttcataaaaaaaaaaaaaaaacaaaaaaacaataaaa

SEQ ID NO: 5479 - DNA, 486 bp, Triticum aestivum
  Clone ID: uC-tsro9316076e08b1
tcgctttcctgcctcccccggagctcgttagggttttctgttttttcgggggagaaatctcaagaggcggcaccatgctcgtgtaccaggacaagctttccggcgatgagcttctgtcggattccttcccgtacagggagctggagaacggcgtgctctgggaagtcgatggccattgggtcgttcaaggagcagttgatgtggacattggagccaatccctctgctgagggtggtggtgacgatgagggtgtcgatgaccaggccgtgaaggtggttgacattgttgacaccttccgtcttcaggagcaacctgcttttgacaagaagcagtttatctctcacatgaagcgctacatcaagaacctcactgccaagcttgaaggggatgacctagatgttttcaagaagaatgttgagactgccacgaagtatcttcttagcaagctcaaggaccttcagttctttgttggcgagagcatgcatg

SEQ ID NO: 5480 - DNA, 534 bp, Triticum aestivum
  Clone ID: uC-tsro9316076e12b1
tcgctgtcgcgtgggggccggtggactggacctgctggccctcgtcagcctctacgacgacgcgcaccggcacacgcagcagaacgcaagctacaacccctgggagcagccggccccggcttcatcggctccgatgatgcagcagcagtatcagcagcagccgatgcacaacccgttgtacgcctcggcgcagcagcagcaggccttcatgctccagcagcagcaggccttcgtgctccagcagcagcagcagtaccagcagatgatgatgatgggcgcgccgtcgctccatcgccaggcgtcctccaacccgtcgctccatcgtcaggcgtcctccaacccgtcgctccatcgccaggcatcctccaacccgtccttccatcgccaggcatcctccaacccgttcgacagatcgtacgtgccggcagccgccgcggcggtggtggctacccttatgctccggcgatgcagctccacaccggcaacgcctataccggaacccgcatgatgtaaagatgcttgtgtggtttttct

SEQ ID NO: 5481 - DNA, 329 bp, Triticum aestivum
  Clone ID: uC-tsro9316076f01b1
aattaatttataaaaaaggaaagaaggaagagccgtcggccgtggcggcagcgtgggagagcctgtgcgcgctgagcctgtcgcccatctcggcgcaggccgtggccaagatcgtctcgcagctgcaggcccaataatgaactgctcgattcgattgatcgccgcgattctgtccgcgattcgtagtgatgcatgctatctcgcatgatctgctgccccatgttctagtagcctcaaattattggtgtttccagttccgccgatataaattatctattattattacaggcgaagaaaacatggttcccgtagtcacgggagtagccatt

SEQ ID NO: 5482 - DNA, 338 bp, Triticum aestivum
  Clone ID: uC-tsro9316076f02b1
acttcgctgttcggtaaaatctgttctcaggatgctgcaaaagtcatcaaggccagaattgcgacgaaccctaactcgttgaacttcaacgtcatggttctttcaaaacagtgaatcggtgatgtaaggtggaatggataggcttggtcttttccattctcatgggctggtgcctgatagtcagcatagcccgtcggaaaaacagagacttgttgcctaaaagtaaactgtgctctttgtgcagaagttatgtctttgtcttctggcttttgtatcagaaataaaaaaggagtattagttgctggattgttaaaaaaaaaataactgtaaaaaccatc

SEQ ID NO: 5483 - DNA, 448 bp, Triticum aestivum
  Clone ID: uC-tsro9316076f07b1
ttgccaaatatcaacagcaatgggagcatctgtcttgatatcttgaaggagcaatggagccctgcattgacagtttcaaaggtgctcctttcaatctgctctctactaacggacccaaaccccgacgacccgttggttccggagattgcacacatgtacaagagcgaccgtgcgaagtatgagtccacagcgaggagctggacccagaagtatgcaatgggctgaccctggagccgcgcttggaggatgatgttggggccatcttcgcttgttacacctaatgtatctttgttcctgttctgctgctgctatatgggattgtactgtccacctacctgactgaattcaagtgtcatattgtgaagtgatggcagatggcccttatgggtctatgggtgcacccatccaacaaattaatagagatgggaaccgaaacttaagttgttct

SEQ ID NO: 5484 - DNA, 452 bp, Triticum aestivum
  Clone ID: uC-tsro9316076f09b1
tcgggtgaacatgcgtggcatctgcttcgaggtctgtgatgttgttctccacactgatgctattcacaggggtggtggtcaggtcattcccacggccaggagggtcatttatgcttctcagctgactgccaagccaaggctgctggagcctgtgtacctggttgaaatccaggccccggagaatgcgcttggtggcatctatggtgttctgaatcagaagagagggcacgtgttcgaggagatgcagaggcaaggtaccccgctctacaacatcaaggcctacctccccgtcatcgagtcctttgggttctcaagcaccctgagggctgcgacgtccggccaggccttcctccagtgtgtgtttgaccactgggacatcatgggcttcgatcctttggaccccggcacccagtctgcgacgcttgtcacggagatccggatgaagaaggggc

SEQ ID NO: 5485 - DNA, 535 bp, Triticum aestivum
  Clone ID: uC-tsro9316076f10b1
ttgtttatccccaaatccccaaccccgactgacgacgagtggaactgttccggcgctttctgccggcgtcgaccatggcggcttccaactccggcggcatccccatcaaggcggaacaggattcggatggctcggcccagagcacagctgatatgactgcttttgtgcaaaatcttctagttcagatgcaaaccaggttccaaactatgtcagagaacatcattacaaagatagatgaaatgggtgcaagaatcgatgaattggagctgagcatcaatgacctcaaggctgaaatgggcagcgatggtatgacccctactaaagtgaaggacgaagaatcaaagccagcagacagctctgcctgatttaagcagaagtagcagaagcaagtcgtattaggcttggctccatgtcaatatcatcagccattcatcactaacttaatgcatgttatgagatggtattcgcactgttatatgcatttgagatctacagtacctgtcgtgagagatctcttttgatgcattgatgcttg

SEQ ID NO: 5486 - DNA, 447 bp, Triticum aestivum
  Clone ID: uC-tsro9316076g09b1
ttgagttcagccacagagtcacacaagcactagcttcagctagccagcctcagccactccgggcattttcttgcatccacgacggcaatggccaccgctgatgtccagaacccgacggccgtgctgacggaggaggcgcccgcggtggagacgccggtggccgccgaggaggccccgaagacggaggaggtcctcgcgccggcggaggccgaggtcgaggcgtctgcccccgtcgaggttgaggcgaccaaggaggaggcgccgggcgccgctgagacggaggaggccaaggagaccgagccagcagctgcggccgagccggaggccgaggcgcccaaagagccagaggcgccagccgtggtcgagacagagaccaaggaggccgtggcagaggccgagccggcggtggtcgaagaggtgaaggaggaggccgcgcctgctgccgag

SEQ ID NO: 5487 - DNA, 530 bp, Triticum aestivum
  Clone ID: uC-tsro9316076g11b1
tttgtttgatctgcactagtcaccgcaagaaccaccaccacatgtgagtgactgtccgtgcaaggaaaggcagggagagatggcaatgaggccgctcgtcgtgctcgccctggccgtggcgctggccggcgtggcgctgggagggggcgcggccgagggggccggcgagtgcgggagggcctcccccgaccggatggccctgcgcatggccccgtgcatctcggcggcggacgagccggactcggcgccctccagcagctgctgctcggcggtgcacaccatcggcaagagccccagctgcctgtgcgccgtcatgctgtccggcaccgtcaagatggccgggatcaggcccgaggtcgccatcaccatccccaagcgctgcaacatcgccgaccgtcccgtcggctacaagtgcggagattacacgctgccttgatggcccggcaatgctgccgatcaagatgaatgctgtggaaggtgtcgtcgtgtgggaataagcgagtggtgcatgtaccacttatgtggggcac

SEQ ID NO: 5488 - DNA, 532 bp, Triticum aestivum
  Clone ID: uC-tsro9316076g12b1
tctattcacacgcagcacgcatccccgacgacgagcggcccgtagccactcctccttggtccggcggcagcggaacgcatcgagatgtccaagtacgtggagctgctggacatgggcgtgcgcatcgccgccagggtccactcccactgcccgcagacggcgcgcatgtactacaagccgccgcagtccacctcctcgtcgtcatcgggcgccgccgaggccgacacgactgatcggagggcagccggctttgacggtggcgaggacgtggcggctggcttccgggccttcgcagcctcgggagctctcggcgccggtcgtcgtacagccgcggttcggcttcgacaccgcgcaggtcgtcatctacgaggtcgtatgagttgaggctccgaacaacgagggcgggctcttctggggagagatctcttcgatgagaatatttatgaggccatggaagtggtcgatttatgacaccattctttaattagtttgcgtacatgccggaagaattgatcacagaagagttttttgt

SEQ ID NO: 5489 - DNA, 492 bp, Triticum aestivum
  Clone ID: uC-tsro9316076h02b1
cacccgtttgagtttccggctacactactagcgtccggcgccgagggcctgttcctctcctccgccatgatggacctggatccccgcctctacgaggacgcctctgtcagcgataacgatgttcgcaacatagtgctatcttatcttatgcacaattgttttaaggagaccgcagagaccttcctatccagcactgggctaaagttacctgttgattatactgtagatgtggataaacgtaaagcgatcttaaattttgtggtggaaggggatgccgtgaaggccatagaactgacagaagagttggcgcccaacttgctagagaatgacatggatttacattttgatcttataagtcttcacttcattgagctaattcgttccagaaaatgcacagaagcacttgagtttggccagaaaaagttgacaccctttggtaaagtttccaagtatgttgagaaattagaggactttatggccctcctagcttat

SEQ ID NO: 5490 - DNA, 243 bp, Triticum aestivum
  Clone ID: uC-tsro9316076h04b1
attttctttaacgtatcgaagccgaggagagcggagcagcctacgagccgccgatcgacatgggtctcaaggaggagtttgaggagcacgctgagaaggccaagacgctgcccgacaccaccaccaacgagagcaagctctgcctctacggcctctacaagcaggccaccgtcggtcccgtcaacaccgcccgccctggcggcctctttgatatggcccgcatggccaaaatggatgcttgga

SEQ ID NO: 5491 - DNA, 537 bp, Triticum aestivum
  Clone ID: uC-tsro9316076h05b1
gctgttatttcagcaggcgagcgagatggtgtttgggaagaaccagatgaccagggcctactccaagcggttccaagtgaagttcaagagaaggagacaggggaagaccgattacagggccaggctcaggctcactaaccaagataagaacaagtacaacacgcccaagtaccggtttgttgtacgatttaccaacaaagatgtcactgcgcaaattgtgtacgctaccattgctggtgatattgtgatggctgctgcctattcccatgagcttcctcggtatggtcttgaagttggcctcaccaattatgctgcagcgtactgcactggtctgcttttggcccgacgtgtgctcaagtgccgtgatttggatcaggaatatgagggcaatgttgaggccaccggggaggacttctctgttgagccagctgatgagaggaggcctttacgcgcgctcttggatgttggtcttattaggaccactactggaaaccgtgtgcttggtgccctcagggagctttggaggtggtcttgata

SEQ ID NO: 5492 - DNA, 93 bp, Triticum aestivum
  Clone ID: uC-tsro9316076h07b1
tttggttccggcccagacgactaacgaccaaaggggggggttagcttaacaactgcgtgcggttatacccacctccccgcaaaaagaactacc

SEQ ID NO: 5493 - DNA, 191 bp, Triticum aestivum
  Clone ID: uC-tsro9316077a04b1
atttcttttatataaagcacaatcggcgcaaaaaaggaagggtcaaattataacgtttgtgtgcgctaaagaactctttttttattattactaaaaatatgtataccggatctaacttatttgctatcattttctttcttctgtgtcacaaaaaaaaagatgaactgaaaaactaaaaaaaataaatgggt

SEQ ID NO: 5494 - DNA, 470 bp, Triticum aestivum
  Clone ID: uC-tsro9316077b01b1
ccctttcgttcggaagagaaaggtcattttaagtttcttgggcgggcattgaagggatcccaggtgtgtgccccctaaaatcatatctgggcatcgatttactgctatcagtcaacaccagtccgctgttcgggattatctggaagcgtacaagctggactcggagaatcctctaatcaatctctgcgttggttcgtccttgatcaacctctccctgggcttcaggcttcagaacaagaaccagtgcatcgtccaggcgtttgcgttcctctacaagtgcctgcgcatcggcagcaacaggcaggaggccctgtacaacatagcccgggcttaccaccatgtcgggctcaaaaccctggcggccatctactacgagaaggttttagccatggaggtggaagatcaccccatacccaagcttccattcgaggaggattttcatgagcaccaggctcttaggcctggctact

SEQ ID NO: 5495 - DNA, 224 bp, Triticum aestivum
  Clone ID: uC-tsro9316077b04b1
catttattatatctataaccaaaaaaaaaaaaaccaaggcggggttaattttaaaaaaaaaatggcggtctaaaaacccaccatattaaactaaaaaacgattatgctctttactggccccccttttttaaggtcccaacattcctgcccctcactgcccccctcatccctcttcttttgtgtcacctaatttaaatccactgtcccccattttacaccccttt

SEQ ID NO: 5496 - DNA, 570 bp, Triticum aestivum
  Clone ID: uC-tsro9316077b06b1
cccattcttcgcccacccgtccgaaacaaaaaaaggagggggctaattaaaaaacccacgggggaacaacaaaaccaaacaacaaaccgaagaaccaaccaagccagaaaaataacccccccagcaaagccccaaaccccaaaagggggcctaaacgggccccccactaaaaactaccaaaatccccccgggcggcttccccccccaaaccccatggtttgggaaccccaaccccaaatccccccccccccctgaacaaccttaaaactgggaaaaccccgcggtgccccaaaaaaaaaccccttccaacaaaacccccccttaccaccggggccaaatacccaaaaggccccaaaaaaacccctcttcacaaaattccgaaaaccaattgggcaaaggaaaccccccctaaaccgcgcccaaacttccaaaactttggtcctttcccccccccaccaaacccccacaattgccccgcccccaacccccccccctcccttcaccccccccttaatccaccatcccccctttcccccaaacctccaaaaggggcccccctaggccccccaa

SEQ ID NO: 5497 - DNA, 519 bp, Triticum aestivum
  Clone ID: uC-tsro9316077b07b1
caccaaagctcatcttcttctccttgaaatggttttgtgttcatcagatttggaggatgtcttgcaactgtggatccggttgcagctgcggctcaaactgcaagtgcgggaagatgtaccctgatctgacggagcagggcagtgccgcggtccaggtcgccgccatggtcgtcctcggcgtggcgcctgagaacaaggcggggcagttctaggtggccgacggccagtccggctagggctgcaactgctgcgacaactgcaagtgcaacccctgcaactgttaagctgcatgcactcgtgtgatggtgtgagagtataccttaataacgagcgtgcctttgatctgatggagtccagcaagggtgcatgtgcttgtgcttgtggttaacttgtcgctctccactatgctctgcccttggtggacttgtgtgaatgtgagtgcacctggccctgttattgcttcatctatcttcactatggatggagtgaagaatattgtaaaaatggatgaattaccta

SEQ ID NO: 5498 - DNA, 329 bp, Triticum aestivum
  Clone ID: uC-tsro9316077b10b1
tttgtctttatggcggtctaagggtttaagctcgtacttggaataaaagtgaatcccacggctgcattcctccctggtgggtcacctgtaaggtgaacttgagctttatgtacgtactgtagtatattgtttcatagtaatgtgtttcagacacccgctcggcttccagcgtttagtaaataacatttgttgaggcattgcccaacgggtgctcatattatttaccaaacttggtatttctaaatgttacggccccgtgactatgaaatgcgttgacacaaggcctaaacttggaactggccgttcttttacaacatttttactgagag

SEQ ID NO: 5499 - DNA, 395 bp, Triticum aestivum
  Clone ID: uC-tsro9316077b12b1
ttttcattaggagcacgatagggggcgacagcctgtgggagctgatttggctccatgtgggcaacatctagacgggcctgcagtcggaggtcttcccgagccaggagtatgagccgccgagcaatgccggtagcccgagaggggggctgaacgacgccgagattaagaactagaaaaagctcatgggtcggctcatccattgagacgtaagggtttgatattgtaacccgcatttcgccgcctccattgtatgtatatttattctgtccgagttgctgttgttgcgtaaaactgtggcagcaatgtgagcagattgacatgtttgcgctgctgacctgagtggctgtgatgcacgtttcatcatcagcactggaaatgctgttgtttccagaaag

SEQ ID NO: 5500 - DNA, 517 bp, Triticum aestivum
  Clone ID: uC-tsro9316077c01b1
cgcttctctattttcctctccatctcactcactctgtgcctgcgtcgttggcgcagcgttctccccgcgactccgatggccagcaagtgggtcaggcccgaggtgtacccgctgttcgcggcgacgggcgtggccatcggcatctgcgcctttagccttcttcgcaacatcaccggcaacccagaagtcagggtcaacaagatggggagggcagcgggagtgcttgagaaccatgaggagggcaggcgctacgccgagcacggcctcagagcctatgtgcaggacaagacccccgagatcatgccaggaatcaacaagtttttcaccagcccaaaatgaagcactttagtctgtctgtgactcgcaattagtaactgttgtggtcaagtgcaaacctatttcaagcattcagtaatgttgttgcggtcataattcagaggacatttgtcaataccctttatttgaagaaccatgtgatgttcgacggcttgtttatatgtgatggttgatggttttt

SEQ ID NO: 5501 - DNA, 535 bp, Triticum aestivum
  unsure (1)..(535): unsure at all n locations
  Clone ID: uC-tsro9316077c08b1
tttgtgtttggaggtgaccttcgtggacgatctggaatggccgttcgagttcttgcccgtggaaccaccccggagcgcctccatcatcgaggttcaccaagatgaggtgtgggaggtaccgcccggtggcaaggtgctggcctactccgacaagacgcgcgtggagatgttcgccgtcggcgacaacgccctcggcatccagggccacccggagtacaccaacgacatcctgctcaacctcaccaaccggctcgtcaacaacagcaccatcgacgggtgcgtgggcgaggactcgcggaggactgcggagagcggcgaaccggaccgcgagttctggagtgggctctgctaggccttcctgaagggatcaggatgcgccggcggtggcggtcccaggccgccgccgcagggaccggccgcggagcttagctgcagccaccacgtcgctcacttccctgccaccgtcttccttattggcttgtagcgctttgcaaatgcacggaccngctgttgttagttcggcgcatgcatgtgc

SEQ ID NO: 5502 - DNA, 316 bp, Triticum aestivum
  Clone ID: uC-tsro9316077c09b1
ttgcatttaccgaatccttgattgagcgattgaaaaagggtgctcaacctaaaaccaatgcttcaactttgaaccccaagccagcgaccgtggaccacccacggagaagaagcttgccgcaataaggtccctgtgctttggggggtatttatctagttttgttgactgattgatgagggcaacaattcggtttgtattgattaaattttttggtctgttgatttctagtacataatctacacattgttgtattatgacggaattgtttgtaagcagtttgtttgtataatctgtcctttacattgtcttacaatct

SEQ ID NO: 5503 - DNA, 282 bp, Triticum aestivum
  Clone ID: uC-tsro9316077d01b1
cgtttatctatgctactgggacaaaatgtttgacggaggcctgaagagaattcatgagaagtacacctggacgctgcactcatagaggctgatgaccctgaccggtgtgtatggattctggaagtacgtgagcaacctatagaggcgtgagactagccgataccttgagatgttctactccctgaagtaccgaagaactgctgctgcagtttcattggcggttgaccgccagaacttcgacaactagcctggagcaatggggcatgaagaggatcatttagc

SEQ ID NO: 5504 - DNA, 284 bp, Triticum aestivum
  Clone ID: uC-tsro9316077d04b1
gatgtgtttcagaataaaatcctttctgctagaatggcggtgttaaaaaaaaattacggggaggcaaaaaaagactacaccgaaaccggcctggccgtctacggcgaccaggcggccggcctctatgctctccagctcaactctttgtctagcctgccgatgactctcaagaacgccctcttgcttgccctcctggagaccgtggtggccctcggtggcacgcttttaacccctgcccaggtggcccccttgctcccgttcacggtttaccccaccggggcgga

SEQ ID NO: 5505 - DNA, 364 bp, Triticum aestivum
  Clone ID: uC-tsro9316077d05b1
gcctcgctgttcgtaacaaaaaacatgagaaacaaatggagagagttacaacaaaaaggctgatggttctacccagatgagaaccaagccggacggctggcgtgagcatgggcgctttccgcctatgtcaataccctgacaactggggggcgcctttttaagggacccctcttacccaccccgtgcttccacggcattatcctttttgtggggctcccgaagtacaatgcatagccggcgtttcacacggcagagatgggaaaaaccctggcttacaccaggtcaatgccttgcactggactccccttttcaccggtcgggattatagaaatggggcccgacccaatcccctttcccaacaggg

SEQ ID NO: 5506 - DNA, 262 bp, Triticum aestivum
  Clone ID: uC-tsro9316077d08b1
tctgttttgtcacccgacgcatgagatcaccatgattaagttaattccgatgatgcggttcgttgatcccgatgtgatagagtacgtccaacacagactttaacatggctccctggggccatagtgtacactgcgaaggagatgatgactaaagatgaaatgaactgtccgccaccgttcgcagggtgaacaaatgaactgagatgttatcttgaacggggacgaaagaagaaactgttgctacacgatggcaaaacttaaa

SEQ ID NO: 5507 - DNA, 99 bp, Triticum aestivum
  Clone ID: uC-tsro9316077d09b1
tttgattagtatagagcgcgagcggccaccagggtgcggttaaaaccaaaaatggggtcgcgcgcccccgaggagatcaagaccgtacaacgggaccaa

SEQ ID NO: 5508 - DNA, 368 bp, Triticum aestivum
  Clone ID: uC-tsro9316077d10b1
ttttgttttcctgcttgccgctctcgctccgcaggcgccgtcgacgtcgccgccgccacggccagagctcgactcgctccctagaggtaaggatggtgagagtcagtgtgctgaacgatgctctcaagagcatgtacaacgctgagaagcgtgggaagaggcaggtcatgatcaggccttcttccaaggtcattatcaagttccttatcgtcatgcagaagcatggatacattggcgagtttgagtatgttgatgatcacaggtctggcaagatcgtggttgaattgaatggcaggctgaacaagtgtggtgtcatcagtcctcgctttgatgttggtgtcaaggagattgagggatggactgcaagg

SEQ ID NO: 5509 - DNA, 489 bp, Triticum aestivum
  Clone ID: uC-tsro9316077d11b1
ttggctttctaccaccagaccgaccgcacagttgaagtgagatctgcgctaagggttcatcagcaaccatgaagagcaccaagctcgcggcgatcctgatcctccaggccgtcctggtcatggggatcctctcacacgtgaacgccgactatttccccaagtgctgcaacaactgcaggtccttctcgggggtcgacgtctgcgacgacgcccacccccagtgccccaagggctgctcggcctgccgcgtggtgacgccgagccctcacaagacgttccggtgcgccgacatgaagagcaccgtcgatggcacctgcggcgggccatgcaagaagcactgatccgttcagggcttcaggctcagacgaggtgtgccgtctaaaataaagctcagatgagatgagcagtcatggtgcctatgcttgtgtgtgggtcgtgctatacggccaacaaatatgatactgctatcgacgtgtcttggtcaatgtg

SEQ ID NO: 5510 - DNA, 375 bp, Triticum aestivum
  Clone ID: uC-tsro9316077d12b1
ttcttttcatggcatcttccaagagtagtcttgcaagggttgcactggccatagtcaggggcgtggtggctgacatctcggcgcagaacaccccgcaggactttggcaacctgcacaaccgcgcccgcgccgtggacggcgtcggccccggggcatgggacaacaacgtggccaggtttgcgcaggactgggcggcgcaacgcgccggcgattgccggctgcagcactccggcgggccgttcggcgagaacatcttctggggttcctggcagtcgtggacggccgccgactccgtgaagctgtgggtggacgagaagcagaactaccatcttgacagcaacacctgcgactcctgcaaggggtgcgggcactaca

SEQ ID NO: 5511 - DNA, 482 bp, Triticum aestivum
  unsure (1)..(482): unsure at all n locations
  Clone ID: uC-tsro9316077e06b1
ctcttcttttggaggagatttttaagatactgctacctggggaacctttaatattgtgcgggggttctggggactggataagaagctggctcaaagaaagcatctcccatctgttaattgattcattttttactcaaaatactccacggacttggaaggatactatgaaaagattgatcctggctttatcgacatgagaacaaaagctcgtgaagtgttgcagagagaggatgacctaaacgaaattgtcacagcttgttggtaaagatgcactgcgagaatctgacaagattactttggagacagccaagcttctgaggcaagattatttggcacacaatgcttgtacccaatatgacaagtattgtccattctacaaatctgcctggatgatgcgcaacattatacattcaaatacatcngcgaatcaagccgtggagcgagcatccaatgctgatggacacactaaacctacgccgtcc

SEQ ID NO: 5512 - DNA, 528 bp, Triticum aestivum
  Clone ID: uC-tsro9316077e08b1
gctgcgcggtggtgatgagcctcatcgcggtggcgctggctgtgctcctctgctcccgccgcagggagggaggccgcgaggacgaggaggcggtcccggccgggatgatgtctgtgcgcgtgctgacgccgttggacagggaggtgcccaaggtggtggtggtgatggccggcgacgacatgccgtccttcctcgccagcgccacgccgctcgccttcgccgaggcggccaaggtgcagcgcccgtactgccagtgcggcgccaaggacgtcgccgaccccgtatagctaactgtggctctctcgccgccgatcgacacccaagtatatatgtgtcggttaaatcaaacggggggagctaaattgtgcttcttttatgtagattattacactagtttacatcatttttctccctagttagtagttttggtgcaacgatgcgaatgcggtgctggggccttgtccaggaggcttgttgtctgagctccaagcatgtacgagtgcgcaattatatgctaattggttgcat

SEQ ID NO: 5513 - DNA, 532 bp, Triticum aestivum
  unsure (1)..(532): unsure at all n locations
  Clone ID: uC-tsro9316077e09b1
ggtttttgccaacaggtaacgatggtgtccggctccggtgtgtccgcgcgtcgcgtggtggtggatgcgcgccaccacatgctgggtcgccttgcgtcgatcgtggccaaggagctgctcaacgggcagcgcgtagtggttgtccggtgcgaggagatgtgcatctccggcggactggtccgtcagaagatgaagtacctccgcttcctccgcaagcggatgaacaccaagccctcgcacggccccatccacttccgcgccccctcgcgcattttctggcgcaccgtgcgcggcatgatcccgcacaagacgccccgcggcgaggccgcgctcgccaggctcaaggctttcgagggcgttccgccgtcttacgatcgcaccaagcgtatggtcatccccgacgcgctcaaggttctgaggctgcagccggngcacaggttctgtctgctcggcgagctttccaggaggtcggatggaactaccatgaaactatcagggactggaggagacgaggaaggagaaggccaagctg

SEQ ID NO: 5514 - DNA, 453 bp, Triticum aestivum
  Clone ID: uC-tsro9316077e10b1
tctagtttggtgaggccgaagatgacgtggtcggccttgctccatatcttcgtgctggcactgctcgggcctgtgattgaccagaacttctactatgtgggtctcaagtacaccggcccgaccttcgcatgcgccatgagcaacatccttcccgccatgaccttcgtgatggccttcatcttcaggatggagaaggtggacctgagaaatttgcggtgccaggcgaaggtggcggggacggtggtgacggtggccggcgcgatgctgatgacgctctacaaaggcccgctgatgcggatggcgtggacgagccacggacaggcccacggcggcgaggccccggccgtcgatcccacgggcagggagtggttcctcggctcgctctttatcatcatcgccaccctcgcctgggcctcgctcttcatccttcaggctcacaccctgaagcagtac

SEQ ID NO: 5515 - DNA, 335 bp, Triticum aestivum
  Clone ID: uC-tsro9316077e12b1
ttgtctttgcctcgcaccaaaacacaactaccaccaggggcagctgttcgactccggggaggcagagatgggctccaccgcaaccgacatggccgcctccgccgacgaggaggcgtgcatgtatgctctccagctcgtctcgtcgtcgatcctcccgatgacgctcaagaacgccatcgagctgggcctcctggagaccctggtggccgccggcggcaagctgctgacccccgccgaggtggccggcaagctcccgtccacggcgaaccccgccgcggcggacatggtggaccgcatgctcccgctgctggcctcgtacaacgtggtgttctgca

SEQ ID NO: 5516 - DNA, 559 bp, Triticum aestivum
  Clone ID: uC-tsro9316077f04b1
ctctgtcttcgcctccggcatcggcacggtgtcccaaggcgagctgatcaccgtgagatccagagccgccgccgccgccgcatctgctagcgcctcactcccttccggcctcccttcccgctgcaaagatggggaggataccgtctctgaagaacttcaatgcgtttccgcacgccgaagaccacctgctgaagaagacttactcgggtgctatagtgacgattctcgggctaattgttatggttacacttttcgcgcatgagctcacgttttaccttacaacctatacgatgcatcagatgtctgtagatctgaaacgaggagaaactctaccaattcatataaatgtatcatttccatctttaccatgtgaagtcttgagtgtggatgcaatcgacatgtccggcaaacatgaggttgacttgcatacaaatatctggaagctccgtttggataagtatggccacatcattggtactgagtacttgtctgatcttggtgaaaaggagcatggaactcatgatcatgaccatggtcatgagcatgatgtagaaaagaa

SEQ ID NO: 5517 - DNA, 566 bp, Triticum aestivum
  Clone ID: uC-tsro9316077f10b1
tttcttttcgtccgtgaagagatgcatcgttcctagcatcctgctgatgttttcactggaggcagcgctcctcgtcgccggtcgcacctccgccgccgacgaagtgggcgccattctcctgccgagccaaggccaagaggaagcagccatggcggcggccaagaagaggccgtggaagtgctgtgaccaggcggtgtgcaccaggtccatcccgccgatctgcagctgcatggaccaggtcttcgactgcccctccacctgcaagtcctgcgggccgtccatggctgacccgtcccgccacgtctgccaagaccggtacgtcggcgaccccgggcccatctgcaggccgtgggagtgctgcgactcgcctacctgcaccaggtccaacccgccgacgtgccgctgcggggacgaggtcgacaagtgtggtccgacctgcaagacctgcctgccgtccaggtcccgaccctcccgacgcgtctgcatcgacagctactttgggcccttcccgcccgatgcacgccgtcagagctgttgccgacgcggtagctagcatgcgcagcaca

SEQ ID NO: 5518 - DNA, 357 bp, Triticum aestivum
  Clone ID: uC-tsro9316077f11b1
tctgtatgaacaggcggaggggaggggaggggaggaggacttgagataggacctcgttccccgtcgcgccgactagttcgtgtttccgaacgatcgcccggctatcgccctagaaatggatcaagagagttggaaagaggcaatggatacggatgaacacactccccaggttccgataatgtgcataaacaactgcggctatttcaggaacccgatgacagaaaacatgcgctcaatgtgttaccgagacactgtctaggacaagagcatggccctgctagatgagaacacaactggcgctgctgcagcatcgtgacccacaccaatggtggcagacatcaaggatgaagcgtgtgc

SEQ ID NO: 5519 - DNA, 441 bp, Triticum aestivum
  Clone ID: uC-tsro9316077g03b1
gcctttcgtttcggtaaacagagagctcttcgtgaatgatgtcgaggaagaggaagaagaagaagtgtggagcacgctgctgctacctggtcacgctctcagcacagtgaatttccagacgcatgcttgccgtgccttcttccgggtgcaccggaggccggtatgggagcaggggcgctccagtgatgcagaagaaaaaaggcaagtcttattggcaggggaaggctacgacctttcttccaggtctccctctcttcatctaaatccgtgtttggaggagggggctactgttagcttacccaccggtttaccgtgtccttgtgagttgaggttatcatgcactcagcagttgcttgtcatgtatggtgtccttgaatcagcagctacataatggtcgggtgcgtcaccgaatgggagtgtgatcatgtgagtcaattagct

SEQ ID NO: 5520 - DNA, 537 bp, Triticum aestivum
  unsure (1)..(537): unsure at all n locations
  Clone ID: uC-tsro9316077g05b1
gccttctgtggtttccgccgcgatctcgtctcgatccgcactctctatctgagatttggaatcgggcgaggcctgcagctcctgccgacatggcgctcgttttgcattcgggcagtggcaacaagaatgccttcaaggcacttattgctgcagagtactgtggggtcaaggttgagctgaccaagaactttgagatgggtgtctcaaacaaaacccctgaattcatcaagatgaatccccttggcaaggttcctgttcttgagactcctgatggtgctgtttttgagagcaatgctattgcacgctatgttgctcgctcaaagggtgacaacctgctttggggtggttctcttattgaatatgcgcgtgttgagcaatggatggactttggtgccacagaggttgatcccaatatcgcaaggtggctgtacccaaagcttggttatatgccttacaatgcccagtctgaggaactcngcattgcttgattgaaagggcccttgagcattgacacacacctgcatcaacacattcctt

SEQ ID NO: 5521 - DNA, 549 bp, Triticum aestivum
  Clone ID: uC-tsro9316077g08b1
tgttgtgacctctgccaggccgccgccgacgccgtgctgcgcggtgactccctgcgctcgctctccgccgtgcccgccgccttcacggaacgcgacatggccggcctctacggcaacgtcggcacaaacaccggcagctcctcctccctccactcctcgccggagaactccacgtccgcgcccgccaggaagcggagcaagaacaaccctggctgcggcgccgcaggagggcagcaggtgaagctgccggggccggtgctgccgtcgtgcgatctggacctctgcctgacgcccttgtcgtcgccgctggccggcgggaggcgaggcggcgcgtcagacgagtactccaccacgacgtgctgcgaggacgccagcggcgacgcggcggaggccggggcgcccccgctgctgaacctcttcaactgagaacctgagtgtaaactgtaattgtgcagttcgtgtgtgtgtgtgtgggtggtgattaattatgttgcatcggcgttagtcaatgacgtttttgggaccggcaaaaaaaaaaaaaaggtgggc

SEQ ID NO: 5522 - DNA, 514 bp, Triticum aestivum
  Clone ID: uC-tsro9316077h04b1
cgttttctgttggcggacgcgtgggcggacgcatggggggcaatggtgtgagaacatctggagaaggggttagtcctatggcacaagagcttgtagaacctgcacctgacaatgtccatattgacgcggttttcattacagaagttagtggctccatgtcccagtctgatttccactcctcgctgatggcatctgaaaggatcgtgcctggcttggaagacggcgaggcagctctccgcaggacttcatccagagatgttttgtcaagtgaaagatcagatgtttctcaatccagcttaacatctgtgttgcctgctacttcaagtgcatcatccatcattggagaatcaattccagatgcaactgctagcagagaagatgttccaaccatattcagcgtgtcacatggtcagattggtggaagtacagtgcatgaagacatggttagcattttctcaaatgatggcccagaacactctagagattcgagtaatggtgaaacaagaagaaatca

SEQ ID NO: 5523 - DNA, 553 bp, Triticum aestivum
  Clone ID: uC-tsro9316077h05b1
gagaactttttcctccactgcccagaccaccattggggttgactcgatgtttgagggcgtggacttctactccaccatcacccgtgccaggtttgaggagatgaacatggatctgttcaggaagtgtatggagcctgtggagaagtgtttgagggacgcaaagatggacaagagcaccgggcacgatgttgtccttgttggtggttccactaggattcccagagtgcagcagcttctccaggacttcttcaacggcaaggagctctgcaagagcatcaaccctgatgaggctgttgcctacggagccgtcgtccaggctgccatcttgagcggagagggcaactagaaggttcaggacctgctgctgctggatgtcactcctctctctcttggtctggagacggacgggggtgtgatgacagtgttgatcccaaggaacaccaccatcctcaccaagaaggagcaggtctttttcacctactcggacaccagcctggtgtgctcatccaggtgtacgagggtgagaggaccaggacccgtgacaacaatcttc

SEQ ID NO: 5524 - DNA, 104 bp, Triticum aestivum
  Clone ID: uC-tsro9316077h06b1
gtaagtaacactcatgctgtaggctgacacggatcagttagtgtccgaacgactggcatgatgatggccgttcggtgccattgttggtgtctcgaggagtccat

SEQ ID NO: 5525 - DNA, 244 bp, Triticum aestivum
  Clone ID: uC-tsro9316077h07b1
ttttcatccggcataaaaaccattctaggtatagggagggttgttattaaaagtggatgaggttgcctcaaaagaaaagagaacatggaagaacaagtatcccaattccagccaaagtccagtacatctttggatggccatcatgaaaaaaggtctttaaaaaaaaaaacactaacctttcttgtttatcaaaaaaaaaaaaaaaaaaaaactacaaaaaacataaaaaaaaacaaaaactaag

SEQ ID NO: 5526 - DNA, 488 bp, Triticum aestivum
  Clone ID: uC-tsro9316077h11b1
ttgtttggctttcttctcggcggaggcggaggcgacaggaaggcgaacgacgaaccctagccgcgcaaggaacgcccagatccccaaggccggccacgatggcggcggttcggtgcgcggcgaggaggctcggtggctccctgctccagcaaacgcaggcggtggtcgcggaggagggacgcctgctcgcgccaggcaggctcatgcgctcccgccagctctccagccaggtctccggcgagcgatcacaggtggcggagcgacgactcctcgagccaggctggctcatgcgttcccgccagctctacagcaagacccccaagaagaagaagctgtctgccttggaatctgagttcctgtggacacaggagacgcttaatgcctcgtgtgataggttggaggagcttcaaaagaaagcagcaccagatgcctttaagttgggcgtgaagacctatggacgtgtggctaagggtgtggtcagtggagct

SEQ ID NO: 5527 - DNA, 96 bp, Triticum aestivum
  Clone ID: uC-tsro9316078a01b1
tagtaacgctcgtcaagcgcaactggttcgtccgtcgtcgcgtaccgaatcttcaccacccctgcgcggggtgaggtgtggagatgatggggggag

SEQ ID NO: 5528 - DNA, 98 bp, Triticum aestivum
  Clone ID: uC-tsro9316078a02b1
ccctgatagtctagtctcgccgaggagtgagggagggggggctttattgctagcttaggggtcggcgtgccccgagaggagtggagatgatgggggga

SEQ ID NO: 5529 - DNA, 367 bp, Triticum aestivum
  Clone ID: uC-tsro9316078a07b1
gtgtagccagtcttgccgaggagcgagggaggggttgcttgattgcttgcttcggggtcggtgtgcggggtgaggtgtgtagatgatgggggcaggctcacacatcaagacaataaatagagcctgtctgtttggggccaatcaaaccaaacaacaagttcatgtctgatctcgacgtccaggttccaactgcttttgatccgttttctgaggcaaatgctgaagactccggccctggtgctggatcaaagaactatgtgcatgttcgtgtccagcagcgcaacggaagaaagagtctgacaactgttcaaggcttgaagaaagactaccgctataacaagattctcaaggatctcaaaaaggaatt

SEQ ID NO: 5530 - DNA, 234 bp, Triticum aestivum
  Clone ID: uC-tsro9316078a08b1
ttttgtgccggctcaagaccgagtctagctgggggtggtttgtattttgcccgggggtggttaataaaccgaacaaacctagggtgggtcttttttttgagcactcgtttatatgcggcgcattcctcctgagagggtgttcttgatatacctttctgtgaacaacaaatggggcagttctcctgtaagcgttcaggaaaaaacctggggatacccaaaataaaaaacttaggg

SEQ ID NO: 5531 - DNA, 408 bp, Triticum aestivum
  Clone ID: uC-tsro9316078b01b1
tcctcgcgtccgcggacgcgtgggccgcgagcaaaaaatctgtcctccgatcgcgccatagctcgccgcctactgctcctccttgtctgcgagcgaacgagcgtagcacggtagggagtagctccggggactgttggcctggtccaagaaaaatccaagcacagagcagaggagcatacagcctcgaggaaggaaagaaacagagcggctttgctgtttgggaggtggccggcgagagagatggggcagctcaggccggcggcgggaggcggcggggactgcctgatcaagctgttcgggaagaccatccccgtgccggacgccggcgccggcgccaacgcgggagacgtcgacaaggaccttcagcacagaggcggcagcaccaccgctgaactaaaggtgcaagaa

SEQ ID NO: 5532 - DNA, 373 bp, Triticum aestivum
  Clone ID: uC-tsro9316078b02b1
gttttagctggcctcctggtcgctctaccgcgccgtcatcgccgagttcatcgccacgctgctcttcctctacatcaccgtggccaccgtcatcgggtacaagcaccagacggacccggcggtgaacagcgccgccgacgcagcgtgcggcggcgtgggcgtgctcggcatcgcctgggccttcggcggcatgatcttcgtcctcgtctactgcaccgacggcatctccgggggccacatcaacccggccgtcaccttcggtctcttactggcgcgcaaggtgtccctggttcgcgcgctgctctacatgattgcgcagtgcctcggcgccatgtgccgggtcggccttgttaaggcccttcagagcgcctac

SEQ ID NO: 5533 - DNA, 368 bp, Triticum aestivum
  Clone ID: uC-tsro9316078b04b1
cctttgtttccgcccacgcgtccgtctacggtgtggagcctactgtgagtgctgtcttaaatggtggaaagcctggaccacacaagatccaaggaattggagctggttttatccctggtgtcttggatgttgacatcattgatgaaaccatacaggtttcaagtgatgagtccattgagatggcaaagtctctggcattgaaagaaggattgctggttggaatctcttctggtgctgctgcagcagctgcaatcaaggttgctcagaggcctgaaaatgcagggaaactctttgttgttgtattcccaagcttcggagagcgcttcctttcgtggtgctcttccactccatcaagaaggaggccgaga

SEQ ID NO: 5534 - DNA, 107 bp, Triticum aestivum
  Clone ID: uC-tsro9316078b05b1
tcaagtacgcgagcggcgacccgtacgatataacagggcgcgatcaatcacaaaccaccccccagaattcacccagatacgcatacacccgcccggctaataacaaa

SEQ ID NO: 5535 - DNA, 414 bp, Triticum aestivum
  Clone ID: uC-tsro9316078b06b1
cattttctcccctgtggaggcgtcctcatctaccagagctttaccgtgaacgaagaggttgctgtctctgccgggtcgcccaggtccgtcttccactgcttcgaggccgagagtgtgcacagccaccctctggtcaaggaaggcaagctcgccaacctcctcgcatggcgggcggggaggattctctggaagagggcgcggtgctgtgcgagtgaagacatgatttgctgtcgctattccatctgtggaatttgttctgactgtcagtttgtcgtttggttactgtgaagcagccggccaggctattgctctctgaataaactattagctctaggtggtttgctgcgtctgccacaatgagcgtacttctggggaaaagctgcctcgaacttataaataagcattattttttct

SEQ ID NO: 5536 - DNA, 460 bp, Triticum aestivum
  Clone ID: uC-tsro9316078b08b1
cgctcctctcaagggagaggagagctcggaaagcatcgccagcgccgcagccccccgcgaatccgcgcccggatctcccggcccggcggcgatggcgctctccgacctctcccgcgactcgctcctccccagcttcctctactccccgcgctccttcgccgccgccgcctccccgcgcttcccctcctccccgtcgccctaccaggcgcccgcctcgcccgccgcggccccggctgctggcctcgtcggcgctggcggggtcgggggcggcaggcccttcttgatccgcgcgcccaacgagaagatagagatgtactctcccgccttctacgccgcctgcaccgtcgggggggatcgccagctgcgggctcacccacatggcccgtcaccccggtcgaccctcgtaagtgccacatgcagattgaccccgcgaaatacaagagcatctcatctggatttg

SEQ ID NO: 5537 - DNA, 538 bp, Triticum aestivum
  unsure (1)..(538): unsure at all n locations
  Clone ID: uC-tsro9316078b09b1
ggttctttgggaagattcccaagcttctgctccataggctatttccaaatgtaagattttcagtttggatagacgcaaagcttcagcttgttgtggatccttatttactgcttgagaggtttctgtggagaaagaattctagttttgcgatatctcggcactacagacgttttgatgtgtatgaagaagcagaagctaataaagctgctggaaagtatgacaatgcatcaatcgatgaacaaatagatttctacagaaatgagggcctaacacattattctcccgccaagcttcctatcacaagtgacgtcccggaaggctgtgtgatcatcagagaacacgttcccatctcgaacctcttcacatgtctttggttcaatgaagttgagcgcttcaccgtcagggatcaaatcagcttcagcaccgttcgggacaaaataagggctaaagtcggctggatgccccaaatgttcctggactgcgaaaggcgcaactttgttngtcaggcataccacanggagctgctagagcaaatgat

SEQ ID NO: 5538 - DNA, 421 bp, Triticum aestivum
  Clone ID: uC-tsro9316078b10b1
tgttttgccgccggcgccggcgggttcaggcgcggctactgcctcaagcgcgggcgcgccgaccaggagcggaagaagggcgtcccgtggacggaggaggagcaccggctgttcttgaaggggctgaagaagtacgggagaggcgactggaggaacatctcgcggaactacgtgacgagccgcacgccgacgcaggtggccagccacgcccagaagtacttcatccggctcacctccggcggcaaggacaacaagcgccgctccagcatccacgacatcaccaccgtcaacgtgcccgacgacgacgaccgcggcagcccctcggggtccccgccgtccgcgctcaccaccgtcgacacgaagccttggccgtcgtacggcgggcaacggcacgccttcatgccgccgacgctgccagcgg

SEQ ID NO: 5539 - DNA, 376 bp, Triticum aestivum
  Clone ID: uC-tsro9316078c02b1
ttctcgcgttcgcccacgcgtccggaagtactacaaatcaagggtcgacaggggagtgatcaagcagagcgaccttggcctgtatgtgtttgcgtcgaagccgtcgagcggcgcagccatactgaggctgtagatcgaccaccgccggccgtggtcggtcgcttgtacatgcacacatacctattgctcgaataaacgcgtgctcgaggcgagcacgctgccattagctaatttagtgcccgcgtgtctgaatgtacaatactagtacaatgtgtagtatttatctctgtttattatgggcgatctgactgccaggttatctaaaaaaaaaaaaaaaaaaaaaaaaaaaaaaaaaaaaaaaaaaaaaaaaaacacg

SEQ ID NO: 5540 - DNA, 377 bp, Triticum aestivum
  Clone ID: uC-tsro9316078c06b1
atgtctttctccccgccgcttcttctcccgcccgccgccgccgtctccgcctccgcccccgccagtctcctggttgattccggcgccttgaaccaagatgtatctccagtactacatcaacgagaagggcgtcaaggtgtacaccaccaagaaggaatcccctctcggtgtgccgacgcagtctgcccacccagctcgtttttccccggatgacaagtacgcccgtcagcgttacctgttgaagaagaggtttggattgctgccaacccaacagccagcacaaaagtactgaagcactggatgggtcctcctaagagatctgttttctttgctgaatgctgtttggagtgtagattagctttgtgaagagagaatta

SEQ ID NO: 5541 - DNA, 469 bp, Triticum aestivum
  unsure (1)..(469): unsure at all n locations
  Clone ID: uC-tsro9316078d03b1
tcttcgcgtccgcaaattctaatacaaactatgttcatcgtgagatagtcgatctacgtgatggctctgagtttgtgattaaagtgccttattgctacaactctatgtacatggatactgaccaagctcaaaatgatttattcatgatgatgcaggtcaatgtattaaatgaattggtagctccagacacttgcgcacaaagcgtagaaattttgtatgaggttaggggtggagtagacatggaatttcaagttccagttcctttcaatgttctaccagttcaacagatagttcctcagagtggtggagaaggccaagctgagttagttcttgattcttgtattggtagttccactgtgcatgacccgtctaagatgtctgctgagctatgcattggtgaatcttgcacttctatgttacagttgatgaagaggtatctncgattgcaacaactaatgcatcatggact

SEQ ID NO: 5542 - DNA, 394 bp, Triticum aestivum
  Clone ID: uC-tsro9316078d04b1
ttttttgcgtccggggaatctcagctgatgacatggaagcagtttacaagaaggttcatgctgccatccgtgctgatcccaccatggccaaatcaaccaaggcgcctcccaagactcacaagagatacaaccccaagaagctgacctatgagcagaggaaggccagcctcgttgaaaggctcaacgccctcaacaactctgcgggtgccgccgatgacgatgaggacgacgacgagtgaagagctctttgtccaccccagtgtagtcttgcaacgtgcgtttttgttaaagtccggcactctgcacaatgacctgttccattgagttctgtttgtcctgctggagttatagattgtgttatctgggttatgtgccgtgctggcatttggatctt

SEQ ID NO: 5543 - DNA, 288 bp, Triticum aestivum
  Clone ID: uC-tsro9316078d05b1
tttttatcccacccgtctccacccagataaccacgagagatatttcgtccgccccgacgaccgacgaacggcagagaaaagtgaggtgatcatgagcaccatggcgatgtcggcgctgaacccggacgcgcccatgttcatcccggcggcgttcaagaaggtggaggactactcgcccgagtggtgggagctggtcaagaccaccgcctggttccgcgaccactggttccgccagcaccagctctacgaggacctcgccgacgacgtcgacgtggacgacgttgtcgc

SEQ ID NO: 5544 - DNA, 94 bp, Triticum aestivum
  Clone ID: uC-tsro9316078d06b1
cccatgcgtccgctgggtgtgcatcttctatcatgttgctaaagatggtttgtatgtcatcaatctattatatgttgttaaaaattatcttgtt

SEQ ID NO: 5545 - DNA, 72 bp, Triticum aestivum
  Clone ID: uC-tsro9316078d08b1
cctacttgtccgccaaaaaaaaaaatacaaaactatgaggatagatgtgaaagacaaaatacatgaaggctc

SEQ ID NO: 5546 - DNA, 429 bp, Triticum aestivum
  Clone ID: uC-tsro9316078d10b1
ccttgttatagagaagaacacgcctcttcctcccaaccacaactacctccatctcggcatggtgagcccgtgactctctgtctaccatgattttttcctcctcgaaacccccgtgcgctctctggttcgcaggttcctcgtcgatcggcgggctgggcttgcggcgatcttggagcgagacgcgaggcggctgcatcttccgatctgcccgtccggcgactcagatctgttacctatctgatggcccgcggcggatctgggggttcccggcggtctagagttgactctgcggcgatgaaggctttttctccgacgtgcacgtgtggattcccggctttcctgcttcgcgcgacgacggcttttgtattgataattatccgatgatatttcgataattattagatctaaaagatcaaaggtaagagcgtg

SEQ ID NO: 5547 - DNA, 389 bp, Triticum aestivum
  Clone ID: uC-tsro9316078d11b1
tttttacagactatatttcagacgatgggactgcaatgcctctctattcacatagataacacacatgagttctctgcagcacctgtgattgcatggctaatgtataccagggagacgctccggtgcctgtattacaacatccaaaccaaccctaatgtaaacatcctggagaagtgtgggagacagaagctggaggtgttggatttggaccataacacaatcaccggtgttgaaccaagctaccagaggttcacttgtcttaaatccctttatttgaggcatgtgagcatttctgccctggatttgagccttctagttgctgcttgccccaagatcgagtcactagcacttgatgtccttgagattgtcacttctgattggcagtctac

SEQ ID NO: 5548 - DNA, 409 bp, Triticum aestivum
  Clone ID: uC-tsro9316078e04b1
ttgttatcacagccagcatacggtgatcagtcagctgaaaacattgcaaactatggttatcagggagccccagctgatcccaactatggaaatgcctacccacagtcaggatatgctgctgcaccgacaactggtcagcctggatatggtcaggcaggatacactcagccaccagctacaaacccaccaagttatgatcagtctgcgccaccagcagctcaaagtggctatgctgcacctgctgcaaacccacagcctgcggttgcaaagggcgtgtcacctcagcctgctgctgctgctggatacggcgggcagtggactgcctgacttctgttccaaagccctgctgacagcaagatatatttgaaagctatatatgttttgtcacctgctgctttaaatctttgcg

SEQ ID NO: 5549 - DNA, 393 bp, Triticum aestivum
  Clone ID: uC-tsro9316078e05b1
tttgtacgcaaccttcgagaatgcagagcgctggctgaaggaactgagggaccatacggatccgaacatagttgtcatgcttgttggcaacaagtctgatctccgccatctcgtggccgtcccaaccgacgaagggaaggcctttgcagagagggagtcactctatttcatggagacctctgcgctcgagtcgaccaatgttgaggacgcttttgcggaggtcttgaaacagatttaccgcatcgtgagcaagagggcggtcgaggcgggtgaagactcggccgctggccctggcaagggtgagaagatcaacatgaaggacgatgtctcggcggtgaagaaaggcgggtgctgctctagctgaggcgccatgctgtattttttggtgctgag

SEQ ID NO: 5550 - DNA, 301 bp, Triticum aestivum
  Clone ID: uC-tsro9316078e06b1
gctcgcgcccgcccgatcccggatccccgatccccccctgtgcgatggcggccagcctgtggcgcgcggtgatgggctcctcctcctccccctcgtcgggcggcggcgacgacccggcggcgggcggcgtggagttctggcacggcgcggagcgcgccgggtggctgaccaagcagggcgagtacatcaagacgtggcggcggcgctggttcgtgctcaagcagggccggctcttctggttcaaggacgccgtcgtcacgcgcggctccgtgccccgcgggatcatccccgtctcctcctg

SEQ ID NO: 5551 - DNA, 298 bp, Triticum aestivum
  Clone ID: uC-tsro9316078e07b1
gcttattatgaactgcccaagtatgttttgtgtgagccaaccaacctggtccaagacagttgaagggcagctgcactatgatccattcatgtaaaaaactgtaaatcgcttcagatgctaaaaacaatgccttgctcaagtgtcctggtgacaggagcatggttgattaatgatttcaagcatgcttctggtaactgtcagcttacagtttcccccctatcgttagcatacaatgttctcttctatctcagactgtcttccgacgatttagataaaagttgttcatagcatcccctaa

SEQ ID NO: 5552 - DNA, 427 bp, Triticum aestivum
  Clone ID: uC-tsro9316078e08b1
gattgatctaatccaccaagagggcatcgcgttcaaccctgattaccagtaggtggtgttcctttgatcggcttcattcatatggaaagttttcggtcctcctgccgccataaaatgtcgctagctgtaaataattgcctcacccagagaatcaaaaggagatggcgtgttaagggtagatgacaagagctgtggtggtcaaatttccgtgtagcctatggattcttgtgcttgtgtatgttgttttatgtggattttttccccttctgcttgaagatgtttcagcattttccgtaagatgcgatagtccctgaacgatggctgcctaatttctgtggcccgccatgagatttttacattgtgggtggatatggattattgaaatggtggccctggttaatgaacctccactgactgattggaatat

SEQ ID NO: 5553 - DNA, 321 bp, Triticum aestivum
  Clone ID: uC-tsro9316078e11b1
ccttcgtttccgctcaattgtgcaggtcaaagttcagtggtcttcgttagctcctgaatccccgacctgggaggattattctgtgctccgtcagcgctacccggaggcaagctgttgggatgaagacgctcgcgctcaaggggaggcaaatgtcacacctgatacatgagtatcggtggacctggaaggtgaaatagatagaaaggggtgagcgtgtgtgtgcccagtgggccacatgtggccaggcgtgtgtgtgcaagtataagagacctaccctgtactccgtgggggatatgaaataagaaaagtcttgttgccctc

SEQ ID NO: 5554 - DNA, 323 bp, Triticum aestivum
  Clone ID: uC-tsro9316078e12b1
ctatcttcgccgtccggtccaccccgagaggagagcgcagcgacatgccggcgacgccgaccatcatcggtgccctgctggggctgggcacccagatgtactccaacgccctccggaagctcccctacatgcgccatccctgggagcatgtgctgggaatgggtctgggcgttgtgtttgtaaaccaactggtgaagtttgatgagaaggtcaaggtggaccttgacaagatgcttgagcgtgcgaaacacgccaatgagcagcgctactttgacgaagacgacgattagctattcaaatttgttggcggctaccagggtttt

SEQ ID NO: 5555 - DNA, 254 bp, Triticum aestivum
  Clone ID: uC-tsro9316078f02b1
gtgtattccaattcgttgtagctagcagtgacattgaacactgggtgggttagtaagaataatgtatcatgctatgttttccagctgtagaaatctgctaccagtgtagactgacaattgtcaaaatacttcttagtctagttcagagcaataaattttttgtaaattttaaaaaaaaaaaaaaaaaaaaaaaaaaaaaaaaaagaaaaaaaaaaaaaaaaattaaaaaaaaaaaatcaaataaaaaagaaaaa

SEQ ID NO: 5556 - DNA, 437 bp, Triticum aestivum
  Clone ID: uC-tsro9316078f03b1
ttctacttcacctctgagtctgtgaacgagggccaccctgtacaagctctgcgaccaggtctctgacgctgtgcttgacgcgtgcctcgcccaagacgctgacagcaaggttgcctgtgagacatgcaccaagaccaacatggtcatggtttttggtgagatcaccaccaaggccactgttgactatgagaagattgtgcgtgacacctgccgcaacattggcttcatctctgatgatgttggccttgatgctgaccggtgcaaggtgcttgtcaacatagagcagcagtctcctgacattgcccagggtgtgcacggacattttaccaagcgccctgaggatattggtgctggtgaccagggtatcatgtttggctatgccaccgatgagacccctgagctcatgcccctcagccatgtgcttgccaccaagctgg

SEQ ID NO: 5557 - DNA, 255 bp, Triticum aestivum
  Clone ID: uC-tsro9316078f04b1
tttttgcccacctatggcaatattgccctctttatattctccctcgctcatcagcagcagcgatggtggcgtcattgtcggccttgcagcatgtggcataatcatgtccattgcctactctggggcagatctttgaaagttccaagttggttaatgttgatttttgctcatgcacaacccatcataggaattagtaggatcctctttgatggatgtaaggactgcaccaggtttctttcagcagcctggggttgt

SEQ ID NO: 5558 - DNA, 410 bp, Triticum aestivum
  Clone ID: uC-tsro9316078f06b1
ttctgccgcgccgatccccccaccagcgcagcagcagccatggcgaccgcctacaacctccggtcccgcgacgagccggacgacttcgacgagttcgactccacgccctacggcggcggctacgacctcttcgtcaccttcggccgcccgctcccgccctccgacgagacctgctacccctgctccgccccctccacctcctacgacgcgccccactacgccgccgaggagccctccccctacgcccaccaccagaagccgcagcccgcctacggcttccgcccccagaacgagcagcagcagcagcctttctacggccgtgaggacgacgactccggctacgtatccaagcccaagcccaagccccagcccgcgtacggctttcgccctcaggcggaggaggagcagcg

SEQ ID NO: 5559 - DNA, 490 bp, Triticum aestivum
  Clone ID: uC-tsro9316078f07b1
gtttatttgatagttcctcagagtggtggagaaggccaagctgagttagttcttgattcttgtattggtagttccactgtgcatgacccgtctaagatgtctgctgagctttgcattggtgaatcttgcacttctatgttacagttgatgaagaggtatctccgattggcaacaactaatgcatcatggactgcgaacaattcttttgcagtctacccgtattattatggggcttacttcacttcgggtgtggcattgagtggcaccacaggctatattactggtgattatgtggggcttttggcttcatgttatgcccattctcgtggagccctgaggtatagatggatgaacggtcaaaccactgcttcgggtacgatcactaagattataccctatgataggctagtggtagctccagtgtctgttacaactaagacgacctcccaattgcttggccaagcacctcaaatcacattaagtgaaaatg

SEQ ID NO: 5560 - DNA, 174 bp, Triticum aestivum
  Clone ID: uC-tsro9316078f10b1
caggataccattgataaggttggagcagggtgctcggtcttatgtgaaccgaggtatcatgtctcgaggtgcctttgcagttatctatggactgcacttgaagtactacataaaggatcctgaggttattctgggaagagagacagaagacgtaaaagtagacatagatttagc

SEQ ID NO: 5561 - DNA, 417 bp, Triticum aestivum
  Clone ID: uC-tsro9316078f11b1
gactccttgcaccaactggtcttttccttggaggcgcaaagttcatggtcatccaaggtgaacctggggttgtcatccgaggaaagaagggcaccggtggcattactatcaagaagaccggcatggccctgattcttggtatctacgatgagcccatgactcctggccagtgcaatttggtcgtggagaggctcggcgactacctggtcgagcagggtttctaagcccgctctgatatgctgttattttggtcgtctgggactaagtttgctctactgtgggctttgcatccatctgcttggcgtaccgcatgatatatgcagtgaataattttagcttggggtttgtcggttggtgatgtgtcgaaagggaaaaatggatttactatgctttctttttaatgtttggcatcgcgtc

SEQ ID NO: 5562 - DNA, 215 bp, Triticum aestivum
  Clone ID: uC-tsro9316078f12b1
cccactcgtccggtttgcgtttgttaaaaaaaaaaaggggaaatataaaaaaacaatggaaaaaaaaaaaaacaaaaaaaaaaaaaacaaaaagaaaggccaaaaaaaaaaaaaaaaaagactacaacaccaacaactggccagcctgacacaaaaaaaaaaaaaaaaaaacaaaaaacaaaatacaaacgggccggccctctttaagggtcaaa

SEQ ID NO: 5563 - DNA, 271 bp, Triticum aestivum
  Clone ID: uC-tsro9316078g02b1
tgctagacatagatgtggcgatgacaagtgaaattgatgttaaggagtattagcatatgctcacaggattactggaagcttattaaggtggaaattagcaagcaagctacagtcggtgcaaggatgtccaagtttacttattactttacgaagatgatgattcctgcatgttgattgtgcttcaaggtgttattaatatggggagaagagcagtccaaatggcggatggagtatgtgacctgttgatgttagtttcattttcagaaggaac

SEQ ID NO: 5564 - DNA, 326 bp, Triticum aestivum
  Clone ID: uC-tsro9316078g07b1
tgctgctgtctctgctccgatctcccccgaatccaagggcaaattcaaatccaaatccaagtccgccgcggaagaagcgaggatgatctaccgcaactggtccctgctctcctccacggtcgccatctggggcagcgtcagcgccgacggcctcgccgggatcttcctcttcggcggcaaggagaaattgcagggctatctttctcgcgaaggctagaggctgaggcagcaggacagagccatgatgggcaagaactagtgcagaccacggctcactttcgacgtgtcaacatgtgaactagacatggaacgaagtatctctatga

SEQ ID NO: 5565 - DNA, 226 bp, Triticum aestivum
  Clone ID: uC-tsro9316078g08b1
cttgtgtttaacaatatcattggggcgctgcgtcaaagtgaaaggtgaatgtttttgaagtattttcttatgctcacaggattactggaagcttattaaggtggaaattagcaagcaagctacagtcggggacggacgtccatgaggacccaatatctcaccacgatgcatgatacctgaatgttgttttatagtgaaggcgaaattaatatgaggggacgagcat

SEQ ID NO: 5566 - DNA, 342 bp, Triticum aestivum
  Clone ID: uC-tsro9316078h01b1
cgtttaacatccctgcgcatttgagagggaggagggattcattcagcggccggtaatcaatggcttccgctactgcttccgtctcgtcgcactccagcgccctgcgcgatctcaaagccgcgaggattggagccgtgaggcagcaggtggccgtggttccagcgggcctgccggcaaaggcgcccaagggccagcgcgcgagggcggtgcgcccgctgtgcgcggcggagccagcgaggaagccagtgtcggccttcgcggcctcgtcgccggtggcgcctgtggaggaggaggaggcatctgccgtggactacgaggccctggcgcaggagctggtgggcg

SEQ ID NO: 5567 - DNA, 299 bp, Triticum aestivum
  Clone ID: uC-tsro9316078h02b1
ttataataaagctctagctagctggctaggcggcgaatctaatctgtcgtgactgaaagcagaccaatatggagggagcccaatggcttcacaagtagttgtatgagtagaatagtacgtgctaagcaacagtgggggagtgcaaccctcagatggcttgaataaaagaggcaggggcaaaggcgaggctccacacgagggcagtgcgcccgctgtgcgcggtggagccagttaggaagccagtgttaggctacgaagtctcctagtctgtggcgcctatggaagaagatgaagggggt

SEQ ID NO: 5568 - DNA, 441 bp, Triticum aestivum
  Clone ID: uC-tsro9316078h04b1
ttgtatcgtacagccaaagtaggggtcgcgggcgcggactattggttatactacggtatgcgacaggccaccgggatggaagacgcagctttcttctagctaggagcgactgtgagtgtgtgggagggctctggatgagctgctatgacgccaaagaaactttgtgctggcaggagtgtgcatagcaggtgggtggaacgtgtgatgctgatggaccataggcccaaataaagtggacaaatgaacgattaactataccccactaagggtgttggacgattaagacagcaggacggtggtcatggaaagtcgaaatccgatggggaggggcgttacaacggatctgacgtatcaactagcccgcagaaaggatggagctgtagtgtgggaccaacacaaggcaatctgggggagtgccatgacaagatgagtaagaggaaa

SEQ ID NO: 5569 - DNA, 386 bp, Triticum aestivum
  Clone ID: uC-tsro9316078h07b1
cgtcaaacatccctgcgcatttgagagggaggagggattcattcagcggccggtaatcaatggcttccgctactgcttccgtctcgtcgcactccagcgccctgcgcgatctcaaagccgcgaggattggagccgtgaggcagcaggtggccgtggttccagcgggcctgccggcaaaggcgcccaagggccagcgcgcgagggcggtgcgcccgctgtgcgcggcggagccagcgaggaagccagtgtcggcctccgcggcctcgtcgccggtggcgccggtggaggaggaggaggcatctgccgtggactacgaggccctggcgcaggagctggtgggcgcgtcgccgctggagatcatggatcgtgcgctcgacatgttcggc

SEQ ID NO: 5570 - DNA, 399 bp, Triticum aestivum
  Clone ID: uC-tsro9316078h08b1
cgcccacgcgttcgtgggatctgtggggcaacatatttgctcatgagaggcgcatacatggatagaagatgctgcatctgatgacatgcatttgtcggtgtggataggagcctccatcagggcatggggcgaacttaaagtccaagtgtctgtaaaagaaacagacaggagacatcgtgaaaggtctaaaattacgcagctttccccccaccactggtggggggttttggagctgaccccttaggaaaacaattcttcgattgattgctagatacgttatgagacggacctgtttaaggggccgatccatttctgaagctaacacactttaagtcgttgatttgcctgttatttgaagacctcgttgatgcatctgctctggttaataacagtgcattt

SEQ ID NO: 5571 - DNA, 357 bp, Triticum aestivum
  Clone ID: uC-tsro9316078h10b1
cttagtgaaggagtgttaattgaataactgagaaaaatgtgggatatagaaagagtgggtgatggcgatttttttattaggatcgatggatggatgggtggatttgtacattctttttgttgattaattcgtataggttttactttgtttcattcgtgtaggaatgaaatttcgaaaaaaaaagagaataaaacatcaaacaataaaaaaaaattaaaaaaacaaaaaaaaaaaaaaataataaatttataaaaaaattatattagaaaaatatatataacttatggggggggccttctttaggaatccaagttttttaactctggtaggggacattttatttttttttttgggtct

SEQ ID NO: 5572 - DNA, 77 bp, Triticum aestivum
  Clone ID: uC-tsro9316078h12b1
gaataatagagtaattactaaaaaaaggtttctgaactgtggctcgaataaaagagaggaagaaagtttttggggtc

SEQ ID NO: 5573 - DNA, 317 bp, Triticum aestivum
  unsure (1)..(317): unsure at all n locations
  Clone ID: uC-tsro9316079a01b1
gccgctttctctgctgttcaaatgcctatcaaacaccaccatatttggttttgctacgcccccgttcacccatggccgncgncttgcccgagttcttcaagccggcggacgccttctccccgcgcctgcacctcctcgccgccggcgccggcgcagaagcctccgacggcgacgacggctactaccgctgctgccggacgcccgcgggcgccgggaccggctgcctgggccaggcggtcacctgcccgccggcgccgtggaagccgtgcgcgcagtccgacgcccgtctgtcggaagcgcctttttggcgtggaggt

SEQ ID NO: 5574 - DNA, 381 bp, Triticum aestivum
  Clone ID: uC-tsro9316079a03b1
gatggcggacgcgaagcagcagcaggccgcggcgcccaccggcgtctggaagacgatcaagccattcgtcaatggcggcgcctccgggatgctcggcacctgcgtcatccagcccatcgacatgatcaaggtgaagatccagttgggtgagggatctgcagctcaggtcgcaaagaccatgtatgctaatgagggccttggttccttttacaagggtttgtcagctggtttactaaggcaagcgacctatacgacagctcgtcttggatgcttcagggttttgacaaacaaagcaattgaggcaaatgatgggaagccattgccacttgttcacaaagcttttattggtctgactgctggagcgattggcgcatgtgtggg

SEQ ID NO: 5575 - DNA, 419 bp, Triticum aestivum
  Clone ID: uC-tsro9316079a04b1
gtccgttgtgatgcaccacgagtccctcctggaggcgcttgctggtgacaatgttggcttcaacgtgaagaacgttgcttaaggatctgaagcgtgggtttgttgcatccaactacaaggatgaccctgccaaggaggcagccaacttcacctaccaggtcatcatcatgaaccaccctggtcagatcggcaacggttacgcccccagagctggactgtcacaccttccacattgctgtgaagtttgctgtgctggtgactaagatcgacaggcgatctggtaaggagctggaggtgcttgccaaggtcctgaagaacggtgacgcttgtattgagaagatgattcccacacagcccattgttgtggagaccttcggcacctaccctgctattggtcggttcgctgtgcgtgacatgag

SEQ ID NO: 5576 - DNA, 289 bp, Triticum aestivum
  Clone ID: uC-tsro9316079a07b1
ggttcttgtgggcgggcgcctgggcggcgtgggggggtgcttctgttacggttcgggttctggttcgccccgcggtcggttcgagagagaggtcgagtagctagaatagaaaagggtttcggtagagaggaagggcgatccatggcggacacggagaaccgatggttcgtgggcggtcttggctggcaccacctactacaccatcctccagcaggcttttttctcagttcggcgagaccctagacgcctagatcatccgcgacctccagacggggagagtccgtggctt

SEQ ID NO: 5577 - DNA, 485 bp, Triticum aestivum
  Clone ID: uC-tsro9316079a08b1
gtcatgttcgccgtcggccaccccgacacgctcggggactgtcccttctcgcagagggtgctgctcacgctggaggagaagaaggtgccctaccagatgaagctcatcgacgtcagcaacaagcccgactggttcctgaagatcaatccagagggcaaggtgcccgtgtataacggtggtgatggcaaatggattgctgattctgatgtgatcactcaagtcattgaggagaagtacccaactccatcacttgttactcctcctgagtatgcatcagtgggatcaaagatcttctccaccttcgtcacgttcttgaagagcaaggatgccagcgatggctcggagaaggcgcttgttgacgagctgcaagcactcgaagagcacctaaaggcccatggaccctacatcaacggggcgaacatctccgccgtcgatctcagcctggctccgaagctctaccatctgcaggtcgccctggagcactt

SEQ ID NO: 5578 - DNA, 510 bp, Triticum aestivum
  Clone ID: uC-tsro9316079a09b1
cttaaatacccgcagcattacattgtatgggatatgaatctggatagtcacatctattctgaatttgtagtcaccatcaaattgccatctaaagccaaagattccctcttcacacaagaagattgtcacgattcatctgatgcttcactggtcttgagtccaagttcggccgacagtgtatcacaggacatgaatcttgaggcatctccagcattgggtggtcagtatgaagcccccatgttaggaggatcaatggcaaaagctccaagtacaccttggatgcccttttccatgttatttgcagctatttcaaccaaacttcctcgcgagaaaatggacatgatcaataactgttatgaagaattcaaggccaagaaaataagcagaattgacctagtgaagaggctgcgtctcatagttggtgacagaatgctggtctacacaataattcggctccaagataaagtgccttcgatggtgaaagcggaagcagcaaatgctccagtcaag

SEQ ID NO: 5579 - DNA, 297 bp, Triticum aestivum
  Clone ID: uC-tsro9316079a10b1
gcggcgtgttatcctgtccggcgcgcactccatcagggggggccactgatcctccttgatggtgggtctcaccgcgccgtcggagcagatccacccggcctaccgaaaccttttcaaccacaagtgccactctggggacgaaccccgtcgcaatgacaacgtgcgtgatggggactactagacggtgtacaagttcatgcccggtgtcaccacccgggggcccaagatcagcgacttcctctgcaacgcctagtaccacaacaacctttccaggcaacgtgggcttaaactgcgact

SEQ ID NO: 5580 - DNA, 75 bp, Triticum aestivum
  Clone ID: uC-tsro9316079a11b1
gcggcgtaattccgtggtcccacgaggcggccgacttgttcaaccacgcggccggcgagtgctaggtggcgagct

SEQ ID NO: 5581 - DNA, 249 bp, Triticum aestivum
  unsure (1)..(249): unsure at all n locations
  Clone ID: uC-tsro9316079a12b1
cgctattattctattgctcttgctcgctcgcccaacagggacgcgtatttgcgccttcttggtttcattacacgttcttctacaagaagccgatccggattgtactggccggtctggacttccgacaggacaccctngacgactagcaagagctgtctacatatagctcgcttccaaggattgggtttggaggagaggctggtcgattcccaggaggaagaagaagctgcaagagcacgcaaaggggga

SEQ ID NO: 5582 - DNA, 75 bp, Triticum aestivum
  Clone ID: uC-tsro9316079b01b1
acataattatagaaacctgttgtattcagaggagttgttggtacataagttataactaccttgtcgctttgcact

SEQ ID NO: 5583 - DNA, 360 bp, Triticum aestivum
  Clone ID: uC-tsro9316079b02b1
ctgatgtttttgatgaggtagagtacacagtcagggagcgcagaggccgatatttatctgcaagagacgggaggaaatactctaggcaaggacgatagagcttcccaaggctttgttataggattttatttattcatagcgttgagttacctaactagctaccccaaccttgtgcattgctcgagtgcctttgatgcggactcatacattctgagttatgacattatatgaaacaattttacatgccaaaaaaaaagagctatggatccttacagaaaaaaaaaaaaaaaaagaaaaaaaaaaaattactgaaactgttacaaatgtataagcatacgcctaccaccgaaagtcagacag

SEQ ID NO: 5584 - DNA, 385 bp, Triticum aestivum
  Clone ID: uC-tsro9316079b05b1
cccactttttcgcccacgcgtccgcccacgcgtccgcgatcaatccatcaccacccccagaattcatccagatacgcatacacccgcccggcttctagcttacttgctttagcacttctttgcatatctcgatggagtgcgagaacgggcacgttgccgccaacggcgatggcctgtgcgtggcacagccggcgcgggccgacccgctcaactgggggaaggccgcggaggagctgtccggaagccacttggatgcggtgaagcggatggtccaggagtacccgaaggccggtggtgaccatggagggcgccagcctgaccattgccatggtcgccgcggtggctgccggcagcgacaccagggtggagctcgacgagttcgctc

SEQ ID NO: 5585 - DNA, 372 bp, Triticum aestivum
  Clone ID: uC-tsro9316079b06b1
cggacgcgtgggctaccacacacacacacacgcaccgggcacgaacgcacgcgcgcaccccctgaaggccagctgcctgtgcccgtgcgccgactcgccggagcttggcgttggaacgagacacggagcttgcgggcttccgggaacgttacacgagctcttagctgggtcttccggccggcttggtttgtttggccgtgcgcagcgcgccgagtgacatgacgacgagccaggacgtggttgtttcggagatgggcattggggcgggtggggcggccatgccgggctccggcgccgggggcctcttcgcgtgccgcagcgccgtcagcgctcgagccatgaacatgcgggagacgtaccgagacctcgccg

SEQ ID NO: 5586 - DNA, 502 bp, Triticum aestivum
  unsure (1)..(502): unsure at all n locations
  Clone ID: uC-tsro9316079b07b1
agttctttgctcatcacgacggcaagtgcaatgacgccgccagcggcccgcccgttacagtgttggacaaatgcgccagccagccaacaagcggggtttaatatggacggattccaagctcatcactgtacggtatgtacactactcgatgagcctcgatcatcagaccagatggatgccttatattgaataactcatccttccttcacgtcctaaacattacagatacgtatcttgtgttagggaataaaacttttatgtaatgtaagccaggaggctgccaaacggcgccctagcagtttgtgtacgagcgctactgtggccgagcgagccatcacatggtttgtcatgctaataagcacagggaactgaatgacgaccttatattgattgatgtgtgtgtgtgtgcgtgcgcgcgtgagtgtgcctagtgggggtgatctgtatatgtatctatgngtactgaataaattgtctcaagatattccttatttcctgtttg

SEQ ID NO: 5587 - DNA, 503 bp, Triticum aestivum
  Clone ID: uC-tsro9316079b08b1
gatttttcgaacttcctatatcctagtgctgtagacaatttccggaggcaatttgctaacttggaggaaaatggagggaagggaggggcaatcgttccatcggacaggaagcatgtttcgctccccaggactactacagttcattctacaccaattcctccaaaagatcagaagtcttcccaggttccccaaaggattccaacaggtagaccaggaagagtggttggcccggtaataccatttgagaattcatgtgctatggatccttacagtcaacgaagggtggcaaggaatccagtacttcctgcagctgctaccaatgtatcagcatacgcataccaccgaaagtcagacagttcagagagagagttacagcaggagcttgaaaaagaccgcatgcagtaccaaccgatgcagcgtttcatggatgccaagatggtctcccctgacttgaggtctaccttctattacatgccaaagggtgtcccaaaagcagatgtagc

SEQ ID NO: 5588 - DNA, 479 bp, Triticum aestivum
  Clone ID: uC-tsro9316079b09b1
gatttattttatgtttacttggagaatcccataaaccatttttggttttgcaaaaaaaaaaaaaaaaaaaaaaaaaaaaaaaaaaaaaaaaaaaaaaaaaaaaaaaaaaaaaaaaaaaaaaaaaaaaggggggggggctaagggggaaaaaggaaataggaaaaaaagataagaaggaattaatattttaatgggggggggggtttttgggggttaaaggttttgtttgggggggtgggacggtttaatttttttttggggggcacttaatttgatttggggggggggggttttaaaacggggggtgggggaaaacgggggggtttccaattttttttgttttgaggaaattgtcctttttggggggggggaattcgggagggggcgggaattgaggggtttttaaaaagtggggccaccttgttggggaagggggattgccttgggggtggtcttttggggggggggggggggggggt

SEQ ID NO: 5589 - DNA, 473 bp, Triticum aestivum
  Clone ID: uC-tsro9316079b10b1
gctttttctcgaggaggacgtcgcctaccgcgccaaggacaagccctactgcagcctgctggtggggctggtgagcgcgtaccgatacgaagggcccaaggtgagcgacgacacggtcaaggcggaggccaaggcgctgggcgcggcggtgaagagcgccgccggcggcaagctggtggagaacgacgaggtggtcaggatcctcaccaccaggagcaagcctcacctcgtccagaccttcaagtactacaaggagctgcacggcaagcacatcgaggaggatctgggaagcgaggaggctctgagggagaccgtgcagtgcctggcgacgccggagaggtacttcagccaggtgatggcggcggcgctgaaggagggcgcggaccaccactggaaggaggccctgtaccggctggcggtgacgcggtcggacgtggacatggacggcatcaaggtgggctaccatgagcagt

SEQ ID NO: 5590 - DNA, 262 bp, Triticum aestivum
  Clone ID: uC-tsro9316079b11b1
cccactcgtccggatctagatcgcgagcgaccgcccggaattttttaacacctgtagagattatttcaaaagccgaaacacctttttcggttttagcttacgtgatttaagacttctttgcaaatcttgaaggagtgcgagaacgggcacgttggccccaacggcgatggcctgtgcgtgggacaaacagggcgggccgaaccgctcaaacggggaaaaggcgtcaaagaaatttgcggaaaccacctggatgcaaataaac

SEQ ID NO: 5591 - DNA, 333 bp, Triticum aestivum
  unsure (1)..(333): unsure at all n locations
  Clone ID: uC-tsro9316079b12b1
ctgtcttgtgggcgcgacccccttaatccttctcccagcccttatctgtatccctctccatggccacggcggcggcggcgaagcggaagccggtgttcgtcaaggtggatcagctcaagcccgtcaccagcggccacacgctcgtcgccaaggtgctcagctccaagaccgtcctccagaaggcccgcgccgctggcggccccggcccagccgccaagcccaccaggatcgccgagtgcctcatcggcgacgagaccggctgcgtccctttcacccgccngcaacgaccagggtgatgttttgaagcctggcaacactgtcattatccgcaat

SEQ ID NO: 5592 - DNA, 432 bp, Triticum aestivum
  Clone ID: uC-tsro9316079c02b1
cgcacctgtttcccttccttcccttccttccctttacaccccccccccccacccccccctctatgtgtctctctgcctatagctgtaccctccctctaattgggtagtacgtactccagtagcagctagctggctagagatcagcgacgttccttccggccatggcgagcaccacgcgcaaggaggaggggccggacaagcagcagcagcaggggggcaccaagctctactccaggatgctctccaaggacgtggccatcgccgagccgtccttccgggtgtactacggcgtcgcctcggccggctccgtgcccttcctctgggagtcgcagccgggcacacccaagagtttgtcctccgccgtcgtcctcccggcttttacgccggcgtcctcctactacgcggccggcggcaagggcggcttcaaaaggg

SEQ ID NO: 5593 - DNA, 262 bp, Triticum aestivum
  Clone ID: uC-tsro9316079c03b1
tttggtttgatagattcacattaataaaggttcccaaacgtcaccatcgaacatcttacgaatgataaaggagcatatttcaggtagcatatcctaacaggactggtgatattaaaaaactaggatagcaagagcagtatggcaaccggcagatccaccgagcttaatcgatctcctggagcgaggcgccggtggccgtggcacccccagcggcggcggcgacgtcctcggccgtgaacttgcccttggccttgtcagcagc

SEQ ID NO: 5594 - DNA, 422 bp, Triticum aestivum
  Clone ID: uC-tsro9316079c04b1
cttgagtttgcatggacgaataacatgctggatttcgcatttacctatctattacagctcatccgggagtacacaaacacggtagatgatttggtgaaggacaggatagaatcgcagaaggaagaaaaagcttaagagaacgaatagaaagaactagttgcgcagcagaacatgtacgctcaattgcttcctctggccttgcctgctccgcccggcatgaagggcggtccaccttcgatgggcggaatgggcatgccgccgatgggcgggatgggtatgcctccgatgggtcctggtccaatgccagcatacgggatgcctccaatgggaagctactgagtcaaccaacctctgttgtatgaatttgaagagtacagatgatgtgaagtatttccagatgacgcaaagggagggagacaatc

SEQ ID NO: 5595 - DNA, 314 bp, Triticum aestivum
  Clone ID: uC-tsro9316079c05b1
tctaattcgctttcaggccttgtgctgatccataccggtggttttcgtgccttgtagtattatatgactttccacttttttctcttcatgctgtgatacagttcaggatgtgattgtgtatttgatgtagtccatattctgttgtcgtaagtctagtagaagctggtgaaatttatttaaagatcaatttcagtgggaaattaggacgattgatgaaataagaacccaactataattatatagaatggagatttaggatgacaattgtaaagacctaataggacatgttaaaagaacataagaataggataagg

SEQ ID NO: 5596 - DNA, 275 bp, Triticum aestivum
  Clone ID: uC-tsro9316079c06b1
gaccgtctttcattgcccccaacaatgcacagactgttgtgttcattcacctcactgtccgtctccagattcttttggagctggggcttccttaatctcatcaacgtcatcctcattggtgtcggatgtccatagagtcaaattgtcacgcaggagctgcatgattaaagtgctgtccttgtaggattcctcgcctaagctgtccagctctgatatagcctcatcaaaggcttgttttgcaaggttgcaggcgcggtcaggggagttcacgaaaa

SEQ ID NO: 5597 - DNA, 442 bp, Triticum aestivum
  Clone ID: uC-tsro9316079c08b1
gcatggtggcggagaagccggcggccaaggggaagaagggcaaggccggcaaggaccccaacaagcccaagagggcgccctccgccttcttcgtcttcatgggcgagttccgcgaggagttcaagcagaagaaccccaagaacaagtccgtcgccgccgtcggcaaagcggccggtgagaggtggaagagcttgagcgaatcggagaaggccccctacgtggccaaggccaacaagctcaagggcgagtacaacaaggccattgccgcctacaacaagggcgagagcgctgctgctgctgccccaaagaaggcggtggccaaggaggtggaggaggaagatgagaaggagtccgacaagtccaagtcggagatcaatgacgacgacgatgatgagggtagcgatgaggacgaggacgacgaccagtgaagaagacgcatctt

SEQ ID NO: 5598 - DNA, 422 bp, Triticum aestivum
  Clone ID: uC-tsro9316079c09b1
aggttctgcacacagttcccgtaatctatgagaagtatgaagatcagattgatacctatggtgagaaggggtggattgaggttaagaaacagtatgctgtgtttgatgccaaggttctgagcaaagtgccgaggggccccttgaaagacaagaagaactagaaacgagtgataccgtgtgccatcggtatggaatgatggcgactggttcgtggctgcccttgtggtatgagcaccaaatttctcaccagttgtcttgtgttatgtgtaagactgttttcgttgtttgcgactttgatgagagtagcctgggtagcttacccttcacagtaatgcagaggcagcacttgtttcgctgtaccgctgtttgatttttgatctgttaaggtgtcgcatgggtaccggttctagacgctgattttg

SEQ ID NO: 5599 - DNA, 428 bp, Triticum aestivum
  Clone ID: uC-tsro9316079c10b1
gctttttaccggtctatgtacagggtttgatcgaacaagaggctttggaggaagctaagaatgatcttcttgattacacattaagtttcaacccaaggaagaacagcatatccaaacgcgtggagaagcctaccatgaaactgacggttgatgctgagaccgatgaggttatcggagcagccatgtgtggaccagatgcagctgcaattatgcagggcattgttgatgcgctcaaggctggagctaccaaggcgaccttcgacagcaccgtcggcatccacccttctgtggaggatgagtttgtgacgatgcggaccttgaccaggcgcgtgagcccgccatccaagccaaagacgaacttgtaagcaagttgcctgcaatgttttggaccataattataccggtgtggacacgggaactgtagacac

SEQ ID NO: 5600 - DNA, 400 bp, Triticum aestivum
  unsure (1)..(400): unsure at all n locations
  Clone ID: uC-tsro9316079d01b1
agctcgttttccacaatctcaacagccatcggaatcaacagcagcagcagcggagcgatctcatcgaccaactctcttccaagtttcgattcaacggacatggggatgccggcggtgaggaggagggagagggacgcggaggcggagctcaacctgccgccgggcttccgcttccaccccaccgacgacgagctcgtggagcactacctgtgccgcaaggcggccggccagcgcctgcccgtgcccatcatcgccgaggtcgacctctaccgcttcgacccgtgggcgctccccgaccgcgccctcttcggcacccgcgagtggtacttcttcaccccgcgcgaccgcaagtaccccaacggnttccgccccaaccgcgccgncggcaacggatactgga

SEQ ID NO: 5601 - DNA, 401 bp, Triticum aestivum
  Clone ID: uC-tsro9316079d02b1
ctccgttctattcgtttcgatctatttcggcttcctctcctccaagcttcggccatggccgccacgatccagtccgtgaaggcccgccagatcttcgacagccgcggcaaccccaccgtcgaggttgatgtgtgctgctcagatggaacctttgccagggccgctgttcccagcggtgcatcaactggtgtttatgaagctttggaactgagggatggtggatctgactacttgggaaagggtgtatccaaggctgttgacaatgtgaactcgattatcgcgccagctttgattggcaaggaccctacagctcaaactgagctcgacaactatatggttcagcagcttgatggaaccaaaaacgaatggggttggtgcaagcagaagcttggtgctaatgc

SEQ ID NO: 5602 - DNA, 141 bp, Triticum aestivum
  Clone ID: uC-tsro9316079d03b1
cccacgcgtccgcccacgcgtccgcccacgcgtccgcccacgcgttcgtccacgcgtccgcccacgcgtccgcccacgcgttcgcccacgcgtccgcccacgcgtccgcccacgcgtgcggccattgtttttttgtggtgt

SEQ ID NO: 5603 - DNA, 457 bp, Triticum aestivum
  unsure (1)..(457): unsure at all n locations
  Clone ID: uC-tsro9316079d05b1
cagttttgttgcatcagtcatgtacggttatgctatcgtggtacctgctgcattctttttcctgtttcagtactttggatcacgcccaagccttatccggttttggtgtatgtggggctattctctgtttatcttcgtaccagcatctatactgctacttattcctgtggaatttcttcgctgggtcatcatagctggtgctggtggtgcatcatcttggttcatctttttaaacttgaaggaatgcaccnaaggagctgatatgatggctctgatcgcaagtgcatcagtgctgcagtttgctctggcactgttcatcaaagttttcttttttgcctgaganctattcntgggtgcttcaggtgagctggatgttttctttgtgtccccgtcgttctgttctgccattcatcttttctgaagaccaggcagtggactagtttcaccctacatacat

SEQ ID NO: 5604 - DNA, 459 bp, Triticum aestivum
  unsure (1)..(459): unsure at all n locations
  Clone ID: uC-tsro9316079d07b1
cttgatcttatcggtggtagtgctacaagcgagtgacactagttcttgcaccgatcagatccaacttctgcacaggatgctggacaagctgtgggacgacgtggtggccgggcctcgcccggagacgggcctcgacaagctccgccgggccgccgccacccaacccctcgccatcaacacagctgcaggggaggcgattaagcagtcgccgtcgatgccgacgaccccgaccacgccggtgacgccgtcgtcgtccacgccgccgcgcggcggcagcgtgtggcggagcgttttccaccccgggagcaacctggccaccaagagcctcggcgccaacctcttcgaccggccgcagcccaactcccccaccgtctacgactggctntacagcgacgagacgaggacaaggagcaaccaccgcttaataagagccgtcggccagagaaactgaggcagggt

SEQ ID NO: 5605 - DNA, 428 bp, Triticum aestivum
  Clone ID: uC-tsro9316001a01b2
gacccacgcagaacgtgttccggccagcgcgagaggctctacgaccgcggcaccatcctcggatacaagcggtccaagtcgaaccagtacgagacggcgtcgctggtgcagatcgagggggtgaacaccagggaggacgtggcctggtacggcggcaagaggatggcctacgtctacaaggccaagaccaagagcaacggcacccactaccgctgcatctggggcaaggtctctcgcccccacggcaacaccggcgtcgtccgcgccaagttcacctccaacctgcccgccgaggccatggggaaaaaggtcagggtcttcatgtacccgagcagcatctaaaaggttactttgaagtgtggaggatttcgctcgccccttaggtttcaattcagagtcttgaagaaggaatcaagcccggatagcaa

SEQ ID NO: 5606 - DNA, 65 bp, Triticum aestivum
  Clone ID: uC-tsro9316001a02b2
gacgtaatgggtctcctatagtgaaaccgaagggcaattcactgcaccggactttacaacaaaac

SEQ ID NO: 5607 - DNA, 329 bp, Triticum aestivum
  Clone ID: uC-tsro9316001a03b2
tttatttaagcgcggcaacgtcttcagaagagccaaagaaggttaagaccctttttgtaattgcccctagaccatggcagagagcaataacaccgtgacccgggcgaccttacagtgggtgtcgaccttgccctagtggtgtgctgatgcaacacggcccgaagaaatataaagagtatgtttgtacctttgaatattatagagcgtgcaccgagcaagcgtgatgatcaaatcaaaccagtcgcttcaggcgctagattttgatggatgtttgcttgtagtcatgtgccctccaattcaggcctacttggtgtgcaatttttgcacac

SEQ ID NO: 5608 - DNA, 184 bp, Triticum aestivum
  Clone ID: uC-tsro9316001a04b2
ttctctcgcccggccacgcggccggcgacgcgtgggatttttaccaggcttattgcgcttgaccccggcctctgagcagcccagttacgaacatgctgcagaaggatggccgcagggcagccctaagcacgcctgagtatgcccgcgccccacaagaacaccgtatcgcaccccaactaactgc

SEQ ID NO: 5609 - DNA, 465 bp, Triticum aestivum
  Clone ID: uC-tsro9316001a05b2
ccctcgcgtccggaaattttttggaaacctgatggatgctggaatgtgctcagtttgtggtgaagaaagctttggcacgggttctgaccacatccgtgaaaaggatggtatttgggctgttctagcttggctatctattctagcttacaagaacaaggacaaccttggaggagataagcttgttacggttgaagacattgttcttcagcactgggctacgtatggtcgccattattatacacgatatgactatgagaatgttgatgcagaagctgccaaggaacttatggctaacctagtcaagatgcagtcgcacctgtctgacgttaacaagtcgatcaaggagatccagcctactgttgcagatgtggtatcggctgatgagtttgagtacaaggaccctgctgatggttctgtcttcaagcatcagggtatccggtttctttttgagatggtttccgactg

SEQ ID NO: 5610 - DNA, 54 bp, Triticum aestivum
  Clone ID: uC-tsro9316001a07b2
tttcttcacgcgtgcgtccacgcggccggcgacgcgtccggttctagatcgcga

SEQ ID NO: 5611 - DNA, 296 bp, Triticum aestivum
  Clone ID: uC-tsro9316001a12b2
tctatcacgcgtgcggccggcaggctggacgaccggtttttctacgacgtttctgccgtgctctgggaggagctggcttcgccgggggcggcctgccctccccgcggagggcccgggctggcgttcgccggcgggaaggtgtgggtggtctacaggttctacggggacgcggagctcgacgatgtgcactcctacgacccggccaccggcgagtgggccgtggtcgacaccaccggcgacaagcccaccccgcggagcgtgctctgcgccgccggggtcgggaagcacgtggtggt

SEQ ID NO: 5612 - DNA, 204 bp, Triticum aestivum
  Clone ID: uC-tsro9316001b01b2
tgtatttgtgtgtaatacatatcctactagacttgtattgtgacgagcaacagcagtgtggatttgaaaaatgatgatctgttatatttaaaaaaaaaaaaaaaaaaaaaaaaaaaaaaaaaaaaaaaaaaaaaaaaaaaaaaaaaaaaaaaaaaaaaaaaaaaaaacaaaaaaaaaaaaaaaaacatgggggggcccttttaa

SEQ ID NO: 5613 - DNA, 461 bp, Triticum aestivum
  Clone ID: uC-tsro9316001b02b2
cgtcaactctgcccactgctctccctcgttcctgatctctctccccttcccgtccccgcttgctcctcctgctcctgccgatcgctcatggattccaagccccaagccccgccgtcggagggcgcggcgtacccgcgcatgtccccggaggacctcgcgccgccgccgccgccggtcgtggcgcccgcgggctccaacccctacgtgctgtcctcgccctcctccggaccgcccgccaagagcaccaaggagaatctgagggagatgttcggctcggtggggaagaggttcagcgaggccgcgcgcaagaccgagggcatcgccggcgacgtctggcagcacttgaaaactgggcctagcattacggatgctgcaatggggaggatcgctcaggtatccaaggtcatatcggaagggggatacgacaagatattccagcagacgtttgagtgcttgcctga

SEQ ID NO: 5614 - DNA, 481 bp, Triticum aestivum
  Clone ID: uC-tsro9316001b04b2
ctagctagccatggcatcttccaagagtagtcttgcattgtttgcactggtcatagtcatggccgcggtggctgacgtctcggcgcagaacaccccgcaggacttcgtcaacctgcacaaccgcgcccgcgccgtggacggcgtcggccccgtggcatgggacaacaacgtggccaggtttgcgcaggactgggcggcgcagcgcgccggcgattgccggctgcagcactccggcgggccgttcggcgagaacatcttctggggttccgggcagtcgtggacggccgccgacgcggtgaagctgtgggtggacgagaagcagaactaccatcttgacagcaacacctgcgacgccggcaaggtgtgcgggcactacacgcaggtggtgtggcgcaagtcgacccgcatcggctgcgcgcgcgtggtctgcacggtgaaccggtgcgttttcatcacctgcaactacaatcccccgggcaac

SEQ ID NO: 5615 - DNA, 251 bp, Triticum aestivum
  Clone ID: uC-tsro9316001b06b2
tatacttcgcaatatcacaagcgtgatgttacggggtgtcatttgaggcatgttccatctgacatcactgcgtttgtgcctattactcatacatgggtatggcggagatgtataaattagcaaaagaaatagcgctccaaattgattgcgctggaaaaaactgaatgcccgactacaatcgatggtagaacatcagaaccgagatgccagcctgacggggaacgatagaagaactgtcgcatccgcgtggc

SEQ ID NO: 5616 - DNA, 472 bp, Triticum aestivum
  Clone ID: uC-tsro9316001b11b2
ttttaaacccctcgtcgggacgaccgaccgaccgccgcgccgtcctcccaaaccccgcaagaaaatggcgaccagcgccaccttcctccacctcctcgcccctccgggcctccgccccaagcccatactccggccccgcctccgccgcctcgccctctccgtctccccctcgggccccgacgagatccccgccgacgacccgcccgtgctcccctccatcctcgtcaagaacaccgagcccgaggacgtcgcgcgccgccggagctgggtcgagcacgggtgggcgccctgggaggaggcgatgagccccgaggtggccttcgcgcgccacagcctgaacgagggcgaggaggtgccgctcacctcgccggagtccgtcgaggcgttccgcatgctcaccccggcctaccgcgagaaggtggagtccgagccggggtacctcgagcgcctcttcatcatgcgcgagacgccc

SEQ ID NO: 5617 - DNA, 319 bp, Triticum aestivum
  Clone ID: uC-tsro9316001c01b2
acccacgcgcattctttgacaacgccgcgaaaaagtgtggcaagaggggcttgagagagagaatgtgtggttggtcgaccggcacgagaaggctgaagcaaggacgccaagagcggggataccagcaggcaacccaaagggcggaacaccaacaggaaacggcgcaaccggcgccgaaagcgcagccgaggaaagccaacaaaacaacggcaccgtccgactcagcagggtaatgcgcgagaaccccaggcagtgggttgaacatgccagagcttggaaacacaagctacacgagacacggaggagaaagcggaaggag

SEQ ID NO: 5618 - DNA, 468 bp, Triticum aestivum
  Clone ID: uC-tsro9316001c02b2
ttgtaacgtccgtcgatcttcttcctcgtgatcatagatcgcaacgaaattttgttaccgttcattaactaatcaatttgcgattgattttgactagcaggtggtgaaggatgggtaccaatggcggaagtacgggcagaaggtgaccaaggacaacccatgcccaagggcctacttccggtgctcgttcgcgccgtcgtgccaggtgaagaagaaggtgcagcgcagcgccgaggacaaggccgtgctcgtggccacgtacgatggcgaccacaaccacgcaccgtcgtccaagcaacaaggccctagtggcaggaagagcggcgacgcaaccgccgtccgcgcaccaccggcgccggtgcttgttcagcagcagcggaagcaggaagcttcgacggcggagcaagtggccgacaggaagaaccttgtggagcagatggcggcgacgctgacgagggaccccgggtt

SEQ ID NO: 5619 - DNA, 260 bp, Triticum aestivum
  Clone ID: uC-tsro9316001c03b2
tgttttacctatgagaattggccatgccctttggaagattgcgatcgagagcagctacttccagcaaggtcgtggtgcaacccgctgatacagtggtatggtttgctagaatcaggaattcatttgttttaccctgaacgatgtatgactgtcgcagttctgtcatttgcaaaactataatgaatggacagccctatgttttgcaaataaaaaaaaaaaaatttaaccttaaattacaaaacttattattctttcactct

SEQ ID NO: 5620 - DNA, 457 bp, Triticum aestivum
  Clone ID: uC-tsro9316001c04b2
cggctactccaagggcaccggcctgggcgcggtgatcatcggctccttcgtgctcgcctacaccgtcttctccgccaccgaccccaagcgcagcgcacgcgactctcacgtcccggtgctggcgcccctcccgattggcttcgccgtgttcatggtccacctggccaccatccccatcaccggcaccggcatcaacccggcccggagcctcggggccgccgacatctacaacaaggacaaggcctgggatgatcagtggatcttctgggtcggccccatgaatcggcgcggcgatcgcggccttctaccaccagtacatcctcagggccggcgccatcaaggccctcggctccttcaggagcaacgcgtaacaagttatcatccatgtgacccgcacgcaagattgaagcaatggcgacccgtgctggggcatccatccaagagacatgcctattgc

SEQ ID NO: 5621 - DNA, 195 bp, Triticum aestivum
  Clone ID: uC-tsro9316001c06b2
tttttgttctgtatttaaaaagttatcgagatggaagcaagagtatgtgctgtcctcaaactgtttcttgtcgccgtaaatcattgtcacgttgatttgtactgactattttgtacaatggaaataaaattattacatggtcaaaaaaaataaagataatcaataacattgacttccttttcttggtgaacaact

SEQ ID NO: 5622 - DNA, 417 bp, Triticum aestivum
  Clone ID: uC-tsro9316001c11b2
tctttcatccccgataccaaagcccatcttctgggccttgaaatcattttgggttcacagatctggaggatgtcttgcaactgtggatccggctgcagctgcggctcagactgcaagtgcgggaagatgtaccctgatctgacagagcagggcagcgccgccgcccaggtcgccgccgtggtcgtgctcggcgtggctcctgagaacaaggcggggcagttcgaggtggccgccgggcagtccggcgagggctgcagctgcggcgacaactgcaagtgcaacccctgcaacagtggaggtggatgcactacttcgtgcctacgagagaaggtgtgagagtatacttgaataacgagcgtgtgatcctgaggagtcgagcaagggtgcgtgtgcgtgagatttggttgcttgctctcc

SEQ ID NO: 5623 - DNA, 452 bp, Triticum aestivum
  Clone ID: uC-tsro9316001d01b2
ttatatttcttgctctgtatctgtgtgccgagtgctagacttgagagagcgagagagggagggaggtcggccgacaaggttcaggaaggatgcctcgcgcggggttgtcggcggggtcgaacaagttggacatcgccatcgacctcgggaacccgctcctcaaccgcaccgtcgacggcttcctcaagatcggcgccgtcggcgcctgcagggtggccgacgaggacgccttcgactgcctccaaagtgggagtgtctcgaagcgcaagcttgagcagacactgaagaaaatgtgcaaggagggcgcatattggggtgctgctgctggagtgtatgtaggcatggagtatggagtggaaagggtccgtggtcagtatgactgagaaaatgcgttgattggaggcatcacaagcggcgccctgatctatgctgtgagcaacaacaaagggaac

SEQ ID NO: 5624 - DNA, 265 bp, Triticum aestivum
  Clone ID: uC-tsro9316001d02b2
tattttgcgtgcctatccatatacatgcgtcgagggcaaaattaaaaacagatttttcctacgtttccaacaggaccaaacagacacaagtaaaaagaaaagcatggcacgtgagacccacgaacgcaaaggggggcggccgttcaagaggccccaggctaacccccgcgaccaggccgaactcatagctctttaatagggcccccaaaagcaaaacaacgggccggccttaaacaacgattggccgggaaaaacccgggggaac

SEQ ID NO: 5625 - DNA, 310 bp, Triticum aestivum
  Clone ID: uC-tsro9316001d03b2
tttttggatactcggctctcaagaggcattctggcatttcgtgacgttttgtctccagttggttttatgcgagaactggcggtgagccgcagtatgcatattgccgtagaccttgccttcgctgcttgctacagtagtaaataggcgtatgtatatattgatgatgtttgggtacctgtacgaattgatgcaattcagcaattgttacttttagcagcagcaaccttttcgcttaaaaaaaaaaatccaaaaggaaaaaatataaaaagacaacagaacaaataaatataaaaaatataataaatataag

SEQ ID NO: 5626 - DNA, 235 bp, Triticum aestivum
  Clone ID: uC-tsro9316001d05b2
tttctcacgcgtccgcccacgcgtccgcccacgcgtccggctgactgaagcataagttgcttccagcagtgttttgtcctaaggaattatctgttttttgcagtttagacgatactttggattcagttctgctggctgtttagtcaagggtatctttgtacttggtgccatggatgtttttgttatgttattcccccctaaaaaaaaaaaataataaaatataacaaataataag

SEQ ID NO: 5627 - DNA, 55 bp, Triticum aestivum
  Clone ID: uC-tsro9316001d07b2
cccgcaacttctttttccgaattaccggttccaaccacgcgtatttagaccgcga

SEQ ID NO: 5628 - DNA, 417 bp, Triticum aestivum
  Clone ID: uC-tsro9316001d08b2
gctttccaagctagcacgccacgcgtgacaagtggtctttcatgggagcttcatgcaatatcgaagcaatggcgacctgcgctgtgcccattcagagagaaatgcgcttttgcaacttctcaacagatcagctggcccgcactggacgtgttatttatgtgtcggcagcagcatatgcttccagcgagtacgtggatggccttcatgtgcccggccctgcgtgccgggacttgcaattcggtccatgggatcgctgtgtctcaattaggccgcattgcttttcctactgtatttaaatatggcgtccatatgatcgaaccatcgtcagcacctttctgtatgagctatgaattcaccaagcaagtgactcattccttgatacctaacccacagtattctggcacctttaactgctct

SEQ ID NO: 5629 - DNA, 591 bp, Triticum aestivum
  Clone ID: uC-tsro9316001d09b2
gaactcgccggcggttttgtccgtattcccgtttgacccacgcgttttggggttctcactgggaagtatagcaaagggaatatacttcgctgaatgtttgtttgccttacataactacaagaacctggcaaacaggtctctggttgacgacacgcttagaaaagtgaacgggctcaagccaatcgcttcggagcttggcgtctcgatggcgcagctgggtatcgcctggtgcgcgtcgaaccccaacgtgtcgtctgtgatcactggagccaccaaagagagccagatcgtcgagaacatgaaggccctggaggtcgtcccgctgctgaccccagaggtcctggagaagatcgaggcggtcgtccagagcaagccgaagcgcctcgagtcgtacagatgaagcggtcggtcggtcggcttcgtcagctgtgcagcgtgtgccccgccgccgcccggtgggattttttcagtacccggttcttcgaaaaaccatataccgaacgtcctgtgtggtcggcgtgcccagcgggcgaaacattttgtcgagtggacctgatgatgaacggtggtcgtacagacaatgctttaatg

SEQ ID NO: 5630 - DNA, 431 bp, Triticum aestivum
  Clone ID: uC-tsro9316001d10b2
gatcatgcagcttctgcgtgataacctgacgctgtggactttggacatctcggcggacgctgctgaagaaatgaaggatgctcccaagggtgaatctggagatggacagtaaacactgtctatgtgcccagaaacttgtctttctcgcttgttcagtgtagattgtaatgtcgtcgtggttgctggtaattggaggctccaatttgtgctgtgatagggaagcttgtagctgccttgcttgctcggcggcctgattatcgggctgcactggttattgcctcttgttgaacctttgtgttacttttggtggtatctagaaattttctgctgctcttgtttgtgaccccctgcctttgtattcactagatgaccagttgcgccaatggcgcaaaggccgagagtaagccatgtttttgaagaatgtacattta

SEQ ID NO: 5631 - DNA, 474 bp, Triticum aestivum
  Clone ID: uC-tsro9316001e01b2
ttcttttcaacaactgagctagttggcactccgggctacataccacctgatttcggacatggatgggttgctacactgagaggtgacatgtacagtcttggcatggtgctacttgagctgctcactggaaggcggcctgtgctggtcttgtttttatcaaaagaacttagtgaactgtgtacaggagatgaaatcagaagggaggcagattgaggtcctggatactacactccggagcacagggtatgaagagcagatgttgaatgtgctcgaagccactcgcaagtgtgtacactataatcctttactgaggccaaccatacaggagatagtgttcttttctgaaagtttagacgccaagcttgagacacgaaattcagttcagatagaaagaggttagacttgattatttggaagtcaattgcacatggcagacgtagctttcaattaactagtactgttaaatttatactt

SEQ ID NO: 5632 - DNA, 441 bp, Triticum aestivum
  Clone ID: uC-tsro9316001e02b2
aggcacctgttaccggcacaccccggactcgacccacgcgcattttttaccacaccaaaccctagcctcctcctgcgcgcgccgccgccgccgccgccatgtcagggaggaagaagacccgcgagcccaaggaggagaacgtgacgctcggccccgccgaccgcgagggggagcacgtcttcggcgtcgcgcacatcttcgcctccatcaacgacaccttcatccatgtcacggatctgcccgggagggagacgctcgaccgcaacaccggcggcatgaaggacaaagctgatcgagatgaatcatcccctaatgcagctatgcttgcaactcaggatgccgctgtaagacgcaaggagcttggaatcactgctctgcacattaagctccgtgctactggtggaaacaagacaaaaactccaggtcctggagcacaagctg

SEQ ID NO: 5633 - DNA, 345 bp, Triticum aestivum
  Clone ID: uC-tsro9316001e04b2
ctcccatgcttccaaccagggcggtttttacaaatggttttttatcctccgctcatgccctgtgtgtcggcaacatgtgcagcgtatataggaatacatgcattccttacaatcgagttctctgtcctagaaggaattaattatcgcaaatactctgctctcatacaacgtaaaaagggagaggagagagagcaagcggatctgtacacaccgagtactccaagcaagcggatctgtacacacccgcgactccaagcaagtggatctgtacatctgacacatgatcttacattctgcggaaaatgatgagtggaaacgcctgtcatagaatgaatccaatacatt

SEQ ID NO: 5634 - DNA, 308 bp, Triticum aestivum
  Clone ID: uC-tsro9316001e07b2
gtccgaccactccttcgacgacgggaagcttgtgctcaaggttaccgattaccgcaagtgcctgaagtttaagactgatcaagctcaggacgcatagaagatggagaagcttaacaacatctttttcgttctcatgactagtggacctgatgctgatatccgcgaggtttcagggaaggaacacgcggagcagtagctatcaaagaagggacggtgcaggaggcagtagtatcatgttctgggtttctttcagaatgatcacaactgggagtggtgggtggacattctgatcgactcctgttagccat

SEQ ID NO: 5635 - DNA, 377 bp, Triticum aestivum
  unsure (1)..(377): unsure at all n locations
  Clone ID: uC-tsro9316001e09b2
tgatcgcgagcggcgcccttactccttttggtgtttatttcatgcagatcaatcaccatttcagnccacggtgcactgcttaaataattagcacaccgtgcgtgataatcatctccctctccttctcttctcaccattacatacatacatatactaattaatcaacaacgcacacagcaattaacacacatacgaaaacggaggctatgacctatacgtacgtacgtacaaagtgcccgtatatgcgcttgtgtatgcacgtacatatgtacaggctgctggtatatataaggaaagtgtatactgcatatagttggatcgtcggtcggcggtggcgaaggcgattttggtagatggatagggtggctacattcttt

SEQ ID NO: 5636 - DNA, 357 bp, Triticum aestivum
  Clone ID: uC-tsro9316001e11b2
tgttcttccacgcgtgcgcccacgcgtccgcccacgcgtcctgccacgcgtcctccggagctcgcaccacgcgccccccctcccccccctgtgatcgctcaccgtggtctcgccgccgggccgaccccttcaccgggattggattcggagcccagctcatccgccggcagccgagccatgggcacggatgtggatgctcccgcagttgtgactgacaaggaggtggttgctgagaacatgttgggtgacaagaaagtcacagtagtatttgttcttggcggtcctggaagtggaaagggcacacagtgttccaacattgctgaacactttggattcacccatcttagggctggagat

SEQ ID NO: 5637 - DNA, 484 bp, Triticum aestivum
  Clone ID: uC-tsro9316001e12b2
tttttgaactacaaaaaggacttgttatcaagcataatgcttaccagcgttttgccacatgtgctgcaacagcttttctcttcaaagaaatagctcgaattcataaccttcccgtccaggaatttgttgtaaggaatgatatgggttgtggctcaactatcggtcccatacttgcttctggtgttggcatacggactgttgattgtggtattcctcagctttccatgcacagcgttcgggaaatgtgtggcaaagaagacatagacacgacatacaagcacttcaaagctttcttcgagatgttctcggacattgaccagaaactgaatgtagatttttaggtcttgacatctgaatgtgcagcctcttaataatgtatggatattcagctcggtctctgaataatgtcttgatcattgtatcagcttttgttgcatattcaatctggttaagacaagagcactggctctgaaatcattttcca

SEQ ID NO: 5638 - DNA, 188 bp, Triticum aestivum
  Clone ID: uC-tsro9316001f01b2
ttctgctccgcacacgggacagcggcggcgccgctgaatcaggagcccaccgacgccggggtggacgccgggcgcgcgttccgcggcgtgcggaagcggtcttggggcaagtacgcggcggagatccgggactcgacgcggaacggcgtgagggtgtggttgggcacgttcgagagcccggaggcgga

SEQ ID NO: 5639 - DNA, 461 bp, Triticum aestivum
  Clone ID: uC-tsro9316001f02b2
ttctatgcatccgcagacgcctgggcggcgatgcagatcctattccggtgctgttgcggtgaggcggcgtgcccggagtgggcggtggtggaggtgcagggcgtgctgcagccgcagccctgcttctccggccgcatacagggcctccacatcggccgcctttgctccacctacttcgtcccgtcttccaagggcgggtacaccttcaccgcggggtaccatgagctcgccggctcgaaagtgactctcaagaagccccttctggtgctgaggaagaagaagaacgacaaggtgaaccccggcgagctcggacaaggtggacaggcggcggcggcggctgacgtggagctggaggtgattggcatcatccggcacaagaacctcttcaaggaccgtcccaaggcccctattcaaagccggtgccgtatgaaaagaaggccatgcctgaagcggcgacccca

SEQ ID NO: 5640 - DNA, 427 bp, Triticum aestivum
  Clone ID: uC-tsro9316001f04b2
tttctttatttcaactggaaatagatagttcatctggcaactttggtgcaacattttctttccatagatgtgcatctgatgacttccatttctcgttttggttaggagttcccacgatgggatggttacaaacttaaagtccaagtgactataaaagaaacaacaaaaacatagtaaaatgtataaaattacgcagctttccccccaccactggcggggggttttggagctgaccccttaggaaaacaattcttcgattgtttgctagatacgttatgagacggacctgtttaaggggccgttccatttctgaagctaacaaactttaagtcgttgatttgcctgcgatttgaagacgtcgtagctgcatcctgctttggttatttcagtgcatctgcggctgtttttattgcaacaaaaaataaaa

SEQ ID NO: 5641 - DNA, 475 bp, Triticum aestivum
  Clone ID: uC-tsro9316001f05b2
accttttgaaccctacccacctgagcgtaaactaaggggacctttcaaactactaccttcaaccctcccaccaaccactgtgcatacaccctcccatgatcccataaccctcggaccccaaaacagtcaacgccaggggaggcacctgcgccgcccgcaccccgaacgtgctccagggcttgcacgaaccagcaaatacgcaaaacctacacatgccgcggcacaaaagaccggcgtccgcgacaggaggagagactttcgaagccgaaactcgagagctcccgcgcctggattgctctcggcagtcgcccagggtagcgcaagcagctaaggatgctcggacgaaacaaagcaacaaccagaacaggcggcataaaccacccggcaagagaagaaaaaggcccccaagggaagaacctacccaaaagacgccatgccggaaggcaaagggcccccgaagcggaaaacattccca

SEQ ID NO: 5642 - DNA, 316 bp, Triticum aestivum
  Clone ID: uC-tsro9316001f06b2
ccctatttcgagcggccgccgcagccgccttcgtccaggccgccacgatgccgtcgcacaagaccttccggatcaagcagaagctggccaagaagcagcgccagaaccgccccatcccctactggatccgcatgaggaccgacaacaccatcaggtacaacgccaagcgcaggcactggcgccgcaccaagctcggattctaatccggggatgacggcgatgacacccgttgctgccgacgggagaagggtctagggtacctagggtttatgacgtctcgctgtttttgcacgctagcaagtgactccgggatgcc

SEQ ID NO: 5643 - DNA, 219 bp, Triticum aestivum
  Clone ID: uC-tsro9316001f07b2
tcttccacgcgtccgggaacattggaggatatgacagcatagcgcatgcttgatcattaccttcccagaagagctcaacggtgtatgcttaccaccagaagtcattgccattcatatttcctccctgattgatgtgtaaactcagagctgtaatggagaaatgaacactatgtgagatttcagatttatatgctgtacaagtggccttaccctgctgat

SEQ ID NO: 5644 - DNA, 206 bp, Triticum aestivum
  Clone ID: uC-tsro9316001f10b2
tctttcggcatgctgaggctgccggaggaagagcagcacaagggatatctcagagctctgtaccaaattctccgccagatgctgctcccggcatcctgattcgaacttccaacttcacaaacgattctatatgatgccttgtggcgccgattgcctctaaaaaaaaaataaaaaaaaaaaaaaattaaataaaaataaaaaataat

SEQ ID NO: 5645 - DNA, 437 bp, Triticum aestivum
  Clone ID: uC-tsro9316001f12b2
tttctccgctacagccctgactcggagatccaaacccagtattcctgagcttctcatacctacaaattattaggtcgtgcttttcggcttccttctgtctccttagctttccccatttattgcaaccttctcaaatctcaagattccaactggtcaaggaagtgaagaacaaggacagaaggacatggatgccttaagttcaatgctcgacaaggcgaaagacaaggtgaaaagcaaccctgatgtgatggagaaagtcaattcggtcctcgacaaggttaagaaccacccagaagtcatggagaaagttgctgaggttttacatctgggaaaacgtgaatccaaagagaaagaacccgaggccgaggacaagacaaaagaaggcgagacctttgccgacaagacccaagactcaaacatcctagaccagtccgtgg

SEQ ID NO: 5646 - DNA, 503 bp, Triticum aestivum
  Clone ID: uC-tsro9316001g03b2
ccacagcgttcttttttgctttactgatggctgctcttaaatctggaaatgcaccccaaatggtttcggggtatgcaccccaaatggttcccgggaatgccagtgtgctaaatgctaatggttctaatgcccctaatggaagcttgccttcccatagctggcctaatctaggttatcagaaccctgcatctatttcagcagcagcaccacaaaatggtgtcgccaaggctgggaacaacaatcaggacttcttttctgggaacttcggttttggttcgcccggcatgccagcaaatgggtccacaaccgcaggtgctaacaagagcgcatacacccctaccttttgtaccctgcccttttaatcaagcatagagtacgatttttcctcattaacgcaaggaatgttttcgaagcgattaatggcttgaaatactcggagatggatgaggccttcatagggcgcagatttagggagaacgttggggggcgcttgtacactgttt

SEQ ID NO: 5647 - DNA, 339 bp, Triticum aestivum
  Clone ID: uC-tsro9316001g05b2
ttattttagcagacggccatagcctagaccatacggggcttccttcaacatttgacgggcggcaaacccatgccctcagctgaaattagggtcgcctgcagagcagagaaggcagacggccatggacggcgacagcccggcgatgacggacagcgagcggagggcgaaccggtacgtgcaggcgcccaaggtgcatggcctgggcggcatgaagaactacatggaccaaacgacatctctcttaagcctcagctacgccggcgcggggggcagggccgtcgaccactcgtgcgactgcgcgccaaccacgcacccgggctccttccgctgcaagcacca

SEQ ID NO: 5648 - DNA, 470 bp, Triticum aestivum
  Clone ID: uC-tsro9316001g06b2
attcccgggtttttccacgcgtctgtcttcgcctccgcccacgcgtccgggcgcctatgaaggtgtatcggctgtttcttgtgtcttcctggatggcgcgggtcctcgtgtgcctggaggaggccggcgccgagtacgatttcgtgcccatgagcaggaacggcggcgaccaccggctgccggagcacctcgccagaaaccccttcggcgagatcccggtgctggaggacggcgatctgacgctctaccaatcccgtgccatcgcaaggcatattctgcgcaaatgcaagcccgagtttctaggagcgggcagcctcaaggagtcggcgatggtggacgtatgggtcgacgtggatgcccaccagcttgagcccgtactcaagcccattcgtgtttaactgcatcatcaacccgctcgttgggagggacgtcgaccagggcctcgtcgattgagagcgtcgagaagctca

SEQ ID NO: 5649 - DNA, 488 bp, Triticum aestivum
  Clone ID: uC-tsro9316001g08b2
tttttgacgcgtgggcgctgccgccgcccaaaatccacctgtgaagaagaaatgaggggcctcttctcttcctctctcgcgtccgatggcctcgagcccgggcgtcggcggcggaggggcggacggcggcggaggggatggaccgacgacgctcgacgagctgtaccacatcaacgtcgtgccggccgagctgcacttcaagttccgcaaggagctccagggcctccgcgtgggcctcaacttcgagttctacaacctagaggtgaatgattttgaggcaaaggtagttctgaagcccctggactttgaccggaagtggaagttccagtacaagcccatcagtggtgacatacagctgctttccaagaagataccagtcacaaaatatctcaaccttcaggtcggcattggtcacaatttccaactgaaggcaactggatggacgtggaagctctctactgcttggggggagatggtgtttttcagat

SEQ ID NO: 5650 - DNA, 423 bp, Triticum aestivum
  Clone ID: uC-tsro9316001g09b2
tcttttcccccaacggcttgagggcattgatggatcatttctatacgccttccacaacattgccctccacgatgtcaacatgcgtgcattggacggtcttatgggaccagtctatgcaggcactggctgacagcttcgccgtgtctgcactcctatggatttgaccctccacgctccacagaacacggaggctgctgcagcagttgcttcctgaagaagcgcacgatcaagagcactgtttcctcaggcacatttgaagagacaacggtctttgtgcatggcaaactttgatgatgaggagatgaacatgtcaacattttccaagaggttcggttattcaaactacctcatcaactctatctcgaatgccgtttctaagggcgcccgcttgatgtcaccctgggtcaagaagggcgtccacca

SEQ ID NO: 5651 - DNA, 74 bp, Triticum aestivum
  Clone ID: uC-tsro9316001g10b2
tctggccgcccttttttttttatttcaattttggggctttcttttgcggcattttttctaatctgtcctcaaaa

SEQ ID NO: 5652 - DNA, 440 bp, Triticum aestivum
  Clone ID: uC-tsro9316001h01b2
tgttttcgacgacaacggcgtggtgatcaagaggaagattaagaagggtctcatggagaagctccaggagaagctgcccggccacaaggacaccgagggtgagcacgtgacgggcctacccgcaccggcggtccccgcgtccgtgcagacccaccatgacaccgacgtcgtcgtcgagaagatcgacggtgacgtgaagacagaggcgacaccggcagtgcccgaggaggagaagaaaggcttcttggaaaagatcaaggagaagctgcccggcggccacaagaagcctgaggacgctgctgcggtgcccgtcacgcacgctgctccggcgcccgtcacgcacgctgcttcagcaccggtgcacgcgccggcgccggccgccgaggaggtgagcagccctgacccgagtgagaaaaaggcctgctgggaagatcatggac

SEQ ID NO: 5653 - DNA, 178 bp, Triticum aestivum
  unsure (1)..(178): unsure at all n locations
  Clone ID: uC-tsro9316001h02b2
tanaggccacgtgatgttcggaactcagagcgtaagttctaggaattttgatctgcgtattgccaacatgatctgattatctcatcgtttatctgaagtgattcgatatattaaaaaccaaaaatacataaaaaaaagaaaacataacaaaagaaaaaaaaaaagaccaacaccaatg

SEQ ID NO: 5654 - DNA, 373 bp, Triticum aestivum
  Clone ID: uC-tsro9316001h05b2
ttcttaaccccggcaaaggcgctgccatgatccgcgggctttttcaggactgtttggggtggggccgagatgcactggccctacgggccccgactggggccaagccggcgccagagaaactcagtcaggctcacgaccgtcgcgtgcgcggctgccagcatggtgacgcccatgaggacgccctccaggcggactgcccgggcgcgcgcctctgaggagacagagatggctctgcggtccgagacgggcctctgcatgctcaggaggggcaaggaacactgccagaggccgaacggccgccgggacggcaccatgtccaacacctacgagccggtcaaggtcctgggcccgccgacggccaacctcagcgacc

SEQ ID NO: 5655 - DNA, 464 bp, Triticum aestivum
  Clone ID: uC-tsro9316001h06b2
ttctttgcgtccgcccacgcgtccgcccacgcgtccgatgaggacggcgtgttgtgcggtgtgtccgacggccacgggccgcacggccacctggtggcgcgcagggtgcgggactcgctgccgctcaggctcatgtccgccgcgcgcgcctcgcccaagaccgggctcgacatgccggccgccgcctggaggaaggccttcgcgcgcgcctacaaggccatggacaaggacctccgctcccaccccgccctcgacagcttctgcagcggcagcaccgccgtcaccgtcctcaagctcggcacggacctttacatggccaacatcggggactcgcgcgccgtcctaggctccagagacgccgccgccggcggcatggcggccgtgcagctcaccgttgacctcaagcccgacgtccccagcgaggcggagcggatcaagaagtgcaggggcagggtgttcgcgct

SEQ ID NO: 5656 - DNA, 366 bp, Triticum aestivum
  Clone ID: uC-tsro9316001h07b2
ccgggacacgcggcgggagaggaggatattaagacagttttgtggtgctgcccgcgacccccacggagcgcacggccacccagcggggcgcagggtgcgggactcgcggccgcgcaggctcatggacgacgcgcgcgccaaagccaagaccgggcgtcgacactgccggccgccggctgaaagaaggcacccgcgcgcgcctacaagggcaacgacagagacactggctcccaccgcggcatagacagcagatgcagcggaagacacgaagtcaccagctcgaagctgcgcgcggaccaccaccatggcacaggggggaccctggcgcccccctaagagcgagacgccgacagggccgtatggcag

SEQ ID NO: 5657 - DNA, 510 bp, Triticum aestivum
  Clone ID: uC-tsro9316001h09b2
tctcctcacacgtccgcggacgcgtgggcggacgcgtgggcttataatcattctttcgcccgtcgccgccgccgctcccgccgctagaccagctcgccagcagcaatggcccggatcaaggtgcacgagctgagggggaagaacaaggcggagctgcagggccagctcaaggacctcaaggcggagctctccctcctccgcgtcgccaaggtcaccggcggcgcccccaacaagctctccaagatcaaggtggtgcgcacctcgattgcgagggtgctcacggcgatctcgcagaagcagaagtcggcgctgagggaggcgtacaagaacaagcgtctcccgctcgacctccgacccaagaagacccgcgccatcccgaggcgtctcaccaagcaccagctctctttgaagacggagagggagaaaaagcgcgagatgtactttcccatgaggaagtatgctttcaaagcccaggttaggagcacatgttttacctgcccggttttgctc

SEQ ID NO: 5658 - DNA, 237 bp, Triticum aestivum
  Clone ID: uC-tsro9316001h10b2
tcttccacacgtccgcccacgcgttcgcccacgcgtccgcccacgcgttcgatttttggaaccattcttaattcatgaggccaaacggcctaggccaatagtattaaattgatttttgtagatttaggcgggaaagaacaaaaaattgggaaagagactgtaaatatctcccagtatttatagtacaatactggatgcaaaactaccgggaatgccaaaaattaattcttgagttgt

SEQ ID NO: 5659 - DNA, 295 bp, Triticum aestivum
  Clone ID: uC-tsro9316001h11b2
tcttcctgacaccaaagctcatcttcttctacgtgaaatttttttgggtcttctgatttggtggacgtcttgcaactgcggatcaggctgcagctgcggctcagactgcaagtgcgggaagatgtaccctgatctgacggagcagggcagcgccgccgccgaggtcgccgccgtggtcgtcctcggcgtggcgcctgagaacaaggcgggacagttcgaggtggccgccgggcagtccggcgagggctgcagctgcggcgacaactgcaagtgcaacccctgcaactgttaagct

SEQ ID NO: 5660 - DNA, 454 bp, Triticum aestivum
  Clone ID: uC-tsro9316002a02b1
cgtccgggggaattcggcaattacacgaccacatgttagcccttaaaagagaagaagctcaagtgcaaggaagattcaacaattgatcggtttgaaatgcgaggcgatatctgggcaaggagaaggacatgcctgcgggataactctgcctttcacttgatccagtggaggaggacagcggggcttcggcgagtacaagtgcagcagccacgggaagcctcatcgcagaatgacagcaacacgctccttaaggaactgtatgtcacgatgaagagtctcctcgaagaattgaaagtcaacaccaaggcagcgacggagtcatgccagcttatcgccaaatcttgtcaagaagttatcgaggcctgcaagatctctgcgaccagcacggggacccgtattgtgaactgaggaaccgcatgtagatgagtagccgtgactttacatgtagatgagt

SEQ ID NO: 5661 - DNA, 172 bp, Triticum aestivum
  Clone ID: uC-tsro9316002a03b1
tttgtttttgtgtgtattcggtggcgtatgcataatgtatattggcaaggtatacccatacatacagtttgtttgtacatgtgggtacgttttcttttcctttcattaaacgggtttgctatttctcaatagactgagaaataggtatagctcaatcgatgctatagccttc

SEQ ID NO: 5662 - DNA, 535 bp, Triticum aestivum
  Clone ID: uC-tsro9316002a05b1
tttggaactctcgtcagtacctgatactattcctcctagagcacaggtgcaaatcccagtcgaggttacaaatcttcgcgcgagtagagatgttgctgttcttgatttctcatataaacatggagctgcactggtgaacgctaaacttcgacttcctattgtgttgcataaattcttgcaacctataactctttcccctgaagattttttcgcccattggaaaacatggaatgttcagtcactcaaggttcaagaagtggttagaggtgtaaaaccattacctattcctgagatggctagtcttctcttgagccttcacctggcagatactcctggacttgataccaacccgaacaacatggtggcgtgtgctacattcttttcggagacaaccaatgccgcgctttgtctggtgagagttgaaacagatcctcaagacagaagtcagctcccgctaacagtcgcatcaggagatcaaaatctgacattcgagttgacggagtacatcaaggaacatctgatcgacattccgagg

SEQ ID NO: 5663 - DNA, 522 bp, Triticum aestivum
  Clone ID: uC-tsro9316002a07b1
tcttctgtttcacagtgtgactttgaccgtcttaaattgtcgactgcgccctttatggaaaggaacctagaatttatgattgggtgcatggatggtctttcatcagagcaaaacaagttccaatattactatcgcaacctaggaaggcaacagtcacagcaacaggcatggcttcaaaagagaaggcaagagaacatgtccagaaaggctgctggcgaggagccgttgccagaagaagatccatccaaccctatcttcaagccgcttcctgagccatcccgcttagagggttatctcgtaaccaatcagatctcgagttactgcaaccatatcaatggggttgctggccagagtttcaacaggctatacttgatgaaggcgttgcaggaagattaggtgccgggtggcagctgctgtgagattttaacttaacactgtaccgcacctcaattttgcaatgtactccatgtgcactcgcacattgcctattttgttttgcccaaatcagatagttaagatgca

SEQ ID NO: 5664 - DNA, 482 bp, Triticum aestivum
  Clone ID: uC-tsro9316002a08b1
tttttcacgcgtccgcccacgcgtccgcccacgcgtccgcgccgaacaactctcaccggaacgcagcaaattccccagccttccctcgacccagatccggaaaatggcccgcacgaagcagaccgtgcgcaagtcgaccggcggcaaggccccgcggaagcagctggcgaccaaggcggcgcgcaagtcggcgccggcgaccggcggcgtgaagaagccgcaccgcttgcgccccgggaccgtcgcgctccgtgagatccgcaagtaccagaagagcaccgagctgctcatccgcaagctgtccttgcagcgcctcgtccgggagatcgcgcaggacttcaagaccgacctgcgcttccagagctacgtcgtgtccgccctgcaggaggccgacgaggtctacctcgtggggctgttcgaggacaccaacctctgcgccatccacgccaagcgtgtcaccatcatgaccaaggacatacagc

SEQ ID NO: 5665 - DNA, 505 bp, Triticum aestivum
  unsure (1)..(505): unsure at all n locations
  Clone ID: uC-tsro9316002b01b1
tgttattgttctatttatttgcttctgcacatttaggaatggaaagaagaaggcgcctcctgttgaaacacccaagcaaaggacaccagatgcagtatctgcagttgaatcacttcctcgccccacaagtactaggttccttgcatatgaagaacttaaagaagcaacaaacaactttgaggcttcatgtgtgcttggggaaggtggttttggccgtgtctttaaggggatactaagtgatggcactgctgttgctattaagaagcttactactggggggcaccaaggagataaggagtttctagttgaagtggagatgctgagcagattgcaccaccgcaatcttgtgaaactcattggatactatagcaaccgtgaattgtcacaaagccttctttgctatgagcttgtttctaatggaagcctagaagcttggcttcatggctcattaggcgctgactgccccttggatngngacaccagaatgaagatagcacttgatgct

SEQ ID NO: 5666 - DNA, 197 bp, Triticum aestivum
  Clone ID: uC-tsro9316002b02b1
tatttaaaaaaaaaaaaaaaaaaaaaaaaaaaaaaaaaaaaaaaaaaaaaaaaaaaaaaaaaaaaaaaaaaaaaaaaaaaaaaaaaaaaaaaaaaaaaaaaaaaaaaaaaaaaaaaaaaaaaaaaggggggggcctttttaggggtccaaggtttccgtccgggggctgggaacgtaatagtttttttttgggggcc

SEQ ID NO: 5667 - DNA, 242 bp, Triticum aestivum
  Clone ID: uC-tsro9316002b06b1
ttctttaccaagctatcgatatcctgcgtcttgcaacttgttctgtactactccgtttatgatgttaagtcagatcttgtggatttatagattttgagagatattgtgttgcatgtttagaaaatgaccctttcccctcttttgaatcaagtggttgccatctaaaagacacgctacgacatatggaagaacaactaaaccaagatgtcaactaagacagaaacaaaagaaaaactgaatgg

SEQ ID NO: 5668 - DNA, 464 bp, Triticum aestivum
  Clone ID: uC-tsro9316002b08b1
ttgtcaggggtttgaggctgtcatgcgtgtcaggtgcagtcaggggcttcaagttcaagactattctggcaatttctgcaagcgcgtccctactgatattgatttgcctgtgattgactctgacaaaaccataatggtttcctttaagcatgatgataagtttcaggagaattcagaatgtggttttcagtgtgcacttctttacaccacggtatatgggcaaagaaggatacgagttataaatatttcacttccatgtacaagcatgctcagcaaccttttccgatgtgctgatctggaagcacagtttacgtatgttgttaagcaagctgcaaatggcattccatcaagttccctatcccaagttagggaccaagtaacaagtacatgcatcaatattctccagtcctaccgacaatattgtgcatctgtaagttcttctggacagttaattttcccgaggc

SEQ ID NO: 5669 - DNA, 390 bp, Triticum aestivum
  Clone ID: uC-tsro9316002c03b1
ttcatcggctcctaccagcaccacgccaggcaagaagaaagccacgacacctcctctactgttccttatccgtgtcccgtagctagccagcaatctgcgcagcaagaaaagaagggaggtacttggatcgcttcttctgtggagatggtggcgcccatggtgatcgcgtccgcggggctcgggatgctggcgggcgtggcgatggcgaaccggacgaccagggacgggctgccggcggcgtccagatgggacgcgcggccacgttgctccacgtgcagcggcaccggccgggaggagtgcctctgcagccgttggtccgaccgcgacgttggctgcaggacgtgcttccgctccggccgcaagcggtgccgcagctgcggaggctctggc

SEQ ID NO: 5670 - DNA, 339 bp, Triticum aestivum
  Clone ID: uC-tsro9316002c04b1
ttattacaatcaaaaaagaaaagacaaaaaagggggactttataccatatatatataaatatctcatcgaaagaaaaaaaggatacagcggggggcccttaatacggggcggtcagcttgaagggccatgcatgaagtcacgagctgggaagcttgctgttgttttaagatgtagacaaaatgaaatgacgtgggcaatgaggaacaacttcttaattggagaaactcagagaaaaccaaaataaatggccttgtagaagatcccactttacccacgcgggcatgcaacgaaaaggccctcacatagcgccctctaaaacaaatgcactgcccgaaggg

SEQ ID NO: 5671 - DNA, 433 bp, Triticum aestivum
  Clone ID: uC-tsro9316002c05b1
agctggtacgcctgttggtatctggtctggtatttctgggttgactctacgcgtctgttttcgcgtttgtccacgcgttcgtttacgcgttcgtccacgcgttcgtccacgcgttcgtccacgcgtccgctttttttttttttttttttttttttttttttttttttttttttttttagattggaattattttgatccagaagctcttaacaggggcccaacattgcacgttagtgtccttgtaaggatgtttactttaagcttcagttttatgcagaatttttttgaattgattgattggtagagattttattacatgataccatgttacacaattttacagggcacgattggattgtggttggttgccaaactgcaggggttgtgattttaaatcaaaaaaataaaaaaaggggtggtcggttttgaggat

SEQ ID NO: 5672 - DNA, 264 bp, Triticum aestivum
  Clone ID: uC-tsro9316002c08b1
tcgtaagaagggacggggcaggaggcagtagtatcatgctctggatttctttcaaaaagatcacaactgggagtggtgggtggatattttgatcgactcctgttaagccatgttacaactgtgagtggtgggtggtctaagagtggcgagtagttttcaagacaatgtgcgagccattgttggatccttttactggcacagaaccgcgaattacacttacccacacaatcatggttgatgagacaaatcaaatctttgaccgtc

SEQ ID NO: 5673 - DNA, 504 bp, Triticum aestivum
  Clone ID: uC-tsro9316002c09b1
tcgtttcttctcgcccccctcgtctccttgccaggacctcgcgcgcatctcgccccccccccccctctcactcgcccaggtctagggttccggcgcccgattcgggccgaattggacggcgccgcggcggatcggaggagcgggggagagatgacggggaagaagcgcaaggcggaggcggcgcggctggacgagacggaccgggccatgtacggcgcgttccggggcgccgccaactcgctctcgcagctctacacgctcgccatgggcggccagaagctctccttccaggccggcgagcgccacgccatggaaaagctgtatgaatggatcttaagacagcatgaaaatggtttgaggctgacagttggtgatatagcctcgcacgtccagcatgagattcagtatggaggcgacaatccgttggcctctccaagatcacaatatgcaagccaaagcactcatggtaccgtgcatatgcccaacacaggcaaccagcaacca

SEQ ID NO: 5674 - DNA, 317 bp, Triticum aestivum
  Clone ID: uC-tsro9316002d02b1
ggggggcataattaaagggaaccgccgcgatctgccaagcagcaccgaaggaaggaacgggcctccaagcgaagaacaccagcgcccacttggcacagattctaaggggaggaggccatccaaatgcccaacaggctgcccaagctggtggaggaaaccaacgcaaaaaccgcgatgacagaccgggagggactacagaagaactggagcgctgcgacgcacacgtacagagggaggtggcatgcgacaggccttatgccggcaatggctctgcgaagaccggccggagatccctagatgctacacaccatcaagat

SEQ ID NO: 5675 - DNA, 328 bp, Triticum aestivum
  Clone ID: uC-tsro9316002d03b1
tttttatgtcaagtgtccttaggaagatgaggtctgctggtggtggtgctggtgacaagaagaaatagaacttggctagctggtgaattttatccggaagcaaagtcctgtattaccagtccgtacctatagagctatggccattgtgttgacactatctttagcccgtggtttctattttgagaagaccaatctttttaagatttttatacatgagtctggtgcctttgtttgattacttggtactctgctgtttattcagttatgtagcttgtctgggttttgtacctgcgcttgacacgtaatttacaactctatgactggtaaa

SEQ ID NO: 5676 - DNA, 289 bp, Triticum aestivum
  Clone ID: uC-tsro9316002d04b1
ttattcgcaaagtgcgggagattgttgagcagagctggacggcagactaataagctgagctcaccatgcgttctcatgcggtttctgtaccaaaatgtttgtaactaaaatggctgaactccatcgttaccacctgaaacagcaacttgctttgttgcatcatttggctggacggctggagattgctctgtcatggcctgtgcctatactgtctgtatcttgaacacaaacattttgtaacgtcttgtgtgggtttgtaatgttctagtatcatatcatattgattctg

SEQ ID NO: 5677 - DNA, 219 bp, Triticum aestivum
  Clone ID: uC-tsro9316002d05b1
ttttgaccagaccaggtacaaatactctgtcgaactgagaatttcctgagatggatgcatctaggtgacaaactgtaattgatgtagccttgcatctggacaaaattgtattggactctgaattgtcccagcttcatagtgcccctgtgcaaaatgcctgttcacaaagaaaaaataaaaaaaaaaaaaaaaaaaaaaaaaaaaaaaaaaaaaaaaaca

SEQ ID NO: 5678 - DNA, 269 bp, Triticum aestivum
  Clone ID: uC-tsro9316002e01b1
tggttagacaccaaggaacacaaggaaggacggggcctttgttgaatgattggtggatactaaaggagcgtaatcatattgtacggtgcgcaagaggggcgacaggttaacacgatggaggatcacgtcacgcacgattggcctcaagttcgatcgttttgagagtgaaaggaagtcaatttactgggcagaagattaaagtgttcttgaggtataaacccgggtttcaccgagatagagtgaggagcatttattctatatatgccctg

SEQ ID NO: 5679 - DNA, 372 bp, Triticum aestivum
  Clone ID: uC-tsro9316002e02b1
cttgtattccacaggctacacctccaagtgagttcaccctgtttgattcggtgggagctcagcattgtccgggcccggcaagggaggcaaggggccgggcaagggcggcatcgagctccaccggcaggtggctctgtgacaacatccacagcatcaccaaatcaactgatccggcctctcgcgcgcaggggcggaacagacagagcatctgctggctcatttacgaggagacccgaagagcgctcaagatctgtctcaagaacgtcatacgagacggctgacactacagcctagcacttgccgctgtatgaccgttacacaacatggacgactggtacgacctcaagcgacaggaactcactctctacggat

SEQ ID NO: 5680 - DNA, 497 bp, Triticum aestivum
  Clone ID: uC-tsro9316002e09b1
ctcgcagccccggtggtgggaacgcgcgctcgtgctcgtcgtgcagggcgtctgcttcaacgcctacttcctgggctgcctcatctcccccaagttggcgcaccgttgcccttggtacccagaggaggaggccgtggagtcctatactgagtacctcaaggaccttcgaggccttccttgatcgagaacaccaccggtccggtcattggcgtcgactactggcgccttctcgacgacgccaggctcaaggacgtcgtcaccgccgtgcgcgccgacgaggcgcatcaccgcgacgccaaccactacgcatcggacattcattaccagggaatgacgctgaatcagacgcctgcgccgttcgggtactactgatcagctcaatggaccatatatcgatgcctgctcagtccattgttggtgcgtactactaccactgtcgccgatgactggtgcgcgtgcagcctgatctgcggaaacgatgtgtgtgtatgattctt

SEQ ID NO: 5681 - DNA, 171 bp, Triticum aestivum
  Clone ID: uC-tsro9316002g03b1
atgcgttctttgcgtccgcccacgcgtccgatttatacgtctacaaatgttacgtacgtacgtaaataagcacacattccggcctgcatgtatccatgcggctctgtggagcgtgtaaatgtatgcaaacatctttacttttgttttgttgttcaaaacttggacctagcc

SEQ ID NO: 5682 - DNA, 410 bp, Triticum aestivum
  Clone ID: uC-tsro9316002g07b1
tcgtccacgcgtccgcgcctctcgccccttccgtccccttgccgccggagcgagcaatggacctcgacgacgacatggtgccgtactccccctccggcgactcctcgccgtcgtcctccgacctcgacaccgagtcgacggggtctttcttccctgaccggagcacgacgctggggacgctgatgggcgtgtcgacgttcggcggcgccggtgtccagcggcggctgactcgggcggcgccggggcaggagagcgagaggccgacgcgtgcggcaacggaggagcgagacgggcggcgcgcgggcgggtggcgacggaggaggcggctgcggtgcggcagctggtggcggctgtgccgcgacgacgccagcgggccgtcgacgaggctgggcgagttcctggacatggag

SEQ ID NO: 5683 - DNA, 428 bp, Triticum aestivum
  Clone ID: uC-tsro9316002g08b1
tctttgacgcgtggggctcgctggggcagaaccccactgaggcagagcttcaggatatgatcaatgaagtggatgctgatggcaatggaacgattgactttcctgagttcctcaacctgatggcgcgtaagatgaaggacactgattccgaggaggagcttaaggaggctttcgcgtgtttgacaaggaccagaatggtttcatctcggcagctgaactccgccatgtcatgaccaaccttggtgagacgctgacagacgaggaggtggatgagatgatccgtgaggctgatgtcgatggtgacggtcagatcaattacgaagagtttgtgaaggtgatgatggccaagtgagctgtcatactaagctagttctatcttgatgttagcagctagtctagccttgaaaactgacagcagatggtactac

SEQ ID NO: 5684 - DNA, 483 bp, Triticum aestivum
  Clone ID: uC-tsro9316002g09b1
tcgttcacgcgtccgcggacgcgtgggctcgcgcacgcgtcctacgccttcaacgactactaccagaagaacggccaggccagcagcgcgtgcgacttcagtggtgctgccaccattgtcaaccaggcaccatcaggccggtgcgacccgagcccgagctggtgtgtggcgaacgcggcggtgggcgccgcgcggctgcagaatgcactggactacgcctgcggtcacggcgcggactgcacggacatccaacccggagcacggtgcttcgatcccgacaccaaggtcgcgcatgcgtctttcgcgttcaatgactattaccagcgccatggccggggcgccggaacgtgcgccttcgccggtgccgctaccattgtccggcaggcaccaaagataggcaactgcgtgctgccgtaagggcctgaactgaagaactgtgccaaagcgaagcttactacacgagattaagcataattccgcaga

SEQ ID NO: 5685 - DNA, 454 bp, Triticum aestivum
  Clone ID: uC-tsro9316002g12b1
tcttttccgcgcattccatccaccgccgcattccgaggggttcgagctcgccggagagggaagagagatggccaggaagggcggagagaggaagaaggcggtgacccggtccgtcaaggccggcctccagttccccgtcggccgcatcgggcgcttactcaagaagggccgctacgcgcagcgcgtcggctccggcgcccccgtctacctcgccgccgtcctcgagtacctcgccgccgaggtgctggagctcgccggcaacgccgccaaggacaacaagaagagccgcatcgtgccgcgccacctgctccttgccatccgcaacgaccaggagctcggcaagctgctcgccggcgttaccatcgcgcacggcggcgtgctgcccaacatcaaccccgtgctgctccccaagagggcccttgagaaggccgagaaggaggcccagtcgcccaag

SEQ ID NO: 5686 - DNA, 406 bp, Triticum aestivum
  Clone ID: uC-tsro9316002h02b1
gttttcagcgccctccatggcgccatggcaggatacagtggcttcaccgtcgcgcccgtgaacggcagacacgcttacatcccattctatagaatcaccgagaagcagaacaaagtcgtgatcactgacaggatgtgggcgagggtgctgtgctcgacgaaccagccctgcttcctgagccacgaggacgtggagaacatgaagcacgacgacgatgagcgccaccacctgcacaacacgcagctcctcgatggctcaccggcgaagtgctcacccaactgtaacgggtcagctggagccgagtgagaggcacaaagctgttgggatggatatattgagcatgtgtaattatagctattcttatttaaccttctcttgggagtttttagcttgccttgtagtagag

SEQ ID NO: 5687 - DNA, 229 bp, Triticum aestivum
  Clone ID: uC-tsro9316002h04b1
tgatacctctttatcctagtatatgttttctgtgtaacactcgtcggtgccgcaacactttgtgttcgactaagaagtttttatcaagagttgaacatcacaataaaatgaaaatgtggtgtaatgagacatggaaccgggttagtttctgtgaaaaaacaagaaaccaccctcgaaaaactcatgtgacgagtgattaatactggcttgctaggcttggattatgatg

SEQ ID NO: 5688 - DNA, 253 bp, Triticum aestivum
  Clone ID: uC-tsro9316002h06b1
tttttcggtgactaggtgggaaggcgatatcatggatttcaagcaacacttgaagaaaagggctggtctctagatttcctgtcttttccttctctcggctctttggagatctagacaacccaaagttttgcctctgtatcagaaaagcttccatcatttagcgcgacaagtacaagtactattgtatcacttaaaacatatcttctctacgctattttataaccagacgatccgtatttaatttcatatcttt

SEQ ID NO: 5689 - DNA, 364 bp, Triticum aestivum
  Clone ID: uC-tsro9316002h07b1
tcgttgacgcgtgggcagctttctcctgctcatcaaccttgttctagctagctagctactccaggtgagcgagcttactttctggagcacgaaacgcatggcggtgtcggcgctggcgatcctgctcgcctcgtgtgccctggcggcggcgagcttagacacggagttcgacgtcacctggggtgacgggcgcggcacgatcctcaacaacggccagctcctcacgctggggctagataagatctccggcttcgggttccagtccaagcacgagtacctctacagcaggatcgacatgcagctcaagctcgtctacggcaactgcgacggcaccgttaccgcatactacgtaatgaacccaaca

SEQ ID NO: 5690 - DNA, 356 bp, Triticum aestivum
  Clone ID: uC-tsro9316002h08b1
tttagagacccaccgacgcccgtacgattggtcctactgcaattacaccacacaacggtgctccgctacgctgcgctcgctctgcccgcaccgtactgttcacaaggggcgtgggcgccggtcgccgacagtgaccggaccgagccgttcgtgcgagcacaggacgcggggaggagatgccggctgatctccggttctcagacgcgtctagctccagcgggaggaggaggcggcgtcatcgatctcggcgggggaaaggcgcgagcttgggcttgcctgacttattgctgacggcgggggcgaaggggagggcagaggcgatgctgcggctgtagtcgccattcgcagtggtgcct

SEQ ID NO: 5691 - DNA, 229 bp, Triticum aestivum
  Clone ID: uC-tsro9316002h10b1
tttttccgtggtaatgctgttgccgcagtgctgttaataagacagatatatccaggtttcctgtaaaacgtaagagtatcattcagctgttatgcatggctctagctgatgaagtgttgtccgaggtctctactcgtatgatgtcggagcctgtaaacgcaagaaacaccccttgaaaaacgcatgtgttgtggtattaatactggtttgctaggcttggattctcctg

SEQ ID NO: 5692 - DNA, 486 bp, Triticum aestivum
  Clone ID: uC-tsro9316002h11b1
tcgttatgggctgcgaaaacattgtaccaggtgatccattctgctcgtgcgaacgcagctcacaaccatggactggatgcagataaacttattgcggaagaggcttttgtggggaaaggactttatctcaagagattgtcttaccacgccaaagggaggtgcggtgtcagggagagacctaggtgcaggctgacggtggtggtcagagaagccacagccgaggaggaagctaagattgcgaaactcagggtcatgaactacaagaagctcaccccgaaggagaagcagctcatgccgtaccggcttatcgaggtcagcccgaaatgggctcgtaaaaggaaagaggaggaggaggaggctggtgcttcagcgtagtacaagtttacgtttgcagcaaggtctgtctttcttggccggcctggagccagagattagtagctgcatctgcagtcgtctggtctatctgttgagacttactgaagaaca

SEQ ID NO: 5693 - DNA, 84 bp, Triticum aestivum
  unsure (1)..(84): unsure at all n locations
  Clone ID: uC-tsro9316002h12b1
tagctgcnttaaactaaaagaacaaaaataaatggaggaccattattaaaaaaattaacaaaagaaaaaccaaaaaaaatatat

SEQ ID NO: 5694 - DNA, 398 bp, Triticum aestivum
  Clone ID: uC-tsro9316003a02b1
ttgtacgtcccagccctccctcgtcttatatctagggttcagggttcttgcggcggcggcgcgacttcctcccccctcttgcgaaggtctagggtttggctgagtagagaagagagacttccccctcgtccagtagggagccgccatgagccgatcggggcagccgccggatctgaagaagtacatggacaagaagctccaaatcaagctgaatgcgaaccgtgttgtcattggcacgcttcgtggatttgatcagttcatgaatttggtggtggacaacactgtggaggtcaatggagatgagaagaccgacatagggatgggtggttctgagaggaaatagtgttgtgatgattgaagcccttgaaccaattgccaggtctcagtgatattttggc

SEQ ID NO: 5695 - DNA, 485 bp, Triticum aestivum
  Clone ID: uC-tsro9316003a05b1
tttagcaagtggcatgtgttctgggtagacgagagggtcgtgcccaaggaccatgaggatagcaactacaagctcgccctcgatgggttcctctccaaggtaccaattcctgctggtcaagtgtatgctatcaatgatgccttatctgctgaaggagcggcagaggactatgaaactatcttgaagcaacttgttaagaatggcgtccttgcaatgtcaaagacaactgggtttcccaggtttgatctccagcttcttggcatgggccctgacggtcacatcgcctctctcttcccaggccatcctcttgttaaagagaacaagaagtgggtcacccacatcttggactctccaaagccgccaccacagaggatcacattcacgtttccggtgatcaactcctccgcatatgtcgccatggtggtaactggggctgggaaaggccgtgcagtgcagaaggcgatttctgacaagaagacttctga

SEQ ID NO: 5696 - DNA, 369 bp, Triticum aestivum
  Clone ID: uC-tsro9316003a06b1
actcaacgacatcatccagtccatcatcaacatggacgctgatgtgatcacccttgagaactcgcggtctgacgagaagcttctctccgtcttccgcgagggtgtggtgcacggtgcacgcattggcccgggtgtgctcgacagttcactcccccaggatcccgtgcaaggaggagatcgctcgccgcgtgaccaagatgcttgcggggctggacagatcgaccctgcgaacagaccctgactgcggattgaagacccgacagtccgctgaggggaagcttgagctcaccaacatggttgaggtcgcccagcagatccgagccccgttcgcaacggcccagtccgccttgcttggtttgcgctccccac

SEQ ID NO: 5697 - DNA, 318 bp, Triticum aestivum
  Clone ID: uC-tsro9316003a08b1
tactgccgatatctcatggcccttcatcacctgagaccttgctgcaggatgctgcaaaagtcatcaaggccagaattgcgacgaaccctaactcgttgaacttcaacgtcatggttctttcaaaacagtgaatcggtgatgtaaggtggaatggataggcttggtcttttccattctcatgggctggtgcctgatagtcagcatagcccgtcggaaaaacagagacttgttgcctaaagtaaactgtgctctttgtgcaaaagttatgtctttgtcttctggcttttgtatcagaaataaaaaaggagtatttagttg

SEQ ID NO: 5698 - DNA, 572 bp, Triticum aestivum
  Clone ID: uC-tsro9316003a11b1
atctggggacttgggggtcgatcgatcggaggcggaagtgaaggaggaggggcggcgggatgacgcgggggaagcagaagatcgacgcgcagcggaagagcgcggagaagaaccagaagtccaaggggtcgcagctcgaggcccgcgccgtcgggctcaaggtcgtctgccccatctgcaaggcgcaactggccaacgagaagcagttgattgatcactatggatcaaagcatcccaaggagaaacctccaggtccatcaaatgcagagtgactgatgcgaagtggaagcatgagctatactttgcctgtttctgagggtgttcaatctgctccacacttggacgacttgagcctcagctctaccctatgtaatgcatgcatttcctcttgttccaggcaagagcctttgatgaccatgtatttgccttctatgagtatctatgtctaactgtcaacatacctttaaactgtatgtggtgcaatctttggataagagaatgctaaacttttttcgttatgtcattctcctgtacgggctgtgtctaagagccaaaaatgatgttttcttgtc

SEQ ID NO: 5699 - DNA, 298 bp, Triticum aestivum
  Clone ID: uC-tsro9316003b03b1
tgctactcgtgggcgggctccctgtcggcccggggatttacagtgatctggctgcgagggcgcctgtgaggacgcctctttctcctccatcctgagcatgcggttcaccgtcggtttcgctgcgcaggctggttcatgatatggccacattgttggaggatgaaggtagccattttagttcccatcccctgtgtgtgcttgtacacttcagagcacctcaatttccaggccacatctgctgttcatttgcactcttttaataatagcatatatctctattgacagagttggctagtct

SEQ ID NO: 5700 - DNA, 326 bp, Triticum aestivum
  Clone ID: uC-tsro9316003b05b1
ttttccacgcgtccgcccacgcgtccgcccacgcgtccgcccacgcgtccgcccaaaccctaccccgccgccgccgtcgccgccgcagcgcgcggaggcgacctcccaccgccgccaagatgcagatcttcgtgaagaccctgacgggcaagaccatcacgctggaggtggagtcctcggacaccatcgacaacgtcaaggccaagatccaggacaaggagggcatcccgccggaccagcagcgcctcatcttcgccggtaagcagctcgaggacgggccgaccctcggccactacaacatccagaaggagtccaccctccacctg

SEQ ID NO: 5701 - DNA, 424 bp, Triticum aestivum
  Clone ID: uC-tsro9316003b08b1
ttttctactatggaagcgagctgcctctagcacagggaattaactttggctagtttggtgctgaaggactgccagtgaaacgtcgtgctgcagcatggggattggggataatgtgttgagatatctggagcgtgcagccatcatcttcaggaaattctctgtgtcgatcattgcacccaaattgcgacgctgctgctgagtacatataataagagatgtgttgatctcatgtatgcattgttcatgccttttggcatgtttagccatctgtgccctggacctagtctattaataaactggaaaaatagcatatcttccggtgagagtaacattttacgcatgctaccttgagatcggactgctcgaaataaaaggagatcgaagccttcaggccgttgtgcaaaaaaaaaaaaaaaagggcggc

SEQ ID NO: 5702 - DNA, 459 bp, Triticum aestivum
  Clone ID: uC-tsro9316003b12b1
tttctggagaatattgattgatgattgtgatacttctaagtttggaatttgggatttgcgaaaagtgttaggaataataccacaggcaccggtcctcttttcaggtactattcgatttaatctggatcctttcagcgagcataatgatgcggatctatgggaggctcttgaaagggctcatctaaaagatgtcataaggaggaatgctctagggctagatgctgaggtttctgaggccggtgaaaattttagcgttggacagcggcagctgctgagtttagctcgtgcattgctaccaagggcaaagatacttgttcttgatgaggcaacagcagcagttgatgttcgaactgatgctcttatacagaagacaatcagagaagaattcaagagttgtacaatgcttatcatcgctcaccgcttgaacacttgtatcgactgtgacaggctgcttattct

SEQ ID NO: 5703 - DNA, 294 bp, Triticum aestivum
  Clone ID: uC-tsro9316003c01b1
tcgtgatctgcgccaataatttactggcacaaatcttcttgttccatttctttgacataaaaaaacaaaaacatgtacattaccagtgatgtatttgtgtgtacatgttcagcagttctcctgtgcaaacgcgattgtactgctataacatgcatgtttgggttcggttgtgatagtaataacattgaaaagagcagttttaagatgacaatgcagttgttgcaaaaaaaaaaatgaaacatcaaaaaaaaaaaaaatgacagatgagctagatgacacgagggcctagcttgg

SEQ ID NO: 5704 - DNA, 366 bp, Triticum aestivum
  unsure (1)..(366): unsure at all n locations
  Clone ID: uC-tsro9316003c04b1
tttttgacgcgtggggaagaacttccacttccctagctttgatagaaaacaaacaaggaaaacagagaagctcacaccatggcaaccaatgggtactccaatggcggcagcaccaagggaaagcccatcaaatgcaaagcggcggtggcgtggggtcccggcgagccgctggtgatgcaggaggtggaggtggcgccgccggcgcacatggaggtgcgcgtcaaggtcctctacacctccatctgccacaccgacctcagcttctggagaggagagaacgagcgtcaacgcaggttccctcgcatccttggacacgaggcnagccgagtggtggagagcgtgggtgaaagcgttgaggaccttgcg

SEQ ID NO: 5705 - DNA, 386 bp, Triticum aestivum
  Clone ID: uC-tsro9316003c05b1
tcttccttttccacccgccatctctccagcctccgccgacgcccgacgccatggggcaggcctgggcgtctctgcaagagaagctccaagggcggcactggaaggagaggcaggtgcggaagatcaccgacaaggtgttcgaccggctcaccgaggacacccagaagcccgagaaggacgccctcaagttcgaggaggtctacatcgccgtcctctgcgtctacaatgacatcaacaagtacttgccagggccgcactacgaccccccgtccaaggagaggctcaaggaactcatgagagagtttgacatcgacatgaacggtctcctggaccgcgaggagttcgcggagttcatccggaagctgaccgcccagtcactctgcgcg

SEQ ID NO: 5706 - DNA, 368 bp, Triticum aestivum
  Clone ID: uC-tsro9316003d02b1
tttttcacgcgtccgctcctcaaggcctaggagatggccgccaagtaccgcgccaccggccactctcccaagaaagtcatgggatgcttcggggcctgaagtaaaaacgttcctagttcacaaatggagcaagagtgaatgaagtgttcatccgtggttgcttgcttgcttccttctttctttcatccctcccaagtgtgtagtgtgccttgtgtgtaaagtctgccgtctctgtatatacacattgctcccaggacaggtgctcggttgtgtacatctttgatgcttgacaagcaacattcttatgtgtagttaagaaagtcacatttgttattactgttgacgttaagcagtcgttttttggtctt

SEQ ID NO: 5707 - DNA, 395 bp, Triticum aestivum
  Clone ID: uC-tsro9316003d04b1
tttttgcggccattggtgccatgctgcgtgcggtctggagaggaacttgatcagaccaggcccgacactcaaggggccgatagggacgactgagatgcagttccagtgtcttggttgcagccattcttctgagatgtttggatttgttaaggaggtgttcaattgctgcgcagagaactggaatgctgagacgctgatgaaagagctagatgttgtcagcaagtccaaaggcatattggcagcaaatcaggcgagccaatctacgattccccttctatctccggccatcagtccacccaaatccttcaatttcaatgccagcacctccattctcgactcacagattgatgcgctcaagaccagcccaaagtccctctctattgaaccctgttttg

SEQ ID NO: 5708 - DNA, 489 bp, Triticum aestivum
  Clone ID: uC-tsro9316003d12b1
tttttgctaggatgaatttaggaatggttgccatttcatggtacagttgagctgatgttgagtatctgtttatgtgtaacggttcatttcctccttttctttctgcaacatttcgtgaacttgcttatacaaagattcatcacataggcctttagcttgattgttccgccatgagaaccagcatgactttggatatatgtttctgcaggtttcagaatgtatccaagattgcagggaagttaattacaccatctgtggaagatgggttgtggaagatggacattgcccctcaggtaatttcactttgtcctagattaataacagattactaatttatttgtttaaacagggcaggttatttacgggagtattttctatgcagaaacttttagaattaactttgaccatttactattgacttgctaaattacatgttggcaggactattcctgcagcctagtataattgctctgccaatttccaaccaaa

SEQ ID NO: 5709 - DNA, 288 bp, Triticum aestivum
  Clone ID: uC-tsro9316003e04b1
tcccacgcgtgcgtccacgcgtacgaccacgcgtccgtccacgcgtccgaaaaagaaaagaaaaaaaaaaaaaaaaaatgaaatatgcttatgttctatgagggaggaaaaatggtgtagcaaatgatcacaaaagtcacagtggatagaagcaatgatatcaataaaggaatgaaacaacggaacaagaaatagaaataaaatgtagcatctcaatgggttggcagaatattgttgaatgtatagaaaactgctgcgaaaatgagcgcatgtatagtaactggttgg

SEQ ID NO: 5710 - DNA, 374 bp, Triticum aestivum
  Clone ID: uC-tsro9316003e05b1
ttgtgcagagagagctctgtttctgtggaacaacgatcatattgagggtttaatcaaacaaaacagcaaggtgttactgcccataatccttccttcgttagaacgaaatacaaaaggtcattggaatcaggcagtgcaaagcttgagtcttaatgttcgcaaaatattcttggaccatgaccctgtactctttgaggggtgcctgaagaagtttcaggacgatgaagctcaagaagatgcgatgcgatcaaaacgtgatgccacatggaagcgcctagaggaaattgcctcgtcaaatccacaagcagggaggccacaggcaatagctcatcagcagagttcttctacctaaccttctggctgacttgcatatg

SEQ ID NO: 5711 - DNA, 402 bp, Triticum aestivum
  Clone ID: uC-tsro9316003e06b1
ttgtgccggccgagggcccgcgtacggcgcgctggcgtgatcgctcgatccaatcggcggcccgtgcctccctccggcggtcaactcgagcccggctcggccgcaggggcgtggcggtaaaatcgcgctgcgattttgcgattgatgaatcgaaatccatggtggtggtggtgcgcgggtggtggcggtcgattatttttctcttgttctttctggcgtgaaggcgaggggtcggagcgtcggctcggaccggacggtgcgcatttcccacccggcccctcgctgtttctccttatcgcgagacaccccctagcagtgttcctagctctagtttccgttggttcccctatgtttgttctgggtaagacgatgataagatttgacagaaattgaagagtaaaa

SEQ ID NO: 5712 - DNA, 377 bp, Triticum aestivum
  Clone ID: uC-tsro9316003e07b1
tgttcgaccgctgcatgcaggcgaggcctagctagctagtgtcactaaccaagcagagcactaaccagtctcacaccggcggccagccatggcgctcgcgtccctccccaaggtggtgctcggctccttcgccttcgccatcttctggatgatggccgtgttcccgtcggtgcccttcctgcccatcggccggacggcgggctcgctgctctccgccgtgctcatgatcgtcttccacgtgatcagccccgacgacgcctacgcctccatcgacctccccatcctcggcctgctcttctccaccatggtcgtcggcggctacctcaagaacgccggcatgttcaagcacctcggcacgctcctcgcctggaagagcc

SEQ ID NO: 5713 - DNA, 372 bp, Triticum aestivum
  unsure (1)..(372): unsure at all n locations
  Clone ID: uC-tsro9316003e10b1
tttctgtgaaagattatgaatcaaagaaggcgaagctgggagacagccctgcagagaaggctgccgaagcatgagcatgatatatgcttctgttctatgagggtgggaaatggtgtgcaatgttcacaaagtccagtgttgtagcatgtatcataaggatgaacacgaacagtttgaaataaatgtgctctcatgtttggagaagttgttcatgtatagcagctgctacgaaaatttgtgcatgtatagcaactgcttggaagtcgtaatgtacaatttgtcatttgcccgttccaaaaaacattcggtactatattgctggttattttggttganaaaaannttntanaaaaaaataataaataaaatttg

SEQ ID NO: 5714 - DNA, 355 bp, Triticum aestivum
  Clone ID: uC-tsro9316003f01b1
tttgtttagtcatggcatcctccaagagcagccttgcaatgttcgcactggtcatagtcatggccgtggtggccggcgtctcggcgcagaacaccccgcaggacttcgtcaacctgcacaaccgcgcccgcgcggcggacggcgtcggccctgtgacgtgggacaacagcgtggccaggttcgcgcaggactacgcgaacaagcgcgccgccgactgccggctgcagcactccggcgggccgttcggcgagaacatcttctgggggtccgggcagtcgtggacggccgcgaacgccgtgaagtcgtgggtggacgagaagcggaactaccacctcaacagcaacacctgcgatgc

SEQ ID NO: 5715 - DNA, 264 bp, Triticum aestivum
  Clone ID: uC-tsro9316003f02b1
tgttctaccgtacgctcccacaatgagatgaccaattggtttagcatcaacctgattcttgctgagtgaggctcctcttctcatactctgacctcggaggatgtcatgttctgggatcgcaatctgaccagtcagtatgcggcgtataggacactagaagctatccctcttgcggggagtattgatttctccgtcgacagtccactcggcgttcatgcgaaattctaaagctgattgtgaagatccgagtctgattttcaaggg

SEQ ID NO: 5716 - DNA, 270 bp, Triticum aestivum
  unsure (1)..(270): unsure at all n locations
  Clone ID: uC-tsro9316003f03b1
actccacgcgtccgggcggagaccccgagaagttcaaggagctggcacaagcctatgaggtttcgagtgaccctgagaagcgtgagatatatgatcagtatggcgaagatgctctcaaggaaggaatgggtggaggaggtggtggtggagctnacccattcgacatattttcatcataaatagggcccttttttggaggtggtggtggtggcagcagctggggctgaaggcaatggaggtgataggattttttccatccactaaattctt

SEQ ID NO: 5717 - DNA, 354 bp, Triticum aestivum
  Clone ID: uC-tsro9316003f05b1
ttgtacaacatggcacttcattccaccagtagattaaacatagtagtgtagtagtggtacacaataatgtcaacaatctggtgcaaacttgcagagcaagtgccgctgttgaatctgtaaaggatgcttctgatcaaatccagtttgtcactaggcaaattagatacgaacatgtgattggtcctggaactttgtaggttgttctgcccatggctacgcgcagatattgccgaataaaaatgccaagattgcaagcatgtgttggtttggcatacaaaaaaaaaccaaacctggaacaaaaaaaaaatattaaaaattatatacctaataaactcttatatttaccaaaattaa

SEQ ID NO: 5718 - DNA, 281 bp, Triticum aestivum
  Clone ID: uC-tsro9316003f06b1
caaacacaagcaaccttgcaaatttatttttagggaaccttaagaacaattttaaccttggatacccactctgtgtccctaagacagggatttaacacctggtacacgttacccaataaccggacaatagcactaaaccggtggggccccaagtcgactttttttacgccaatacaagtgcccatgttccccgggtacgtaccgggggggaaacttcccggagacgagtggctaatatccgggggggttctttgcacggggggcggggaaaaatgtccggg

SEQ ID NO: 5719 - DNA, 368 bp, Triticum aestivum
  Clone ID: uC-tsro9316003f07b1
tttcgttcagttatcgcaggacaatacaactcgaatatgacattactatttggtttcttttcatggttgggagttttccttgcaattgctggactagttatgttttatagatgtagcaggaaagatcctggttacatcaacaagaatacaagagactcgcaaactcaaagagatgatgaacctttgttgaagaggggtctagataacccagaacttctggctggcaattggtctcaactatgtattacttgcaaaattgtgaggcccatacgctcaaaacactgctctacatgtgatcgctgtgttgagcaatttgatcatcactgcccttgggtttcaaattgcatcggaaagaagaacaaatggga

SEQ ID NO: 5720 - DNA, 87 bp, Triticum aestivum
  Clone ID: uC-tsro9316003g03b1
tcgtccacgcgtccgcgaaaatgtaaggatgcatggcaaaatagccttgcatgttgttccatcaatttaagatcatataatggtgtg

SEQ ID NO: 5721 - DNA, 151 bp, Triticum aestivum
  Clone ID: uC-tsro9316003g05b1
ttttaatatagaagaactctaaattattatgccatggatggaacatgtcattaatctggtctttggttattcggtctgacaaaagaattggatgtaagtgaattttgtatcaggaaggcaaacattacattgcgtgtcgttttcatgatgt

SEQ ID NO: 5722 - DNA, 259 bp, Triticum aestivum
  Clone ID: uC-tsro9316003g06b1
tcgtccacgcgtccgagaagatcgatcgatcgatctcggagcctggttgaatccacccaccgccactcgatccaatcacatacagcgaggaaagattaaaccgccgccgccgccgcgatgaagttgcagacggaggccgccgccgccgccgggggggaggggaggctgatgatccggcaggtgtgggcgaacaacgtggagtcggagttccaggcgatccggcaggtggcggagcggttcccgtacgtgtccattgaca

SEQ ID NO: 5723 - DNA, 315 bp, Triticum aestivum
  Clone ID: uC-tsro9316003g07b1
cttcgattccggcttctcgtgaagaagctgttcaatctgccacaggatttcctgacaaaaagggacgcgtgggctgggaccttcgaaggtgtcgtgcaaaccagaactgaaccgaggacagactgcccagagcaactcccgacgccgacgaggatccggcagacggaggcgaacgaggaggcgaagctgagctcgttccagcaggagatcgtgcagctggcggcggtgctgaacggcgaccaccagctaagcagcctgcaggagaggatcagggagaggatgaacgtgagggaaggcacctcctacatgaggagc

SEQ ID NO: 5724 - DNA, 377 bp, Triticum aestivum
  Clone ID: uC-tsro9316003g08b1
tttgcctctctctccatcccgacctctcgtggccgccgcgaagaaaaggagcttatcatggcttcaaaacgtatcctgaaggaactcaaggacttgcagaaagatcctccgacatcatgcagtgcaggtccttctggcgaggatatgttccattggcaggcaaccattatgggtcctcctgatagtccctatgctggaggtgttttcttagtgaatatccatttccccccggactaccccttcaagcctccgaaggtatcgttcaagacaaaggtcttccatccgaacatcaatagcaatggaagcatatgcctcgacattctgaaggagcaatggagtcctgctttgacaatctctaaggttctgctttcaatctg

SEQ ID NO: 5725 - DNA, 287 bp, Triticum aestivum
  Clone ID: uC-tsro9316003h01b1
ggctcagagaagaagaaactccaagcctgcgtggcgacgatgaagctggttcgaccagattagtacagccagcagtgtgcgatgtcaaccaccatgatgaatctgagctcggcgcggttcgttgcgagttgagacgggatctacaaactgaatctgtctccccgttgaagaccctctctgttaaaagactcacggaagaaacaaaatggtactgctaattaggactccctctgtaaactaatataagatcttttagagtactatcgagaaacatttctgtttcaaaa

SEQ ID NO: 5726 - DNA, 261 bp, Triticum aestivum
  Clone ID: uC-tsro9316003h02b1
ttgtctacctgagctcaccttttacttcacgtgttccttcgtgtcagcttatagatcagctcaatctccgaggacttgttcaaggagtgcacgaccagggtccaggccaggcacctagctacggacgtagctagcgaagagccacgtcgagcgcgactagcgcgcgggattgtgttccaacggcaagtccaaccggaagaccaacgccgacgccgcggtcaccaacggggacagcaacggcgggcccgccaagatgtacca

SEQ ID NO: 5727 - DNA, 413 bp, Triticum aestivum
  unsure (1)..(413): unsure at all n locations
  Clone ID: uC-tsro9316003h06b1
ttctcacgcgtccggtttttgtgggtgtggtgctgcttatcatcttgatatcaggactttgctgcatgatggggatcgataccccgtcaaggtttgaggctccccaggattaaacttggtctgatcttgaagcaaacccgatgtggatggccagtgtttgttaccctgcgcagtggatatagttagcttcctcttcaaaggtgccttgcttgtgtattttactaagccaaacttctgtttagtgatcaattttttgatgtactattgcattcccaaacccacggagatctgagcctttgcaactactacatngtgcaggtttatgttgtactatcaaaccagaattgtttcagttttccttgtgatagcctggatttcaggaagccataagatgatggcactaaatgtcatct

SEQ ID NO: 5728 - DNA, 300 bp, Triticum aestivum
  Clone ID: uC-tsro9316003h07b1
ttctgatcatccccgataccaaagctcatcttcttctttgaaatctttttgggttcacagatttggaggatgtcttgcaactgtggatccggttgcagctgcggctcagactgcaagtgcgggaagatgtaccctgatctgacggagcagggcagcgccgccgcccaggtcgccgccgtggtcgttctcggcgtggcgcctgagaacaaggcggggcagttcgaggtggccgccgggcagtccggcgagggctgcagctgcggcgacaactgcaagtgcaacccctgcaactgttaagct

SEQ ID NO: 5729 - DNA, 250 bp, Triticum aestivum
  Clone ID: uC-tsro9316003h09b1
tgatcgctcacacgtgcggccactcgtcggcgggggcgtatttgtaaatgatccggcggttcaacgagtaaagaggaaaagaagctggtctccgccaccaaggagggccaagaagcacgctgacagcaccggaatagatgaagaggaatgcagaactaaagaggaagtccgaggggctatccaaggtgatcaaggacgcgctggccgacaggtatgcgaaggtgagcgactcaaaaagaattgactattc

SEQ ID NO: 5730 - DNA, 474 bp, Triticum aestivum
  unsure (1)..(474): unsure at all n locations
  Clone ID: uC-tsro9316003h10b1
tttttctatgaggtgctgtacatggttgacgccattgatgagtactccattggccagctcaaggagtttgagggaaagaagctggtctccgccaccaaggagggcctgaagcttgatgacagcgaggaagagaagaagaggaaggaggagctcaaggagaagttcgaggggctctgcaaggtgatcaaggaggtgctgggcgacagggttgagaaggtgatcgtctctgaccgcgtcgtcgactcaccgtgctgcctcgtcaccggcgagtacggctggaccgccaacatggagaggatcatgaaggcccaggccctgagggacacgagcatgggcggctacatgtcgagcaagaagacgatggagatcaacccagagaacgccatcatggaggagctgcgccagcgcgccgacgtggacaagaacgacangtctgtcaaggacctggtgatgctgctgttcgagacctccctg

SEQ ID NO: 5731 - DNA, 416 bp, Triticum aestivum
  Clone ID: uC-tsro9316003h11b1
tcgaaaaaaaaaaaaaaaaaaaaaaaaaaaaaagaaaaaaaaaaaaaaaaaaaaaaaaaaaaaaaaaaaaaaaaaaaaaaaaaaaaaaacaacaagaaaaaaaaaaaaaaaaaaaaaaaaaaaaaaaagggggggccgttttattggaccaacccttattaccccggcgttgcagcgaaatattttttttttggtggccccaaaataaatttaattggccggggtttaaaaacaacgggctggggaaaacaatggtgtgacccaccaaaattgttttcaagaaaaaccccctttttacggcgggtggaaataaaaaaaggggggcccccaaggcccttcccaacaaatggccaacctaaatgggaaagggaacccccccttctcgggggccataaagcggggggggggggggggtt

SEQ ID NO: 5732 - DNA, 294 bp, Triticum aestivum
  Clone ID: uC-tsro9316004a11b1
tgatcgccggccggcggctggttgatttggtggcttaattactttggttaatctgttctctgcactgtgtgcgtgacgtggagtgctctgccatttcgtacctttttttgcttcctattccacattacattactacttgtgttgatatatgtactggtgtgttagtttactcagggctgtgagattgtacgagcagcaatgttatgtgtttttcctgcagattaactaatacatttgtcttgtaaaaaaaaaatcttaaaaaggagcctgacgacaccaggccttatcttattg

SEQ ID NO: 5733 - DNA, 508 bp, Triticum aestivum
  unsure (1)..(508): unsure at all n locations
  Clone ID: uC-tsro9316004b02b1
tttgtcacgcgttcggctcacacacacacagaggcggtgtcaatcccccagacgaggcgacaccggaccaagaagaggcggacggcggcgatgggcggcggcggaggcgcgcacggcggcacgacctacaagggctacaccatcccccacaacaagcgctggcacaccatcgccggcaagggcctctgcgccaccatgtggttttggattttctacagggctaagcaggatggcgctgtgctcttgggtatgcgtcatccttgggatggccatgatgatcacgcgcatggtcatggacatgcacacgagcatgaggcttcgtcgtcgtaatcgccgtcccattgagctcgacgctgaatgcggctgacagagaccctgacgcgtngcatgtttcgacgcaagtctctgcttaataaaaacaatcacaactatcattattcacccctgttgttngcatgtatttttttttagcacacaaactgggccttgtgtgtattttgttttgagc

SEQ ID NO: 5734 - DNA, 553 bp, Triticum aestivum
  Clone ID: uC-tsro9316004b08b1
tggtggcagtactacaagcgagtgacacaggttcttgcaccgatcagatccaacttctgcgcaagatgctggacaagctgtgggacgacgtggtggccgggcctcgcccggagacgggcctcgacaagctccgccgcgccgccgccacccaacccctcgccatcaacacagctgcaggggaggcgattaagcagtcgccgtcgatgccgacgaccccgaccacgccggtgacgccgtcgtcgtcgacgccgccgcgtggcggcagcgtgtggcggagcgttttccaccccgggagcaacctggccaccaaaagcctcggagccaacctcttcgaccgtccgcagcccaactcccccaccgtctacgactggctttacagcgacgagaccaggaccaggagcaaccaccgctaaataagagccgacggccagagaattgaagacaggaagttctgcgacgccgccatgtttgctgctcttctggttatctaatcctgcatagcgtacgttgctgcctgaggctgcatgtagtttggctggagcttcgtactact

SEQ ID NO: 5735 - DNA, 168 bp, Triticum aestivum
  Clone ID: uC-tsro9316004b12b1
ttgtgccgcgaaccaaacgcacccttggttgcagttgcaaagagctagcacatcacgtatgtatgtatgtacctgcagaactctctgaatcaccccgagtgagagaacctatgttggactgagccgttttattcagagttgctgccagtgctggttttcagagtgtcg

SEQ ID NO: 5736 - DNA, 419 bp, Triticum aestivum
  Clone ID: uC-tsro9316004c03b1
ttctttcaccccaaccccccctctcgcggcgcggcacggcagagaggagtcggcggagatgtcgggcgtgacggcggacgaggacaagaagcccgcgggcgacggcggaggcgcccacatcaacctcaaggtcaaggggcaggatggcaatgaggttttcttccgcatcaagagatccacacagctgaagaagctgatgaacgcctactgcgaccgtcagtctgtggatctcaactccattgctttcctttttgatggtcgtaggctccgtggtgagcagacccctgatgagcttgagatggaggaaggcgacgagattgacgccatgcttcaccagaccggagggggctctcctcgcccttagaaggagcttgctgcagcctgggctgtctatgtcgtatgctacctttagaactaga

SEQ ID NO: 5737 - DNA, 488 bp, Triticum aestivum
  Clone ID: uC-tsro9316004c10b1
tttcgtgtatgatggtattctccgcagcatcctgctgagcccgacgccgcagaacttgttgcgggctgatgtcaatcttcttgattaccgtggcaagcaaaacagagatgcagctgcggttcgccagaggttttgtgaattactccaaggcttcatccacgtcaagcagatcaaattgaatatccgtcttcggaaaggtttcaatgttaccagccacggcgttcttcttccagtcctactcaacatcgagtgcattgagcttggtctcgtctactcaccaagttgcaaggaagcggcggcaatgttgattgcggagctacttacctgctgtcctaagctccgtgatcttcggttcaaccttatcaccagttttgaagaggatggtcgccgctctgagggatctggaaattggccgacagtgtgtctagagaaggatttcaaggagtctgtccgccgttcaagcgccgtaaatgcagctgatgtgcagc

SEQ ID NO: 5738 - DNA, 440 bp, Triticum aestivum
  Clone ID: uC-tsro9316004c12b1
tttggaggagtacacgttccaagagatcatcgccaagcttgggccgatcccaagtacgtattcggcggttcatcttcccgcctatctgctcgagaaggctgatcagtacagatatcttcttcctggcaactgcatgagagaaagtgggtagcctccgctgtttgcatcaagatgtgatgcccccttggggaagagcgtggcttagcggttgtatttgataccagtggctggctgacttagttggatggcggctgggttgggttcatgattttgtaccatgtaattcaaaacaatggaaggagggcctgacagcatagcgcatgctccatcggccgctgtgtgcttgttttatttttggaagaggagcttagccacctgagtctctggttgattcattgcttccatgattgatttatgaactcagaaaattattgtagatt

SEQ ID NO: 5739 - DNA, 519 bp, Triticum aestivum
  unsure (1)..(519): unsure at all n locations
  Clone ID: uC-tsro9316004d01b1
tgagaatataaagaggtcaaacgaaggggcggcgaccgaagcttcagagggcactgggttctaggtaacaccgaggaagatgactcggttgatctcttgcatcctgacagctctgccaggagttcagaatctaggccttctggtgtaatggaggtgcagcttgagcctctcaccagatgagtagtagaatagcgtagatcaatctgtatctcccagtgtcagatacacacacacacacacaccaagtnctgttttcagtcatacaacagaaacagatggtgtccacaagcacggtgactttccgctcagaaagaaaattgaatttctcatgcttgtttcttctaccatggcagaatggtaccaggctacataggatcttcaaattatgcctttgattccttgcgtcacacttgtcagattgtatagtgtacattttggtttttcacaatagacaggcacaatttgttacattgtccccaagtaatttctttncccatcagattttgagagagagagaga

SEQ ID NO: 5740 - DNA, 223 bp, Triticum aestivum
  Clone ID: uC-tsro9316004d06b1
tgccacgcgtgcggaatcgtttgagtgggcgttttctttgccctgctctccctcaagccaacccacaaaggtgggaataatggtcggccaaggcgaccgacgtgggtcactcggggggccgcccggtggattacgatgaagatgaatcgtcaagatactgttccatcttgggtgcggatattgcagtatttcggacgataatgctaatgaagctgcttatgta

SEQ ID NO: 5741 - DNA, 441 bp, Triticum aestivum
  Clone ID: uC-tsro9316004d07b1
tcccacgcgtccgcggacgcgtgggcgaggatttttgacagctttgtgctgacccaagagcaaaagctgctgtcttggctgacatggattctattggaaaggaagcacagctaagaggttttgaattcgccaaagctgttactcttgttgctgaaccattcacagtagaaaatggtctcctcacccccacgttcaaggtcaaaagaccgcaagctaaggcctatttcgcgaaagaactcgcagatatgtatgcacagctgcgtgacgccgaatcagctaggcagaagttgtaattaatcgagaaatgttcaggagtaaggttcaaaccaatacaggacaggttcacacaacggagtaaggatttctcgtttgctccatgagcaggaatacctttcagccgtcaacagtcaggagtggtgctgggtgtgggtatctcttatt

SEQ ID NO: 5742 - DNA, 257 bp, Triticum aestivum
  Clone ID: uC-tsro9316004d09b1
tttctggtggaccttgacaagatgcttgagcgtgcgaaactcgccaatgagcagcgctactttgacgaagacgacgattagctattcaaatttgtttggcggctaccagggtttttgcagtttgctttggtcagaaaaactggctccgcatttcatctgcggtagtgtaataaactgatgtttcacagtacttgggttgtacttgtacgggagacctttttatggtacttgaatctgattgattaccttctctgaat

SEQ ID NO: 5743 - DNA, 409 bp, Triticum aestivum
  Clone ID: uC-tsro9316004d11b1
ttttcaccccttgtattaacaccatcgctgctcttcactcggagcacaagatcacacgcataaaatggtgtaggaaacacaggggcacaagaactcgagcaccagccactccagctgcctgctctgctcattggtttggtagggagagatgaaggcgatgtccgggacgaagctgctcctcgtccgccagccgtcgagcaagtacggtaacggggcggtgtcgccggcgacggccacatccatctcctggcgccgcttctggctcgtcgcgttcctcgcgctcttacctgcgcgtcccttttacggtcttcttcacggggcgcgcgccgtccggggcggcgtcccgggggtccagttcggcgcggccggggtcggtgcgggcagcgtcgggggcccgtccgcgggcgga

SEQ ID NO: 5744 - DNA, 522 bp, Triticum aestivum
  Clone ID: uC-tsro9316004d12b1
tttcaaccgcgtcgcttaatcggaagccgccgccagggaggaagagaacggagcgaggagccatggccgcccggaacttcttcgtccgatcccccaaggaggaggaatccagcgccgccatccgagaggctgtcctgttgggagggaagaacgccgccattgctggcaccgtggtcgcggttcccacggtgcgtatttgtgtgctgaattcttgtgtgcatgctcgcatatgtcctgacttctggcagatctgatcttgtgcagttcgttgcttgccgtgtccttccttgggctaagcacaacctgaactacaccgcgcaagcgctcatcatatcgacagtcctgtgtcgccggcttcttcatcaccgcggataaaaccattctgcgaaacgcaaggcaaaacaccatcggattggatcgacgagtcgacttgatccaggactgtacagaatcgcaggccctctgttccatctatgatccatggatggtgctgcatgaggagacgtcgaatttcagtttcag

SEQ ID NO: 5745 - DNA, 340 bp, Triticum aestivum
  Clone ID: uC-tsro9316004e01b1
tagtatcttgggtgtactgtatggcaagtgatccggtcaagatggtcctcttatgttcttagtggcaccgcctcccctatgtggttttgcacgtgtacttgctgactgcagatggatggctggcttgcatgtagtattgagctatgtaccctgctggtgccatgcatgctagttctttttgttctttgtttctgtcgtcccgtatgttgtttcagcttgtaatttgtttgaatctaggagagacttccttagtgacatgtatcctatgaatttggcgtggcgccttggttgtcaatgattctacattctgactatttgtgacgaatgtatgggatgcccc

SEQ ID NO: 5746 - DNA, 160 bp, Triticum aestivum
  unsure (1)..(160): unsure at all n locations
  Clone ID: uC-tsro9316004e04b1
tgctcngagagattcaggagagccctaatgagtgagactgttttcatgttttatgcttatgtcgccccatacacacctatgtaattcgagagtctatctatgatctattagcatacattggcataagtgttcactttgtggcaataatacttatctaata

SEQ ID NO: 5747 - DNA, 222 bp, Triticum aestivum
  Clone ID: uC-tsro9316004e05b1
tttcgacccacgcttctaccacgcgtcggagagaagaagaggaagccttgcagcagtggcgagggaagccaggatgtgcgcgaggggacaccgcggatgaggggtgctcccatcctgctccgctcgagggggatcgtagagcctgctgtatgacctgcctcaccggcgccagccctgcacccgcggcacgatcccatgccgcgactcctggaggaccccaag

SEQ ID NO: 5748 - DNA, 381 bp, Triticum aestivum
  Clone ID: uC-tsro9316004e06b1
tcgccgaagcagaaaaagcatcgtctcgtctcgtctcgtcgaggaatcaacagccatgggcggcggcaacgcgcagaagtccaagatggcgagggagaggaacctcgagaagctgaagggcggcaaggggagccagctcgaggccaacaagaaggccatgaacatgcagtgcaagatatgcatgcagactttcatctgcaccacctctgaagcaaagtgcaaggagcatgccgaggcaaatcatgctaaaagcgagctcgtccagtgctttcctcacctcaagcagtgatatctgcccatcagacagagagagagataaagagagagagagagagaagctgtcataatccacctactattatcatgttccgcaatgactga

SEQ ID NO: 5749 - DNA, 436 bp, Triticum aestivum
  Clone ID: uC-tsro9316004e08b1
tctctgggcaaggtgcccgcgtataacggtggtgatggcaaatggattgctgattctgatgtgatcactcaagtcattgaggagaagtacccaactccatcacttgttactcctcctgagtatgcatcagtgggatcaaagatcttctccaccttcgtcacgttcttgaagagcaaggatgccagcgatggctcggagaaggcgcttgttgacgagctgcaggcactcgaagagcacctataggcccatggaccctacatcaacggggcgaacatctccgccgtcgatctcagcctggctccgaagctctaccatctgcaggtcgccctggagcacttcaagggctggaaggtccctgaaaccctgaccagcgtccatgcctacaccgaggctctcttcagcgcgagtcgttcgcaagaccaagcgaccaagagac

SEQ ID NO: 5750 - DNA, 288 bp, Triticum aestivum
  Clone ID: uC-tsro9316004e09b1
ccccttttcgacccacgcctcctaccacacggccgggaataccagccaggggccattttaataagtgttgggtttatcccccacgtctcccgtttcatgaaccacagttgctcccccaagcgtctccggcagccagtgcagaacaaccacggagacgacaagcacccacacataatgtttttcgcacttaatcacatcgctcccatgacagagctaacctatgactatggtgtgcctggagaacagaccacccatagagccaagacctgcctgtgtggatcattaacc

SEQ ID NO: 5751 - DNA, 204 bp, Triticum aestivum
  Clone ID: uC-tsro9316004e10b1
gctgctcacgcgtacgaccacgcgaccgaccaggggtcctttcacgcgttcgccaaaaaaacacaaaaaaaaaaaaaaaagaacacaaaaaacacaaactcgtaaaaaaaccaacacacaaataacaacaaaaacaaaacctaacactaaaaaaaacaaaacaaaaaaaaagaaacacctccctaaaaccaaaacagggggggg

SEQ ID NO: 5752 - DNA, 540 bp, Triticum aestivum
  unsure (1)..(540): unsure at all n locations
  Clone ID: uC-tsro9316004e11b1
tgagacaatgtcacagtagggcatagtgctgtattacatggatgcactgttgaggatgaagcttttgctggtatgggagctaccctgttagatggtgttgttgtggaaaagcatgggatggttgctgctggagcccttgtaagacagaacacgaggatcccttgtggagaggtatggggtcggaaaccctgcaaaatttctgaggaagctcacagacgaggagatcgcttttattgcggaatcagctgccaactattccaacttatccaaggcacatgctgttgagaatgctaaatccttggaaaagattgattctgagaaagtcctgcgcaagaaatttgctcaccaggacgatgaacacgattccatgcttagtgtcactcgagaggtccctccagagctggcgcccaccagtcctactcctccaattaaactattctatcaccaccttcagtttgcattcttatttctctatctgtccagngagtttggcagtctacttttacttcagtaattttgggtcgagcattgtctaaagct

SEQ ID NO: 5753 - DNA, 417 bp, Triticum aestivum
  Clone ID: uC-tsro9316004e12b1
tttctcggaagtacgggcctctgaagctgcaagtgttggaccacgacatggtgtccaaggacgacctgatgggggaggccgagatcgacctgcagcccatgatcaatgcggcagcatcgtttggagatccagaactgctcggcgacatacagatcggccggtggctcaagtccggggacaacgctctaaccgccgacagcgctgtcatggtgaccggaggcaaggtgaagcaggaggtctccctgaagctgcagcacaccgagtcgggggaggtgacggtggagatgactggggatggctctaaacatttagagaatccggatatacgatggcaaatttgtactttgctgcaaaggatccattgaatcgactttctgggaaaaataataatttctgctactagtagcaggcaatcac

SEQ ID NO: 5754 - DNA, 487 bp, Triticum aestivum
  Clone ID: uC-tsro9316004f01b1
tactatttgtgagatgctccgccggctggtgccgccggtgcattattgggtggtcccacgcgtcttgttacgcgtccggccacgcgtccgcccacgcgtcctcccacgcgtccgcccacgcgtccggttgaagtgtttgatgaggaaggtctccatattctcatgggcatggcttttcttacctatctggagctaaaggtatcagagacagccggcgtcatgactgtaagtagcaacgggttcaagctgctagaggtgttccactacagaattaatgaagaccgtttgaatgaaggcgaagcaccagggatagaatttgcagcaggtgctatgccagcactccggcggctccatcttttctggaacggaaattttgctagtgatggtgctgacatgggtatccagcatctttcaagccttgcgcaccttcaagtggaaactaggtattataatgcaaccatggaagaggtgaaggctgtggagggtt

SEQ ID NO: 5755 - DNA, 293 bp, Triticum aestivum
  Clone ID: uC-tsro9316004f03b1
ttgtaagaagaagagagggtgctcaacaacttctgcgactccgccatgtttgctgctcttttggttatctaatcctgcatagcgtacgttgccgtccgaggctgcatgtggtttgtcttgagcttcgtactactgtctactagtgcttgtaactttcttttcttatcccggtctgctcactgcatgctagcgagtgatgggtgtgtatgtgtgtactttgtgtacgctccatgtgtaaattctcgtgtgtgtggtgtggtgttctcaatgtttaaccacctactatggtaaga

SEQ ID NO: 5756 - DNA, 370 bp, Triticum aestivum
  Clone ID: uC-tsro9316004f07b1
tggggaacgcggaaagggatctcgccggaacgctccatggagctcgccgcaaccggcgctgctgccctccggcgatcgttggcgtcggggtatccggtggttccgagggagaggagaaggcggatgccggccagggtgtcctgcgtcggccgcggaggcagaggcgtaggcgggggattcgccgacgaggcgcacctcaggtactacgaggcgccgccgcggaaggcggtggaggcggctgccagggaccttaccaagctccaggccatgggccttgtcgcctgcgacccggccaaggagaagatcctctcggaagccactgagctgctgctaaaggagctgaatcagatgaaggatgcagaggacgagc

SEQ ID NO: 5757 - DNA, 467 bp, Triticum aestivum
  Clone ID: uC-tsro9316004f10b1
ttttctcaaaatgatttattcatgatgatgcaggtcaatgtattaaatgaattggtagctccagacacttgcgcacaaagcgtagaaattttgtatgaggttaggggtggagtagacatggaatttcaagttccagttcctttcaatgttgtaccagttcaacagatagttcctcagagtggtggagaaggccaagctgagttagttcttgattcttgtattggtagttccactgtgcatgacccgtctaagatgtctgctgagctttgcattggtgaatcttgcacttctatgttacagctgatgaagaggtatctccgattggcaacaactaatgcatcatggactgcgaacaattcttttgcagtctacccgtattattatggggcttactttacttcgggtgtggatttgagtggcaccacaggctatattactggtgattatgtggggcttttggcttcatg

SEQ ID NO: 5758 - DNA, 390 bp, Triticum aestivum
  Clone ID: uC-tsro9316004g01b1
tggtcatctcctccgccaccaccaccaccacgtgcccggcctcgctcctcgccaggcaggccgtccgccccggcgccgccgtcgtcgcgctgacctccgcgaacggcggcggcgacgacgcccccgtccggcccgtcaaggtcgacgccggcgccgcgtccggcgggaagccgtgaagctgaccggccggaacaagggtgcatccgtgcatgcattatctatgttattaggatataatcacatgtatcgctcctgtatactgcttcccttccaattttcttgctctgaagatcagactcaccatgcacacgtacgtgcatgtgcatgatcgagcgagctcccatgagaaggcttatctcgctccctccatgaatttgcatgaagatcttc

SEQ ID NO: 5759 - DNA, 384 bp, Triticum aestivum
  Clone ID: uC-tsro9316004g09b1
tttttcccacgcgtgcgtccacgcgtccggcgacgcgtccgtccacgcgtgcgcccaaaccctaccccgccggcgccgtcgccgccgcagcgcgcggaggcgacctcccaccgccgccaagatgcagatcttcgtgaagaccctgacgggcaagaccatcacgctggaggtggagtcctcggacaccatcgacaacgtcaaggccaagatccaggacaaggagggcattccgccggaccagcagcgcctaatcttcgccggtaagcagctcgaggacggccgaaccctcgccgactacaacatccagaaggagtccaccctccacctggtgctccgcctccgcggcggcgccaagaagcgcaagaggaagacctacaccaggcc

SEQ ID NO: 5760 - DNA, 283 bp, Triticum aestivum
  Clone ID: uC-tsro9316004g12b1
ttcttacgcgttcgagaagatcgatcgatcgggctgttttactggttgtttcctcccaccgccactcgatccaatcacattcagggaggaaagattcaaccgactgcgcctccgtgatgaacttgctgactgaggccgccgtcgccttccgcggggaggggaggctgatgatcctgcaggtgtgggcgaacaacgtggagtcggagtgtgcaggcgatccggcaggtggcagaacggttcccgtactggatcatggacacggcgctccctgtcgtgatccact

SEQ ID NO: 5761 - DNA, 317 bp, Triticum aestivum
  unsure (1)..(317): unsure at all n locations
  Clone ID: uC-tsro9316004h01b1
ttttcttcgcgtgcgtccacgcgtacgaccctggttgtcttcttcccaaacccagtgcaagcaagcgcaaccatggctccgattggcgtgtgcagcaccctncccgacgggcagctcgcgtggttcgacgagagcgaacagatgcaacaggtctccatccactccctggccgccggcaagaaggtcatcctcttcagcgtccctggcgccttcacccccacctgcagcaatcaacatgtaccaggcttcattactcatggccgggagcttaaagcccagggtgtcgatgagatcctgcttgtcaagcgtaatgaccc

SEQ ID NO: 5762 - DNA, 226 bp, Triticum aestivum
  Clone ID: uC-tsro9316004h04b1
tgctctgccagtgcttctactggctctcctggatgtgttttcaactctttcaatggttagagctgacgtcttccttgtaggccttcgggcagtgctacttgtagtggtttggatcaagagtttacctgtgttagtgtactgcagttatctgttgttctgtctagtctttcgagtttcagtctgtcagagttagtgggtgttggtcgtctgtcagtctagatcgcga

SEQ ID NO: 5763 - DNA, 222 bp, Triticum aestivum
  Clone ID: uC-tsro9316004h07b1
ggagagaatggccgccgtggctggggggcaggatttgtggcggggctcacggcgtccatcagcggcgggctcccagtgaggatcaagcgcgcttcgacgtcgggtgcagacttcaaataattactagtgataaattgggatgcgctaacaatgtacataagtaggagatatcagtaggatagttgtttctttaataagaaaatcaacgctctcatcatcgaa

SEQ ID NO: 5764 - DNA, 344 bp, Triticum aestivum
  Clone ID: uC-tsro9316004h10b1
tttgcaatgagatatacatcctgaggggggtactttatacaaatgtattattgttccttggggcatgcatggtacctccgcacctgtcaatggttactgaatatatggaaatgggatcactgtactatctcatccatatgagtggtcagaaaaagaaactcagctggcgcaggaggctgaaaattattcgtgatatatgcaggggattgatgtgcatacaccgcatgaagatagttcacagggacctgaaaagtgccaactgtctggtgaacaagtatcggactgtcaagatatgtgactttggcctttctcgagcgatcacagatagtcctatgactgattac

SEQ ID NO: 5765 - DNA, 285 bp, Triticum aestivum
  Clone ID: uC-tsro9316004h11b1
gggagggtttttcacaaggtatgatctgttacccactggaggaggacgccatccgccctattctgcaccattactacatggcccaagttccggttgtcgctacgcttcaccgaggttctctcccttcttgatatatctgaagacacggacgatgcctgatcgagggctgatcatggattcttgaggaaggaactagtacactaagatcggatcggtaaatatatacatacatatgattaatatcattatcaattaatggcgctttatacctgagttttctgtatc

SEQ ID NO: 5766 - DNA, 323 bp, Triticum aestivum
  Clone ID: uC-tsro9316006a02b1
gtctgctgcttatggcctgggcatgtgtgcagagtgtggtggttctgcactgaggcctcatactggggcggcactgagcagattatacaacgtcatcaaacatcctaatgcattggatccggataatgcgatggcatatgacaattcctgatgcgctcctggaaagatatgtcaatttcatcgtgagagcaccgatgcatctcaggtcattcccgcttgggtaagaagaacgccatcgaaaaatgacctagctgaggccaagactgtgcatcaacagatctgtgcaatgctcgagaagtccgacagcgagcttttaggccata

SEQ ID NO: 5767 - DNA, 367 bp, Triticum aestivum
  Clone ID: uC-tsro9316006a03b1
gtctgttgtttatggtattggcatctgtgctgagtttggtggttctgcatttaggcctcatactggggaggcactgtccagattatacaatgtaatcaaacatcctaatgcattggatttggataatgcgatggcatatgacaattctgtttgcgctcttggaaagatatgtcaatttcatcgtgatagcatcgatgcatctcaggtcattcctgcttggttaagttgattgccattgaaaaatgacctagttgaggccaagattgtccatgaacagatgtgtgcaatgcttgagaagtccgacagtgagcttttaggccataataatcaacatcttccaaagattgtatctacttttgcagagatc

SEQ ID NO: 5768 - DNA, 163 bp, Triticum aestivum
  Clone ID: uC-tsro9316006a09b1
gaatttgcgggtcgccccaaacattgggttaccaccgtctacccgcggcgtgaggggaccatgaaagagccaggacctcagctgctgtggggtgaccatgatgggtgaccgtcatggcaacgggctgcacgatggctccagggggccaatggacttttgtgga

SEQ ID NO: 5769 - DNA, 197 bp, Triticum aestivum
  Clone ID: uC-tsro9316006a11b1
ttgtccaacggcactgcgccgcaagagcttacgatgactgaatcagcagcactgctgccggaggcaaacacctgatgagttcgcgtccgaacaacaggcataatcatggccctatggagccattgattctctgtggaggagcacataagggacgaggaactgataggccgcatactatcgctgggggaacaaccgaa

SEQ ID NO: 5770 - DNA, 281 bp, Triticum aestivum
  unsure (1)..(281): unsure at all n locations
  Clone ID: uC-tsro9316006b02b1
cctacgcttccgcaagtctgtgtagtaaacagtctcttgatatttccctgaaaattcattgccgccaagcgtnaaaaaaaaaaaaaaaaaaaaaaaaaaaaaaaaaaaaaaaaaaaaaaaaaaaaaaaaaaaaaaaaaaaaaaaaaaaaaaaaaaaaaaaaaaaaaaaaaaaaaaaaaaaaaatgggagaaaaaaaaaaaaaaaagggggggccttttaaaagaaacaaaataaacaacccggtgattggaaaacaaaaattttttaaaggggcaacaaaa

SEQ ID NO: 5771 - DNA, 328 bp, Triticum aestivum
  Clone ID: uC-tsro9316006b11b1
tcgtttgagcagtcatgcaaactctagactggatagctaccgccggcgcattttcctcttgaggatcaaataagaaatcgtgtaccgaaagcatgggaatttctttcacttgttcataatgttgttaataagtgctcccagacacacatactggactggatgacgtctcttgatgcctttgcctaatgcttgtatctcgtcgttactgtcatgagaggctaaactaaagtaaataacaccagtcccagtccagtatatactagtagttcgatgtgctacttgtcttattcagtgtttgttctcccaaacacaaaaaaaaaactgatag

SEQ ID NO: 5772 - DNA, 312 bp, Triticum aestivum
  Clone ID: uC-tsro9316006c09b1
tcgctacgcgtgcgcccacgcgtccggggacgcgtggggccgaagatcgccctccgtgacggtcttcccctcatggtcaccgacttccgcaagcggatcttcggcgaccaagataacgctgccaccgccaccaaagggaggttactagagatccggatttcgactgggatgcttgcattcgcagttgcgacgacaaagatgctctcccaatcaagaaggagcgagagaacaagaaagacggcgtagtcccaccggcgaagtaggcgctcgtagtgagcttatactagcgcggttcctttccaaacaaataat

SEQ ID NO: 5773 - DNA, 423 bp, Triticum aestivum
  Clone ID: uC-tsro9316006c11b1
tcggttatatcttgctcaattgctgttgatgctgcagcagatcgtcatcctggagtcgagcagtatgcaatcagggcatttgctgatgctttggatgccattccactagctttagctgaaaacagtggtttgccgcctattgatactctcaccgtcgtaaaatcccaacatgtcaaggagaacaattctcgctgtggcatcgattgcaatgatgttggtaccaatgacatgaaagagcagaatgttttcgagactctgataggcaagcagcagcagatcttgctggcaacacaggtggtcaagatgatcctcaagattgatgatgtcataacgccttctgagtattgatgacgccttcaagaacggaatcgactgtgctaagtggcatgcactccattagtcagcatattttatatgggttga

SEQ ID NO: 5774 - DNA, 370 bp, Triticum aestivum
  Clone ID: uC-tsro9316006c12b1
tcgtttcccatcaatccatctttccatgcgcattcatctccttagagcagctcctctcctctccattgctgctctgctcgaagatgaagctctccatgcagtcgctggcccggaagctctccatcccgtcgcccaagcggggcaagaagcaccagcggcagcatgacggcggcaagcgcgtcatctcccggagcgaggcgccgtcattcgcgtctgcgtgctactactgcaccacctcgtcctcctgcgaggacgcgctgccgcgggcgtcgacaccccggtcggtagctgcccgcggagatctcgcggcagcagctggaggccgtgctccggcggctgggccacgaggagccctccgacgacgagctcg

SEQ ID NO: 5775 - DNA, 311 bp, Triticum aestivum
  Clone ID: uC-tsro9316006d01b1
gtttatttccactgccaccgccaaggtggcctccatcgacaagaagatagggctcagcgagaagttcaccatgggcactacagtggtaaacgagaaggtcaaggagatggaccagaagttccaggtctctgacaagaccaagtcggcgctggctgcggccgagcagacggtgagcaacgccgggtctgccatcatgaagaacaggtacgtcttcacgagcgcgtcgtgggtcaccagcgcgttcggcaaggtcgccaaggccgccaccgacgtcagcacgatgacgaaggagaagatgtcagccgaggacc

SEQ ID NO: 5776 - DNA, 281 bp, Triticum aestivum
  Clone ID: uC-tsro9316006d09b1
tcggtgtattccggtgacggtgcggcgagatgtactgcggtgcacaccggaactctgaccgtgacgactgccgctactactacaaggcgggggccagggacgccatcatcagggaaaacccccaggggcgcgccgccaagaacgcccggatctgagcaacaggacacgacgtctacgcgtacccggggaaacatgaagcaccgagaccactctctgactgtgtctactgagaaacagtaaaggcgtgcgcgagagcttcttaaaggtgaaaaaaacggaga

SEQ ID NO: 5777 - DNA, 278 bp, Triticum aestivum
  Clone ID: uC-tsro9316006d11b1
tgggttatctccggctcaactgctggtgatgctacaatagatcattatgctggagtggtgctgcttgctgtcagggcataggctgatgctgtgcatgccattccactaggttcagctgaaaacagtggttcgccgcctatggatactttcaccgagatgaactgccagcatgtcatggagaacaattctagctgcggcaccgatgagcaatgatgtgaggtgccaaagacatgaaacagcagattgttgtggagactctgatagaggagcttgatgac

SEQ ID NO: 5778 - DNA, 310 bp, Triticum aestivum
  Clone ID: uC-tsro9316006e01b1
tttacgtgttcgcccacgcgtccgcggacgcctgggggctgagcttgcggctgcagcggcacagccactgcctgatgacgatgacgatctgatcgagtagagagaggatcatgagtcttgtctgtcttatcaatcaatactttgagagccagagactgtgcgagtcggttttaggctgaaggcttgattcggagtagtcaagccggatgtttttcctgtctgccttgccttgtctggtgggctgcaaactgtttgtgtgacattgatctacatcatgttgcttgccatggatttgatgttggccaaaaac

SEQ ID NO: 5779 - DNA, 160 bp, Triticum aestivum
  Clone ID: uC-tsro9316006e02b1
gtttgatctttactactcacggacagaaccacaagcaccacaagtgagtgaccatcggagcaaggtaagaccaggagagatgggaacgcggtctattgtggtgctgggcctggcgagggggctgagcagctcctgactgcgaggtggcgcccgatcgggg

SEQ ID NO: 5780 - DNA, 183 bp, Triticum aestivum
  unsure (1)..(183): unsure at all n locations
  Clone ID: uC-tsro9316006e04b1
cttactgtgtgggcggaatttgagttccaataaaccaattacaccttcgtcgttcacttgaaagattgtattattagaaacttcatacaaggcctggctgtttgtattaccgtcgctttttgcggaacttgtgctataattgatttaagaagtgcataggctaaaacataaggagcacanant

SEQ ID NO: 5781 - DNA, 296 bp, Triticum aestivum
  Clone ID: uC-tsro9316006e06b1
gttacctgtcagaacggcggcagcggtggcggcacgggaggtggcagcggtaatgctggtgcatacccttaagttatgtctatttatgtgatagatctgaagatggagcccagaatttcatgtgttttctttctttctgtttgcaccttgtggccccgctagtttgcggcgtttaagttcttgtatgctttctcatgtatactagtatggatgaatcaatcaagggccccatcaacttgtgttgttcaaaagctgaaagaggagcttgatgacacgaggcctaagcttggcactag

SEQ ID NO: 5782 - DNA, 394 bp, Triticum aestivum
  Clone ID: uC-tsro9316006e09b1
tcgtttctttgctgccatattgacttctattcagtccttgctgtgtgatccaaaccccaactctccagcaaattcggaagctgccagaatgttcagcgagaacaagcgagagtacaaccgcaaagtccgcgagatcgtggagcagagctggactgctgactaaggcagggcgaggcggcggctgccagaaagttgcaataagcaaccatgaaacctttgtttatggctctctatagttggttcttagatgaaatattaaacatctccagtgattgcttgcaggtcaaaccgtcaaagtatctttagtctccgtggtaattatgtgttatgtctcgtggcactgctctcatatgttgtgttgatcctgcctcatgaatttaggggcatcctatgt

SEQ ID NO: 5783 - DNA, 412 bp, Triticum aestivum
  Clone ID: uC-tsro9316006e10b1
tcgctatacactctctatcagtcacgtcaggctcggtggatcacggtagcactagcttcagctagccagcctctgccactccgggcattttcttgcatccacgacggcaatggccaccgctgatgtccagaacccgacggccgcgctgacggaggaggcgcccacggtggagacgcccgtcgccgccgaggaggtcgcgaagacggaggaggcccccgcgccggccgaggccgaggtcaaggcgcctgctgcccccgtcgaggtcgaggagaccaaggaggtggcacctgccgccgctgagacggaggaggccaaggagcccgagccagcagctgcggccgagccggaggccgaggcccccaaagagacagaggcgccagccgtggtcgagacagagaccaaggaggccgtg

SEQ ID NO: 5784 - DNA, 435 bp, Triticum aestivum
  unsure (1)..(435): unsure at all n locations
  Clone ID: uC-tsro9316006e12b1
tcggtgtcagactaccattcggaaaagcctcatatactggactacagtaaatatccagatatcgatgagcagaggcgtttcgtgaagacttacctgagcacttctcgcgaggaacctgaagcggaggaggtggagaatctgctccggagcgtggagaagtacacgctcgcgagtcatctggtttggggactctggggaataatatcggatcgtgtcaacgacatcgacttcgattaccaggagtacgcaaggcagagatttgagcagtactggcagaagaagcctgccgtcctaacctcatgaatagctgtacctatggctctaggaactccctgagggcctgtgctgctgcacacaaactgtgcagtgttactaacacacatatccnctggctgggataatgacaggaaggatatgagagaagcatactattac

SEQ ID NO: 5785 - DNA, 247 bp, Triticum aestivum
  Clone ID: uC-tsro9316006f02b1
gttacatctaaaaaaacaaaaaaaagagaacaaaaagaaaaaaaaagaaccaataatgctgatagataaaccaagaagagaaagagaacgaacaactagcaaaaaacaatggacataaaaagggggtgcctctctggggaggccaacatgacgaacgatgaactgaaagcccagtctctttttattgggtgaacaaatgaaacttaatgggaggctgtctgaaacgaaagaagaggggaaaccccgg

SEQ ID NO: 5786 - DNA, 330 bp, Triticum aestivum
  Clone ID: uC-tsro9316006f04b1
cttcttttctcattttgataacaagtatttccggacggaggggtacttccttcgtcccacaatgtaagacgcttttgcaacctattttgggacggagggagtattcgcttgctactactacttggtctgtatactgtagtagtgcttctgccctggatgtgatgtataaactgcctttgtggccagataagataagtctttgaattctcatcggacaaagttatcgtccggtgcatgtggtggagaaggacaggtttggaataaaagtttctacagtttcttcctcggtaaaaaagacaaagataaaaaacgaagagactgagaaaaccc

SEQ ID NO: 5787 - DNA, 392 bp, Triticum aestivum
  Clone ID: uC-tsro9316006f10b1
tcggtcatggatccggctcttcggcgccgctcccgcctgcctatccacctcctgctggtggccgtcactttactcgccgccctggccgcgcgatccgacgcggaggtcatcaccctcaccgaagagaccttctccgacaagataaaggagaaggacacagtatggtttgtgcaattctgcgtcccttggtgtaagcactgcaagagcctaggaactctttgggaggacctcggaaaggctatcgaaggtacggatgaaattgagatcggagaagttgattgcggtgcaagcaaaccagtctgctcaaaggtggacattcattcatacccaacattcaaggtgttctatgatggcgaagaagttgcaaaatataaagggcctagggacgtaga

SEQ ID NO: 5788 - DNA, 254 bp, Triticum aestivum
  Clone ID: uC-tsro9316006f12b1
tgggttacccccgcggacagggggcgggagtggaccatgactgactctgaacctcggggactgagtactaaccgtggttaggcttggtccgctcaacttgcatgatgatggtccctccacgccattggatgtgtccggaggagcacatgagaccagaaaagctgctggtcgcgctactttcaatggcaacacgcctgagccaaccatggacctctgcggatacgaaaggagagactgggactacgatgatagca

SEQ ID NO: 5789 - DNA, 434 bp, Triticum aestivum
  unsure (1)..(434): unsure at all n locations
  Clone ID: uC-tsro9316006g10b1
tcgttttctttgtgtttggcatctggtcattgtgggaaggcttcaaagaagaaggagagtcagaagatctggctgaattggaagcaaagctggatgcggactttaagactaacaaaggggaatcgaaaaataaatcaaaggcaactgaagatacaaagaaaaagcaaaggccatttctcatgcagttcttctcgccaatttttataaaggcattttccatcactttctttggtgagtggggtgacaagagccagattgctacaattggcttggctgctgatgaaaacccattcggcgtcgtcatcgggggagtcatagctcaagcactctgcactaccgctgccgtgatgggagggaagagcctggcctctcagatatccgagaagatggttgaattgtcgagcggngtgctattcctgttgatcagcataatg

SEQ ID NO: 5790 - DNA, 388 bp, Triticum aestivum
  Clone ID: uC-tsro9316006g11b1
tcgatgatcggcgacggccagatcaactacgaggagttcgtcaaggtcatgatggccaagtgaggtggcgggacagggggtgtcctcccacgaaataagcttaaaatttgctctcaagtggattggaatggaatgccagacagactcgcaaggatgtattttgtgctatgttctttaagtactgttgcctgttgggtagctggtcgggttatcttgtaccggcgtagtcgtggggagcagcatcggatttacctggtttctagtcttatcatggaatttaggggctttgtgcaaatctcggctttgccctgcggattgcttgtatgctagggttgtgttcagctacaaaatgctggccggaagtacattttgtggattccaattaaat

SEQ ID NO: 5791 - DNA, 361 bp, Triticum aestivum
  Clone ID: uC-tsro9316006h03b1
gttcatttcggtgagcgggttcaacaagacggggctgccgggcgccatctggaacttcatggcgccctactccaaggtggacagcgccggcggcatctccgtgctctgcgtcatcatgctactgctcttcaacctggcctgcaacgtaccaacagtgctgctgatggggaacgaggtggcgaccgcagcagccctgatctcgccggcagcggtgacgcggccgtggctgctgctggcgtgggtgagcacggcggcagggaatctctcgctgctggggtcggcggccaacctgatcgtgtgtgagcaggcgcgtcgggcgccgcgtacgcctatgagctcaccttctgaaccacctcatctt

SEQ ID NO: 5792 - DNA, 302 bp, Triticum aestivum
  Clone ID: uC-tsro9316006h05b1
tcgtttacgttttcgcccacgcgtccggccacgcgtacgaccacgcgtgcgcaaaaaaaagatgataaatgaccatgaagagaaagagaacaaacaaatgaggaaaaaaatggacataaagagacattgataatatgaggaaggagaacatgacaagggggggcctgtttggaggactcaagtttatgggcgaataaatgaaaccgaatagtttttctatgggggaccaaaaatgaaatgaactggccggggtttaaaaatgaaagaggtgggaaaaccctggagtcccaaatttaaactgg

SEQ ID NO: 5793 - DNA, 459 bp, Triticum aestivum
  Clone ID: uC-tsro9316006h07b1
tttcgttcacgcgtgcggccacgcgtccggtgccaacagatcggttaaatcacccccaaaacgcacccaccaccacaactccggcggcggcgaccagacgaacacgagcaccaaggcgatggcgactgctctcaaccgcggcctccgctccgggatccgactactcgccaccggcgccgaggtctccaagccagcttcacgtggattccatgctaccggcgtgaagaggatgtcagggcacggccatgatgagccatactacctgcacggctagcacatgtacaacttgcacaggatgaagcatcagaagctgactgcatggacttcggtgctgggagccgtaagcattggtatcggtgtcccggtcttcgcggtcgtcttccagcaaaagaagacctactacgatgagctcacataccctcccagggcctacttattggacctattttgaattagcat

SEQ ID NO: 5794 - DNA, 312 bp, Triticum aestivum
  Clone ID: uC-tsro9316006h08b1
tttcgttcacgcgtccggaagacaatgcggttggctctcaaatcgacaggaaaaaagagggctgcacctgatgacgacgacgacgacgagattgagatggaccctgaaggccgtatgatcattcgcgaagaacgggaatggcgtaaaaagaaacccgtcgtctcgcatgaggaggaggctgatgacaagacctctgtcagaagccagtcggtgaagaggaggaaggtggccagcactggctggtcctacaccggccatgagtacaccagctagaaggccggcggtgatctcaagaagaaagacaagatggag

SEQ ID NO: 5795 - DNA, 193 bp, Triticum aestivum
  Clone ID: uC-tsro9316006h09b1
cttacgcgtccgcggacgcgtgggccatcccagaagacaggactggaagtgtttagacggtcctgccccaatgtaaaatattcaagtttgtaaatgcttatataatgcggacatggagcatgtgatcccgagctggggaaaacaggaccaaagatgaactgattgcccggctgctctcgactagagcacaaac

SEQ ID NO: 5796 - DNA, 185 bp, Triticum aestivum
  Clone ID: uC-tsro9316007a04b1
ttcttgtacgcgtgggggaccacaacccgagcgggggcggtttagcaacaccaccgccaccacaccggtgccaaagaagtacgcgctttttggggtaacctagaaaaccaacggcaggaacctaacaacggccactaccgggaaagcttaggccagggacggcaccgcggatggacctcaccaag

SEQ ID NO: 5797 - DNA, 139 bp, Triticum aestivum
  Clone ID: uC-tsro9316007a05b1
tgctacgcgaccgcccacgcgaccgcccaggcgtgcttttacgcgaccgatttttcgtcatcacagagaaaagaaactgtgcttgtgttttaaaaaaattcaaacacctactgcaatttggtcaaccacaaaaacacta

SEQ ID NO: 5798 - DNA, 374 bp, Triticum aestivum
  Clone ID: uC-tsro9316007a06b1
ttattaccccataccaagctcatcccggggtcttaaatcttttgggttcacagatccggaggatgtcttgaactgaggatcccgctgcagctgcggctcaaactgcaagtgcgggaagatgtaccatgatctgacggagcagggcagttctgccgtccatatatgccgccgcactcgacctcagagcgaggcctgagaacaaggcggggcagatcgtggtggccgtcgggcaagccggcgagggctgcaagctgcggcgacaactgcaagtgcaaccccagcacaggtaagctggatgcactcacaccaacctgtgttggtgagagagtatacgaacataaccagacgtcgaatcttgatcgaaacccatccac

SEQ ID NO: 5799 - DNA, 241 bp, Triticum aestivum
  Clone ID: uC-tsro9316007a07b1
tcttggtcacccccggcgcccgggcgcccgagggggaccgtatacaggtatccgcgccaatgcccgcgggagagaggcgaccgggtgcgaccgaggaaggcctaccaatacgaccaacccgccggcgaagatgctcggacgcgaccccaagaagagcgaaaacaccgagagcccccaggcgctcggggcgcccacaaacgccccccaagaacaagctcaacaaggcctaccgcacggccgg

SEQ ID NO: 5800 - DNA, 150 bp, Triticum aestivum
  Clone ID: uC-tsro9316007a12b1
tttaacaccccaacccacaaccagcagaggaggagaataaagagagagaccgagagaaagagcccacaagggcggaggcggcggcgcacgccacaaagggggcaaacacgaccggcacgagccaacggagccgcgacgagaagaggacgc

SEQ ID NO: 5801 - DNA, 183 bp, Triticum aestivum
  Clone ID: uC-tsro9316007b01b1
tctccacgcgtccggagctttctacctattggatttattttagttgtatggtcctgatgtgctctaggaaccactcttgatatcttcggtttgtgaacctttttgcgacgctgagatggagctgtcatacagataatacttcatatggatgtactgatggacattcatgtggattatgttttt

SEQ ID NO: 5802 - DNA, 635 bp, Triticum aestivum
  unsure (1)..(635): unsure at all n locations
  Clone ID: uC-tsro9316007b04b1
gaaaaaggagaagaaaagaaggtacagaaaaaaagagggagaaaaaaaataaaaaagaaaaagaaaaaaaaataaaagggggagacagaaaaatttngggaaaacacaaagaaagaatgaaaggaaaaaaaaataaaaaaagaatttttaaaaaaaagagaaaaggaaaagaaaaggggggaaaaaaaaaaaaaaaaggagaaaaagaaaaaaagagaaggagaaaaaaaaaaaaaaaaaaaaaaaaaaaaagaaagaaaagaaaaaaaaaaaagaagaaagagagaaaaaaaaaaaaaaaaaaaaacggaagagaaaaaaaaaagaaaaagaaggaaaaaaaaaagaagagaaaagaaaaaaaaaaagaagaaaaatgaaagaaaaaagagaagaaaaaaaagagaaagaaaaaaaaaaaaagaaagaaagaaaaaatgaaaaaaaataaaaagaaaaagatagaagaaaaaaaaaaaagaggaaaagaaaaaaaggagaaaaagaaaaaaaaaagtgaaaaaaaagagagaaagagaaaaaaaagaagaacaaagacgaaaaatagaaagaaaaagaaagaaaagaaaagaaaggaaaaagagaggagaaaggaaaaaaagaaaaagaaggaa

SEQ ID NO: 5803 - DNA, 78 bp, Triticum aestivum
  Clone ID: uC-tsro9316007b08b1
ttaatgaccacacccccgatgggcaggtgatagggaaaaacttggaaacgctgccgcgaaaactcaacggcttcaaaa

SEQ ID NO: 5804 - DNA, 327 bp, Triticum aestivum
  Clone ID: uC-tsro9316007b10b1
ttttgaccccaccaccacctgtacgtatagcggagattatttaactaatattacgatgagaaacaccaaataatgcaatgcatgaaagcccaatcaccattatgccgacacaaagcagaatagtacagcgggctttggaagtggagagcacagaacacacgccactgccgagtgctggtccattcagacacctgaatggtttgcaggagacactcaatgaacggggctctggccggttcggggcgtctactaggggggacttcagagaacaccatgatttagcaaattctgcgttcaatggggcaactaccttgacacaaaactttg

SEQ ID NO: 5805 - DNA, 296 bp, Triticum aestivum
  Clone ID: uC-tsro9316007c01b1
tctacgcgtacggaccttggcaagcgctgtgccaagttctatgaggctggtgcccgctttgccaagaggcgcgctgtccttaagattggccctaccgacccatacaagcttcattgaccagaatgctcacggtctggctcgttatgccattatcttgccacgagaatgggctggcgcccattgttgagcttgaaatcctttgtgatggaccctcatgacattgaccgctgtgcttatgtgaccccgatggcactgctgcctgctcaaggctctcaacgaccagtatgtcctccttg

SEQ ID NO: 5806 - DNA, 98 bp, Triticum aestivum
  Clone ID: uC-tsro9316007c03b1
tcgtaataaaaaaaaaaaaaaaaaataaaaaaagggatattttaagaaaaaaagaccaaaaaaacccagcattaaacgagtcaccatacctaagcaac

SEQ ID NO: 5807 - DNA, 320 bp, Triticum aestivum
  Clone ID: uC-tsro9316007c10b1
tcgtcgtcagctcctcaacgacccaccgcagggggaccttatacaagagatcacgtcgctgcccccagctgccaccatgcagaatgaggtgggcgacatggtggacactcacgcccccaggaagagctcggtcaccaacaggatcatcacggccaaggaccacgcctttgctcagatcaacataggtaatgcagatgagaatggactgtatgatggccgtttaaccaccttagctctgaatgggctcgtccggactcagggagatgctgttggtaccctcgacaggccgaggcagaagaggaaggctgagatcaagcaga

SEQ ID NO: 5808 - DNA, 427 bp, Triticum aestivum
  unsure (1)..(427): unsure at all n locations
  Clone ID: uC-tsro9316007d04b1
ttttaaaatgatatcgagactgatatagaaagatcactaaagcaacttcagcaagtaaattctcaaatgcaaacctgggtatcatcaggaggctcagaagttctatctcatacattgacccgtcatatggagattttgcaagaccttacgcaggaattctatcggcttcgatctagtctcagagtgaagcaacagcatgcttctctccttgacttgagagactttgacagagcaaagtttgacgtggaagagtctggggactcagaacaagctcttcttagagaacaagctgcaatcagcaggaattctggacaggtggacactgtgatatcacaagctcaagcaacactgggcgctctcatgtnccaagcgncaacgtttggtggcatcactaccaaaataagcaacgtcagcagcccgatcccca

SEQ ID NO: 5809 - DNA, 388 bp, Triticum aestivum
  Clone ID: uC-tsro9316007d05b1
ttgtccacgcgtccggccacgcgtccggggctcacagctagctagatccaccagccatggccggcagcaaggcactgctgctactcctgtgcgcggcggtggtgctgctgaccccggcctccgagggggaggacggtctgaccaagttcaagctgtattggcacgacgtgctggcggggacgagcccgaccgcgatccggattgcgcaggcggagtgcagcaacagatactccaccttcttcggtgcggaggtggacatcgactacccggtcaccaccggccccgccgtcacggggctccgccaaatccaaggacgagatcggtcgcacgcaggggacctacacgttcgtcgaccaggccaccttcggtctcctcatgaacatgagct

SEQ ID NO: 5810 - DNA, 382 bp, Triticum aestivum
  Clone ID: uC-tsro9316007d10b1
tgtcgcccacgcgtccgggaaaggcccccaagcttggctgtggtggcgggaagcgctagatggagtcccttacgatcaatgtgaaattttgaaccagttgcatgatgtcttaccccgtatcttttaggaagttttttgctcaaaccagctgttgctgtcggtatgcagcatctgggtgcacaaaccagtggtggatcagtgtgaaagattgttttatgtttctcatcaatgtgagattgttctatgcttaaaaaaaaaaaaaaaaaaacaataatttattataattaaaacataatataagttaaaatattttgtcttgtaaatacttatttttcttaaaaatcaggggcggctcttctaatggatccaagtttttttaccc

SEQ ID NO: 5811 - DNA, 349 bp, Triticum aestivum
  Clone ID: uC-tsro9316007e04b1
acctgaccgatcggtggtggtgctggtggtggtggtgccttttacataaggtggagttgttacacaggccactaaagcttaggagatcaaggacgaagagatggcggagagcaaggactaccttgcctactacttattctagaagagctcattaccactgatgaacagcacggatcacattgttctattgcacgcacaattttgatgccttgcccacagggtacgcgaacctgcactagtttgatagaaatgggatgcatgtgttacttgctgtgcatgcgatgatttggataaactaatatgcactaactaatttcctaaataagatgtaggcttgccagcttacaat

SEQ ID NO: 5812 - DNA, 152 bp, Triticum aestivum
  Clone ID: uC-tsro9316007e12b1
gtcgtaccagggtggagacgaaggccgagcgggggacttatactaccattccggtcttccccaaaggccgaggctggcccaggaatcgcctgacacctgacaggaatcagactagcgtctggtacaccagaggctcgcccgggctcaaccaa

SEQ ID NO: 5813 - DNA, 304 bp, Triticum aestivum
  Clone ID: uC-tsro9316007f02b1
tccacgcgttcggtgtcgctgcgaagcgcgcaggccgttggcggattggcgctcctcaccgcggaggctctcgtgccaggtcagatatgctatgacctgaaggtgagggctcatggtcggcgcacggcatgtgaggtggagatgctgttggcctgacggggtgtggcagaggagatgtggcctgatctggtgggggcggtgtcagcggtaggtttttctgggttctcacgttcaggtaggtggctgctctgttattgttagatcaatatggagtctttgcgagcatctagctttctgtcattcc

SEQ ID NO: 5814 - DNA, 237 bp, Triticum aestivum
  unsure (1)..(237): unsure at all n locations
  Clone ID: uC-tsro9316007f03b1
tctgntcatttacatgtactcatctacactgtgcaatctatgtatgatacaggttacagacactgggagatgacctcccaccaattgaccaccacgtttattagatcaaaggagtcaaaactacaaaacacaggatgatgttgatgagtacatttacatgtaataatccttatgtttgcacaaagtgacagttcatgtaccttttgacagcaagttcaaggtgttgccattcttcgg

SEQ ID NO: 5815 - DNA, 51 bp, Triticum aestivum
  Clone ID: uC-tsro9316007f04b1
tttattgcacgagatcgcgagcgccgctcatgggggtttttttaggaacct

SEQ ID NO: 5816 - DNA, 324 bp, Triticum aestivum
  Clone ID: uC-tsro9316007f06b1
tgagatatatgagttgtgacaataattgatgtaaaatggtttgtcagttcaaactgcattagtccagattgcagcaattcgaactaccattcactgttggaagtcttgaaaacatgttgttaaaaaaaaaaaaataaaaaaaaaaaaaaaaaaaaataaaaaataaaaaaaaaaaaaaaaaaaacaataaaaaaaaaaaaaaaaaaaaaaaaaaaaaaaatataaaaaaaaaaaatggggggccccttttaaagaatcaaaatttccttccccgggcttgaacaataaataatttttttatgggcaaccaaaattaaattaatg

SEQ ID NO: 5817 - DNA, 252 bp, Triticum aestivum
  Clone ID: uC-tsro9316007g04b1
ctttataccgcatgctgccggaatggtgcgggggcccatgatccagaactaggcctggtcctccaaccacacggtgatcagcgtcgaaaaccgtccccacctgcccctagtacaggctggactagcaaagaaagagagcccgaagactcacggctcttaggcaacacacaaatgctcgtgtgctgacaccgaagcctggaagtacgccgatacttggcatagtgacaccaaagaccatctgaaccgctagaa

SEQ ID NO: 5818 - DNA, 319 bp, Triticum aestivum
  Clone ID: uC-tsro9316007g06b1
ttgttaaacgcttctctcgaaccttttcgatggggcaggtcatgctgttcccgcagttcggctcaagcaggagatgcattccatcaaaactgaacgggttgctcgcaagctttcgcatggcgaagatgtcttcttgaagcccggccaggtccgactgaactggaccgctggaccggagggtgacctgaagccgtggtagcaactctcgcatggcggttaggagatgtataaaaacctacttgaaaataaacattgtcagaccttgaatactttgcgcctttataccaccatggttgcacagtgctgaccataagtcaaa

SEQ ID NO: 5819 - DNA, 485 bp, Triticum aestivum
  unsure (1)..(485): unsure at all n locations
  Clone ID: uC-tsro9316007g07b1
tnctgaagaaagcctcggccaccggagctgctgcaggtcttctatcgagtatggacaaggtgctggccttctccatcctgagcgcctcggccgccgacatcgcccccggcgccggcaaaggcggcagctgggcccggctctcctggcgggggaggaagctgcaggagggcgaccgggcaggagcagagcaccaagggaagcagggaggcctgccgcgggaggcagagcaacagccgggcaaagggaaatcgcagtcgccgtcaacgttgccgccgcggtttgcgccggagtttgatgggatcgactgcttcgagaccatcgtgtgccattgatcgctgatgaatcgcgatctgctcgtggtccagccgggcgtgtggctacggactgattctttctccgtttgtcggccgtacgatcggcgtgttcatacgtttcttaacttgtgcttctaactgaagccggatgcttgacagaatacagagtta

SEQ ID NO: 5820 - DNA, 273 bp, Triticum aestivum
  Clone ID: uC-tsro9316007g08b1
tctcgctgccgatcctgcctgcgcaaatcgtgcagctagttctcaacaatgcctcctactgaccaatcaagaacatgtgtgaaaatttttcccggaaggcaggggaacaagaatactggaggtgccaacgatctctcggacccagacctgaaaaacactagattctccgtcaacgcacttgctagcttcgcggtgtgcatcacctactaagcacgactggatccaccaaacggcctctggcaagatgatctagatgggcaaaagactggacac

SEQ ID NO: 5821 - DNA, 434 bp, Triticum aestivum
  Clone ID: uC-tsro9316007g11b1
tttctcccagatgcctaccctcctaacctcacccgccttcctttactactccccgctccacctcgcctaccgactaggaggagccgccgtacgaacgacctccaaccaccaccgtcggatcctcgcccccgatccccaaaccgcgccgaggggcaccaccaccggcggcgggtacgctgagatgagctggctcgggaagctggggctggggggcgggggaagcccgcacgcgtcggaggcgacggaggagctggcgcaagggcccgacgaggacaagccgacgcccgggtgcgagatcgtgcagttcggagccggctgctcctggagcgaagagctggtgtaacagcgcgtgcccggggtcaccccgaccaaggacggatacagtcagtgcgcctttaagaccccacctacaggacgtttgaccggagccaccg

SEQ ID NO: 5822 - DNA, 419 bp, Triticum aestivum
  Clone ID: uC-tsro9316007h02b1
tggtatcaacacgtaccagtacccagcacactagcagctagcttagctcaccatctgctcttagaatggcggcctactacagcgccggcaggcccatgtactactccaacaccgaggagtccttcgacggcggcaagaccgtgtactccaccaccaccgaggagtgctacgacgctggcaagctcggccatggtaccggctacggccagggtcagagctatggcaatggtgggaccaacatgtactccaacaacactggcgtcgactccagcatgtacgggcatggcggtggcggcggtggcaggaccgtgtacaccaccaccaccgacgagtgcttcgactccgtcaggcccgggtatgggcagggccacggctactggcacaacaacggtggggccatgccgtacaccaccaccacc

SEQ ID NO: 5823 - DNA, 421 bp, Triticum aestivum
  Clone ID: uC-tsro9316007h07b1
actgcgtcgtccacgcgtccgcccacgcgtccgaaacggatcgtctctcgattgttcgctcccgagcaccgacccaaccctagatctcgcagcagcaagcgcgaagccgacgccatggccaagccctggggcggcgacggcgcctgggcgctcgacgctgagcgcgaggactaggagcgcgagcacgccgtggactttcacgcgcccgacccgtccgacgacgcgggcggcgccgtcagctttcccagccttaaggaggccgtcgtagccggcggcggcaagcagaagaagaagaaggggaccaccctttcgctctacgagtttaccacctacggtgcggacggtgcgcctcgccgagtagtccccgccgagcccaagggcctcaccccgcatgagatgatgatgctccccaccggcccga

SEQ ID NO: 5824 - DNA, 270 bp, Triticum aestivum
  Clone ID: uC-tsro9316007h09b1
cattaacgactctgcccgttgcccgaattttttgttcaccaccggcgatacggagcgtgaggggaccttgattcaaccagcaccgctgacgcccgcaggctgacccagaagagtttcgggttcgaacaactggcccactcatggcccctcggggccattgcatttctgcggcaggaggtcctgaccaatgatgaactgtaagcccctctccactagctgggagaacacctgaaccgcgatgataccctgaccgggacgaaagaagaactg

SEQ ID NO: 5825 - DNA, 83 bp, Triticum aestivum
  Clone ID: uC-tsro9316007h10b1
ggggacgcgccccagaacggcgcaccaagcgcggcggctgtggcgagcacccacagagagaccaaaacactagacagacccac

SEQ ID NO: 5826 - DNA, 430 bp, Triticum aestivum
  Clone ID: uC-tsro9316008b02b1
tttctgacgcgtgggcgcgtgatgatggagcagctgctggatgcggcaaagaagatacatggagccggcatcatccatcgggacttcaagccggagaacgtcatggtcggcttcttcggcgggctcaaggttggtgactttgggtcggcgattcgggcgaagccggccagagtgccctatgaggagtgttgtgtcggcaccctgatttacacatcgccggagcagctggaaggcaaccggtactagggccaggccgtggacatgtgggcgcttgggtgcatcatggcagagatgttggccggcgggaccctcttcgtggcggagacagaggaggagctgctcgccgagatctacaagctgcgagaccagatcacttctacggggaagctggatttggagttcttggaggagctttcagaagccgggcatg

SEQ ID NO: 5827 - DNA, 306 bp, Triticum aestivum
  Clone ID: uC-tsro9316008b03b1
gaacccgaacaacaggccgcccattttaaatccggcgcgtgggttcaccatgattgacttagtacggttgatgctgctcactgaccctgatgagggcccgtccgggcaactggcgttatcatggggcttccgtgccaaaggatgaattgggaggaggccatgactaaagaggaacagaacggccccctgctgtcggtgggagaacaactgaaccaggatgtcagcctcacggggacgaaagaaaaactggggcttcttacgccagagcttaaataggcgcttggcgacactaggcctaagcttggc

SEQ ID NO: 5828 - DNA, 513 bp, Triticum aestivum
  unsure (1)..(513): unsure at all n locations
  Clone ID: uC-tsro9316008b05b1
ttgttcacgcgtccggttagtgctgaagctatgttgactgctttaaatggtgtggcctcttcaagtaaaaatgattcaaaggatgatgagtgggcatcctcagatgatgatgcagatgccatggaacaggatggtgactcagaagctgacagatcatcagtgagtttcaaagagcatcgccgcaatcactacgatgaattccgcaaggtcaaggaactgatgcgcactggatccctggttgaagacgaggcccgtgcgaatgagcgagctgcaaacaacgtcgaggacaaaaccgcaggagagaaggcaacaggtgacaagagtgaatcgtcagcatcacctcaagtatgagccgcaaagtgaattctgtggttgctaagcctagggaagttcaactaagcgggagcatgcagtttgcgcctgctctgtgtgtattgctggatccttgttttcataccagatcngatgattttctgtacgcaaagaaacctgttctctttcttattttgagat

SEQ ID NO: 5829 - DNA, 482 bp, Triticum aestivum
  Clone ID: uC-tsro9316008c01b1
tcgtcacgcgtgcgggtgaatccgatcgacgggggagtacaggagaagcggggggtttccagaggacatacctgatggagaacaacaggagcaaccagcaggctcctgcaccaccgccagggtacccaacggcgggtgcggagcaaggccaagcgggcgggaagaaggggggccgggcgagcaccaaatacaggggcgagaagggcttcatcgaggggtgcctggcggcgctgtgctgctgctggatctgcgagatgtgctgcgactaaccggacggcgacggcgaggttcctggcacaaggcctcggtgctatcgtacccacgaggagcgtatgcgtatacagagagagaattgttcttaatttcagtgcccgctgctttaggttctacatatatactcctaaggtgatgcacgcatgatcagtactgtacccgcctacctgtgagcgtgtgtgagatatttcatgtatacgtccgtgtgc

SEQ ID NO: 5830 - DNA, 509 bp, Triticum aestivum
  unsure (1)..(509): unsure at all n locations
  Clone ID: uC-tsro9316008c04b1
tcgttttgccgaggcgaatgctggggacgctggtgcagctgccggatcaaaagactacgttcatgtacgcatccagcagcgtaatggtcgcaagagcctgaccactgtccagggcctgaagaaggagttcagctacagcaagatcctcaaagacctcaagaaagagttttgctgcaatggtacagttgtccaggacacagaacttggacaggtcattcaactccagggtgatcagaggaagaacgtctcaaacttccttgtccaggccggcattgtgaagaaggaacacatcaagattcatggtttctgaacaactgccagctccatatcagagtctacatgcaaagcagctatatattggtggtgcagtatatttagttgtgtgctagcgcaagcaggcgttaccagcttgcgcgctctgagtatacggaaaatctagcatagcccacctctctgcgtgtatgcttggtaccctngtgttgaaaacttgaagggagcaccatcgtaga

SEQ ID NO: 5831 - DNA, 435 bp, Triticum aestivum
  Clone ID: uC-tsro9316008c05b1
ctgctcacgcgtccgaaaaaaaaaaaaaaaaagaaaaatttaaaaaaaaatgggggtcaaaaaaaaaaaaaaaaaaaaaaataaaaaacaaaaaaaaagaaaaaaaagggctggccttttatgggtcccaaatttactttcccgggctgggataaacaatgattttactttgagaaccggtgggtccctttaagtggcccggttttccccccccccccctttgggaaacctcgtttttttcccgacttaaacaactttgaaccccctcccctttttccccactgggtgattgggaaaagggccgcgccccctacttttacataattttgggccttctttttgttacttggggcgcaccttttaggggtgccttagccctgccctttgctactgtttctccccctcttgcctttctttttcccccccctttttccc

SEQ ID NO: 5832 - DNA, 364 bp, Triticum aestivum
  Clone ID: uC-tsro9316008c08b1
tcttttgccctgaggaagatgtcgctcaacaaggccaagaggtaccttgaggatgtgttggcacacaagcaagccatccccttccggaggtactgccgtggtgttggacgcacagcccaggtgaagaaccgtcagcccaatggtcagggacgctggcctgccaagtctgctaagttcgttctggatcttctaaagaacgctgagagcaatgctgaggtgaaaggtcttgatgttgatgctctctacatttcacacatccaagtgaaccaggcccagaagcagcggcgccggacctaccgtgcccatggacgcatcaacccctacatgtccaacccatgccacattgagctgatcttgtcggaga

SEQ ID NO: 5833 - DNA, 440 bp, Triticum aestivum
  Clone ID: uC-tsro9316008c09b1
ttctggccgtttgcccccactggcggtctaggtgcgtctgcccacgcggccgtggtgttgtcgacccgcgctttcacccgcgccggtggatgatgctgcccgagggccacggcctgtatcctggccacggcaggctacatgggtacatccgctttatcaacctctccactggcgccatcgtccgttgcctgctcccgcttttcagagatcactgcatcctcgactcggtcgatggtctcctcctcttgcaacgggacgaagacaccgccatccgcctcctccacccattcactggagacattgcagagctgccgccacttgcgaccctcatgcgtcttcctggagccaagaaaaatgttgaaatggtctggacgtatcttagaaacatcggtgccacgtctgtcagtgttagtgcagctggagtcatcacttgcatgatt

SEQ ID NO: 5834 - DNA, 493 bp, Triticum aestivum
  Clone ID: uC-tsro9316008c10b1
tgtttttgcccgtttctggcttgcggtgacctgagcggttacgattcagaccgctcatacccccttccaagcacagaaggcggcacctaccagagcctagatccagtccagcctcccatcgccccgccatacaaaactgcattggagatgaagaaggcgtctagccacggcgctggcacagataccagcaaattatctcttgacccccaaacaacattatagcttcagcttatgctcatctacccaatcgccacatggaaacatatgaatcatcctgcagtgacgttcagcacatgttgcagagtagatgctgaagttgaagctgaattttggttattcatccaatcttgaaggcaatagcatgtggaagagatggtataaaccgaggggtatgcatgccatgggctaagcaaactcttgaatgaactataagcctggatcaccattgtagtactttgccttggtgtcatttctggtatttccatattggact

SEQ ID NO: 5835 - DNA, 503 bp, Triticum aestivum
  unsure (1)..(503): unsure at all n locations
  Clone ID: uC-tsro9316008d05b1
tctttcacgcgtccggaacttttttcttctgagaggcatccatgagtgtgcttcaataaacagaatatatggattttatgatgaatgcaagcgtcgcttcaatgtgcggctatggaaggtcttcaccgactgttttaactgtctccctgtggccgctctaattgatgataaaatattatgcatgcatggtggcctttctcctgatctggggcacctagatgagataaaaaacttgccccgtcctaccgatgtgccagatacaggtctactatgcgatcttctttggtctgatccaggaaaagatgtccaagggtggggcatgaatgataggggcgtttcatacacatttggccatgacaaagttacggagttccttctaaagcatgatcttgatcttatttgccgtgcccaccaggttgttgaggatgggtatgaattctttgctgacagacagctngttaccatattttcggcttccaactattgtggtgaattgataatgc

SEQ ID NO: 5836 - DNA, 432 bp, Triticum aestivum
  Clone ID: uC-tsro9316008d11b1
gcggacgcgtgggcggacgcgtgggtgtacagtttataattttgaccggaactccaattgttggattcccaaagatacaatggcgtgctcttgatgagatcaattctggtgtatgtgatgggatgacgtatgaagagataaagaaaattatgcctgaggaatatgagtcacgtaagaaggacaagctgcgttatcggtacccgcgtggggagtcttaccttgacgtgattcagaggttggagcctgttatcatcgagctcgaacgccagcgagcaccagtggttgttatatcccaccaggccgtattgcgagcgctgtactcgtattttgcccgcaggcctttgagggaagtttcagacattgtgatgccactccataccatattcgagatacaaatgggccgtacctgtgtcttggagaataggtccaagc

SEQ ID NO: 5837 - DNA, 71 bp, Triticum aestivum
  unsure (1)..(71): unsure at all n locations
  Clone ID: uC-tsro9316008d12b1
cggtcccgaatttctttttcgacccacgcgttcttccacgcgtccaagcnctagaccgcagagggttttat

SEQ ID NO: 5838 - DNA, 342 bp, Triticum aestivum
  unsure (1)..(342): unsure at all n locations
  Clone ID: uC-tsro9316008e03b1
ctggcttcccttgggctggacatacacggcgtcacgttggcaggtggccaaccgatgatgcgaggtgggtgtggtgttgtgatgtgtgtggtgaccacnatggtggctagcagagctgggtcgcggcttgtccttctgatgtcgaaggtccggtgcgccaatggatgtgcctatgctgatttctggctgtgacagataagtcggagctgcgggcggcagggccactgcggcaatgatgactccatgagggcggttttcagtggacggtgctctcccgatgttgcgttggactaggtcgatgcgaattttgcaactttctcctgtgaaactcgttagcaaaat

SEQ ID NO: 5839 - DNA, 537 bp, Triticum aestivum
  Clone ID: uC-tsro9316008e05b1
ttgttacgcgtgggtcgagctatctaactatcccgatcttgatcccgatctcctaccatggtgtccgatgccagcaagaagaaagccgcgcagaagaaggccgccgccgccgccaagaggggagccaagtccagcgccgctgcctcgtcctcgtcggcgtcgtcagcggccgataaggccgccaatggcgtagcggcccttaacttatccgatcggacatgtaccggggtcctggcttcgcatccgctctcccgtgatatccacattgagtgcctttcattaacatttcatggacatgaccttattgtggattcagaattggagcttaactacgggaggcggtatggtttgctcggcttaaatggttgtgggaaatctacccttctcaccgcaataggctgtagggaacttcccattcctgacacatggacatacatcatcttactcgtgagaatgaggcttctgacatgtctgcgctgcaagcttgtatctgttgtgatgtaaaaagagtgaagttggaaaggaagcttgaatttt

SEQ ID NO: 5840 - DNA, 167 bp, Triticum aestivum
  Clone ID: uC-tsro9316008e10b1
tatttgcccccgcagcgcctggccacccgcgggggatttttaccgtatgacgggtcggaccccatccgtccagccggtaagagtcaccaccccatcccatcgtctgacttcgctttcgaagggtcagatatggtggaccttgctaaccacccttttgtcatgcagat

SEQ ID NO: 5841 - DNA, 323 bp, Triticum aestivum
  Clone ID: uC-tsro9316008f01b1
tccacgcgtccggagcagccctgacgcgagcgggattattggcctgctgggccggatcatggacaagctgcctggttaccacaagacaggggaggaggacaaggccgtctccgatacaggcgagcacaagcccagcgcttgatcgccgccgtgcccgagacccgtgaccggacctcgattgaatagctggcgtgtgttgcgtttgctttacgtctaagttggtgtcaaggtgggaggggttgatcgtatttgaaagtacggtccctgaagccccttcaatgaccggtgcttctgtttaaatttggtttaaaatgaagtcctgg

SEQ ID NO: 5842 - DNA, 323 bp, Triticum aestivum
  Clone ID: uC-tsro9316008f02b1
tttgtcgtacctcccgggcggcgtgtgcgtggggggcatggttaggtcggtgtggttcgagcaggctgtggcttgtaaggtgctgggcgactacaactcgccgcactgcctcgacttcatgttcgtcaactggtactttggctagtagtttgtagatactagttcacaaactgttctgcaaagaaccttggtgtgccggcgctaggtcgcttttgccttgtgtttagagtaaagaccctctttgattcagttttatcatcatcattcatcaccctgaggaacacgccttggtgtggtggttacccacaaagggaccgctacac

SEQ ID NO: 5843 - DNA, 276 bp, Triticum aestivum
  Clone ID: uC-tsro9316008f05b1
ttggtgtgacccttcttggtcttgtccttcttggtttattgttcttggtgtgtgtgcgtgtgttcgtgccggggtgtgaggtgtgggcgcgtgcgtgcgtgtatgtatgggtcgcggtggtgtgggaggtgtctagtacgtgcgtgcgccggcgtgccattctttgtgttggtgatcatgtacttactctcttgttcttgctatgaatgagaccatttatttgaaaaaaaaaaaaaaaaaataaaaaaaaaaaaaaaaaaaaaagaaattgataac

SEQ ID NO: 5844 - DNA, 513 bp, Triticum aestivum
  unsure (1)..(513): unsure at all n locations
  Clone ID: uC-tsro9316008f07b1
tttttgaaaatcattcagaattttagcatatgggcaacaaggccctctgctctgctgaaccccatcctcctttccagaaaccaaccagaaaatggcgttcagaggctactgccatcctcacccttcttcctccatggccaccaccggcccgagattcggcgcgaggaggccggcggcagccctgagcttcagagcctctgcagcccatggatgcaaccagccatcctcgcacctctcctttgctgcaccaaccagcaacaaggtgttcgaggaccaggtgagagggatcgtgtgctacagggacgacaagggagagctcgtctgcgagggctacgacgagggcccgaggctcggaatgcggctgccggagaaggcctgcttcccgtggcctgtgggagtccaggtcaccgatttcatccgnctcgcgacgcttcgggtcttcgaggacggcgccgacgacggtcttctgcgcaagaacgatcagaagtggcagctctgaagtctgaactgatc

SEQ ID NO: 5845 - DNA, 121 bp, Triticum aestivum
  Clone ID: uC-tsro9316008f09b1
ccccaacctagaacgcaataccttccacttaatcctacttacatattccaacccacaatttctcgctccagagttccccttacgctcatcccctaccatgactgtggtgtccgttactacc

SEQ ID NO: 5846 - DNA, 172 bp, Triticum aestivum
  Clone ID: uC-tsro9316008g01b1
tggtaaagatggagaaaatgttgcagagagggcagttctgatccagaatggagcatcgacatgtcttatctcatttcatcaacttaacacacgtacatgcgtctactaaaaaaaaaaaaaaaaaaaaaaaaaaaaaaaagaaaaaaaaaaaaaaaaaaaaaaaaaatgaaaa

SEQ ID NO: 5847 - DNA, 441 bp, Triticum aestivum
  unsure (1)..(441): unsure at all n locations
  Clone ID: uC-tsro9316008g03b1
tanctgcctcggcgccatgcaggagggcgaggcggtgcgcgtgctgccggcctgcgcgcacgtgttccacgtcccctgcgtcgacacgtggctcgcgtccagctcgtcgtgcccggtctgccgtgccctggtggagccgccaccgtcgccggccgcgccagcctgggtgcaggagaagcagggcctggagaaggagtgtgctgcaagtgggagctcggcgccgccgtgtgggctcggcgcgtcgctgatgaggatgctgaacagggagaggccgctggcgcggaggctgacgcaaggtgaccacgcgcacccgatggaaatgcatgtcgaggacctggagagtcagcacccccagcagtatcactgtgtggataccaaaaagtgtttttttttgcgttgtgtttttttttgggggttcccatttgttggtcgaatggaaaa

SEQ ID NO: 5848 - DNA, 460 bp, Triticum aestivum
  Clone ID: uC-tsro9316008g05b1
tttcttggacccggcatggcctcacctgcaggttgtcttcgaactgttcttaagatttgttcagtctccagagacagatgctaagatggccaagagatatgttgatcagggtttcattctcaggctgctagatctcttcgactcagaggatcctagggaaagggagtatttgaagacaatacttcacaggatatatgggaagttcatggtgcaccgtccattcatcaggaaggcaattaacaatatattctacaggtttatatttgagacagaaaagcattatgggattgcagagctgttagagattctgggcagtataatcaatggttttgctttgcctctaaggaagagcataaatcgtttctagtccgcgcgctgattccactccacaaaccaaaatgtgttagcatgtatcatcagcaactgtcatactgtgtcactcagttcgttgagaaaagat

SEQ ID NO: 5849 - DNA, 91 bp, Triticum aestivum
  Clone ID: uC-tsro9316008h02b1
atgcaccacgttggtgtggggaagttcttgatgatattgattccaacagtgtaactgtgaccgctgactatcgagtgattctgcaaggaac

SEQ ID NO: 5850 - DNA, 235 bp, Triticum aestivum
  Clone ID: uC-tsro9316008h03b1
ttggttgatgtgaagaacaggcaggttaaggcgaagcaggtgacattccacaggaggaagaacctgcagtactatgagatctctgccaagagcaactacaactttgagaagcccttcctttaccttgcaaggaagctggctggtgatcccaacatccacttcgttgaagcagtggcccttaagcccccggaagtgaccttcgacctggccatgcaacaacagcacgaggctgagc

SEQ ID NO: 5851 - DNA, 476 bp, Triticum aestivum
  Clone ID: uC-tsro9316008h04b1
tttttatcctcatggtcggtctcgatgcggctggtaagaccaccatcctctacaagctcaagctcggagagatcgtcaccaccatccccacaatcgggtttaatgtcgaaactgtagagtacaagaacattagtttcaccgtttgggatgtcgggggtcaggacaagatcaggcccctgtggaggcactacttccagaacacccagggtctcatttttgtcgtggacagcaatgacagagagcgtgttgttgaggcaagagatgagcttcaccggatgctgaatgaggatgagctgcgtgatgctgtgctgctggtgtttgccaacaagcaagatcttcctaatgccatgaacgctgctgaaatcactgacaagcttggcctgcattctctgcgccagcgacactggtacatccagagcacatgtgctacctctggagaggggttgtacgagggccttgactggctgtccaacaac

SEQ ID NO: 5852 - DNA, 400 bp, Triticum aestivum
  Clone ID: uC-tsro9316008h05b1
tctacgcgtgcgcccacgcgtccggccggggcccctttggggacaaggccgaggtctacggcgtcggcgcgctcaaggtggacgagcagctcccggcggaggacgtggaggtgttctacgacccgggggagctgctcgcggggcttatcaagggtcccaaggaggaagaccaggaggcggtggcgctcgccgggaggctcccggaggcggctactgtgtcggaatgaggtgccgacgcgcagccagaggcctgccccttacttggctctggaaagcaggggtgatcgagtggcctcgccaaataaaacgcgtcgagtcctcagacttcaggggggtgctcgagcatcactgtttcgcaataagaacgctcctctctcagcagcttttggagaccaactga

SEQ ID NO: 5853 - DNA, 420 bp, Triticum aestivum
  Clone ID: uC-tsro9316008h06b1
ttgttcacgcgtccgcccacgcgtccggccacgcccccaccggggacaaggtcgagttctacggcgtcgccgtgctcaaggtggacgagcagctgcgggcggaggacgtggaggtgttctacgacccgggggagctgctcgcggggcttatcaagggtcccaaggaggaagacgaggaggcggcggcgctcgccgggaggctccgggaggcggctacggtgtcggcatcaggtgccgacgcgcagcctgaggcctgccccttacttggctctggaaagcaggggtgatcgagtggcctcgtcgaataaaacgtgtcgagtctccagtcttcagggggttgctgtagcatactgtttcgcaatcagaaagatctttctcgtcagcttttggagaccaactgaaagctcagttcaacgtgta

SEQ ID NO: 5854 - DNA, 437 bp, Triticum aestivum
  Clone ID: uC-tsro9316010a01b1
tcgtctgatcgcgagcggccgcatattacatcgggggcattttatattcagtgggcataccttgatggattaacaactatgagctaccagtaggaacctaaaccaccgacagggttcccaacagagaatgaaaatagggccaagctttaaggaagaaagggttacggacgagcaccaaatacaggggcgagatgggctttatcgacgggtgcctagttgcgctgtgctggtgatacatctgcgagatgtggtaaaactaaccggtccccaactgaaaggtttctggcacaaggcctctttgctatcgtacccacaaagagcgaatgcgtatacagagagagaattttcaaataatttcaatgcccaatggtttaaggttacaatttattcttctaagataaacacccatgatcagggctgttcccccctacctgtgc

SEQ ID NO: 5855 - DNA, 420 bp, Triticum aestivum
  Clone ID: uC-tsro9316010a02b1
tcttttgcatccgatcgacagcacaggacaacgggggcaacttataaccagaggacatacctgctggataacaacaggagcaaccagcaggctcctccaccaccgccagggtacccaacggcggatgcggagcaaggccaagcggtacggatgaaggggggccgggccagcaccaaatccatgggctagacgggcttcatggtggggggcctggccgtgctattctgctggtggatctgcgagaggagctgcgactaaccgctccgtaacagagaggttactggcacaaggcctgggtgctatcgtacccacgaggagcgtatgcgtatacagaaagcgaattgctcataatttcagtgcccgtagctttaaggtctacatatagacgtctaacgagatgcacgcatgatcaggactgta

SEQ ID NO: 5856 - DNA, 462 bp, Triticum aestivum
  Clone ID: uC-tsro9316010a03b1
tcttctgcgcgtccgcccacgcgtccgcccacgcgggcgttggattagggttgggcttgcatccattctcaacgttagcaggagcgagtgggagtccggccatggcgccgtcgcagcccaagtcagggctcttcgtgggcatcaacaagggccacgtcgtcaccaagcgcgagctgccgcctcgcccgtccgaccgtaaggggaaaggtacaaagagggtgcattttgtcaggaacttgatcagggaggttgctggatttgctccctatgagaagcgtatcactgagcttcttaaggttggaaaggacaagcgtgcactcaaggtcgccaagagaaagcttggtactcacaagagagcaaagaagaagagagaggagatgtcaagtgttcttaggaagatgaggtctgctggtggtggtgctggtgacaagatgaaatagaacttggctagctggtgaattt

SEQ ID NO: 5857 - DNA, 279 bp, Triticum aestivum
  Clone ID: uC-tsro9316010a07b1
tgttttcaatcaatcaataatactaatagggggtgcttgttgatggtggtgggaatagtccgctaatttgatctggtgctgaactgaacccagtgtggcttacactgttgactgatgagggttgagagagtgtcaatggctctcgcgtctgggcggtggagctgggaggagtagatccttactctgtacgtgaacaggacggcggttggatttgttatttgcgtacaattacaataatggaatgccaatgatgatggttgagcgagcatactagaacac

SEQ ID NO: 5858 - DNA, 494 bp, Triticum aestivum
  Clone ID: uC-tsro9316010a08b1
tcttacccctcctcgtcacatcgggcgcctagggttttcccacccgccggccggcgatgcccgcctcctccgtctccggcagcaccggccccggcggcgtgtcgcccgacgccatcatcgagtggctgcaggacgagatgggctacccctccgcgccgcccgcgcccgagcagctgcgcaagatctgccgcggcaacatgctcccggtctggtccttcctcctccgccgggtccgctccgagcgcacggtcgccacggcgcgccggaacatcctcgtccacggcgtcgcggccaggcgggcgcgggaggggggcgtcggggcgggagggggcgacgcggctgccagagaggccgaggccagggagcgggacctcgccgccgaggaggcggaacggctgcgcggtgtcgtgcggaggcagcgcaaggagctgcgcgcccgcatcgcggaggtcgcgcgcgaggaggcctaacgcaagcgtgtgttgggcgagcgc

SEQ ID NO: 5859 - DNA, 277 bp, Triticum aestivum
  Clone ID: uC-tsro9316010b01b1
tcgtccacgcgtccgaaaaaaaaaaaaaaaaaggaaaaaaataaaaaaaaaaaaagaaaaaaaaaaaaaaaaaaaaaaaaaaaaaaaaaaaaaaaacaaaaaaagaaaaaaaaaacaaaaaaaaaaaaaaaaaaaaaaaaaaaagaataaataaaaaaaaaaagaaaaaattaaaaaaatgcggggggtgtttttataaagaaaaacgttatttcagcctgtctgggacgaaaaaagaattttttgttgcgccccgaaaaaaaaaaaaaggagcttg

SEQ ID NO: 5860 - DNA, 252 bp, Triticum aestivum
  Clone ID: uC-tsro9316010b05b1
tcttcacgcgtccgcgcccccgtccccgaccggggaagctattggtgctgtattgccattagcatcatacatgacaccgtctacctgaccgcctaagctattggtgctgcattgccattagcatcatacaggacaccgtctacctgactcttcttgttgttgttacaataaacaaacccatgcgtgcagcgtgttaaggtgaggtctggcactttgtttgctcgatgatctatacattattttggtgtttgc

SEQ ID NO: 5861 - DNA, 281 bp, Triticum aestivum
  Clone ID: uC-tsro9316010b06b1
acactgtgatatccccttccagcccgggctttggtgggggattttttaagctctatcgggagtactactagctagcctagattagggtttgtgtagacaagaagggagatcaatggccgagacggccaaccgttgtttctgggggagtccatgatgaaacaccaactacaacaacctctacgatggcttcatgcacaactgaaagatcctcgacgccaagatcatcaacaacgcgcaagacggggagggtccgtcagatctgatagaggacgttcgataca

SEQ ID NO: 5862 - DNA, 422 bp, Triticum aestivum
  Clone ID: uC-tsro9316010c05b1
tgtcgccgccgcagccgcctccgtctccgccgccacgatgccgtcgcacaagaccttccggatcaagcagaagctggccaagaagcagcgccagaaccgccccatcccctactggatccgcatgaggaccgacaacaccatcaggtacaacgccaagcgcaggcactggcgccgcaccaagctcggattctaagccggggatgacgatgatgacgcccgttgccgccgacgggagaagggtctagggtacctagggtttatggcgtctcgttgtttttgcaagctagcatgtgactccgggatgcctgttttaagattaagatttcgcttgttttgagagatattattatttactgctttgagcctacctgggataccatcatattttgctgattatggaacagcttttattctgcttaagc

SEQ ID NO: 5863 - DNA, 377 bp, Triticum aestivum
  Clone ID: uC-tsro9316010c06b1
ttgttggtatccaagtgcaaagcgtgcagtactgaggactggtggggattttcccttcctgtcacgtccagatgaggtcaatttgtaccttcagctacacttaaggcgagttggagtagaaccaagaccagatctagtccagggtttcacacgggatggtagctccggctcaaacgaccacgaagatggaaacagttttgatgaccatcccacagatgatggggaccgtagttcatgcagcgatggccgtaagacagagcactctgaatcagggccacctaattcagatggactggtaccaacaagcatagtgctaggcatggtcagatcagctctccatgtttccctatgtgcgtgctcatgatgcatcattacta

SEQ ID NO: 5864 - DNA, 442 bp, Triticum aestivum
  Clone ID: uC-tsro9316010d03b1
ttttcacgcgtccggggaggtgcaaaacctgggcttcctaatgccgcacagaccccaactgcaggtgctcccatgaatcaaggcaccccaatggctcaaggtactcccatgaatcacagcaccccaatggcccaaggtactcccgtggctcaaggtgcccccatggctcaagcccctcctgctccggcacaaagcaccgatgaggtaaagccatcggaggctacaacagctcctgacaatgtggaggctacagcagctaccagcaatgccgaagctactgcagcccctggtactgcggaagctacagaagctccggttccagacccaacaagtagcagtcctgacgctgctgatgctccagcttcagctcctgctccagcagctgattccagtggcactgatgcacttgctgttactcccagtgattttacaaatgatgcac

SEQ ID NO: 5865 - DNA, 422 bp, Triticum aestivum
  Clone ID: uC-tsro9316010d04b1
ttgtaacgacgccttgccagcgcacggcaaggtggtgcttgtggagtgcatcctgccggtgaacccggacgccacgcctaaggcgcagggggtgttccatgtcgacatgatcatgctcgcgcacaacccgggtggcagggagaggtacgagagggagttcgaggccctagccaagggcgccgggttcgccgccatgaagaccacttacatctacgccaatgcatgggccatcgagttcactaagtagatgatgaatgacagcgtccacccatctgatgcatccacttgatgtgtactttctcttggtgtttccttaattttgtcattctctgaatcattctaaattctaatgtttgtgtcgtcgattgattcgaaatgtactaccattaataatgttaattgctcttaatggttgtgtgtat

SEQ ID NO: 5866 - DNA, 488 bp, Triticum aestivum
  Clone ID: uC-tsro9316010d07b1
tgttcaaccccggctacccctacgaggagtcgctcatgggataccacaacgtcaccagcatgaacatgtgcatgtattttcccaagttcaatgcgtttaacttcaccaagggcggtctcgcgcagttcaaccacggccagggccaggcgctgcagtacgccgtcgccaactccttcctcgccgcgctctacgccgactacatggagtccgtcaacgtccccggctggtactgcggccccaacttcatgaccgtcgacgacctccgctccttcgccaaatcccagctgaactacattcttggggacaacccgatgaagatgagctacgtggtggggtacggcaagaagtacccgaagcggctgcaccaccgcggggcgtccacgcccaagaacgggatcaagtactcgtgcaccggcggcaacaagtggcgcgactccaagaaggccgaccctcacgtgctcgtcggcgccatggtacgcggtccggac

SEQ ID NO: 5867 - DNA, 350 bp, Triticum aestivum
  Clone ID: uC-tsro9316010d08b1
gtctaccacgcgtccgcccacgcgtccgctgccctgcgacacaagccaccacttgaatctcaagcgcggagaggaggaagaagagaggagcaatggagtacgggcacccctgcaacagctgcagcagcaacaaggagaagaggcctccgttcaagagaggccagctcaagctgcagatcgccaggactctcggcagcctcgtggtgccgggcgccaagagcagcttcagcttcagaagatgatcacctgagcagccactcaatcagggcaagcagcattttctcagccaatctacgagtatcggatggtctggtgcttgatgtataccgggattgtgcaagttgaacaag

SEQ ID NO: 5868 - DNA, 468 bp, Triticum aestivum
  Clone ID: uC-tsro9316010e01b1
tttgtatataaagaggtcaaacgaaggggcggggaccgatgcttcagagggcgctgggttctaggtaacaccgaggaagatgactcggttgatctcttgcatcctgacagctctgccaggagttcagaatctaggccttctggtgtaatggaggtgcagcttgagcctctcaccagatgagtagtagaatagcgtagatcaatctgtatctcccagtgtcagatacacacacacacacacaccaagtcctgttttcagtcatacaacagaaacagatggtgtccacaagcacggtgactttccgctcagaaagaaaattgaatttctcatgcttgtttcttctaccatggcagaatggtaccaggctacataggatcttcaaattatgcctttgatttcttgcgtcacactgttcagaattgatagtgtacattttggttttttacaatagacaggcacaattttgta

SEQ ID NO: 5869 - DNA, 436 bp, Triticum aestivum
  Clone ID: uC-tsro9316010e04b1
taccacgcgtgcgcccacgcgtccgacaacccggacgatgtcgatgtggtcgtcggcgcctcctccgccacgggattgaatgggctggtggacaggcgcgcgactctacgccctcctcggtcgagggttggatggagccctcggctgcgtgggaacaaccatcggcagacgcgaccccgacgactgtgctcgtggtgctcgctctgatcccacccgtgcttccacaggtgtaccagctcctctctgtatattctttgattttttttctgttcagttcatctttcatggttaattctttgcaacaatttgataagatgctgaaatcaaaggtgtggcctctatttgatgagccagacacaaggaggagtatgggtctgcatgtacatataagaagaagatggcttgaggtgaattgtgtatgttttcagttgcgtcg

SEQ ID NO: 5870 - DNA, 462 bp, Triticum aestivum
  Clone ID: uC-tsro9316010e09b1
tgtcgtgaagacccacagaacgagttcctgtggggccttattgcgatcatatggtgtttcacctgtcctgacagatactttgagaaggtcgtccggttggcccttggaggcgtcggtacagacgaggacacccttacgagggtcataaccactcgcgctgaggtggacctgaaggtgataaaggaggcgtaccagaagaggaacagtgtcccgctggagaaggctgtttccaaggaaacaagcagagactatgaagatatgatgcttgcacttctgggggcagagtactgaggcatgtgcctgatctaccatatgcttgatgatgggggaataagagtgcataaaactgtcgagtgtgttggttttcaaggatgatatacgttagcctgcatggcagtactcgtccgatgaattatattattttcgtattttgagctgcaaaaatatatttagtgttttttg

SEQ ID NO: 5871 - DNA, 430 bp, Triticum aestivum
  unsure (1)..(430): unsure at all n locations
  Clone ID: uC-tsro9316010e10b1
tgttcgttcatctcattcccccacctccccctcccggtatggttgacagcgaccgcgggaagctcccggctcgcctcctccctccctccctcccctgtctcctctcccggctccatccatccaccgggaggagagggcagcaggcggaggaggccacacctacctacctatctatctatctgtctgtctaagccgccggcatggactcggagcactggatctcgcgcctggccgtcgtcaagcgcttttacgccgcgcagctcggacacgccggcgcagatcgggcgggcatggacgagctggacatggacggtgaccagaacgccggcaggcccgacttcacctgcccctactgctacgaggaccacgacgtcggcttcctcattcgccacctngaggaggaccaccccttcgagccccacgccgcgcc

SEQ ID NO: 5872 - DNA, 531 bp, Triticum aestivum
  Clone ID: uC-tsro9316010e12b1
ttgcacagcagaagcaactcgtagccagagggcgtactttatggagaacaacgggtgcaaccagcaggctcctccaccaccgccagggtacccaacggcggctgcggagcaaggccaagcgggcgggaagaaggggggccgggcgagcaccaaatccaggggcgagaagggcttcatcgaggggtgcctggcggcgctgcgctgctgctggatctgcgagatgtgctgcgactaaccggcctgcgactgcgaggttcctggcacaaggcctaggagctatcgtacccacgaggagcgtatgcgtatacagagagagaattgttcttaatttcagtgcccgttcgtttaggttctacatatatactactaaggtgatgcacgcatgatcagtactgtacccgcctacctgggtgcgtgtgtgagatatttaatgaatccgaccgtgtgcagtgccatattcatgcaccgcgttctgtgttatataaccggggggcccagacccagatactactcatcataccgtgattgggt

SEQ ID NO: 5873 - DNA, 189 bp, Triticum aestivum
  Clone ID: uC-tsro9316010f01b1
tttactattcatctcacagcgcaggcagagggggggggtttttagcaaccatggctccacccaaaggtttgcacaatggccgttattgagctcaccattctcgttcgtactggtgctcctggacgtggccatcaccgttcaggcgcccggagcggtccccgcggtaacgctccaagacctgacttcacc

SEQ ID NO: 5874 - DNA, 306 bp, Triticum aestivum
  Clone ID: uC-tsro9316010f06b1
ttctcacgcgtccgcccacgcgtccggtatgggagttgtatcagctgagctatgtgtagttggtgtagcgactgagaagtgtgtctagttgcatccgctaggctatgtgtagttggtttagcaactgagttaatgttagttccaagagttgttcatggtcctttgtaagatatccaaaagtctgtgtctgtattggtcgatcatagtgttataattcgtgaaataaaatatatcagtggttgctttaaaaaaaaaaaaaaaaagaaactgtaaacacaaagactaaaaatgaaaatataaataatg

SEQ ID NO: 5875 - DNA, 544 bp, Triticum aestivum
  Clone ID: uC-tsro9316010f08b1
ggcggacccaccgcgggacaggcaccgagcgcctatttccggggtcgaccacacctgttttgttcagcctgggatcctgcttgctagtcgaccgtcattctcaagaaactcctcagctccaccggccgcccgtgaaggaaggaggcgatcggccatggggaagatgtgctgcagccaggaggaggacgaggcggggttcaacctgctgccgctggtgatggccgccttcgtcatcatgctgctcttcgtcgtctgctcgccgccgccccggcgcaggcgctgcgtcgtcgtcccgtgctactgacctgacctgacctcatggtggccgggtggtgggagcctcgatcggcggtgctgtaggcaggcaagtggctggtgctgtggtaggcgtttgtttggttggtgtttgaattttctgactgatgcgtgttgggtcggagaataatctcaatttctgttgaattcgatcggacctgaaagctaaaggtattctgttgttggccataaaggattcctaatccgctattttttgggcggccttttt

SEQ ID NO: 5876 - DNA, 331 bp, Triticum aestivum
  Clone ID: uC-tsro9316010f12b1
atcgtaaaagctgaagcaaggggtttctgcggcggggttgtgaagagatccatcgatttcgcgtgtcgattgctttatgctgggctcctctttacctgataaaaaatatataccagctggagctgcggtgttgagctactgtttatgtagaaaccttgtcttgagtggtacatcgtcggtattggacaccttatttaagcgaactgataaaccttagtctgaattgagctgctcctggttatagtttttgtaaatttaaaactttgctggggatcatctgtggcaaaaaaaaaaaaaaaataataatacctaacgaaaatcaatataaatt

SEQ ID NO: 5877 - DNA, 210 bp, Triticum aestivum
  Clone ID: uC-tsro9316010g01b1
tctcgtacgcgtgggttttttttttagaggaggcgccatgtattagagttgctgtaagctacttattgttgatgtcatgcgggaaaggttgaattgggattcattcaaaaaaaaaaaaaagaaaaaaaaaaaaaaaaaaaaaaaaaaataaaaaaaaaaaaaaaaaaaaaccaaaaaaaaattggggcgggggctctacaggttcaaagt

SEQ ID NO: 5878 - DNA, 295 bp, Triticum aestivum
  unsure (1)..(295): unsure at all n locations
  Clone ID: uC-tsro9316010g03b1
cttctgtatcattgtggcctcttcaggcttcgtgttgacttcagtcttcgtctgtacgtttgggtgcgtgctatgccttgtgatccgatgagatgctgtattaatcccagtttaaccttcggtgcatctggtgtgttgtgccaatctatatcccactacgattgattgttttgagcattattagttgggaatacatgcggcgtgtnaaaaaaaaaaaaaaaaaaaaaaaaaatactaaaaaaaaaaataaaaaaagaaattagaaaaaaaaaaaaaataaaaataaaaataatcg

SEQ ID NO: 5879 - DNA, 200 bp, Triticum aestivum
  Clone ID: uC-tsro9316010g05b1
tctgttatttctggttctagtagagatttacagggtggcctatgtgcgcggtttggtttgtacatttgctgcacactactgtagctcgttggtctgatcgctcttgttaggtatatatgcacatattttaggactaaaaaaaaaaaaagaaacaaaaaaaaaggaaaaaaaaaagaacaataaaaaaaaaaatataaaaa

SEQ ID NO: 5880 - DNA, 311 bp, Triticum aestivum
  Clone ID: uC-tsro9316010g07b1
gagcaattctgtgcaaacagcccctacagaggatgctaatgggagcggccatgttactacgagcggcgcattagcaagcacaaacggaatgccacagatgaacatttgagctctgcgttgcagtgcgccatcgatcatgttctgaatggagcaccatgtgtttaccagttgtggcaggataaggtcctggacgtgtgtaattcagaacagacttcccgttgcttttccggaggtgcatcagaccgttcaagcttctgttgttgtgtgtttggtgtgataatagctcaagcttccaacctttcccggtttgg

SEQ ID NO: 5881 - DNA, 461 bp, Triticum aestivum
  Clone ID: uC-tsro9316010g08b1
ttcctttagatgcgagcgccgccctttttgggtgtatttttttgcattgcaatccatgaccccaacaaatcagaagcacttaacaaatacaatctcactccctaacaatacagcaaagaagggaaaatagaaccctcaagaaaagggaaaaatggaagaaccctcgctaatcatcagtaaccaaatgcttcaatcgcacaagacggagaggccaaagccaggctctcataaagggctcacggccgactcacgatcagaggtggtcgccgttcatgagcgcggtggccttggcgccgcacgagacggccttcttgggcaccttaccgacgcggtcgatggccttggcgaagatgacccccatccccatgtggaggtgcggctcgatgtggcagtggaacgcccacaccccggggttgtccgtgacgaaccgtagcgccgttcactcggacaggaagatcacc

SEQ ID NO: 5882 - DNA, 477 bp, Triticum aestivum
  unsure (1)..(477): unsure at all n locations
  Clone ID: uC-tsro9316010h02b1
tttgtttatggaatgcagggccttgtctgcctgggggggattttagattaaacatgctgtacagtgataaagcggggactcttagacctggcatccaagaagataatggaatgtctgcacttccaacacccaatgaaatgtttgctcttccagcacccgaacaatatcgtggctccatttcctcgaggatgaagaggcgccctttgaatggttcatcccagggcagtccccgtacatgatttcctcgggaatttaggtagaactgtgttcccggattgaagaaaaggaagaggatgaatcgctagctcactgcagctattcagaaaactatgtctacngtttactcagcttagcttaaaaggttctgttgctattgttgatgtatattgntgttccctttagcaaggatgcgcacgcaatcataaaaaaacgaacttctgtttacaagaacgatcatgttttccacgactgttgaat

SEQ ID NO: 5883 - DNA, 216 bp, Triticum aestivum
  Clone ID: uC-tsro9316010h05b1
tcgtcctcggcgcgcgcgcgccctacgcccgcccggcgcttttcgccgcggccatcatggactcggaggagaagtcggcgtcggcgtcggcgtcgtcctcctcgtggctcgggctggccagcaccgacggcgccttcgccctctgatctgcacggacggacggagcaagacggcttgcccgcttcaagagatcgtttgtagagcacttgaagcggg

SEQ ID NO: 5884 - DNA, 465 bp, Triticum aestivum
  Clone ID: uC-tsro9316010h06b1
actgtaaaacgctaggtacgatgtgtaatgtgacgatgataaaagattttcgatggatcaaaaaaaaaaaaaaaaaaaaaaaaaaaaaaaaaaaaaaaaaaaaaaaaaaaaaaaaaaaaaaaaaaaaaaaaaaaaaaaaaaaaaaaaaaaaaaaaaaaaaaaaaaaaaaaaaaaaaaaaaaggggggggccgtttaaaagaaccaaaattaacttcccccggcatgcaaagtaaaaatttttttatagggcaacaaaaataaaataaattgcccgttgataaaaaaccttaaaatgggaaaaaccctggctttacaaaattaaaactctttaaaaaaaatccccttttaacaaaatgggtaaaaaaaaaaaaggccctaaccaatcgcctttaaaaaaaaaggcaaccctaaatggcaaatggaacccccctttaaccggcaaaaaagcgcggggggtggggggg

SEQ ID NO: 5885 - DNA, 259 bp, Triticum aestivum
  Clone ID: uC-tsro9316010h08b1
agtcggaaggcgctaaggtgttggagacgtggatgggctatttgaacgttttatcggtaaagtgctatactgtgattggtgtaatattatatggtcatattgtgattggaggaatgtaataaactagattggtacatcggtgatttggatgatatatgaatatatttaaaatgtgttctctgattggtgaaaacaactaaaccgagatgtcagaactaacggaaaaaaaagaagaactaaaactgggtgtccgatatat

SEQ ID NO: 5886 - DNA, 405 bp, Triticum aestivum
  Clone ID: uC-tsro9316014a01b1
tctttcacgcgtccgcccacgcgtccggtgaaatacaaactattttcattttgactgccccagaagaactccttcgccgttacctctttccttagtgttgtcttactatatttcctgcaaagattgggtgcaaccctgagttcatatgatgtatggctacgaggcacgagtactcgtagcttctaaggtcccctgctgccaccgtagtccagttccatattctttcgagtgtgataatgtcaattttgatttcattggctgtgtaatcagttgtaaatattagttatctcggctctgttgcacattgtctctttccccgccttggactcctgatgtgtaattcaccaattaataaacttgcaatacatttcccctttaatcagctggaaaaatataaaagggggg

SEQ ID NO: 5887 - DNA, 356 bp, Triticum aestivum
  Clone ID: uC-tsro9316014a02b1
ggctggtcccacgcgttcttctatcgcgtgggctgccatctcctctgtgtgaccacacatgaaactaacttgggacttaaacgccactaccaagggatggactccctgtgaaactggcccattctttctgtggctccacgttttgatggattataagcacgtctgctccattggataacagggtctagtgctcgggaataacaatgtctgcagtgtacgactcagtgttcttcctaaatgacactaccatgcaattggctggttctcatgccatggctagctgcagatactatatctctggtttgttcatgtgcacgcaaacgggttgtttcagcttccttaatggcttactgttg

SEQ ID NO: 5888 - DNA, 391 bp, Triticum aestivum
  Clone ID: uC-tsro9316014a03b1
tctttttcgcgtgggctgaaatctcctctctggttttttacatgaaactaacttgtgacttcaacgccactaccaatggaagtactccgtatgaaatttgtccatcctttctgtggttccatgttttcatggattataaacatgtttgttcaattggaaacagggtatagtgtttgggaataacaatttctgcagtgtacgaattagtgttctttctaaatgacactctcatgcaatagtctgtctctcatgccattgctcgtttcagatattatatctctgttatgttcatttgtacgcaaatggctttttacagattccttaattcttgactgttgataagcatatgctctgatccgtgttcctctgctgtgattttgcccccaggtaa

SEQ ID NO: 5889 - DNA, 356 bp, Triticum aestivum
  Clone ID: uC-tsro9316014a07b1
tctaccacgcgtgcgcccacgcgtccggtcgatgttgcattaagctggggtggaaggaaggcctgtgaatgaagtgttggattacagttccaattgctcgtcttaatttttgaataaatatatagttgtctaaaaagctcagtaaaatcttccgaatcgagaactcatcatttgtgtagcccctctgtatatttaaaactcatggatggtcccgtggttgaaatgtcagatatgtgtttattatttagcctgccttgtagaaactttattcccgagttaaatatcatcatacaccctttgcccatatttttgtaccattattgatattgatgtcgataccatttcttctggttttc

SEQ ID NO: 5890 - DNA, 259 bp, Triticum aestivum
  Clone ID: uC-tsro9316014a10b1
tctttggaaggaagaagatggcggtcgaggggaccgacaactgcatcgacatcattcttgccatcatcctgccgccgctcggcgtcttcttcaagttcgcctgcgggatcgagttctggatctgcttgctgctcaccttcttcggttacctacctggcatcatttacgccgtctgggtcatcaccaagtaggactgcatgcaggaggggcttctctgcctctgccgctaggtgatccatggcgaacttgttctgtgtgt

SEQ ID NO: 5891 - DNA, 378 bp, Triticum aestivum
  Clone ID: uC-tsro9316014b03b1
tttgaccagagcggccatggccgcaggccactgctaccttcgaccgccacagcctggcgccgcgcgggcgcgagcgccgcagtaaccgacgagcgagatgggttcgccgaccgtaagaaagagcgccgcgtcagccgctggccgcctccactccaagaggagccggggctgcacaggagccgcgctaggaagccccacgcagaggccgaaggccatggccgtgtgtagatcttcccgctgctgcatgccggaaggcagccgaaggccaaggcctgcatgcccgaagaccagccgtcggcgaaaggatcaaaaccggaaggcagcaccccgaacctcgtacgcagcaattagatcaaggcctcggccgccccctgactc

SEQ ID NO: 5892 - DNA, 358 bp, Triticum aestivum
  Clone ID: uC-tsro9316014b05b1
atttttatgagtccgcggcgccgccgtggtggggaggccatgatgcacagtcgtgaggaccagagaagagtacaccaccgggccggaacctgctgccgtgaaccgtcgtggcggcacggaaggagcgccgctacggattggggaggagcgccgttgcaggcctagggagagcgccgtccggaccaagctccctgctccaccgatcaaggactcttgattccggccgcctgcagcacatcaggccatcagctaacagaatgggagcactgagcaaagcttgcgggatgcaaaaaacagagaggccgttgatttgcttatatctggtcctgctattaagttactgaagcaagacaccctt

SEQ ID NO: 5893 - DNA, 352 bp, Triticum aestivum
  Clone ID: uC-tsro9316014b06b1
ttcttattcctggcactctgtcttcaagcttatcgcctttatcctatctccggcctctcttcggcatggggaacttcgcgtcctgcacgctggccaggatccccggggcggccaagggcgccagggtcgtgctccccgacggcgggctcaggctggtcaggcccccggcgacggcggcggagctcatgctcgaggcgccgggccatttcctgaccgacgcgcgcgcgctgcaggccgggcgccggatcgaggcgctcgcggctgacgacgacctcgagctcgggggcgtctacgccgccttccccatgaagcggctcggctccaaggccgcgcccgccgacgtggcgcgcct

SEQ ID NO: 5894 - DNA, 159 bp, Triticum aestivum
  Clone ID: uC-tsro9316014b08b1
ttctaagggaaaaaaaggattttactatgttttctttttaatgtttggcatcgcgttgtatcaaactcagccgctctttcgctgagtaatgtacatttgcctcgccatggcaacttgtgggctctgctgctgctttattgaagatgatcgcaattttac

SEQ ID NO: 5895 - DNA, 364 bp, Triticum aestivum
  Clone ID: uC-tsro9316014b09b1
gtggtgggcaacccgtcggggtccaagcgcggcacggtttgcatccagggcatcgcctggagcttcggcggcatgatcttcgtgctcgtctactgcaccgccggcatctccggcgggcacataaaccccgcgggcaccttggggctgtcactggccaggaagctgtcgctcaccagggcggcggtctacatggtgatgcaatggctggggcccatatgcggtgctggggttgtcaagggggtccagaccacgctgtaccagggcaacggcggctgcgccaacttcgtcaggccggggtacaccaagggggaccggcttggggcctccattggtggggaccctcgggctgaggtccaccggtttt

SEQ ID NO: 5896 - DNA, 188 bp, Triticum aestivum
  Clone ID: uC-tsro9316014b11b1
ttttcaatgttagcttcctagctcatgtgtgtcagtttttcagttagttgcgactgcttgcttgtgcatcacccctcaatcaacaagtgaagtaaataaaagtggtggtttatgtgcacaagaacagaacttccccacagaagaacaaaactgaaaaagaacccagtgaaagaagaaaaacttaaggt

SEQ ID NO: 5897 - DNA, 200 bp, Triticum aestivum
  Clone ID: uC-tsro9316014c02b1
ggttgtcccacgcgtccggtctagcaagggtgcgtgcgcgtgtgatttgcttgctcgctctccgcctatgctctgcccatggtgtccttgcgtgtatgtgtgtgcgcatgtctccctgtaattgcttcatctatctccactatggatggagtgatgaatatgctagaatgaaagatttacctaattaactagtcctacat

SEQ ID NO: 5898 - DNA, 148 bp, Triticum aestivum
  Clone ID: uC-tsro9316014c07b1
gcggtccactgttgatctactaggtgcaggaagaaggtgtgatacagcactggcgccgatagcagctgacgccgaggaggtcgtggccttgcaatgggcagagcaatggcccttctgaggcacagtcgctctgtggaggagcccagga

SEQ ID NO: 5899 - DNA, 428 bp, Triticum aestivum
  Clone ID: uC-tsro9316014c09b1
ttcccacgcgtccgccggccatccttcaaaccgtcagctctcaggccaccggagcttcgctcgccgaccgactcgactcggccggcgatggggaggacgctggacgtgctgctgggccgaaccaccaagcagacggcgcgcctcaagtccctcctgcacctcgccacgaagcggatcgccgtggtgcgggcgcaccgggaggtgcggtgcgcgcaggcgcggggggacgtggagcagctgctgcggcagggccacccggaccgcgccctgctccgcgccgagcaggtcatccgggagcgggacacgctcgacgccctcctcctgctcgacgcctactgcgcgctcctcgccgaccgctccgcgctgctcgacgacgcgcaccggggctgccccgacgagctgcgggaggccgcggcggagctctgcta

SEQ ID NO: 5900 - DNA, 384 bp, Triticum aestivum
  Clone ID: uC-tsro9316014c10b1
ggtactgtccgaattcccggttgcccagcgtttttgacgcgtggggttctacggacctggtggaccttatgccctattcgctggcaaagacgccagcagagctctagccaagatgtctttcgagccccaggacctgaacggtgatacctctggcctcgggccgtttgagctcgacgccctgcaagactgggaatacaagttcatgagcaaatatgtgaaggtcggcaccatcaagaaggcagcttccgcagaagacggcaccacaagcacatccccagaaacaaatgaaacagtcaccgccgaggcagagaccgagaaggcacccgccacggagcacaagccgagggaggtgagcttcgaggaggttaaagagaaggaagccac

SEQ ID NO: 5901 - DNA, 350 bp, Triticum aestivum
  Clone ID: uC-tsro9316014d01b1
ttgtaagaaagagggagccgccgtgtagtcggcggccgtgggcgtaggcgaggtcgttagcggtggcggcggcagcggcggcggtgaccagttagggtcggcggccaaaggagccggcgaaggagcagagtcgggcgtgggcggcactgctgaaaaagcggggtccggtgggagccaggcagtccagggcgccggtcaaggtgctggtagctcttactccggcggcggcggcggccgtcgttgagcctgccgtgtaccgcgggatcatcgccgccgtgactgaggaatgatacccaaccatgccactgcgaataaaatcaagctgcttaattcacaataaaaaaaataaa

SEQ ID NO: 5902 - DNA, 154 bp, Triticum aestivum
  Clone ID: uC-tsro9316014d04b1
gaaccggcccggaacacccgggacgacccacgcggacggtcacgcgaccgcccacgcgaccgaccacgcggccgcccacgcggccgaaaaaaaaaaaaaaaaaaaaaaaaaaaaaaaaaaaaaagcaaccaaaaaaaaacacaaaaggcaccac

SEQ ID NO: 5903 - DNA, 172 bp, Triticum aestivum
  Clone ID: uC-tsro9316014d07b1
cctgtgaaatgtgataactatgaactgttttcaatgcggtctttgccagaaacatgtcgccgctcgctctgctgactttcttatcgcttgctggtgctgaacctgctgatttccatgtgctgtgctaataaagcaacatagtcctcggatgctgtggtaaacaaaataaaaa

SEQ ID NO: 5904 - DNA, 417 bp, Triticum aestivum
  Clone ID: uC-tsro9316014d09b1
tttattcaaagcttacaatccccatcatctgtcaccaaaccgatagcaaagcaaccccatacatagaagcttacaagcgaagcatgcgaccgagctaatggacatggcaccgcctgcatccgccgtctccttctccccccgcccatcgacgggaacgactttccggccccgcgccgcttccgcctctggctccgtgggcgccgggcgggtccgcgcggcggtagcccccgagggaggcaagtggtgggcgccactgctcggctggtctgggcgggcggactacatcgaggccgcggcaccggcgccggcgatggcgatggctatggcggcggaggaggaggagaaggcggtgaggtcgttccgtgggcggcctgacggaggagaaggcgcggcaactgcgggcgcggatggtggaga

SEQ ID NO: 5905 - DNA, 352 bp, Triticum aestivum
  Clone ID: uC-tsro9316014d12b1
tttgaaggcgcatggctcgagcatctacatggctcttgagagcggaagcagggtcgggatgaaccgcaaagctgagcgcttcagctttgcggtgcctctcctgacctcccaggtggtcgcctgaggtacgcaagaatcggcaagtcacaaaacggcaatggtgaactccggcaggagtccaccccccttttatccttttctctccattcagttgtatcaggtggaagtcgaataatcggaagtctctgtgtgtgatgaatcaatggatgcttcaagtccatgttttgtttttctcttcctttattatgggcactctggaaacactactataaatgggtgatgttcattttgc

SEQ ID NO: 5906 - DNA, 182 bp, Triticum aestivum
  Clone ID: uC-tsro9316014e03b1
tttgaaccctcatactcacaacagatactaggaaaccgatcgaccataggcggaactgacactgcgacacacaccgcaacaaagatacagctgagcaaacgcaggcacacgggagcccggcaagaggtgctgcatcgatcgctcgctcgctgctgaaccgacactgggcgacgactggcccc

SEQ ID NO: 5907 - DNA, 299 bp, Triticum aestivum
  Clone ID: uC-tsro9316014e05b1
ttcaacattgtgccgtcggtggtgtacctcaagccgcccaagccgaagcagggcatccggctcgtgctccagtgcgtcgaggagccgcacgccgccgtcttcacccaggagctggagaagctcgcctaagagggcttgcgttcgtcatggttacctccatactttacagaattattacaggtgggatttggagttgctgttgctgctgtattcttcatcttgtcgtgcgtcgtagttgttgcattccacaccaggttttgctttcaacaaacaaataaatcactgaggggttcttctct

SEQ ID NO: 5908 - DNA, 504 bp, Triticum aestivum
  Clone ID: uC-tsro9316014e06b1
tttacgcgtccgtctctctcacggacctgtgaggctcctgcggctccagtgcgcgggactggcggcaaggcggtgggcaagatggattggcaggggcagaagagcgcggagatgctgatgcaggtgctgctggtggcgtcggcggtggcggcgttcctggtcgggtacgcgatggccgacttccagctgatgctgctcgtctacgccggcggggttgtcctcacggcgctcgtcaccgtccccaactggccgttctttaaccggcacccgctcaagtggctcgacgccgccgaggctgatcgccacccccgcccgcagatcagcagcgcaccagcgacgaccgggggtaagaagaagaccggggagaacaaggagtcatgttacttatggcccatgtggtgcagacatgttttatgattatcagttgcagaacttttgaggatgacatgcttgaagtggggtacctgaatgtttttatgacaaaaatctgcttcctttttgggt

SEQ ID NO: 5909 - DNA, 338 bp, Triticum aestivum
  Clone ID: uC-tsro9316014e08b1
tctcccacgcgtccgctcacacaggcacagcttgcacagctgatcaatgagaagccacatgtcatccaggagtacgagtcaggcaaggctatcccaaaccaacagatcattggcaagctggaaagggctcttggcacaaagctgcgaggcaagaagtgaagccgcgtgcatttgacaggaatttaggctttaagaaagcttggttgggcaagtttaccgctaaataaagcttgtctactaaatcatgcgacttaagaaaaccctggagtttggcattttgctcaagtttgggtgaatggtattattagccttctgtgaacaacttctgtatctggggt

SEQ ID NO: 5910 - DNA, 374 bp, Triticum aestivum
  Clone ID: uC-tsro9316014e11b1
ttctcaaacctgcctcctgatgtgactgttgaggaactgcaagagctttttggaggaattggccaggttggaaggatcaagcaaaaacgtggctacaaagaccagtggccctggaacataaaaatctacactgatgattctgggaaagccaaaggagatgcttgccttgcttatgaagatccttctgctgctcattcagctggtggattctacaacgattatgacatgagaggccgtaaaattagtgttgtgatggctgagaaatcagcacctagagctcctacatctggtcatggaggcggacgtggtggaggcggcggctatggcggggatagacgcatagatggaggaggccatgggcctaacagaaacca

SEQ ID NO: 5911 - DNA, 400 bp, Triticum aestivum
  unsure (1)..(400): unsure at all n locations
  Clone ID: uC-tsro9316014f01b1
gtttattttggattgaaaatttacttgtccgaccagcttcttggtacttgtaagttagtacaactcttggtcaatgtggatgaggaaactgacctgaaacatcctatttccttcacgtataaatgggttcctcctgcggatgataaggatgaagatcgccgtcagcccaagggccttaactttctncatgatgccaacctgccggtgatctacaagcaggccttcaacatctactggactagggtcagtttgagccttcacgagctcgacatcggagccagcactctacatgcttatcgacgcggtggccatcgaggtccaacttgttcggaaatatttgtcggagtaatggatgtatctatacgcattttagttttagacacatccatttttatgcatt

SEQ ID NO: 5912 - DNA, 473 bp, Triticum aestivum
  Clone ID: uC-tsro9316014f03b1
tctttaatagacaggtcatctggcaacttgggtgcaacatcttctctccatagatgtgcatttgatgacttccatttctcgttttggttaggagttcccacgatgggatggttacaaacttaaagtccaagtgactataaaagaaacaacaaaaacatagttaaatgtataaaattacgcagcttttcccccaccactggtggggggttttgtagctgaccccttaggaaaacaattcttctattgtttgctagatacgttatgagacggacctgtttaaggggccgctccatttttgaagctaacaaacttttaagtcgttgatttgcctgccatttgaagacttccttactgcatttgctctggtttattttactgcatttgcggctgtttttattgctaatatttaatctttcttaacactattctatcacaccttttctattattcttactttcttttttctacattaa

SEQ ID NO: 5913 - DNA, 461 bp, Triticum aestivum
  Clone ID: uC-tsro9316014f04b1
tttctagggtttgcctctgtcttccggcggccggcggtgaacggattcagacgatgtcgaagaagaacagcctctccaagcggaagaagcagcacgagttcgacctccagagggagaagaaggccaaggaggagcaggccaagaagctgcaggccaagaagtccaagatgaagattgatggcagcgataagaagaagaagggcagcagcttcaaggtgggcaagaagaaggtgaagacaaagctctccgcactgggaaaagccaaggccgcgcaagccatggagctcgacaactgactgactcccacggcctaaactgttgcaccaatgccggtcattttttatgtaatcgtcggagaaatgaagttcatttgctctggccaggtccatgtagtcgagctgcgttagatagataagagttttggtatttctccagtcaggcagatcctgatcgtgtatgat

SEQ ID NO: 5914 - DNA, 167 bp, Triticum aestivum
  Clone ID: uC-tsro9316014f06b1
ttaaaaatgttatgttggcatagtggcttatagcagtttgaatgaaaaatgtaggcttttattccaaaaaaaagtatgtaggttacatggctcacacctgccaagcggaagccccggtggaagggttactggaaacctattgaagatggggaggcaaaccacataaa

SEQ ID NO: 5915 - DNA, 239 bp, Triticum aestivum
  Clone ID: uC-tsro9316014f07b1
ttatagatcattttagcgggagtaagaaagagggagcatggggaagaagggggttgccctggtggcgctgctgctggtgatggtcagcatggcggtcgtgatgactgccgacggccagggtgccggcagcgagttcggcaaagcggccgaaggagccgggacaggcgccgccaccgctgctgagggcgcgggagccgccgtgaagtctgcggcccaaggagcaggccaggcagctagtg

SEQ ID NO: 5916 - DNA, 180 bp, Triticum aestivum
  Clone ID: uC-tsro9316014f08b1
tcccacgcgaacgcaagacatagcaaggggacgaaattatcatcacgagtgcaagccagagccaatcaaccacggggagcaggcaccaaaaaatatcgcgcgggacgacgaaggaaagacaagggcggcaggccttggaacacctgacccgacaaaaggctcccaagaaaaaccacagaa

SEQ ID NO: 5917 - DNA, 460 bp, Triticum aestivum
  Clone ID: uC-tsro9316014f11b1
tgcaaacccgcacagaagttcttcaagttaatgcctggcgaagttattcttgcttcgctggacggatttggtaaagtttgggacgctgttgaggtgtctggaaagaacgtgatgaaaacatcgtcagttgtcactacttcagttgtaacgcacaggtacggtgatcaggcaggagagatcacacaggactacctccacgccaccggaaacgctcttggggtcgcgtgggccgtcttcaagatccggaaagcgctcgacccaaaggggcacatcaagaagtcgtccctggcgagctcggcggcgcacgctgtggctaagcaatcgatcagcctgcagaagaagaagtaagccgtcgtcgtcgtacgctggtcgatgatggctccactgtatattgtagtatgttcttgttgagtttcatgtgtgggctaaggtggttccactgtgctgagtaatggtgatg

SEQ ID NO: 5918 - DNA, 197 bp, Triticum aestivum
  Clone ID: uC-tsro9316014g07b1
gtgcggacagccgaaaaggggctagcttatggagcagagggcgccacatcaatcgccgagcagactatggttcaggccctaccaccagcgtgagaacggtttgccaaatctctgctaatgtgacgtggccctttctcgtggacgaagatcggattggcccaatgcgttcatttcattgacaaaggagaaatgagggg

SEQ ID NO: 5919 - DNA, 352 bp, Triticum aestivum
  Clone ID: uC-tsro9316014g10b1
gtccagggtctttgcgggcgcgttgggcgccgacgggctggtctacgccggcggcgccctgcacacggccggcggcggcggcggcggcgccgcgggcatcgccgtgcagtccggcaccttgaccctgaacggcaacgtcacgggcggcgcggggggcccctctccgtaccagcccggcggcggcggcgatggcgtggtgctcgggcatggcgacatcatcgtcaatgcgcggatctccggcggacaaggcggctcgcgccgttactacggtaccccgagatcggccagcggagacgggggcagcggcatatcgatcggctcgggcaccgtcatcaacaacaacgtcgtgcta

SEQ ID NO: 5920 - DNA, 480 bp, Triticum aestivum
  Clone ID: uC-tsro9316014g12b1
tttttaattccagcctgtcatccccttcgcgacactctaccgctctcccgatggatccgcagcagccggagcccgtcagctatctatgcggagattgcggagctgagaacacgctgaagacaggggatgtgatccagtgccgtgagtgtggctaccgtatcctctacaagaagcgcacccgcaggattgttcaatacgaagctcgctgaagacagaagaacaaacatcattcactgttggtaggtgcctcgattgatgtggagtgtgccctgagacaaagctacaatggagaaatgtattatatacagtacttttaggtcttatttgtccgttggactttggcttgaagtggtaaaacttgttgcaaaccgattgagattttagacaattgagaatccagattatgcatcccaaaagctggatgtcgaaaaatggttattattgctattggcagcaataaaatgctctgttggttggttg

SEQ ID NO: 5921 - DNA, 187 bp, Triticum aestivum
  Clone ID: uC-tsro9316014h02b1
gatcgtagccatgtccgggcgcggaaagggatgcaaggggctcgggaagggcggtgccatgcgccacaggaaggtgctgcgcgacaacatacagggcattaccaagccggcgatccggcggctggcgcggcgcggcggcgtgaagcgcatctcggggctcatctacgaggagacccgcggcgtgctg

SEQ ID NO: 5922 - DNA, 380 bp, Triticum aestivum
  Clone ID: uC-tsro9316014h06b1
aattctacgcgtccggtcggctcaccgaaaggtgcgcctggaggaaacaagcgccttatgaactctccaaggagtgttggaagcccaagacgtgggtctgccgagaagaacattcctgggctagaacatgtataccaggcaaggaggaaggctatactgcgggagctgaggaagatgaaggccgcaggcaggtgaagatcccagagaggtatcgtttgaaccatttccgaaccttcagtgcaagtcaagttttagatgctactcaacaagtttgaactctggattgcttctcagccagagaagatgactgacagccgaattgttgtgcctcgtttgtttcaagttcatcagttgacaagcctgcttattgaagccctgtt

SEQ ID NO: 5923 - DNA, 103 bp, Triticum aestivum
  Clone ID: uC-tsro9316014h07b1
tctatcgggtgtgatggacctgaccaattcaatcatgcaagaatttatgctgcgcggtttgcaaaaaaaaaaaaaaaaaaaaaccacacaacaacaacacacg

SEQ ID NO: 5924 - DNA, 316 bp, Triticum aestivum
  Clone ID: uC-tsro9316014h09b1
tttttcggcgtggtggcggcgcggtcgcggctgaagatgaagctgaagcgcgctctgagtatcattcaagaggttgctgagtgaagcatttctctaaaagataaatactagtagtgtttttttttttagtttctggttctgcttgaagccatatttaggtttaagcccaaatatttaattggtttagttgatttaggataggaagaacatgtcttctgggaaagggtatgtgaatatgtcccatggtgtatgtgattaactattgaatacttttatgcaagactaaaagaatgcaatacacccgattcttgatttg

SEQ ID NO: 5925 - DNA, 212 bp, Triticum aestivum
  Clone ID: uC-tsro9316015a02b1
ctctttggcaccaagggcgagatccggaacaactgcgccgtccccaacaggcgtgtccaggacatcgagaccgccgccacccgcgacgaggggatcgccgccgacatgtgagagacatgttctatcgatgtaacgtagtgtgagtgagtgatcgttaagccggtgtgttgtaaacttttaattaattgtgcaagcatgttgtcttagttagt

SEQ ID NO: 5926 - DNA, 498 bp, Triticum aestivum
  Clone ID: uC-tsro9316015a03b1
ttcttagaagcaagcaagaaaccttcacagcatccaagcaagcagcagacagtgatcatcatccatggcggcgcaccagcagcaaccgcagtcgcagtcgcagcagcaggcggtggggttcgaggactacctgccggtgatggcggagcggctgggggaggaggggctgatggaggagctggcggcggggttccggctgctcatggacccggcgtcgggcctcatcaccttcgacagcctccgccgcaacgcgccgctgctgggcctcgggggcatgtccgacgacgacctccgcgggatgctcgccgagggcgacttcgacggcgaccgcgcgctctcccagatggagttctgcgtcctcatggtcaggctcagccccgacctcatggacgagccccgcaagtggctcgacgacgccggcgcgcaagcattccactttcttttcaccagctaggctgctgctgcatcgatccgataggaaaattaatcttcttcttc

SEQ ID NO: 5927 - DNA, 363 bp, Triticum aestivum
  Clone ID: uC-tsro9316015a04b1
tcacttgtccgcccacgcgtccggcacacatggttttaggagtcccgtcacatgcgcgcacgcacatcacaccattcgtgggtgctcatggctgccgacatacggacactgaattaccctactccacattctcatgcgtcatctgatcgatccggggactgtttgagacccacaccaggttctacagatctggagacagggaggcgaacgtgttccccacaccacgtcatttgcgggatcccgtccacgtcgagcagtccatgagtactgggacaacactgtagtgagcagggtggcacgcatgcaccccgctgctccaccagatgagatccaaataaaaaaaacaagggcggcccgtttaga

SEQ ID NO: 5928 - DNA, 116 bp, Triticum aestivum
  Clone ID: uC-tsro9316015a06b1
ccggaacaccccgggcctacctacccacccgttcgtaccacacgaccaaaatacaaaaaaaaagagacggctaaaaaaaagaaccccagcgttaacaaaaaaaaaaaaaaagaggg

SEQ ID NO: 5929 - DNA, 273 bp, Triticum aestivum
  Clone ID: uC-tsro9316015a07b1
ttgtgacgcgcgggttgccattcttcgacaaaaaaacaataaaaaaaggaaaagaggaagcaataaaaaaaccatgaagagaaagagaccgaacaactggccgcaaccatggaccaacaaggccatcgatccctatgcggcggagacaaagggggggggcgttcaggagggcccagctccgctcccggggggaggcaccgcccacgtgttgcagtggggcccgcaaaaaaaaaataacgggccctcctttcaacccggttggacggggaaacc

SEQ ID NO: 5930 - DNA, 329 bp, Triticum aestivum
  Clone ID: uC-tsro9316015a11b1
ttctttcgacatgatcaagcttgacaaggaagagtctggccaagaagtgtagccacatgccattttacgatccctggctgctgtttgttatgccatggctggctgcttatagactcataggttgctgcttgtgattttccttttcttcctccttgtattggcggacgttctcgtagaatgttgtacggaagatggatgtatgagtgattgagtgtgtatcattatgtgtgggtagtaggactcgggagcaaattttgcctggcattgctgatagttcatgcaagtaacattgttgtcatatatgtattgatcaactgttaccactggtt

SEQ ID NO: 5931 - DNA, 352 bp, Triticum aestivum
  Clone ID: uC-tsro9316015b04b1
tacctctcccccctatcggcttgcgccccatctgcggcgcctatccgcgactcctccgctccaaggaacgatggcatcccacattgttggataccctcgcatgggccccaagagggagctcaagtttgccttggagtctttctgggatgggaagagcagcgctgcggatctggagaaggttgccgacgacctcagggccagtatctggaagcagatgtcagaggctgggattaagtacattcccagcaacaccttctcatactatgaccaggtgcttgacacaacggccatgcttggtgccgttccggaccgctactcatggactggcggagagattggaccagaacctact

SEQ ID NO: 5932 - DNA, 232 bp, Triticum aestivum
  Clone ID: uC-tsro9316015b05b1
ttaatttccttgcgatgcatacccactgccatcacagctgtcgtcgcaagccggctgccgtcttctgctgcacagcgagaggaggggcggtacattgcggcggctgcgacgggaagaggaagaacagtgcataggggaagcaaattcttgttcattcacgatacaattcggattgattcattatgctgtgatccggaggtggtgactagggagggggtgctggaattccttt

SEQ ID NO: 5933 - DNA, 329 bp, Triticum aestivum
  Clone ID: uC-tsro9316015b06b1
gggcggacgcgtgggcggtggtagtgcgacatgcgtgtgacactagttcttgcaccgatcagatccaacttctgcacaggatgctggacaagctgtgggacgacgtggtggccgggcctcgcccggagacgggcctagacaagttccggcgggccgccgccacccaacccctcgccatcaacacagctgcaggggaggcgatgaagcagtcgccgccgatgccgacgaccccgaccacgccggtgacgccgtcgttgtccacgccgccgcgcggcggcagcgtgtggcggagcgctttccaccccgggagcaacctggccaccaagagc

SEQ ID NO: 5934 - DNA, 360 bp, Triticum aestivum
  Clone ID: uC-tsro9316015b09b1
ttggtgtgctctacgcctccatcgggttgtacttgtgatccttttgttttaaaaaaacaaaaatataccacaacaaaaaaaaacaaaaaaaaaaaaaccatacactccttcttacatttatcctatctctctaccatacctccccccttttttccccccggggggggcctctttgggggccccaggtttccgcccccgggcttgcggcgtctttgcttttttttgggggccccttattctcttccccgggccgtcgtttcccccctgcgggccggggaaaccccgggggtccccccctctattcccctggcggccctcccccttttccccggtggggttatttctgcaggggcccccccc

SEQ ID NO: 5935 - DNA, 255 bp, Triticum aestivum
  unsure (1)..(255): unsure at all n locations
  Clone ID: uC-tsro9316015b11b1
tctttaacagatacaacaatcccacgagagtttacgatttacaatgaacaatttcactgctttatcatcttcttcctttatggaaaatccctcgcccgaggtagatcgtggcaatgttttggcttctattccggagtctaacaattcagtacctgttgactcatgtccttatggatataaaatggttttgaaacttaagagtaagatctacccagaagggttcacatnnaaaaaaaaaataaaaacaaaaaaaca

SEQ ID NO: 5936 - DNA, 225 bp, Triticum aestivum
  Clone ID: uC-tsro9316015b12b1
tctgtcccttccaccctcccggacgcacaagatcctcgtcggccggcgcggccgtggtggtacacgactggactagctagccatccatcgctgcggtgccgtcgcccaatgacccggctcgccctctccgactgccgcggcctcacgccgctccgcgcgcgcagccgcggcagcgccattgcgctgccgtcgcctccccacctcgctgcggggccgcgtcgcccc

SEQ ID NO: 5937 - DNA, 303 bp, Triticum aestivum
  Clone ID: uC-tsro9316015c05b1
tttattctgttgaggaccagaggaagcagaagctgcagcttaaggttcagcttcttgctcatagtaatggctggcacgggcagcacctggctcctgctggagcagaagggagctgggccgggagcaaggagcttccacaccatcacgctcgtcagcagcacggtctactgcttcggcggcgagttcacgccgcacctgaccgcggacaacaccatgtacaccatcgacctcaaggtccagttctgggccgacctctacgcggccggcgaggtgccccccgcgggcgtccgcgtcaccatgacc

SEQ ID NO: 5938 - DNA, 269 bp, Triticum aestivum
  Clone ID: uC-tsro9316015d01b1
ctaatatgcacaatcacacaagcaacatcctcaccaagaaccttgaatactccaaagcgatggaattagctcaaagtcgatgaacttcttccaatgttcttgttcctttatgtacagaaaattcagaaagtatttttaagttgatggctgcttagtgatgctgccctttatttaagcgagaaatgtaaatggcattgtacatacgacactgcttcgacaaaacattgttgagtgttaaatagaagaaaggttgtcattcttgttgtttt

SEQ ID NO: 5939 - DNA, 496 bp, Triticum aestivum
  Clone ID: uC-tsro9316015d03b1
tggacccccggcggcgccggtctcgtcgtcctgggttgtctacgcgcgcttggtatccgccgctggggggctcgaggccgcgaagatgtaaatacacgctggctggggtgttatgaccagccacaggagtggtgagaccgaggacacattcattggtgatttggctgccggtctgtccacggggcagatcaagaccggggctccctgccggtcagagcgtcttgccaagtacaaccagattttgaggatcgaggaggagctgcgcgaccctgcaaagaatgctggcctcaagtggcgcgcaccggtggagccctactagacaggatgttctcgagttgttgtgaaaatgggtgtgcataacctccggaaggaactctggtggaagctcttaggattgagcataatgtccagcatgtttatgtgaacggaacggatatgtacccccaaacttgctacaattctggcccatggggatatgaacctgattgggacccga

SEQ ID NO: 5940 - DNA, 222 bp, Triticum aestivum
  Clone ID: uC-tsro9316015d04b1
ttggttgtgccgctgtgatgacctgaaacggtctctggtggaatgctacggtgactagtttccgttgtagaagcgttattatccggactgttttcgtgtacttccgtgtgaatttagacggcaagttttttcctctttactataaaaaagtacaatgacttgcttacccgtgatctggctggcaactttgaaggtatcatacaccaccgttctgttgtcagt

SEQ ID NO: 5941 - DNA, 496 bp, Triticum aestivum
  unsure (1)..(496): unsure at all n locations
  Clone ID: uC-tsro9316015d07b1
ttgatcacgcgtccgaacaaacttccctgattcccctgaaccaatctacgggacccagtatctacccaggaagttcaagattgcggtcacagttgctggtgataactctgttgatatcctgaccaatgacatcggtgttgttgtcgtttcagatagtgcaggggagcctgttggctttaacctctatgttggaggtggcatgggaaggacacacagaatagaaaccacattccctcgtctggctgatccacttggttacgttcctaaggaggatatattatatgctataaaggcaatcgttgtcactcagagggagaatggaagaagagatgaccgcaggtatagcagaatgaagtatctgattgacagctggngtattgacaagctccgggctgagggtgtaatatactatggaaagaagcttgatgattttcatccattgtcagaatggcaattcaacagctaccttggctggcaggaacagggtggatggtaa

SEQ ID NO: 5942 - DNA, 204 bp, Triticum aestivum
  Clone ID: uC-tsro9316015d08b1
tactgcactgattactgagtgttaacgagaatctcgttgtactaatttttgtttgggggtgtatgtggcgctagagttcaccttggtggagcctctccttcacccttgcatgtaaccaatggtttttatacgtttccatcatagatccatgctttctgaatcctggacattgttgtacttgtggaagtactccctccgtaaact

SEQ ID NO: 5943 - DNA, 520 bp, Triticum aestivum
  Clone ID: uC-tsro9316015e02b1
tttctatctcacggaaagaaccacaaccaccacaagggagtgaccatcggagcaaggaaagaccaggagagatggcaatgaggccgcttgtcgtcctggccctggccgtggcgctcgccggcgtggcactgggagggggcgcggcggagggggccggcgagtgcgggaggtcctcccccgaccggatggccctgcgcatggccccgtgcatctcggcggcggacgagccggactcggcgccgtcgagcagctgctgctcggcggtgcacaccatcggcaagagccccagctgcctgtgcgccgtcatgctgtccggcaccgccaagatggccgggatcaagcccgaggtcgccatcaccatccccaagcgctgcaacatggccgaccgccccgtcggctacaagtgcggagattacacgctgccttgatggcccggcaatgctgacgatgaagatgaatgctgtggaaggcgtcctcatgtgggaataagcgagtggtgcatgtgccacttatgtggggc

SEQ ID NO: 5944 - DNA, 445 bp, Triticum aestivum
  Clone ID: uC-tsro9316015e03b1
ccctcgcgtccgaccacgcgttcgctcccccgcaaaaccctatccctaccccgcgccgcctctgaccgtcgactccaggtaaggaggaggagaggagggcgagatggtgaagcacaacaacgtcatccccaacggccacttcaagaagcactggcagaactatgtcaagacgtggttcaaccagcccgcccgtaagcagaggcgtcgcatcgctcgccagaagaatgctgtgaagatcttaccccgacctacctctggacctcttcgccccattgtgcaatgccagacccgcaagtacaacatgaaggccagggctggcagaggatctacccttgaggagctctagtccgttggcattccaaagaagcttgttccgaccatcggcatttctgtggaccatcgccgcaagatcaggctgcttgagggtatgcagtccaatttccag

SEQ ID NO: 5945 - DNA, 394 bp, Triticum aestivum
  Clone ID: uC-tsro9316015e06b1
acgcaccgcaaacaacagaaattatatacagccatgcctctgttgctagctgacagcagacaagatgttgggttaaatcattgaatcagagttttgcagcaagaccagaaaattgactgctacatggtcatgtactttgtaaacatgtctttgaccattcacttagactgaagcatggttatgcacaatcagcaacattagccattcacactatctcgcctcacagatgctgtatagttgatttacctcctcagatgaacaaagccttaccataacaaataaaaaaaaaaacaggctgattactaggtagacacgctccattctgagtgggaaaagcccatcctacagagcattcctgagcacattttacttttgacatatctgctcatgcttt

SEQ ID NO: 5946 - DNA, 442 bp, Triticum aestivum
  Clone ID: uC-tsro9316015e07b1
ttcttgtaggagtgagaagaagagcaggaaggccatgctgaagcttggcatgaagactatcactggcgtcagccgtgtaactgtcaagaagagcaagaatatcctgtttgtcatctccaagccagatgtattcaagagccctgcctctgacacctatgtcattttcggtgaagctaagattgaggatctgagctcacagctgcagtcccaggccgccgagcaattcaaggcgcctgatcttagcagcgtcatctcaaaccctgaggcttctacagctgttcaggaggatgacgaggattgtgatgagactggggttgagccgaaggacattgagctggtgatgacccaggccggtgtgcctaggcccaaggctgtgaaggcgctcaagtctgctgacggtgacatagtcagtgctatcatggaactgacgaactagccgtgc

SEQ ID NO: 5947 - DNA, 511 bp, Triticum aestivum
  unsure (1)..(511): unsure at all n locations
  Clone ID: uC-tsro9316015e08b1
tcgtattatggtggtaattttgtcaaagatgtctgcattgatgacggacaacctcttcctcggaagatttcagaagataaagtagtagatgaaaagtcatctccaaattttgattgtcaaatgatacacgcaaatggtgctccgacgtacatagaaaaagattgtgctgcaaaatctttccacaaaccgagaccagaagcagttcaacctgttcattttgctcctgatagtaacaatgagaaacgatattcttcttgtgaaaaacatgatcctgaaggcaggagtaaagccactaattttggtgatctcagtgagaagaaaataagtctggaagaattacttagactcgaaagtgcagaagagtccctgcataaaggtgcaataagctctgaaaccagtaaaaatcatatgccatctttccatggagaagcagtcaggcaggtttccgcaaatgtgggtcatgaagtcgaagctattgcatccataacctgtngtattgctaatgattttg

SEQ ID NO: 5948 - DNA, 404 bp, Triticum aestivum
  unsure (1)..(404): unsure at all n locations
  Clone ID: uC-tsro9316015f02b1
accgggacgacccacgcgcccgaccatgcgaccgaacgaccacgggagacaacgaaacgaaagggaggaacccaccccacgacgcnggaaaaaaaaaaaaaaagaaaaagaaaaaaaaaaaaaagaaacaaagggcggccggcccaaaggacccaagcgaacggacgcgagcaagcaacgacacagcgctgccaaaggggcaccgaaaggcaaaaaacgggccgcgggacaacaacgccgggacggggaaaacccgggcggcacccaacaaaaaagcccgggaaaaaaacccccaagccccagggggcgaaaaagcgaaaaggcccgcaccgaacgccctagcaaacagaagaacagcccgaaaggcgaaaagggacgcgcccagaaacggagcaaaaagcgcg

SEQ ID NO: 5949 - DNA, 153 bp, Triticum aestivum
  Clone ID: uC-tsro9316015f03b1
ggaccggcccggcaaacccgggacgacccacgcgcccgttcatgcgcccgaaaaaaaaaaaaaaaaaaaagagggggaaaaaaaaagggaaaccgccggagaccacccaaagggaggcgggggccgcaggagcacaacacccgacgggggcaa

SEQ ID NO: 5950 - DNA, 472 bp, Triticum aestivum
  Clone ID: uC-tsro9316015f04b1
tgttatgctactgatcttggaactggcaaaggccaacgtgaacgagaatggagctgagaatgcggccactcataacggtcttctgcgtgcgatcgtcaacggcgcccatggcgctggccatggtggcactgccggggacttcatcgttggcaactgtaagaccatatacttcgcagggcatgagaccacggcggtcaccgccatttggtgcctgatgttactggccaaacacccggaatggcaggagcgtgcccgcatcgaggcgctggaggtttgccatgggaggagcacgttggacgttgacgccctccaccgactgaaaattctgacgatggtgatccaagaaactctccgtctgtacccaccggcgtcgctgatgatgcgtgaagccctgacggacataaagatcggcgacctggatgtgccccgtggaacgatcgtccaggtgaccagatcgatgctgcacctggac

SEQ ID NO: 5951 - DNA, 155 bp, Triticum aestivum
  Clone ID: uC-tsro9316015f05b1
tttgatgaccagcagacgggaagtcccgtcatagcgcaccatgtcttcagcggcgtgctagagtctagcattctacacaacaatggaacatggcgtcgtctgacgaaaccaaaaaaaagaaaaaagaatctctaaagaggagaccaagacaaaag

SEQ ID NO: 5952 - DNA, 115 bp, Triticum aestivum
  Clone ID: uC-tsro9316015f08b1
ttgttcacgcgtccgcccacgcgtccgcccacgcgtccggaagatcgcaatcgacgttgtaagccctggattcgattttcacctgcctgaatgtaaatgttccgtatgttttctg

SEQ ID NO: 5953 - DNA, 483 bp, Triticum aestivum
  Clone ID: uC-tsro9316015f09b1
gggcgaaggcaccccacggcccagcccgaatccagaacacctggttgaccaccggagacccggcgcgggagaagaggaggaaacaagcagcaccgccgaggccgcccgcagaccaagacgagcacgcgaccggacaaccggcgaaaacaaaggaccagaggggccacagcaaccaagaggaggagcccacgacgaaagaagaaccgagagcccgacaccggacggcgggacgaacaacgggacccgagaagacagccaggcggggacgaaagaagaaccggcgcaccggggggcagaccagagaggaggagccagacgacacgaggccaaaagggggcacaggacgacgcaaaacaacgaagagaccgggaaaaccccggcggaacccaaagcaaaagccaagcagaacaaaccccaaccgccagcaggaggaacaggaaagaggcccgcaccgaacgcccgaccaacaggagcacaacccga

SEQ ID NO: 5954 - DNA, 464 bp, Triticum aestivum
  Clone ID: uC-tsro9316015g04b1
ttctttcgtccgcggacgcgtgggcagaccatcatacagatgactaaagaggcgtccaattatctggaagaagtgcatgctgcatcagacaagatccatggtcttgctgccactgccttagaccctgctgccagcctgtctctttccactctaaaacaaactattttggcgattcaagattcacttgttgctcttcaaagcactaccgccgctgcacgtgcctccctagaggaaaagggcatgtactcagaggatgatgtggctcaaccaacctacgatgggctttctgatgaagagaccgatgaagattgccatcaagacatggatgatgactacgctcactatgtgcgatccccatgagcactgtctaagccctactaagctgatcagcaagtgaagctttctatatatagcttcatgatgacaatgctcactgtgtccgatccccatgagtgtcatattga

SEQ ID NO: 5955 - DNA, 207 bp, Triticum aestivum
  Clone ID: uC-tsro9316015g07b1
tctttcgtggccatcaaagtcagctggacttcatgtaaattcattttgtacagccaaccactgtctgtacacaattaagaaacaaagtcagactcagccagcagacagacggtgccttcattgggcccaaaaaaaaagaaaaaaaaaaaaaaaaaagaaaagattgttaacaatcaaaaaactggaaataaaaaaaaaacatataag

SEQ ID NO: 5956 - DNA, 357 bp, Triticum aestivum
  Clone ID: uC-tsro9316015g08b1
tcgttgacgcgtgggcggacgcgtgggtgtacgagaacaaccacccgttggatatggtggaccagaggctggaagagtttgacagcgaggaggcgctccgggccatcaaggtgtctctgctctgcacccagggctcgccccaccagcgtccctccatgtcgagggtggtggcgatgctgacgggcgacgtcgaggcgcccgacgtggtgaccaagcccagctacatcacggagtggcagatcacggggggcaacaccacctatatgagcaccgacgtcagtgggcagccgagctcggcgccaaggcctaactcgccgtcgtcccgcacctcgtcgccgtttctgagctccgtcatgg

SEQ ID NO: 5957 - DNA, 304 bp, Triticum aestivum
  Clone ID: uC-tsro9316015g09b1
tcgttcgccgcctcccctccgttcgttcttcttcttcgggttgggtagtttacgtctacccaccagccatgggtaaggagaagactcacatcaacatcgtggtcattggccacgtcgactctggtaagtcgacgaccactggccacctgatctacaagcttggaggcattgacaagcgtgtcatcgagaggttcgagaaggaagccgctgaaatgaacaagaggtctttcaagtacgcctgggtgcttgacaagctcaaggccgagcgtgagagaggtatcaccatcgatattgctctctggaa

SEQ ID NO: 5958 - DNA, 304 bp, Triticum aestivum
  Clone ID: uC-tsro9316015g11b1
ttcgtcacgcgtccgcccacgcgtccgcggacgcgggggcggacgcgaggggcggcgcgtccactgaccggcccaacacagaacgggaccccagcgccgacggcgaagggccccccgggacaacgaaggacagcggcgggccaggcccgagggaacacgatgcacgcggcgacgggcgcgggcaaaagaaaaggcgccagaagccagcagggcaacaacacacagaaccccagaagacaagggcaaacaagaacgggaagggcagacgggagcagcacgagaaccaaagaggagggaagggcgc

SEQ ID NO: 5959 - DNA, 203 bp, Triticum aestivum
  Clone ID: uC-tsro9316015h01b1
acaggctggacccgttctggaatcccggggtgacccaagccgccggtttatttcacaacgggccgctggagacacccccagggtggatgaacttaccatacaaaagttggctcacccaagactgcgggaggtgcggaagctgggggagaacaccgtcattaaagaaaaggtgacacacgcgaggagttgaagacaaaggttga

SEQ ID NO: 5960 - DNA, 70 bp, Triticum aestivum
  Clone ID: uC-tsro9316015h02b1
tgtccacgcgccctttattttcactgtgcatctcgtgtgtgtagcttagatgatcgtgtgactgtgctgc

SEQ ID NO: 5961 - DNA, 319 bp, Triticum aestivum
  Clone ID: uC-tsro9316015h05b1
ctatttccaatacgtggggcaggtgcagcagattaacaattcagctcgtgcgtgcgtgcgtgctccatggtgagatcgcttccgtctgttccaatggaggggaggaggctggaggaggaggagcagccgtaggtgctgctcacacacagccagatgcggtggatcaagcgctaggaccaggagacccacaggcaccccctgaagctgcacctgctggagacgaggacgaactgcgggcacgggcaggaggcctcgacgacgggctcccggtcgctgggaccgatccggcgcgccgacagcgccataccgctcggcgact

SEQ ID NO: 5962 - DNA, 327 bp, Triticum aestivum
  unsure (1)..(327): unsure at all n locations
  Clone ID: uC-tsro9316015h06b1
cccccgggggaggcaaaaacgcccccgcaccgaacccgaaacacagggtgataacaggcgaagcggcgcgagaggacaccacgggacaaacagaaccgcagacgcggcaagcaagacccagaagagaaagcgaccgcacaacngagcgaaacaaggcccaaccgagggcaaaagaacaacaaggggggggaggccacgccgaaacgacgacacgggacgaccgaacaccgccggacgggggaacaaacagaaaccgagaaggaaagccagacggggaacgaaaggaagaacaaaccggcgccacccgggagggagagaaagaaagag

SEQ ID NO: 5963 - DNA, 388 bp, Triticum aestivum
  Clone ID: uC-tsro9316015h08b1
tcgtacgcaggacccaacaggaagctcaactgaaccaagatatagctagctaccaaaccagtgatggcgctcctcgaccatggcgagtttgaacgagcggacggactatgctcccctcggtgcgggtgggtgaacgggcccatcgcactcagagcgaggccggggggcatcgtcgtggccgacatgctccgggagcagggcgtgccctccgtctgcctagagcgcgacgacagcaactgcatccgctgcctctggcagaggcgcgattacgaccgcactacgactgcaccttgccaagcagctctgtcaccgacgtcagctattcgagcacctcgagatctgccccaccaagctcgacatggagcaagaactccgcggcgggagatcg

SEQ ID NO: 5964 - DNA, 453 bp, Triticum aestivum
  unsure (1)..(453): unsure at all n locations
  Clone ID: uC-tsro9316015h09b1
tcgtagatcgacccaacaggaagctcaactgacccaagagatagctagctaccaaaccagcgatggtgctcctcgtccctggcgagtttgatcgagcggacggcctctcctcccctcggtgcgggtgggtgaacgggcccatcgtactcagcgccgggccggcgggcatcgtcgtggccgacatgctccgggagcagggcgtgccctccgtcggcctagagcgcgacgacggcaactgcatcgcctccctctggcagaggcgcgtttacgaccgcctacgactgcacctncccaagcagctctgccaccgacgccagctttccgagcacctcgagatctgccccaccaagctcgacatggagcaagaactccgcggcgggagatcggcggcaccgagcagtcnggccaccccggcgtggccagcttcctcggggcccgcgggtcgctcgtcgt

SEQ ID NO: 5965 - DNA, 479 bp, Triticum aestivum
  Clone ID: uC-tsro9316019a02b1
tgaacaccgtgtcgtatgtgaccctgaacaaggtcggcgggttcctgcagcggatggatctgtgccgcaagtatgctttcggcaagatgctcgtgattggttctgaggcgcccttcaaggtcaaggggctgtggctcttccgtgggcaggacatccctgagtttgtcatgaacgaggtctacgacatggagctctacgagtggaccaaggttgacctctctgacgaggcccagaagaagcgtgtcgaagccatgatcgaggaccttgagccgcttgaggggcaggccttgctggacgccaagtgcttcaagtaagcggatcagtgctttggatcgtgatggcggtgacaaaagaacctatctaggactcaaattcagtgtcgaaacagttgtctattttggaagagtttgctcgttacttaatggctatttgaccttgtgaacttgttaatttttgtgccatgctaagagtttttgggt

SEQ ID NO: 5966 - DNA, 358 bp, Triticum aestivum
  Clone ID: uC-tsro9316019a04b1
tccacgcgtccggctgctggaaagtaacgatagccctatgctaaacggtcaattattgatatccaagaactttgtgtattccgaaaggcgcaactagccaaacacaggggaaaaaaaaagacacagaaaaagtgaagaaggcacgaacatgaaaaaaaaaaaagacaaaaaaccaaggggccctgagtgcacaaaaaaaaaaaaaaaaaaaacctaaagggggcccccttttaaaggacccaaactttcttccccggggaaacaaaaactaaatttctctaaggggaaaccaaaacaaaaaaaatgggcgcacatttaaaaaaccccaaaaaggaaaaacctgggcaaacccaaatta

SEQ ID NO: 5967 - DNA, 493 bp, Triticum aestivum
  Clone ID: uC-tsro9316019a10b1
ttcccacagcaccctgacttgcaagctgtagtgtaccgatccatggaggcttcacgcaggctcctctccgcggcgctcctcctcgtcctgctgctcgccgccacaggggagctgggaggcccggtgatggtggcggaggcgcggacgtgcgagtcgcggagccacaggttcagggggccctgcgtgcgcaggtccaactgcgccaacgtctgcaagaccgagggcttccccgacggcaagtgccgcgggttccgccgccgctgcttctgcaccacccactgccaccattaacaagcctctccttcgggtgatgccttctttggggtggcctttctgcgagcgtacgtgcgtgcgtgtccatgaataaacctcagcttgtcttggcaagctaggagcgagtccctaccttgttcttggctgactattgccagcgcttgtttcttggttgggttcgcctcagaagtgctgcgagatttatgggaatatcccaggc

SEQ ID NO: 5968 - DNA, 340 bp, Triticum aestivum
  Clone ID: uC-tsro9316019b04b1
ttcgaaactgctctgtctgcgcgaaaagcgagcgggcgatcggccatggggacgatgtgctgcagccaggaggaggaggaggcggggttcaacctgctgccgctggtgatggccgccttcgtcatcatgctgctgttcgtcgtctgctcgccgcagccccggcgcaggcgctgcgtcgtcgtcccgtgctactgacgtggcatcatggcggtggtgcggcggagggagcctcgacctcgatcggcggcgctcaaggcaggcaagtggctgctactgtggtggtaggcgtctggttggcgtctggattcttctgactgatgcgtgctgggctgggtggaag

SEQ ID NO: 5969 - DNA, 400 bp, Triticum aestivum
  Clone ID: uC-tsro9316019b05b1
tttcctctccactttcgtctctctcactcactgtccccctccgccgccggcgcagcgtcctccccgcgactccgatggccagcaagtgggtcaggcccgaggtgtacccgctgttcgcggcgacgggcgtggccatcggcatctgcgccttcagcctcctccgcaacatcaccggcaacccagaagtcagggtcaacaagatggggagggcagcaggagtgcttgagaaccatgaggagggcaggcgctacgccgagcacggtctcagagcctatgtgcaggacaagacccccgagatcatgccaggaatcaacaagttcttcaccagcccgaaatgaagcactttagtctctctgtgactcgctattagcaactgttgtggtcaagtgcaaacctattt

SEQ ID NO: 5970 - DNA, 339 bp, Triticum aestivum
  Clone ID: uC-tsro9316019b08b1
taacaacctgccactgcccccattggctttctaagcaggaagcaccagggaggaggggttagatagttggcatttgcaagcggtaaccaaatgcgcattccattgagtttgtatggtggggtgctctttgcacaagctgtgtgcttatgaggtgttggtacttgtcgaggacagcaggggggtagcttactcgtggtgttgcactatgttttgtttctttgttttatttttgagtgtttgatctgtttgagcctttgtgattcgagaaaataaaaataatatgagttacctttattaatttatttaaaaaaaaaaaaatttaaaaaacaactactaaac

SEQ ID NO: 5971 - DNA, 514 bp, Triticum aestivum
  Clone ID: uC-tsro9316019b09b1
ttaggactcactaccagcgcctctccgcgatccaaatcctcccgggaaagttcttggttgatctcttcctcctcgaccgcctcccaggttcttggtgtagcttttgccactctcaccaggagatttcatgtctgatcttgacgttcagatcccaactgcctttgacccctttgccgaggcgaatgctggggacgctggtgcagctgccggatcaaaagactacgttcatgtacgcatccagcagcgtaatggtcgcaagagcctgaccactgtccagggtctgaagaaggagttcagctacagcaagatcctcaaagacctcaagaaagagttttgctgcaatggtacagttgtccaggacacagaacttggacaggtcattcaactccagggtgatcagaggaagaacgtctcaaacttccttgtccaggccggcattgtgaagaaggaacacatcaagattcatggtctctgagcaactgccagctccatatcagagtctacatgcaaagca

SEQ ID NO: 5972 - DNA, 94 bp, Triticum aestivum
  Clone ID: uC-tsro9316019b12b1
ttattttgtaaacgactcctcatttttcttttgtagtacggatgcactatctgttgtcgaattgcttttatggcagatccttacctgttggttc

SEQ ID NO: 5973 - DNA, 402 bp, Triticum aestivum
  Clone ID: uC-tsro9316019c03b1
tccgtgtcactgccaactttggtgtgcacattgctgttttgtaacatgtcttagatatattctttctaaaaaaaaaaaaaaaaaaaaaaaaaaaaaaaaaaaaaaaaaaaaaaaaaaaaaaaaagaaaaggaaatagaggagtaagaaggacacaagaaaaaaagagagtgaatgaaacgaaagaagagtgaaaaagagaaacccaaagaaaacgggggcggcgctctaaagagaaaccggatgtctgggcagggtgcgggggacacaaaactttgttgatggggggcctaaaaacgaatatgggggggggcgaataaagaagaggatggggaaaaccccgcgtcccacaactcatatggcttgaagggcaaacggccctctgcccggggggggaaaataaa

SEQ ID NO: 5974 - DNA, 166 bp, Triticum aestivum
  Clone ID: uC-tsro9316019c04b1
tttatgatgactggtacctcaggacggagggcgtatgtttaataagctaaccgtgagcatatgaggatgacgttaatgcttttgtaagatattttaaactttgactaaggcgttgtaatattccagattcatcgttatgtgctcattagtcaggttttttcctctc

SEQ ID NO: 5975 - DNA, 512 bp, Triticum aestivum
  Clone ID: uC-tsro9316019c05b1
cccttatagaagaagcagccgcagccgcagcgcgagcccgctaggaaaccctaccgccgccgtagcaggagcagccatgggtatcgacctcgtcgccggcgggaggaacaagaggaccaagcgcgtcgcgcccaagtccgacgatgtctacctcaagctcctcgtcaagctctaccgattcctggtgaggaggaccaagagcaagttcaacgccgtcatcctcaagaggctcttcatgagcaagactaaccgcccgccgctctccatgcgccgcctctccaacttcatgaagggaaaggaggagaagaacattgctgcggttgttggtacaatcacagatgacatgcggatccaagaggtcccagcaatgaaggttaccgctctgaggttcacagagacagcgagggcaaggattgtcaatgcttgtggggagtgcctcacttttgaccagcttgcactccgtgcttcaactggggagaacactatcctgttgaggggaccccagaatgccc

SEQ ID NO: 5976 - DNA, 323 bp, Triticum aestivum
  Clone ID: uC-tsro9316019c06b1
atccactcctccggaatcatctcccactcactaaaaatgttatcatactgtgccggaaaaaccaaaaacaaacaaacaaaaacaaaaaacacacaaccaaaccaatcaaaaacaaaaaacaccaccataaaaaccccctaaaaccacacaaaaaaaactaaacaaaaaacggctcccccatctaatgaacaaccccctggacccccatttctgcccgcctatgacccactaataacgtgcccaaactacaatccaccctccacggtccccccccgacctcatttgaaaaaccctgccctaccccaacaaaataccttttctta

SEQ ID NO: 5977 - DNA, 433 bp, Triticum aestivum
  Clone ID: uC-tsro9316019c07b1
ttgccgcccttttttttttttttttgtgtttattattgatttatttttttttttttttttttttttgctgaccctgtttagtttttaaaaaaacatcaaaaggggccaagggctttttaaactttgaaaacaaaaaggggggaacctttcaaacgctaaaaacttttttggggggctttaaaaaagtgtacaaacttacaaacttttaaaacctactggggccaaggaagatccatacatattcaaaactttaaaataaccggggaatacccggggggcccctaagagcccccccccttgttggccattttggcggggcccttttattggaacttggccctgaaccaaaggaacccctggggggggccggtctcgacccttttaaacccggggggccgggcccctcttaaggagccaaacttcctctccccgg

SEQ ID NO: 5978 - DNA, 130 bp, Triticum aestivum
  Clone ID: uC-tsro9316019c08b1
tttctttatagtactcccaaaaaaaagagaaaaaaaaagaaaaaaaaaaaaaaaataaaaatgcaggatgaccctgaaaagaaaaaagaaacaaacaaaatggaaaaatggtgggcctttttagagattg

SEQ ID NO: 5979 - DNA, 566 bp, Triticum aestivum
  Clone ID: uC-tsro9316019c09b1
ttttatttccaatattcaggaaggtaggtagtagctgcttgatacgatgggcagccgcgcgggtggcacggaaacggcggaggagaggacgcgggtgtgcgacctcccggaggcgtgcgtggcgcacgtgatcgcgctcacctccccgcgggacgcctgccgctgcgccgctgtctcgccctgcttccgcgatgccgccggctccgacgtcgtctgggcgcgtttcctcccgccggactacctccagctgcaccaggcgccggcccggcgattcccgctctcgcgctccggctccacggcctcggcggcggcgtcggcgtcgtccaccaagaaggaggcctacctcgggctcaccgacgcggccctgctggtggacggcggcggcatggcggtgtggctggcccaggagagcggcgccaagtgcgtggcgatctcggcgaggaggctcagcctgccgtgggaggaccgcgagttcagctggaggtggacgccccacccgctcttcaggttcgggacgtggcccagctggtggacttacgtgccttgacatttactgcgggttccca

SEQ ID NO: 5980 - DNA, 396 bp, Triticum aestivum
  Clone ID: uC-tsro9316019c11b1
ttctatttgtaataataattgacaattagcctgtggatgattcccaggtgtgtgtaatctgtgcatgtgtcctgtacatcctgtacatttgtgtgcttatcttcagcctagcttttgctccatgagtcagtccgtgctgctgtttgttgcatacagtttgtagagtctgaataaaatggattctgctgtcaaaaaaaaaaaaaaaaaaaaaaaaaaaaaaaaaaaaaaaaaaataaaaaaaaaaaaaaaaaaaaaaaaaaaaaaaaatagaagacaccaaaactaaaaaagaaaaataactaaaaaaatacaacatcataaatagggggggggccgttttaaaggaccaaattttccttcccggggattgcaccttataatttttttttttagggc

SEQ ID NO: 5981 - DNA, 432 bp, Triticum aestivum
  Clone ID: uC-tsro9316019c12b1
ttaccctccacctccaaacgcgcacgcacgcgtccacgaataaaggccgagggcggcgaagccaggcccaatcgccaaaaaccctagcgccgatccgatccgatcgagctctgcttcccctcccatggcggccccctcgagccaggcgagcctcctgctccagaagcagctccgagatctagcgaagaaccccgtggacgggttctcggcggggctggtggacgacggcaacgtgtttgagtggcaggtcaccatcatcggcccgcccgagacattatatgatggaggctacttcaatgcagtaatgacctttcctcaggattatcccaacagtcctccatcagtaaggtttacttctgagatgtggcatccaaacgtctatcctgatgggcgtgtgtgcatttctattcttcatccacctggtgatgatcc

SEQ ID NO: 5982 - DNA, 369 bp, Triticum aestivum
  Clone ID: uC-tsro9316019d04b1
acaccggtattgcacgggctattccttgcttgcagatgatctcgattactgctgatcggcgattcttaaacacttgtaaaaaattaggagaagtgaaccgcctgagtatccgcttataaaaaagcaatcgttgggaagccagtagtggcgagcgagtatttcttattgtcttatctccatgagcaaaaaagtttaataataaatcgtaacttaacacgctaaaaacaaatagatgcatagtagtcgtgtcaagctaagcagtgaataatttggctctgcccaaaaaacaaaaaaaaaaacttaactatagtgaacctagctccgtaagggaaatctgaaaaagcacctttcttgatttgaacagacatt

SEQ ID NO: 5983 - DNA, 557 bp, Triticum aestivum
  Clone ID: uC-tsro9316019d05b1
tcttcacgcgtgcgctcaagcgcaactggttcgtcgtcgttgtgtaccgaatctccaccatcccccgcgcgcgccgccgcctccgtcgtcgacgatgggtgtctgggacgccatgtaccgcgtggtgatgcgccgtaacggcgtgtacgtcaccttcgtcgtcgccggcgccttcgctggcgagcggctggtggactacggcgtcaacaaggtctgggagatgaacaacgtcgggaaacggtatcaagacatatctgttctggggcaaaggccggttgaggagtgaagacattgaagcccagatttcccatgatcttttaagtgaaattaggcaccttataaagcttcatgttttgacattttccttttggcacaataatatttgaaaactctcttgctgggtgttattcactccctttgagcactatggcatcaatctgttccacagcaaagtgattgctatgtcttgtccctttgaacaagttcactacttatcaattatgaattggacttcttctaatggctattagaaatggcatgctgtgctcgcctttttg

SEQ ID NO: 5984 - DNA, 443 bp, Triticum aestivum
  Clone ID: uC-tsro9316019d07b1
ttccacgcctccgattggactcagggaagaaacttggttagtcttcgctggtgttgtgtgatcaaagctcgggagtcggaatggagtccgagatggtgagccagcacggggcgctgctcaaggtggggctgttcgtgctggtgcaggcgctggtgtacctcatcctcgcccagtcctcctccgtcttctccaccaccaagaccctctgcctccccccggcgcgctccctcagcgcccgccgcatggccgcgctgctctctgacctgccgctcgacggcgagccctcgccccgcgtcggcttcgcggagccgtcgtcacccgtgtccgtgcccgtgcacgcccaccagaagaaggattagttgcccgagttgggaggtggccactgcctagcgagcgagccatatcacgtcgctggttccctgccaatggtcggtgcctgcccc

SEQ ID NO: 5985 - DNA, 478 bp, Triticum aestivum
  Clone ID: uC-tsro9316019d09b1
ttcccccagcaatccacccctttccgctccccggcggattccctcccctcccgagctcgtcaatggcaaacgcatcatccggagctgggatccatgatgactgcaagctgaggcttgtggagctcaagtccaagaggatgcaccgcttcataacctacaggctggagaaccagaaggaggtcattgtggaccaaactggggagcgcgaggccacctatgaggacttcaccaagaccctccctgagaatgactgccgattcgcggtgttcgacttcgacttcaccaccccggaggatgtgccaaagagcaggatcttctatatcttttggtccccggacaccgcacaggtgaggagcaagatgacgtacgccagcaccaacgagaagttcaagaggaccctggacggcatccagatcgagatgcaggccactgaccccagcgaaatcagtctggacgtgatcaatgagcgcgcgcacta

SEQ ID NO: 5986 - DNA, 378 bp, Triticum aestivum
  Clone ID: uC-tsro9316019e04b1
tccacgcgtccgcccacgcgtccggccacgcgtccgacctacctcccctaccactccttcaagccctgctgcgttgactggcgctccagtggcgcttgcaccggcgtcaagaatcaaggcacttgtggatcgcgctgggcattcgcggcggtggcggccatcgaaggcatgaacaagattaggacaggggagctggtgtcgctgtccgagcaggaactcgtggactgcgacaccgggagcagcgtctgcggcggcggccactaatactcggctatgggcctcgtggtcgcccctggtggcatctcgtcagcggagaggctcccccacccctgatttcacggtacgtgtgacatggtcaagcctgttgccgaccaccag

SEQ ID NO: 5987 - DNA, 437 bp, Triticum aestivum
  Clone ID: uC-tsro9316019e07b1
tttattcatcacaaatccaaaacaaaacgtcttcggcgactacccgcatccgatagcccccttctccgcgccttctccggcgagaagcacccacaacggtctcaccggcggccatgccggctacggactaccagggctcctcctcctcctcccactccccgttcgcctccttcggccgctcgctgctgtctcgaagccgggacaccccggcgtcccccgccatgcttccgtccggcggggaggccgaggtcgaggcgttccagcggcacgtggccgttagcctcgcggagctgagggacggggaggatttcctcttcatcgcgtggatccggcagctcctcgaggcgttcctgctgtgccaggaggagtctcgggcggcggcggccgaagtgcggcgccccggctgtggaggcccgtctgccgagaggctggtgggc

SEQ ID NO: 5988 - DNA, 393 bp, Triticum aestivum
  Clone ID: uC-tsro9316019e09b1
ttgtcgccaaggagaagcagctcaaggtcaagggccccgtcaggatgcccaccaaggtgctcaacatcaccaccaggaagtccccctgtggagaaggtaccaacacctgggatcggtttgagatgcgggtgcacaagagggtgatcgacctcgtcagctcccccgacgtcgtcaagcagatcacctcgatcaccattgagcccggcgtcgaggtcgaagtgaccatcagcgaccagtagttatgctaccccatgatatgtgtctttaaatctttctacaagggtggagagacaccagcgtaccaagatatttttgaaactttctgtagtatgagaactgggctttgtatgactaggttctctgcttcgtgattttaagtgcctactgtcctaa

SEQ ID NO: 5989 - DNA, 175 bp, Triticum aestivum
  Clone ID: uC-tsro9316019f01b1
tcagctacacagctagtgacagcgctctcttggtctgcacactatgcaaagggtctttctctctctgcttcccacgaattcttcgggaatttcacaacttgcagaatcgagagactctcgcggatcaaaatgggcctaagaatttagagacagagaaatataatacttcctctgt

SEQ ID NO: 5990 - DNA, 179 bp, Triticum aestivum
  Clone ID: uC-tsro9316019f04b1
tgtactccatctgtgagggatgggttcaccaggaggattgagaagacactacaaccgcttgaggtataatgtaattcgcatgtgcagcaggcacgtattgatagcctaagagtgcaggccaagtaatggtcttgtaggtagaatcgaaatcaccatgcaaaactatgtggatatgggcg

SEQ ID NO: 5991 - DNA, 430 bp, Triticum aestivum
  Clone ID: uC-tsro9316019f07b1
ttctccctccaccagatggccagccccaatcatatggactacggcgtggtcgggatggaggcggacggggacgcggaggaggagatgatggcgtgcggcggtggcggcggcggctgcgggggaggggagaagaagcggcggctgagcgcggagcaggtgcgcgccctggagcggagcttcgaggtggagaacaagctggagccggagcgcaaggcgcggctggcgcgcgacctcggcctgcagccgcgccaggtcgccgtctggttccagaaccgtcgcgcgcgctggaagaccaagcagttcgagcgcgactacaacgcgctgtgccacttctacgacgcgctccgcgtcgaccacgacgccctctcgcgcgacaaggaggcccttctcgccgagatccaatgatctgaaggggaagctgggggactag

SEQ ID NO: 5992 - DNA, 185 bp, Triticum aestivum
  Clone ID: uC-tsro9316019f09b1
tattaaacaaaaaaaaaaaaaacaaaaaaaaggggaaaatttaaagaaaaaaaacgggatatgccaggatggcggaaagaaaggagtggaggcaaaagtcgctccggttgtgttcgtacgtggaagtcagctcccgtgcgggggggggagagggggaagaaggggggggggccttctggggggct

SEQ ID NO: 5993 - DNA, 337 bp, Triticum aestivum
  Clone ID: uC-tsro9316019f10b1
ttccgcgagcggcgccctgcctcttttcttcaggatgatttatgtattacttgcctcttgattttggcttaccctaattagttagtgtatcatccttctatatatatattgtccttgcgtgccatggacttctttgtgtaggaagacatgacgacagctttctcaccagaaagcacaagatccactccagggccccggaggcttgaaagccgacgtcctcggacccaagtttacctgccgccagctttttcagagctgacaagggagaacctttccaggccccctaatgtaggccgtcgcaccactaaaaaatcgtcttgactaagaaaaacatggg

SEQ ID NO: 5994 - DNA, 418 bp, Triticum aestivum
  Clone ID: uC-tsro9316019g01b1
tgaatgggcttcccttcttttaggggtggagtgatgttttgggccgactctctcagcgcggaatacgtgtaccgcagactggacgggtggcccaaagattatggagagttcttcaaaccctgtgaatatctagctgccagagctagtcacggcgcatccttggctgccaccacagctgatggcaccaagacgcgactctagatggtttacctgggtgctctgccatgtccagtcgggatggaggagctggaatgttccggatacgatcgtgcattagaagtaataaagtgcacggcaaaaatgctaggatggctttgagtgttggtgggtgcggctgctttcttttgcaactgctgctgcgtgatgcgtaccaaggtcttacccacgggccaggggctttgtgcattgcggattcccc

SEQ ID NO: 5995 - DNA, 566 bp, Triticum aestivum
  Clone ID: uC-tsro9316019g04b1
tttctgtgacgacattgagtcgctctcaaccagtgtcggtgacggagcaaaacggctggtaaacaagctcaagggtaagatgcagaagccgctggcggagctgctccaggagcacgaccttccggcggggctgttcccgcgggaggccaccaactacgagttcgagccggagacgcggcggctgacggtgcacatcccggcggtctgcgaggtcggctacagggacggctccgagctgcgtttcgacaccacggtgaccggcacgctggacaagggcagcctgacgggggtggagggcctcaaagccaaggtgctcgtctgggccagggtcaccgccgtcaaggccgacgccgcaaaggtctacttcgccgtaggcatcaagaagtcgcgcagccgcgaggcatacgaggtcgtcagaggcgccatcaccgtcgacgagttctagattctagtcgcgcgctcgccgagatgatttttctaccgaaataattgaacatgtgctcacaactaccctgttgaagaagaggatgcttgtaatggggatccataatttagtttcgcagctt

SEQ ID NO: 5996 - DNA, 485 bp, Triticum aestivum
  Clone ID: uC-tsro9316019g05b1
ttgtgcccaaccactctctcttctagctctgctccgtcctccatggaggggcgagcgagtgtgcgagtctgacttgcatgtgaccgagcctacagcaagcacacatccaagagacagagagaggaagtaatcttgcttgcttgcttagttgggttgggttttgtttcgtgtgtgcatctatggcgctgccggcggagagacggaccgaggaggccgcagtcaccggcgggtgccgggtgccggccgggcagggcgggctgccgatcggcttccggttccggcccaccgacgaggagctgctgctgcactacctgcgccgcaaggccctcttctgccccctccccgccgacatcatccccgtcgccgacctcgcgcgcctccacccatgggacctgccaggtacgctccacttactccccatatcactgaccaacggagctgcggctgcattgctggcgcattgcgctgactgtttgccatgtgca

SEQ ID NO: 5997 - DNA, 414 bp, Triticum aestivum
  Clone ID: uC-tsro9316019g07b1
tgcactctggcggactacaacatccagaaggagtccaccctccacctggtgctccgtctcaggggtggtatgcagatctttgtgaagaccctcaccggcaagaccatcacgctcgaggtcgagtcttcagacaccatcgacaatgtgaaggcgaagatccaggacaaggagggtatcccaccagaccagcagcgcctcatctttgctggtaagcagctcgaggatggccgcactctggcggactacaacatccagaaggagtccacccttcacttggtgctccgcctccgtggtggccagcaagtgccctgccatggagctgcttatgtctctgggctcacgagtcggttgtctttctgtgtactcccgtgcgattgtcagcgtgtactcctctggtcttgttctttggtgcta

SEQ ID NO: 5998 - DNA, 59 bp, Triticum aestivum
  Clone ID: uC-tsro9316019g08b1
tgaatatgcaagaatgaatgatttacctaattaactactcctaaatcgctacttcggtt

SEQ ID NO: 5999 - DNA, 263 bp, Triticum aestivum
  Clone ID: uC-tsro9316019g09b1
ttctggaacgtggctctggtggatcatgcggacttcctcaaggaactccactgaagatgagcaggctcaaatgttagtgttgcgaggaggcaaaccttatgttagcaatggtctgtgtgtgattgtaataaaacaaaccttatgtagtagcaatggtctgtgtgtgatgtaataaaacggcagcctcttccgctcgacgatcattcatataaaaaatataaaaatttaaattacatcattatgataaacaatattttcttctg

SEQ ID NO: 6000 - DNA, 381 bp, Triticum aestivum
  Clone ID: uC-tsro9316019g10b1
ttttatggatatgctcatgatggtgaactcaaaagggcgtcaacgggatgaaaatgactggagcaaattattcgttgaagcggggttcacggactacaaaattgtgaagaaactaggagctcgatgtgtcattgaggtctatccataagatattgtgctataggcacatgaataaagggagtgcctattaccataaatgtaagttgcatggactgtaagtagtttaagtgcccagcttaatccactgctttatggtccatgcaatgctggctttgggaagtaatgaagcacttggtgtgcatcttctgtcatgttgctaaagatggtttgttgtatgtcatcgatctattatatgttttattaagaaaaacattcttgacc

SEQ ID NO: 6001 - DNA, 462 bp, Triticum aestivum
  Clone ID: uC-tsro9316019g12b1
tttcacgcgtccgaggaggcagaggttcgcaaggttgaaactgcaatcccggcgacggcaaaggcttctctttagttagctagcgtagcagacttctattcatatactgttcttgcgtgctctgcacttcttggctagctagctggtcggccatggcggatcaccagaggcagaggatccacccggtggacctggaggcgggccagccgaggccctcggcgccgctggtgccgccggggagctcgttccggtccgacaagggcgaccctgccgcggccccggacaggaggccgccgcaccaccagccgctgcccccgccgaagcggcgcaggggctgctgctgccgcttcatctgctgcgtcctggtgaccgtcatcctgctcgccgtcctcgccgcggtggccctgggcgcgctctacctggtgttccagcccaaggcgccccactactcggtggaccggc

SEQ ID NO: 6002 - DNA, 504 bp, Triticum aestivum
  Clone ID: uC-tsro9316019h01b1
tttgatcggcgcgttctttttctcggccctccttgccggttacgtctacgacaaggaggcggagaggcagaacccgggcgtgctggacccttcaaactgctttggacctgactgtttcaggctcacattctacgtctgtgccatggtgtgttgctgcggaaccctgatctgcctagttttcatcgcgaggatcaagccggtttatcagatgctatatgctagtgggtcgttcagacaccctcgacagcagcagctgtactgatggagtaagtggcatcaatagaaaagcttgcaagtatgagaaaagaaaagaacagaggaagttgtcagctggttgtctgtaattctgccttcttcttgcatcatattgcagcagcgtatattatcccacggttgtttgcttgattcatcccttgttggtattggagcatatgagagagttctcttgattccataatttgctcatgttgtgaaggtatatacagccgatcgtcgaccattaat

SEQ ID NO: 6003 - DNA, 235 bp, Triticum aestivum
  Clone ID: uC-tsro9316019h04b1
cccttctcatacggctgctgcaaatgctcatctggtgtgtgtttcgtataaatagcgctgggttacaagaaataaataagtacaatgcctcactcgtcaatggataatgcaatgaatactcaagcagacgaactgttaaggggccggtcgcgtcagaactgtatgcacgtaaccactcatatgtatgtatgtatgtatgtatgtatgctccaacatgtcgagatgttaaaaagaa

SEQ ID NO: 6004 - DNA, 272 bp, Triticum aestivum
  Clone ID: uC-tsro9316019h05b1
tacaacaccgccgcggacacgctgaattggcgtctagtttttggcattttggtatggcatacagaaatatgtgctgagttaatactagtcgggtcttttgatgtcttctgcgctttgcttctgctttttgagtctactgaaaccgcagtacttgtgcggtttcctctatccagttattttttagtactgcatctgtaaaaccatatgtgatcctagtaccctgttcttcccaattctcgatgcttggtgcagtcttaaccttttcgatattc

SEQ ID NO: 6005 - DNA, 198 bp, Triticum aestivum
  Clone ID: uC-tsro9316019h06b1
tatacaacaaacaagaaaaacacgccagtacaggtatatttaaaaagaaccgctgaagcttcctagctgaccctgaagagatcgagaacatacaactggcataggcgtggccttttgggggcaccagatttactgccgaggagaccatgacgaaagatgtatcttattggccgccctaaatcgattggtgagcaactg

SEQ ID NO: 6006 - DNA, 452 bp, Triticum aestivum
  Clone ID: uC-tsro9316019h09b1
tacaccggaaccggcgccgccacggacacaacctgcagtggccaggacggcacgcgctgcgctggaccccccttggctgggagggctcccggggagccgcgccctaggaagccacccttggaacaagcgagggtacctgcggcgtcgacccaggtagcctcacagagtcacgagcgacgactaccgtgttgcggtggagcagggctacgcaggcgacggcagtcgggccagcgacaccagagcctgcgtgctccacaccacggccagctagcccgctgtcccgctctgcatggcaccattcacaaagatggaagaaccagtggccattacctgaagctgagtcacatcccactgcggcgacctcgttcgattctgcagcctctcttttctgatgtttgatgctgtgaatcggtgcacacacgtaattcaccaaagcttgttttgtagctgct

SEQ ID NO: 6007 - DNA, 349 bp, Triticum aestivum
  Clone ID: uC-tsro9316019h10b1
tacgtgaccacgtcatcagggaagaaccagtgcgtgatcactgggcagttcgacgtgatcggctccgcacggcgcgcatcttacaagagcttgataccagccgggatcgtcaccatgcttgtgcatatgctcattttcggcactggctcacgtagatagcaggcgagccagctgacatcgtgatttgattattattacctcggcgtattcagaggtagagacgtcgccatccctgctgcgcttagtcggttagtcgtatggacgaagagttggcatggcctgagcattcttactgtacatacagaaaatgaaaggtctattgttcatgtagtacggcctcctttttctc

SEQ ID NO: 6008 - DNA, 392 bp, Triticum aestivum
  Clone ID: uC-tsro9316019h12b1
ttctcacgcgtccgaggataactcgccgctttatttatctaatgaaagtttgggatctccttggagaccacatctaaaaaaaaaaaaaaaaaaaaaaaaaaaaaaaaaaaaaaaaaaaaaaaaaaaaaaaaaaaaaaaaaaaaaaaatgaaaaaaaaaaaaaaaaaaaaaaaaaaaaaaataaaaaaaaaaaaaaaaaaaaaaaaaaaaaaaaaaaaaaaaaaggggggggccgaactgggggtaccaagttaaccaccgaaagaggagactgaaaacacttgttataagggaggcaaaaaaaaaaaaaatagaacgtttttaaaaaggaaaacactggaaaaacccaggttaacccaaattaaatacattttgaaaaaaacccctttttcc

SEQ ID NO: 6009 - DNA, 267 bp, Triticum aestivum
  Clone ID: uC-tsro9316023a01b1
tgcctgcgcacgtcgtgcccctgacgaacctggactacatcgcgacgtgcatactggtgaagccgtgggcgcacaagccaggcgcgcggctcatcacccagtgcgtgacgcccgaccgcatcgccgccttccacgaagggatgctcgacatgaactgaccggggccgagcacgacgacggagccaaagaagaagtcgaagacgaaggcgagaggaattgacttgtttatgtgatgattaaattagtagaagtagtacaggatattgg

SEQ ID NO: 6010 - DNA, 265 bp, Triticum aestivum
  Clone ID: uC-tsro9316023a02b1
tctcctcgcgtccgaaaaaaaaaaaaaaaaaaaaaaaaaaaaaaaaaaaaaaaaaaaaaaaaaaaaaaaaaaaaaaaaaaataaaaaagtaaccctaaaataaaaaaaaaaaaaaaaaaaaaaaaaaaaaaaaaaaaaaaagggggggcggttttaggggacccagatttccatccgcgtgctggaaacaataaagcttctttttggggccccaaaattaaaacactgggggggcggtttaaaaacgtcttgttgggaaaacccc

SEQ ID NO: 6011 - DNA, 320 bp, Triticum aestivum
  Clone ID: uC-tsro9316023a03b1
tgttttgcttcttctccggccgtccgccgccgcccgccggtcttattctgcagccgtgcggcgtccgtcctactttccctacacatgtgcccctaatcttgttgggcgccacccacagcctgatcaatgtccaacctgtgggtcccgtgcttctctgatttggatcgagatgggagtcctggatcgagttagggtctgtgctcttgtgcaacacatagccatggagtgaccgacccggatctgacttggctatcataagaaggaagggtcctcgaccggaatctgtcccaggcaggacctcaatggcgacctgcaggccc

SEQ ID NO: 6012 - DNA, 221 bp, Triticum aestivum
  Clone ID: uC-tsro9316023a04b1
tcgtcctttttcgttttctgtaatatgtttgtttgctgcactgattgattgtgaatgttgagctgcacaagtagcatctaataatctctggactggcataatgcctgcataaataaaagtgtgttgtttaaaaaaaaaaagaaatcaaaaaaaaaagaaaaactgattgacatactacaattgatgggagaacaaataaaaaaaaaataaaaaacaaaaag

SEQ ID NO: 6013 - DNA, 303 bp, Triticum aestivum
  Clone ID: uC-tsro9316023a06b1
tatcttccttaaccaaacaccacctggctaaacacgcgggcagcagttttgacctctgaccgtgtcacggcgcccgcggaatatctacaccgtggagatgcaggcctcgccgccgccgccgagctcgctgcggcgcagactgcgggccacggcgtgctgctgcttcggctacggcgaccgggcgcggtggggcgggcgggacagccgcggcgtcggcaggtacgacccgctcagctacgcgctcaacttcgacgagggccccgacgacagcgacgacgacgtcaactacgacgacttcagcga

SEQ ID NO: 6014 - DNA, 304 bp, Triticum aestivum
  Clone ID: uC-tsro9316023a10b1
tgtcaccaccggcctcgtcgaggtcgccgtcaacatcactctcagcgccggcaagccgctcgccgcctactcggacgacaaggtgctcctgccccaagcgctgttcggggccaaggcgccggcgccggtgcccggcgcccccaagggggccaagaacaaaaagggtgaagcccgcctctggccgggcgagtaagacgacgacgccgcgcccacgggcgccgcgggcgccagggccgcccgccggggcatggctggcatggacgcccttcttggctacctcttgtgagatgggtagcttgggatg

SEQ ID NO: 6015 - DNA, 253 bp, Triticum aestivum
  Clone ID: uC-tsro9316023a12b1
tttctttacttgagacccacacacacaccagagcacgatcaagcttcttggcctgcctcatcgatcgaaacacagcgggatcatcgactcgatcaggaccagggctctgacgtacctgatacctcatggtttcgtccacgacgcgccttctgctaggggtgggtctggccatccttctaacgtcgacgtgccatgtcgctgatgctgcaaggcccgtgccggcggcggaccatacgcaggtgctcaactgggg

SEQ ID NO: 6016 - DNA, 454 bp, Triticum aestivum
  Clone ID: uC-tsro9316023b03b1
tttgttcagtatcaacaattctctacaaatgtccatcgaaagagaacatttctcttgaaacatctattgatgaacatcctccaaccattatacttccttcagagcttccagtttatccagctagtagcttatactcagtgtcagatgcttctatgtcatctgggcatccaagtctgtctatcttaggggcaagaagtcgtggttctcatgttcctgaatttactgtacccactgatgctcatggtggattgcccatttatcagtctatggtcccagctattcctgcttataacaccccaaaatgttcaggagagctattggtgcgtgttgtatgccctggcgacaagattgggttagctattggtaaaggtggtgacgaccataaggaatataaggaaagaaagtggtgcaagcgtagattgtgatgacgcaaagaatgataaggaggaaagca

SEQ ID NO: 6017 - DNA, 303 bp, Triticum aestivum
  Clone ID: uC-tsro9316023b06b1
cgcaagttgcgcccgaggccactcggccgagggcacgcctgcctgggcgtcacgcttgaaaaaaaaaaaaaaaaaaaaaaaaaaaaaaatgcaagaagaaaaagaggaaaaaagaaaaaaaaaaaaaagaaagaggggggaaaaaaaaaaagaagaaaaaaaaaaaaaaaaagggggggggggtgtagggggaccaaagggaacggccaaagggcaggggaggccaaagtttttcaaagggggggacaaaggaaaaaaaaggggggggggtaaaaaaaagggggggggggggaaaccccgggg

SEQ ID NO: 6018 - DNA, 386 bp, Triticum aestivum
  Clone ID: uC-tsro9316023b07b1
tgttcttccacgcgtccggcccgccgctggtgctggttggggcgcgtacggcggctacgggtacgctcctcaggcgcaggctccggccaagggccacggcggctactacggcgcgagctcgccggcgtggcacggccagggctactgatcggtgcgcgcgctccgcgtcgaccgagccgaccgcgcgggccggagacgggcgagcacgtgggatcgtcataccggagcacctgacgacgatggcatatacatatgcgtactccttttgtgctagcagcagtatatctcagttcagctaatcagtagcaatcgggcggttgatcgagcagaggcagtagtagccgcagcagtgatcgatactgaatacagggagcagatatagtact

SEQ ID NO: 6019 - DNA, 319 bp, Triticum aestivum
  Clone ID: uC-tsro9316023b09b1
ttttgtttttttctttttctcacattttatgttctgctgttattcacttttgggtttacttctaaagagaacgggccggttaaaacaacaccgtcaaccaggggggaccagggtattcaagggtccctgcagcggggacaaattacaaaacggaaccgaaccgaaatttttacaaaatgaggcaccctactggtctgaggttggacataatttgggtggggctacaagaaaaaaagggtcaagtgcgggttattttaccgccatgggaggcaaggggcatgtcaggggcccctacgtttccgtggtcgactcaaaattt

SEQ ID NO: 6020 - DNA, 258 bp, Triticum aestivum
  Clone ID: uC-tsro9316023b10b1
tgttctcttccttcctcccccgtcgtcgcggctccagcttagggtttgtagcccccgccctcccggcttaccgccggtccggtacgccatgtccaagcaaggagggaaggccaagccggtcacgcaggccatggtcgccgagaaggactacgacaagaatgacctgtcatacctccagaagaagaaggatgagcaaaaggccctgaaggagctgaaggccaaggcaggccagacgggtgcgctgtgaggatcctggtc

SEQ ID NO: 6021 - DNA, 308 bp, Triticum aestivum
  Clone ID: uC-tsro9316023b11b1
tcttcctgatcctccagtgctgtccgccatcacagcgtccgtgatagtgttgtgatccgctgatcattcgctgttagctcgcggagcaagctagcgttcgtttcttgcagggagagtgatcggtcgggcgggtggcatgagcccggcgagcggcaagctgcggtggctgcggagggcgccggcgcgggcgttcgggcgcgcgcgggacttctacgtgcggagcatcacagggtgcgcgcgctacgtacccgtcgacgcggacttcggcgcctacccggtgctcgtgcccgcgccgctgtcaaggagcc

SEQ ID NO: 6022 - DNA, 90 bp, Triticum aestivum
  Clone ID: uC-tsro9316023b12b1
tttccatagggacataaaatgagcataggccagggtgtgcgaaggaccctggcatgctcaacaggtagcaagaaaaaaaatggtgactgc

SEQ ID NO: 6023 - DNA, 412 bp, Triticum aestivum
  Clone ID: uC-tsro9316023c03b1
ccctggcgagcatgtactcggcgatgctcctgactggctggtcgacctcggttggcgagagcggcaagcttgtcgatgtcgggtggccgtctgtctgggtcaggatcgcgacccagtgggcaacggcaggtctgttcatctggtccctcgtcgctcccctcctgttcccagacagggagttctagatcgacctggttacctgctagtgcatcatccgtttggagccacctacgtatcgtatcgaacgtgtttcggctgtgatggctaagctgactatctgtatctggtctgcaatattgtgtgagcaaacccatggcaaggagctggtgtttgtgtgacgttgtcgagtctggtctgcatgatgtgtgacctaaggcattgctgacagtatttcaacagagaaaatatggtc

SEQ ID NO: 6024 - DNA, 305 bp, Triticum aestivum
  unsure (1)..(305): unsure at all n locations
  Clone ID: uC-tsro9316023c06b1
tcgttcccttgctcctcctcgccccgcagattcgcctccctcctcctcttatactggcgccgcgcggcggatattgatccggtccggtcctgccgcgtgccgctgggcgccgatgctccggctccgggtccggccaaagattgctgcttgcggggtccgcggcggcgggcgggtggctccgttccggcggcagaggcggctcgatctgcgccggggctcaaatctgatcggcgtggcgcgctcctggagcccggggttccgattcggccgcgctcccggtgtgctgccccaattacncgactttg

SEQ ID NO: 6025 - DNA, 465 bp, Triticum aestivum
  Clone ID: uC-tsro9316023c07b1
tgtcctggaattgttgaactctgaaggtggtctaggaaagcaagttgccgcgtcaggtatatcagtctggaaccccgccttcgacgttactccagcaaatctaattactgcaatcattacagaaaagggtgtgatcacaaagtctgatcctaatggaagtttcgacatcaaaggtttcatcgaatgtgccaagtgatgctctccagtgagcataggttggcatgaatgcggtggaacatccttctcacacaattgatgataggatgcccatgttgtactcccagcaataagatctttcgaagtgagagaaaaataaagtcgcgtacgagatgtattgtgaggatgagctgtttgttatccacaaagcatatttataaaaagatgcatcttttgctaaatttaatgtgtttttctagcaatgaaccacaactcagtttgagatggaagacgagcagctgctatctg

SEQ ID NO: 6026 - DNA, 519 bp, Triticum aestivum
  unsure (1)..(519): unsure at all n locations
  Clone ID: uC-tsro9316023c08b1
tctccacgcgtccgcgagcagtggctgcagacggaggcgcagagcttcgacgtgcccagcgctgacatgatctacagcctcgcctacctgccgcgcaccatgccgctcgacggcagaaaggacggcggcgccggcgccggccgcgaagccatgcagcagaagcagcagcagcagcgggacatgatgatgagcccgtcccacatgcagaaggtggaggagatgaagcagctgttcgagaagagcagcagggatctgagcaaggtgctggacatctacgaccagcggcttgaggaggccgagtacctcgccggcgacaagttcaccctcgccgacctctcccacatgcccaacgccgaccgcctcgccttcgacgaggcgctccgccgnctcatccagtcccgcaggaacgtcagccgctggtgggccgacgtctcgagccgcgagtcctgtgtgtacgtcaaaagcctgcatgcgcccgcgttcgccgaggcgccattctgatcaccatgcactggtcgc

SEQ ID NO: 6027 - DNA, 311 bp, Triticum aestivum
  Clone ID: uC-tsro9316023c10b1
ttgctactagcagttacgcgcccctatccccccacctcttccttccactttccccacctcgcaggccaagcaaacgccaggcgacgcaaggcaaggaagcggcccagcgggcgaggcagccatgtcgtactacgaccggcgtggggagtcgtcggtgctggaggcgttcacgctgtcgccgctgccttacccggtgatcctgatcctgatgatggtgacgctgctgctgggggcgtcgcggctcttctcctacgaggagttcatggaggaggcgtcggagcagttcagctggttcctgcttggcgtgccca

SEQ ID NO: 6028 - DNA, 482 bp, Triticum aestivum
  Clone ID: uC-tsro9316023c11b1
tcgatctcctcctaggtttcgctctccaccaccgcggaacgaaccggaaatggcggcgcggcacctcagatccggcctcccgctcctccaagctcgcctcgcggccaacgaatccgcggccgtcgctcaggtatcgagggggctggcaacggaggcggataagcctaaggagaacaagatcaaggttccaaaagctctgtatggtggcaccggcaactatgctagtgcgttgttccttgcagcagccaacgcaaattcgttggaaaaagttgaatccgagattctcgatgttgtaggggcatccaagaagagccctatgttttctcaattcatgaaggacacatcagtgcctaaagaaaccagggtgaaggctataactgaaatattctctgaagccgggtttactgacatcacaaagaaattcttgtctgcactggcatccaatggaagactgaaatatgttgagcgcatcgctgagagat

SEQ ID NO: 6029 - DNA, 151 bp, Triticum aestivum
  Clone ID: uC-tsro9316023c12b1
tctaccatgtaagacaagctaaagatagccctggaaatcaaataaaacgaataaagcattctccataaaaaaaaagcaccaaccaaaacaaaaaggtatactatacgcaagaaccataccaaaatacaaacgatacaagggggcccccgtc

SEQ ID NO: 6030 - DNA, 232 bp, Triticum aestivum
  Clone ID: uC-tsro9316023d03b1
ttgttcttccgctttgcaatctcaatgcgttccgacacttctacttgccatcgcacggaaggtgattgttgggagaacaaagaaaaatagtagccgcagcgtgatggtattttatggtgcttgctactcattggaatttgcatctataagctgtaagttgtgactgtttcatgcttatttactagtggtactatactaccgtgtggttcaattgtatccgttatacctgatc

SEQ ID NO: 6031 - DNA, 540 bp, Triticum aestivum
  Clone ID: uC-tsro9316023d04b1
ttcttcgcgtccgcggacgcgtgggcgagcccgaccagccctccgcccccgcgaccgcgcccctctccaagcgctgccgtgagcccgccttcgcagtcacggggaacgcgacgagctcccgcggcggcggcggcctccgcgagaaggcgagggccgtcacccgcctcgccggatccggctcccgccatacgcatgccgatgctcagtactccgggggtccggtccccggggtcgcgttcgaccccttcgacatcgaggccgaccctccgccgttggcgctgacacacgagcagatcaagctatgcaaggacgcgctcgcgcatttcgagcggaggagcaagcagctggatgccttgtccgacgagttccaacggcttcagggcatgagaacaatgcatccggagatgatgaaaatgtccactgtagctcgtgatgctgccaatagggagaagaaccgctatattgatgtcttaccatctgatgataccagggtacgggtaaaatcatcagcaaccagccaaatttaggcaatgattacat

SEQ ID NO: 6032 - DNA, 414 bp, Triticum aestivum
  Clone ID: uC-tsro9316023d05b1
ttggtctctctgaggaagttcggcgagacggtggagaagtgcctggccgactacggcgtggagcggccgtcgatgggggacgtcctctggaatttggagtatgtcctgcagctccaggatgtggattcttcgaccgtgtcggacgtgaacagcatgaaccggatcgtcgacctgtcgtcacaagttcagcatgtgggtgccatggagagcatcagcgtgacgatggcggaggacggagctttgcacgagcctgaccacgacctctccgacgtgtcgatgagcagggttttctctcagctgatcaaagctgaggggaggtgaaaacgcgccggatgatctgttagggtaccggtagaggtgtgggcaagccttggattcttattttcttgttgaagtttacctgagatgtgtcac

SEQ ID NO: 6033 - DNA, 469 bp, Triticum aestivum
  Clone ID: uC-tsro9316023d08b1
tcataaacaaaaaaaaaaaaaaaaaaagaagagaaaattataaaaaaaaaacaacaaaaaagtgaaagaagggagaacaaaagaaaaaaaagcagaaaaaaagagaagggatggaaaggagcaagatactcaatgaaaaaaaaaaaataaaagggggggggcgcgtttgggggacccccgttttccggcggggccttggcccgcctgtgttttttttgtgggggcccaaactgaaattaccggggcgtgtttttccacccctggaagggggaaaccccggggggaccccaaattgttggtggggggagccttcccccttttcgagggggggtaaatccgaagaggggcccgtccatggcccttttccaaacatttgcccttcctggaggggcatgggggcccccccctttggggcctttttagccggggggggggggggggccccgcggaggtgggccgtttcctttgg

SEQ ID NO: 6034 - DNA, 479 bp, Triticum aestivum
  Clone ID: uC-tsro9316023d11b1
ttcaagattgcctcagagggtctgaagcacagggtgttcgaagtatctctagctgatcttcagaacgatgaggaccaggcctacaggaagatcagactccgtgctgaggatgtgcaagggatgaatgtcctcacaaacttctggggcatggacttcaccactgacaagctcaggtctcttgtgaggaagtggcagacactcattgaggctcatgtggatgtgaagaccactgacaactacatgctccgcatgttcgccattggcttcaccaagagacgcccaaaccaggtgaagcgcacttgctatgcccaagcaagtcagatcagacagatccgccgcaagatggttgagatcatggtcaaccaagctgcaagctgtgacttaaaggagcttgtgaacaagttcatccctgaggtgattggaaaggagattgagaaggccacctcaggcatctttcccctcagaacgtgtacgttcgc

SEQ ID NO: 6035 - DNA, 274 bp, Triticum aestivum
  Clone ID: uC-tsro9316023d12b1
tttcgttcacgcgtgcggtcaccccgaacccgcagatcctcttcccggcgccgccgcaacagcaagatggtgaagggacgcaccggccagcgcgtgaggctctacgtacgtggcaccatcctgggatacaagcggttcaagtggaaccagtacgagacggtgtacttggtgcagatcgagggggtgtacaccagggaggacgcggcctggtacggctgccagaggatggcctacgtctacaaggccaagaccaagagcaacgggacgcactacc

SEQ ID NO: 6036 - DNA, 428 bp, Triticum aestivum
  Clone ID: uC-tsro9316023e03b1
tctagttagctgatgagaccaagaaaggtgcttcatctgtcgaaggcgtggaggttaaagtgtggcaggtccctgagatcctgaacgaggaagtccttggcaagatgggcgccccgcccaagaccgacgtgccggtgatctccccgcaggagctggcggaggcggacggcgtcctgttcgggttcccgaccaggttcggcatgatggcggcgcagatgaaggcattcttcgactcgacgggcgggctgtggagggagcagagcctgtcgggcaagccggcggtcgtgttcttcatcacgggcactcatggcggcgggcaggagacgacgcctctgactgcggtgacccatctgacccaccacggcatggtgttcgtgccggtggggtacacgttcggggccaagatgttcgacatggacaaggtgcag

SEQ ID NO: 6037 - DNA, 465 bp, Triticum aestivum
  Clone ID: uC-tsro9316023e05b1
tttcttcgttgagcgcctcaagaccggcttcgagaagttcaagaccgaggtctacgaccagaagccggatctgttcgagcccctcaaggcccaccagtcacccaagtgaccttgggcctggagccaggcgaggccttcaccgtccgcaacatcgccgccatggtcccgtgctactgcaagaacaagcacactggtgtcgggtcggccatcgagtatgccgtctgcgccctcaaggtcgagttcatcgtggtgatcggccacagccgctgcggcgggatcaaggccctcctcaacctcaaggatggcgccgatgacaccttccacttcgtcgaggactgggtcaggatcgggtacccggccaggaagaaggtgaaggatgagtgctccgagatgccttttgaggagcagtgcggctgtcctggacaaggaggccgtcaacgtgtcgctccagaatctgagcaccta

SEQ ID NO: 6038 - DNA, 540 bp, Triticum aestivum
  Clone ID: uC-tsro9316023e06b1
tgctttgcagcgtcaccgtgcgctcctacgcctacaagatcgtcgcccatgaggtggagacccgcctcttgcccgtcctcaccgacgcagccgacaagggcaaggtggtcgacctccaggacgtgttccgccggttcgccttcgacaccatctgcaagatctccttcggcttggacccgggctgcctcgacctcgacatgcccatgtcggacctggcgaacgcgttcgacaccgtctcgcgcctctccgccatgcggggcgcggcggcttcgccgttggtgtggaagatgaagcggatgctcaacattgggtccgagagggagctcaagaaggccatcaagctcgtcgacgacctcgcgtcggcgatgattctacagcggcggaagctgggttttgaaaatagccatgacctcctctcccggttcatggcctcggacggagacgtgcatgccatggacgacaagtaccttcgcgacatcgtggtcagcttcctcctcgccgggcgtgacacggtggccttcgcgctgaccacgctctttc

SEQ ID NO: 6039 - DNA, 289 bp, Triticum aestivum
  Clone ID: uC-tsro9316023e08b1
tctcccacgcgtgcggccacgcgtccggccacgcgtacgataaaaaaaaaaccaaaaaaagatgcagaatgaccctgaaaagaaagagaacgaacaactggaagaaatgaatggcccttcaaggccatagatactatgagggggggggccggtctaaagaagcacactgttggcccccttcgatggctgggagaacatctgtactggggtgccctaaattacagggacgggcgcggaactgacaccgcgtgtggtggaaaaacccggggagctccaaaacaaaaggcct

SEQ ID NO: 6040 - DNA, 420 bp, Triticum aestivum
  Clone ID: uC-tsro9316023f01b1
tttcttcacctttcccccctgccccggcctcggcaagaccgcgcgcggcgcgccatgactagctccgcctccttctccccttgccgcaaggtgctgagcaagatcgcgtgcctccggctgcagaaggagctcggggagtggcaggccagccctcccggaggcttcacctacaaggtctccgacaacctgcagcggtgggtcatcgaggtgtccggggcggaggggacgctctacgccggcgagacgtaccggctgcaggttgacttcccggagcagtaccccatggaggctccacaggttatatttatgcatccggggccgatgcatccgcacatttacagcaatgggcacatctgtctagatatattgtacgactcgtggtcaccagcaatgacggtcagttccgtgtgcatcagcatc

SEQ ID NO: 6041 - DNA, 538 bp, Triticum aestivum
  Clone ID: uC-tsro9316023f05b1
ttattggtcaccgctttcatgactataatagatgacatatttgacacatatagcagcactgaagacagcatgcaacttgcagaagcaattaataggtgggatgaagatgcagtaaatgtgcttccagaatacatgaaggatatctacttatatttgttggaaacatttcattcttttgaggaccatttaggacctgagaacagctaccgtgtggtttatctaaaagaagcgttcaagaaattggttcaagcatacagtgatgaactaaaatggcgtgatgaaaattatgtaccaaaaacacttaatgaacaccttcaagtttcatcagtaagtattggaacctctgtggtagcatgtgctatatttgttggcatggatgacacaacagtggaaactctcacttgggtgtcgagcgaccagaaacttcttgaagtctttgctatatatacacgttttacgaatgacatggcatcagcaaagcgtgagcaagcagggggcagtgtgctctactatccatcgtacatgaggagcatggatg

SEQ ID NO: 6042 - DNA, 386 bp, Triticum aestivum
  Clone ID: uC-tsro9316023f07b1
gctttcttcacgcgtccgcccacgcgtccggccagaaggtacccatcaacacacctctccatgacaaagcttgcttactcagcttgcaacaagcaagccttggtcttcctcttctaccctctagctagctagctttctcgaccccccaagaaaaaggagcaaccaaaatctcatactagatcgattgatgggagctagctggcttgattagctgcaatttcatggcgcgtaattaagatccagggcatcatggtgaagtagctcggcaagaagtcaactcatcaagaaagcttgctagccgcccttgaaactacacaaggaagatgaagaccagatcgaggaaggaagcacgctatagcacagagagctaggctaggtggagagat

SEQ ID NO: 6043 - DNA, 449 bp, Triticum aestivum
  Clone ID: uC-tsro9316023f10b1
tctttcacgcgtgcgcttattttccactgctcccggaggcgtcaagggcgtcatgccctctgtcatgatcggatggggatcccaagttcagtcccatcttcactttgctccccctcactgcagcttctctcctatctgtcgagatttactatgtctgtctacagctattctacttgatattgttcttggagcatcaaaggcaattgctttactggttaacatgcgtaggagggtactgttgctcagcgttattatacctctgtaaatacatgtataggaggattcttggagcttcgcacactcagtaaggccatcaaagctacttgccttgctggtcaacatgtataagaggacccctgtacatacatgtttgctgtttgctataaaagaagtactctttggtggattgagaagattgtgactatgaaaccttctagatgtacagaaag

SEQ ID NO: 6044 - DNA, 432 bp, Triticum aestivum
  Clone ID: uC-tsro9316023f11b1
tctctcacagcagagcaccactactactaccaccagtggcaaccctgacaaggctctagcagcttcgctaaagatggctgggctactctctgtcaaggccatcgcgctcgccgccgtgcttgctgccgcgtatgtctcttgcgccgccgctgagcagctgggggcggcggacctcgacgcctccgccgtgtcttacagctccgcgtggcttccggccagagcgacctaggacggagcgcccaacggcgccgggccggacgacaactgcagcgcgtgcggattcaatcacgtgaaccagcacccgttctcctccatgacctcctgcggtaaccagcccctgctcaaggacggaaagggctgcggctcctgctaccagataccgcgcacaggcgacatatcctgctccggaaagatcgagacggtgatgatcac

SEQ ID NO: 6045 - DNA, 439 bp, Triticum aestivum
  Clone ID: uC-tsro9316023g02b1
ttgttcgcacttctccccctctccgccgtcgtcgtctccgatccaccgccgctccgcgcgaccatgtcgtcgaagaggaagaccagggagcccaaggaggagaatgtcacccttggaccggctgtccgtgagggagagcatgtctttggcgttgctcacatctttgcatccttcaatgacaccttcatccatgtgactgacttgtctgggagggaaaccctggtgcggatcactggtggcatgaaggtcaaggctgatcgtgatgaatcgtcaccctatgctgctatgcttgcatctcaggatgttgctacccgttgcaaggagcttggtatcaccgcactgcacattaagctccgtgccactggaggcaacaagaccaagacacctggaccctgagcccagtctgctctcagggctcttgctcgttctgggatgaaaa

SEQ ID NO: 6046 - DNA, 453 bp, Triticum aestivum
  Clone ID: uC-tsro9316023g10b1
tttcttcacgcgtccggcgggaggaaacggcgaacaagttcttagcagagatatatacagacttgggcagctttttgattttttcaggatgttatccttctatgtgactactgttgggttttacttctgtactatgctaactgtactgacagtgtacatatttctctatggtaaaacttatctggctttatctggtgttggagaatcaattcaaaatagggcggatatacagggaaataaagcattgagcgtggctctgaacacccagtttcttttccagattggtgtgtttactgcaattcctatgattctaggtttcatcctggaagaaggtgtcctgacggcttttgatagcttcattactatgcagctccaactatgctctgtatttttcacgttctctcttggaacaaggactcactattttggtcgcacaatactgcatggaggtgc

SEQ ID NO: 6047 - DNA, 265 bp, Triticum aestivum
  Clone ID: uC-tsro9316023g12b1
tctgggacctgctgcctccctgcccgagcgtcgacgttgactcccgcgtccaccatggcgctgccgaaccagaacaccgaggattaccccagctcaaagctcgtcatcaggggcgatggcggcactggcaaaaccacattggagaagaggcatctcactggagagtttgagaagaaatactaacccaccattggagttgacgttgacccgttggattccaccactaactgaggaaagatccgcctctactgcatgggacactgat

SEQ ID NO: 6048 - DNA, 434 bp, Triticum aestivum
  Clone ID: uC-tsro9316023h02b1
tttgtttgaaggttaagcaccaattatggttaaagctttgtctcttttgtgtactatgcatgattgatctgattttgctggtcagcttacaaattcaagtaatacaactattgcaatgcatcttactacgtgtgtatctatttgcattgatattttctcctccttaggctccaaatcgtttgtgggtcataaattattatgcattattgatgttaatttgcaatttaaatgacaatagggatgggttttataagtgcaatggcttgaaatgtgaccttcgagtcaagaaatttccttagtgggaagcttatgtgaagaatgatgtaattaagttagcaatttacagttctctttgataattgtaactgaattgtcaatggccagttctcttgaatagtgagttgctccctcaaatttacaatagagataatttg

SEQ ID NO: 6049 - DNA, 362 bp, Triticum aestivum
  Clone ID: uC-tsro9316023h04b1
ttcctctcgtccgcgaaccaaagccggagcccaagcctaaacctgaaccgaaaccgaagccgcctcctaagtgcaaaccaccgacagctcacagttgatgggatacttatatacgacagttcatggaggagaccccatacgaagccacactatgctatttctagaataagtggtgtaatattccctgtattccagttatttctattgttccatgcatgtgtgatgagtattagtactctgtatttttttttgcttggcggtatatgttcatctactttggatgtgactcgactccttgttcttctgactatctacgcatgattgtattcattcacatgaatgagctattttgtcaatgaact

SEQ ID NO: 6050 - DNA, 322 bp, Triticum aestivum
  Clone ID: uC-tsro9316023h05b1
ttcctgcgcctccacttctctgctccctcgtctcctctcgcgcagggcccggcgaaagggaagcaagatgtacaccgccaggaagaagatccagaaggacaagggcgtcgagccctccgagttcgaggacaccgtcgcgcaggctttctttgacctggagaacggcaaccaggagctcaagagcgacctcaaggacctgtacatcaacactgcaatccagatggatgttgttgggaacaggaaggccgtggtgatccatgtgccataccgtctgcgcaagcccttcaaggagatccatgtcaggctcgtcagggagctcgag

SEQ ID NO: 6051 - DNA, 363 bp, Triticum aestivum
  Clone ID: uC-tsro9316023h06b1
tcctctcatcaccaaaaccccaagaaaccttcagacctctctcctccccttgcaccgtgctgttctaaagcagcgagatcagagggggaaggggggaggaaggagaggcagaccgcaaaaggggcagccagggcggcggactcgtgcggagaggagagaggggtaggccaggacctcagatcgagctcaaggagctggacattaacactgcaacccagacggacgaaagacggaacaggacggcgggggtgacccatgagtcatacggtctcagcaagcccttcaagaagatccatgtgaagctcatcaaggagctcctgaagaatcctagcggccaggacatcggctttgttgcaacaaaga

SEQ ID NO: 6052 - DNA, 259 bp, Triticum aestivum
  Clone ID: uC-tsro9316023h07b1
ggatgcccgaaagtgtttgtgtgcccacaggccgaccggagcgagggctgtgcctgattcaggaagaaccgggggagctcgcgggcacccccgggggggggccacgacgaacaagtgaggaacgcaggggccgtgggcagtactacgtgagtgtgtatgcgcacagaaggaatgatcaacggagggcccagacactgtgggggggaggacgactccacgactgatagacagaactgacggggacggaaaggacaacagg

SEQ ID NO: 6053 - DNA, 152 bp, Triticum aestivum
  Clone ID: uC-tsro9316024a02b1
gcgttactgttcgccacgcgtccggccacgcgttcgaccatcgcttgcgcgatgatatcttgatgtatgaacggtctgacaacaggttgcttcactggaacagcatcagggttgagtgataaacaaagaaaataaaaggaggagcccatgac

SEQ ID NO: 6054 - DNA, 393 bp, Triticum aestivum
  unsure (1)..(393): unsure at all n locations
  Clone ID: uC-tsro9316024a05b1
cagcagagcggcggcgtttttggctttgagccccgccgccgtggcggcgcaccaggagatgatggccacgctgatggtgcccaagaaggaggcggcggacgaggccggcaggaacgacctgttcgtggacctcagctacgacgacatccagagcatgtacaacggcctcgacatgatgccgccaggggacgatctgctctactcgtccctcttcgcctccccaagggtccgggggagccagcccggcgccggcggcatgccggccccgttctaagcagagccaagacacagaccgtcagataccgagatcgacagaagtggaacggatgacttcttcgccgcgagcgagcgagatcgcggcgcagtggaaatacagcatangaaacgggaggg

SEQ ID NO: 6055 - DNA, 194 bp, Triticum aestivum
  unsure (1)..(194): unsure at all n locations
  Clone ID: uC-tsro9316024a11b1
ccggnccgaattcctgtgcgtacccacgcgtttgttgactcccgggcagacgcgtgggcagacgcgtgtgtggagttgcctgaacatctacatgttgaaggggaccaagatggcaataaaaattcatgctgtgaaaaaaaggacataaaaaagacatagtaaatatgaggaggagtacatgacgaaagacgaac

SEQ ID NO: 6056 - DNA, 417 bp, Triticum aestivum
  Clone ID: uC-tsro9316024b03b1
gtttgttctcgatcgcccctaccagacagcactcttcgctcgcggggtaccatgcctttcgcaatcatctgagtagtagaatggcctcgaaagctataaggaggaggcctaccgagaaagaaagagagagacatatggaaacaacaatgccggaatctgtcacagcacctcttctaggaaatagtgcccaggggaataaatcggaggggtatgagcctataccggatttctgggatggaaaatcacgcgagtgccttcattgggtgcatattgtatctacttttattactcagtctgcaagaaagatagtcaatgctatttcggagtttggttcgttcctagcaaggttctttggttgctcccgtgctccccaaagttcacaaaatgcacagacaatgctaattcacctcagtccat

SEQ ID NO: 6057 - DNA, 430 bp, Triticum aestivum
  Clone ID: uC-tsro9316024b04b1
ttcggttctagatcgcccctaccagacagcactcttcgctcgttgggtaccatgcctttcgcaatcatctgagtagtagaatggcctcgaaagctataaggaggaggcctaccgagaaagaaagagagagacatatggaaacaacaatgccggaatctgtcacagcacctcttctaggaaatagtgcccaggggaataaatcggaggggtatgagcctataccggatttctgggatggaaaatcacgcgagtgccttcattgggtgcatattgtatctacttttattactcagtctgcaagaaagatagtaaatgctatttcggagtctggttcgttcctagcaaggttctttggttgctcccgtgcttcccaaagttcacaaaatgcacagacaatgcttattcaacttagtccatcaccggaggagag

SEQ ID NO: 6058 - DNA, 401 bp, Triticum aestivum
  unsure (1)..(401): unsure at all n locations
  Clone ID: uC-tsro9316024b06b1
ccacgcgcattccctccgctcccggccccggatccgaccgtccacccgaccgcgccgcgcgaccgccgggggagggagagcatggcgagcgggggcaggacggatctggacggcgccgccgtggcgccgctgaccatctgcgtgatcggcgccggcggcttcatcggctcgcacctctgcgagaagctcatggccgagaccccgcacgtcgttctcgccgtcgacgtctactgcgacaagatccgccacctcgtcgacccgcccccgccccacctcgccggacgcatgtgcttccaccgnctcaacattaagaacgactcccgcctcgagggcctcatcaagatggccgatctgacgataaacctggcggcgatctgcacgccggcggactacaacacgcg

SEQ ID NO: 6059 - DNA, 514 bp, Triticum aestivum
  Clone ID: uC-tsro9316024b07b1
agcgttgctcccaggtaaaggaaagattcgcccatggctccgtcgcagcccaagtcgggcctcttcgtcggcatcaacaagggccacgtcgtcaccaagcgcgagctgccgccgcgcccgtccgaccgcaaggggaaaggtaccaagagggcgcatttcgtcaggaacttgatcagggaggtcgctgggtttgctccgtatgagaagcgtatcactgagcttctcaaggttggcaaggacaagcgtgccctgaaggtggcgaagcgaaagttgggtacccacaagagggcgaagaagaagagagaggagatgtccagcgtcctcaggaagatgagatctgctggaactggaacagacaagaagaaatagagcatcccaggctcattaagttgatggcaatcttctgttctggtgtccagcttttactgcatgtagaacctactagacctgaaactgttatccgcttgctaaacattatgctatgttgaaccctctgtcttgagagatctttgat

SEQ ID NO: 6060 - DNA, 103 bp, Triticum aestivum
  Clone ID: uC-tsro9316024b08b1
cggacactggacttgcctgtccgtcccacgcgttctttctttaaaaaaaaaaaaaaaaaaaaaaaaaaaatttattaaaaaaaaagcataaagcattcaaaag

SEQ ID NO: 6061 - DNA, 306 bp, Triticum aestivum
  Clone ID: uC-tsro9316024b09b1
aaaaaaaaaaaaaaaaagggaagataaaaaaaaaaaaaacaaaccaaaccacacacccaaaaaaaaaaaaaaaaaaaaccaaacaaataaacatgggcccgcccctcaaaagaaccacaactcccgaccccgggcacgcaagaaaaaaccacttccatagggcccccaaaataaaaaacaacggaccccgttaaacaacccggggacggggaaaccccgaaccggccccacctaaagcacctggaaaaaaaacccccttcccccagaggccaaacaaggaaaaggcccgccccaaccacccttcca

SEQ ID NO: 6062 - DNA, 460 bp, Triticum aestivum
  Clone ID: uC-tsro9316024b11b1
tcggtcgatgcaaggcttgaagttgttttccgcaagaaattgccagagatccggaagcttcttgttgcggcataatgcacacttgtattttggtgatggtacagctgtttctatgtaaaatggctgctggtttgacccccagcaggtgcaacgaactccgcccggttttgcgaacattgattgtttaaagtatcccatcctcttatgtaaacactacttatttgttcattattgtcgccgagcacaaactatttggacgaactttgctctgaggaataataaataaagcaccttcggactgtgtttatgaaaaataaaaatataaaaaaaactataaaaaaaaaaaaaaactaaaaaaagataaaaaaaaaaaactaaaaaaagaacaacaaaaagaaaaaaaaaataagccaaggggggggcccttttaaagaacccaaatttccctcccggggcttgc

SEQ ID NO: 6063 - DNA, 472 bp, Triticum aestivum
  Clone ID: uC-tsro9316024c01b1
ttgagatgtgtgcaaggaccatctactgcacaaacatcgacaagaaggtctctcaggcagatgtgaaactgttcttcgagtcaatttgcggagaggtctatcggctgaggctgcttggggactaccagcataatactcgcattgcctttgtggagtttgttatggctgaaagtgctacagctgctctcaactgcagtggtgttatactgggttccctgccaataagggtgagtccatctaagactcccgttcgtccccgtgctcctcggccaatgaactagagttgtaggtacaggaggtgccaatggcactgcttatatatagagagatcgacatatgtgaaagagaaattaagatatgtcttttcttctaagttatccgctcgagtgtctttttattgcatcgccggtaagtatcaagactcgagcggaggaggggaaaggaaaaattagaaatggctggtcggtgttta

SEQ ID NO: 6064 - DNA, 473 bp, Triticum aestivum
  Clone ID: uC-tsro9316024c02b1
atcgtatgcagaatgtactcatgatggatcgataaaacacattcagaagtttgagttctggggatggaaaacattagaccgccgtgtactcaacgtagaaagaactggcaacctacttcatcttcagttagggcttctcacaaatggctttaaattattgaaaacaggcggatcacttgtctatagtacttgcagcttgactgttgcacaaaacgagaatgtggttcagcaattcctctcaaaacatccttcagcagagctgctaaagatcaatccagccgatagctggccctgcagaagcggcggcatccagaaaaccttgcggttcgatcccgcgacgtcacaaactagtggacttttcgttgccaagttcgtcaagttgcgatgttctttatgagatgctcgcaacttcgtataagttaatttcatatgaaaccaggatgtcgcgagtcaaatttgctaggtttactcta

SEQ ID NO: 6065 - DNA, 497 bp, Triticum aestivum
  Clone ID: uC-tsro9316024c05b1
acatttgtccttgccggacgcgtgggggcaaacgacagacaatttacaccgacccgctgattcaccaatttcacatcgacaatatgggcgacgctaccgtggagtctccttggtggcgcctggccaaggtcggtctgtggaggatcacacaagacaacggcccctacaacggcagaatcgccaccatcgtcgagatcatcgaccacaagcgcattttgatcgacggtccttcatccgacgagatgcttgtggtccccagacaagccatggcactttacgaaattctcctggcccccatcgtcgtcgagtcgatgccccgcgccgtccgcactggtaccgtcaagaagttctgggagaagtctggcgtcgactccaagtggaaggagagctcgtgggccaagcggcaggagcagaaggagcgtagacgggccctcaccgactttgagcggttcaaggctctcagactcaagaagcagcgacgattcgaggagcaaaag

SEQ ID NO: 6066 - DNA, 485 bp, Triticum aestivum
  Clone ID: uC-tsro9316024c08b1
ctgctcgatcgcgctccgacccgtcagccatggctcggctcgccgccctcctcctcgccttcgccgtcgccgtctccgccgccgcgctggcgcatggccgcgatctcccgacccagatcaagctgaccaagggcggcggcgcggtgggcggcgacagccaggagtgcgtgtacacggtgtacgtgcgcacggggtcgatctggaaggccgggacggacgccaacatcacgctggagctctacacggcgggcaacgccgacggcgtggcgatcgcggacctgccgtcgtggggcgggctcagtgggggggccactcctacttcgagcgcggcaacctggacatcttcagcgggcgcgggccgtgcatggccggcgcgccctgccgcatgagggtgtccttcgacggcaccggggcgcaccacggctggtactgcaactacgtggaggtcaccgtaaccggcccgcaccgcggttgcgcccagcagc

SEQ ID NO: 6067 - DNA, 250 bp, Triticum aestivum
  Clone ID: uC-tsro9316024c09b1
agcctcctactgagcttacacgtaacggagcacactacgatgtgtgtatatgtatgcatgtcagcagtatacgcatgtgtgatgttgcgcacagccgcatagcgtatgcaggcgtgcgtgcttggcggccatcagcccctatcgcgcgcccgtgcagcgcttaaataagcgctaatcgtgaaccagaataaagcttctcgcgattagtagcaaaaaaaaaaaaacaaaagaaaaaaaaaaactaaccgag

SEQ ID NO: 6068 - DNA, 126 bp, Triticum aestivum
  Clone ID: uC-tsro9316024d01b1
ttcgcgaccttttgctctgcacacgcatgtaaaccgacccctaaataaattcttcagtgggttaaccaaaaacttttaaaagaaaaaagaagagaaagagaacaaacaactggcgtaaacatgggc

SEQ ID NO: 6069 - DNA, 54 bp, Triticum aestivum
  Clone ID: uC-tsro9316024d02b1
tttactcgtacgcccacgcgtccgcccacgcgtccgactagttctagatcgcga

SEQ ID NO: 6070 - DNA, 474 bp, Triticum aestivum
  Clone ID: uC-tsro9316024d03b1
ctggctagctgcaaagaatcttgcgcctaagtttaacagtttctccaaaaatatttctgtacacctcggagttgtggtgcctcatgtagagttgaagcatgtggttgctgctaccattggtctgaagggtctgggtggtctcctgtttatcgccagcagttcatttggtgcttatctcctggctctctaccttgctttcatcacgcccgtcgtctatgacttctacaactacgacatggagaaggctgaatttgtgcagatcttcatgaagttcacacagaacctggcgctgtttggagcccttctcttcttcctgggcatgaagaactcggtccccaagaggcaggccaagaagaaggcccccaagtccaagacaacttagatagttgcggagaagactcttatttaacaaagaagctaccgtacctggttctcttatgtgtaatcggatccgctttgaaggggggtgcaggc

SEQ ID NO: 6071 - DNA, 482 bp, Triticum aestivum
  Clone ID: uC-tsro9316024d04b1
tgcaaagaatcttgcgcctaaggttaacagtttctccaaaaatatttctgttcacctcggagttgtggtgcctcatgtagagttgaagcatgtggttgctgctaccattggtctgaagggtctgggtggtctcctgtttatcgtcagcagttcatttggtgcttatctcctggctctctaccttgctttcatcacgcccgtcgtctatgacttctacaactacgacatggagaaggctgaatttgtgcagatcttcatgaagttcacacagaacctggcgctgtttggagcccttctcttcttcctgggcatgaagaactcggtccccaagaggcaggccaagaagaaggcccccaagtccaagacaacttagatagttgcggagaagactcttatttaacaaagatgctaccgtacctggttctcttatgtgtaatcggatccgcttttgaaggggggtgcccgccctaccaggtgtgggt

SEQ ID NO: 6072 - DNA, 297 bp, Triticum aestivum
  Clone ID: uC-tsro9316024d05b1
acagaatgaacgggggggggggcccgtgggggccccgggcaaccgccggggggcagggagagcaacagcgtgtcgaggggggacccaaaggcgaacgcacgggcgggggcaccaaccccccgggcgggggaaaccccgggggccccccaagaagaagggcgggggggaaaggcccctatggcaggggggggaaaaagaaaagggggcggaccgggcggccctccccaaaaagggggcacccggaagggagaaggggcccccccccggagggggccaaaaaacccggggggggggggg

SEQ ID NO: 6073 - DNA, 111 bp, Triticum aestivum
  Clone ID: uC-tsro9316024d10b1
tcctcacgcgcccgaaaaaaaaaaaaaaaaaaaaaataaaataaaaaaaaaaaaacaatactacaaaaaaaccaaaaaaaaaaaaaagaacaaacaacagacaaaaacatg

SEQ ID NO: 6074 - DNA, 486 bp, Triticum aestivum
  unsure (1)..(486): unsure at all n locations
  Clone ID: uC-tsro9316024d11b1
tgtttcttcccacgctgtcgttatacaccaacagaaatcacttcccagccaccattgacttcccattcgatccgatcaccacaaaaaacctcaagcttctcgaccggtttattagttgttcaacagccaacaccatgagctctcggatggccggagccacgttgctgcgccacctgggcccccacctcttcgccgccgccgagccggcgtccgggctcgccgcgagcgcgaggggtatcctgcccgccgccgcgaggatcttccccgcgcggatggccagcaccgccgccggcgcgcatgccaaacaagaaggtgacgctgaaaagcccgagagcgccacagcgccggagcagaacaagaagcccgtggcgagctactggggcatcgagccgcggaagctcgtcaaggacgacggcacggagtggccgtgtttctccttaggccgtgggacacgtaccggncgacacgtcctcgacgtggccaagc

SEQ ID NO: 6075 - DNA, 172 bp, Triticum aestivum
  unsure (1)..(172): unsure at all n locations
  Clone ID: uC-tsro9316024e03b1
ccggtccggaaccccctggttgtccttcgcgaccgtttgttgctaaccanctgnngaagngggaggaaactgttgattcagtgcgtagatatcagttttttttctattccagatgtgttttggttaattcattgggcttttaattcattgccattggttcaggctatattca

SEQ ID NO: 6076 - DNA, 505 bp, Triticum aestivum
  unsure (1)..(505): unsure at all n locations
  Clone ID: uC-tsro9316024e05b1
accggccggaactcctggttttcctcgcgcctttctcgcccgcgctactcccgctcctgggattttttaaaaggagagacgtcattcgatcccagccagattcacatngatcgatcgcccccacctttcctgccggatcttctcaggagcagcagcagcttgaattcttgcggatctgcggctgcgaatcccagtctcgtatcaactcgaccaggcggaggagaagcagggggaagatgtccaaggcggcgctgacactggaggaggtgtccaagcacaacaccaaggacgactgctggctcatcatcgccggcaaggtatatgatgtgaccaagcttttggaggatcaccctgcaggtgatgatgcactgctgtcctcgactgccaaggacgcaactgatgactttgaggatgtcgggcacagcaccaccgtccgtgcgatgctggacgagtactatgtcggcgacgtggatacagttactattcctgcccggacaaagttcac

SEQ ID NO: 6077 - DNA, 440 bp, Triticum aestivum
  Clone ID: uC-tsro9316024e08b1
tcctctaatacactggatgcagctgctatcccagctgcaaggaaagctgatctaaaaggcaatatctcaaagctggaggatcaacttaggaaggcgaagaagaaaatgggtgaagaaaatatccagaaggctgtcaagattgccatagatgctgcagaagctgctctttctgaaggaaaaaccttctgtgttactcatgctgatgtgggtcttgacaccactgctgtccgggaagcagttgtcaaagccatgaaccgtttcaagggtttgccgataatggtattcagcacagatgaggcatcaaacaaggctgttatttatgccggcgtacctccggatgcacccaatggcttcaaggtgttggattggcttacaccttcaatcgcaccactcaagggaaaaggaggaggcggcaagaatggtctcgcccagggccaggg

SEQ ID NO: 6078 - DNA, 465 bp, Triticum aestivum
  Clone ID: uC-tsro9316024e10b1
tttttctttccacgcgttcgctctcgcgtccgcccacgcgtccgcccacgcgtccgagcttttggtgaggctatgcttcacactgttggatatatttatgtacggcaagcggcaagagaacttggaaagagtaaattgtatatgggtgtaccattcatagctgagtgggtaagagacaagggtcacaccattaaatcgcaagttcatgctgcttcaggtgctattgctctgatgcagctacaagaaggaatgaaaaaggtggaggagggtgccgacaaggaagagcagcttatgaagagttttgaggagaaaaaagaagccatgcttaattctctatggaaaattaatgtggtcgatatcgagtcaactctttcccgagtatgccaagcagttcttaaagatagcactgtctcaaaagatgttctgaagttgcgaggaaaagcgttgaaaaagcttggaacgata

SEQ ID NO: 6079 - DNA, 513 bp, Triticum aestivum
  Clone ID: uC-tsro9316024e12b1
tttttcttcccacgcgtttgttcatcttcggtcagatgtcatattctgatgctatctagctacttattgggtccaacaagaaatccgagttcccggtaaagtgggggctggctccgcaaagcgagcatgaaagatatatcacagaagtcgcatttggcggcagtcctgcaataattagagattatccaaaggaaatcaaagctttctatatgcgacaaaatgatgacgggaaaacagttgcggcaatggatctattggctcctggggtcggcgaacttattggaggaagccaaagagaagaacgacttgattaccttgaaggtcggctggatgaatcaaatcttaacaaagatagctactggtggtatctggatctgcgacgatatggattcagttcctcatgctggttctggccttggatctgaacggctcgtacagcttgccaccggaatagacaacatcagagatgccattccattttccagggctcctggctctgcagagctctagcac

SEQ ID NO: 6080 - DNA, 267 bp, Triticum aestivum
  Clone ID: uC-tsro9316024f01b1
ccggggcggaaaccccggggcgacccacgcgaccgctcaagtcaaaaccagagaaaacgggaagagagggaggatgaaataaaaaagaaccgccgaggccgccggcagaccacagagagagcgcagaccggccaacgggcgcaaagaacggccccggggggggcaccgccagggggcgaaggcaaccccgacgaaggacggaccgaccagcccgcccccgggggcggggagaacaacagaaccgggcagccagcctgacagggacga

SEQ ID NO: 6081 - DNA, 298 bp, Triticum aestivum
  Clone ID: uC-tsro9316024f02b1
tcgcgactttacttgttcgcccacgcgtccggacgagtgcgatccatactttgatcaggctggctgcaagcatcctggatgcgaacctgcttatcctacacctgtgtgtgaaaagaaatgcacggcgcagaaccaagtttgggaggaaaagaaacatttcagcatcaatgcataccaagtaaactctgatccacatgacaccacggcagaggtctacaataatggccctgtcgaagttgctttcacagcttatgaggacttcgcacactacaagtcaggagtgcacatgcacatcacc

SEQ ID NO: 6082 - DNA, 264 bp, Triticum aestivum
  Clone ID: uC-tsro9316024f03b1
cgaaacaatcaattggcggcatggcgggaactacgacggacacctcgaggcggtcgccgaccgtgctgagcctgggtccgctcatcctgcgcaaggatgggcccgccaggggcgacggcatctgcgtggacgagccgtgcgcagacgcaactgtgagccgcggcgacgggttcaccttaacaacggaccccggagggcacgacgactggttctacagaagaacgcagctctccccctgcgacagccgacttaacctggggaacg

SEQ ID NO: 6083 - DNA, 457 bp, Triticum aestivum
  Clone ID: uC-tsro9316024f04b1
ccgaaacaaccaattggctccatgggggttacttctacagcaacgccgaggctgtcgccggccgaactggtgctcatactcctcctcctgcccgcggcaggggccgccaggggcgacggcaacggcgtgtacgagccgtgcgcggacgcgacggtgagccgcggcgacgggttcaccttcaagggtggccttcgcggggcgcgacgccttcttctccggaggcgtgcagctctccccctgcgacagccgactaaacctggcgaacgcaggaccgctgctagagctattccgccccaccgtcgacgagattgcggtgctcaccgacaacgcctacgaccccaaagccctgacattctgatggtgggcacatggaggcctttgccaggaggaagatcgcggcaaggatgccgcccgtgtacgtaggcaacaacttcgacacagataccggattgaccct

SEQ ID NO: 6084 - DNA, 362 bp, Triticum aestivum
  Clone ID: uC-tsro9316024g02b1
gttatatggtggcgcctttgcggcgacgccggctgaagccgcgtcgggtgccgagttcgtcttctgctgcgtcggcaacgacgacgacctgcgctcggtcgtgctgggcgatgagggcgcctctgccggcatggcggcgggcgccgtcttcgtcgaccacacgaccgcctcggcagcggtcgcgcgtgagttgcatgccgtggcggccgaacgtggcctgcatttcatcgacgcgcccgtctccggtggccaggcgggtgccgtcaacggcgcgctgacagtcatgtgcgggggggacgccgcgcccttcgacgctgccaggcccatcgcgctggccttcgccaaggccgtcacgctgctgg

SEQ ID NO: 6085 - DNA, 201 bp, Triticum aestivum
  Clone ID: uC-tsro9316024g03b1
ttgcgacgttctcatcttagctggctatccaaaaaaagagagaaagattatttttaaagaaccgacggtgcttttcaccaaaaccagaagagatcgcgtacgcacaactggcgcaatgatggcccttcagagccattgtttatttgaggaagagtgcctgacgaaagaataactgggtgcccgccttcgctgggtgggcga

SEQ ID NO: 6086 - DNA, 192 bp, Triticum aestivum
  Clone ID: uC-tsro9316024g04b1
cacgagaacaaaagaggaacggcacggacaacaagggcaaacaaaggacccgcgggggcggcagagcccacaagaggaggggagccaggaggaaagaaggaaccgaaagaccaaccacgagacgtggggaaccaccaggaaccagcaccccaacgaccaggaggcaaagaaaaaacacgccccagggacacg

SEQ ID NO: 6087 - DNA, 518 bp, Triticum aestivum
  Clone ID: uC-tsro9316024g10b1
tttttgtcccaagcttttgtttcagaaccgggctaccatcccccgcggttggctttttttcaagtggcacccgcattggctgccatgagaaccattctcctcgccatggccgcgatggccatcctgagcaccgcttcggcggcaatctacaacatcggcgagccaggtggtgcatgggacctcaacaccaactacggcacctgggcatcctccaggaacttccaccccaacgaccagatcgtcttcaaatactctccccaggcacacgacgtcctcgaggtcagcaaggccgactacgactcctgcagcaccgcaagccccatcgccaccctcaactccgggaatgatgtcgtctccctcaccaccaccggcacccgctacttcctctgcggcttcccgggccactgcgccgggggaatgaaggtcaagatcgacgtcgtgccaagctcatcctcttcctcgccggccccagccagcggccccagtgcaagcaacgctcccccgccagcgcctgtctc

SEQ ID NO: 6088 - DNA, 488 bp, Triticum aestivum
  Clone ID: uC-tsro9316024g11b1
ctcgtttggttgcatatgtccttctccatgttttagtgtttaggcataatggatggttgtaagtgtgtgttacccagaggatgaagtttgcaccacctcagacagataatgagtcaagagatgctaaggagatggacttggcgcggaggcggaatttgctctctattcttgcaattctggcggcaactgtcacgtaccaagctggcctgaacccgtcaggaggcatttggcctgctgagaacagtaagggtggcaaaccaggcaatccagttcttcaagacagccacccatagcgctatgatgttttctactactccaatgctgtctcatttgcgtcatctgcggctgtcatcattcttgttgctaatagggaatcatgcgaggatggaatcaagtcgtacgcaatccgtgcgtgcttggtagcggatttgctgggcctactgattgcctattctgcaggaacctgcagcatagcgagacccgtaata

SEQ ID NO: 6089 - DNA, 253 bp, Triticum aestivum
  Clone ID: uC-tsro9316024h02b1
ggccgggaccggaacggaagggccgtcccatgcgaccggttccgtgcgagcaaactacacgagggagcaaaccggcacactgctgatagccgggagcctgccccagacccatggcgctcacagggatcctcaaggagctcaaggacctgaacagggacccgcccaccagcggcagcgcctgccatgaggcgcaagaaaggatccactggcaggcgacaagacacgggtccatcggcaagcccagatgccggcg

SEQ ID NO: 6090 - DNA, 203 bp, Triticum aestivum
  unsure (1)..(203): unsure at all n locations
  Clone ID: uC-tsro9316024h03b1
gccctccggcgcgcgcaccgacgatgattctggcagtaccgcttattctgtctccggcaccttctgaggagncgccagcgcaactggcgcaagcattgtcgtttagttggacggactccgacttgtggttagcttgactatagacgaaatattggtcccgctgcagatggaggggcgaccactgtacattgtactgagtctgc

SEQ ID NO: 6091 - DNA, 351 bp, Triticum aestivum
  unsure (1)..(351): unsure at all n locations
  Clone ID: uC-tsro9316024h04b1
ttgtcctcgcgaccgttgngtcctagccacgccctccggcgcccccaccggctttccttttaggtctaccgcctactcgttcgccgccaggtcctccggagccgccagcggggctgccgcgaggtctatgttgtacttggagggacgcagactcgtggtagtcttgtgtatacacttcatatcggtcacgcggtttatggagggacgaccaatgtggattatacggcatatacatgttatattgttacagaggcttgtagatatgagtcgcgtatacgattattcgagattgggtacgtaattttgttacacatgcatgagattatttatgaatatacaattttttcgttt

SEQ ID NO: 6092 - DNA, 316 bp, Triticum aestivum
  Clone ID: uC-tsro9316024h05b1
ctcactcgttcggaagttcccagctgctgttttcctcaaggtcgacgttgatgaactgaagcccattgctgagcaattcagcgtcgaggccatgccaaccttcctgttcatgaaggaaggagacgtcaaggacagggttgtcggagctatcaaggaggagctgacgaccaaggttgggctccacgcggctgcctagtaatcacctagcggagtagtattcgcctaaataaaattgccgcttgagaagtagtgcctccaatggcaccggatatgctgtgtactgcttgcttcttgcgagtttatggatgatggtgac

SEQ ID NO: 6093 - DNA, 426 bp, Triticum aestivum
  Clone ID: uC-tsro9316024h06b1
gagcccggctttgaccatatcaaaggtcctgctgtcaatctgctcgttgctgacggacccgaaccccgatgatcctctggtgcccgagatcgctcacatgtacaagactgatcgggccaagtatgagtccacggcgcgctcctggacgcagaagtacgccatgggctagagcctggacggccagctggtgaccatggatgcgccgagccccagaaccgttatcacctaaataaccagccaaagtatcaccccaccccgtgacgaagtgaatggacttttgaggccgtcgtgcccctgttgaactcgtatgaatgtactctttgccatgtcaagtccgttgggtctgggtagtctgttctacctgacgtttcgttatccattaagttaaatctctgtccgtatcatgatatgtatggctttccattg

SEQ ID NO: 6094 - DNA, 358 bp, Triticum aestivum
  Clone ID: uC-tsro9316024h07b1
caaactcacacgagctagcaaaccaggccacactagctcgatcggatggggccctgccccagagctgcgcgcttcctggtgctcctccagatcgtcctggacgtgatctgggacgcgctcatgagcggccccgtctgccatggagcccgagcagggatcgacgggggagctatagatcctaatccaccgacaggcacagaggctgctggtgacccctacaccggtcgtcagtgcagcagatagtacaggtgctcaccaagtgttcagccctgataacagcagaaacacctctcccgaacaatggaaggtgtggacgattgcaccgcctggatgcatgcccacatctagctagcaatac

SEQ ID NO: 6095 - DNA, 267 bp, Triticum aestivum
  Clone ID: uC-tsro9316024h09b1
cccgcgccccggaggcgcacggcaagatctgcttagtccctggcggggctccggcgggcgatgcaccccatagacgtcgccggcaaggtgtgccagcacgacgaggcccgcgccatcgcgtgcagcatgccgaagctccggcacctggagatcgggtacatgctgatcgcgaccaacgccgtggtggagatcgcgtcccggtgccgcgacctcagattactggacctgcgctgctgctggggcgtggacgacaagctgctgcaggac

SEQ ID NO: 6096 - DNA, 88 bp, Triticum aestivum
  Clone ID: uC-tsro9316024h10b1
tcgctcataaccaaaaaaaaaaaaaaaaaaaaaaaagattatttaaaaaaaaacgaagatactacagaaaaaacaaaaaaaaaaacaa

SEQ ID NO: 6097 - DNA, 329 bp, Triticum aestivum
  Clone ID: uC-tsro9316025a02b1
ccccagagctcggtagggttttttgctttctcgggggagacatctcttgtggcggcaccatgctcgtgtaccaggacacgctttccggcgacgagcttctgtcggattcgatcccttacagggagctggacaacggcatgctctggcaagtcgatggccattgggtcgttcaaggagcacttgacgtggacattggagccaatccctctgctgagggtggtggtgatgctgtgggtgatctgaaacaggagctggatgacactaggtctaaactcggcacttgcctggcggtttacaaccgctgtgctgggaaaaccctgatgttaccc

SEQ ID NO: 6098 - DNA, 240 bp, Triticum aestivum
  Clone ID: uC-tsro9316025a04b1
atggcccgggctctgggttatgatttttttacagagaattcatgtgtttttcatgcccaggggattcagcaaagtactgacgcatgcatacagcataccactgcaaatgctgctcataaccttggaccatcaagagatgaaccaacaactgatgtcttccgcagagagccctggtgtcaccccacacagagaagaacacctactggagttgaacaggaaaaggcttctgccgttaccgag

SEQ ID NO: 6099 - DNA, 110 bp, Triticum aestivum
  Clone ID: uC-tsro9316025a05b1
ttcagtgcatactcaagggtgttcttgtttatgcaaatcccttgttattgggatgccgggataatgcgggaacatactggcgaatggatgacagattgctgttacagtcc

SEQ ID NO: 6100 - DNA, 143 bp, Triticum aestivum
  Clone ID: uC-tsro9316025a08b1
gcattctactggcccacgttttacaccgactttgactgtgaaaaccacgaagagcacaactgaatcgccttgtggcacatcccccattcgccagctgacacaatagctaaaaggtcggcaccgatcgaccttacaaaaagttg

SEQ ID NO: 6101 - DNA, 285 bp, Triticum aestivum
  Clone ID: uC-tsro9316025a11b1
tcccacgcgtcctgagttgtttattttttagccggttgctccatttcttccagacgacccaggaaggctggccgcccctcaaaggggaggaagatgccccgcctcctccagtgtgttgctgcatgggcgcacgccaggagagcagatctggtcagacccgcgttctgccgtgcctgaacaccaccaatgggaccggagcctgactgtacaaaggaccaactggggcttcctgaggacaggctgaaagaggcggtcggtcactctagccctaacaatgtcacgggc

SEQ ID NO: 6102 - DNA, 391 bp, Triticum aestivum
  Clone ID: uC-tsro9316025b01b1
ctccgacgacatggatccctgtttccttatcttgtactgctgactcctgctgcagctgccaaccatggcctgtgagactgtcgtcctcaaggatgcaatgtcctgcgcaggctgctcgggagcgggtaaaagggtgctcaccaaaatggaaggcgtcgagagcttcgacatcgacatggagcagcacaaggtgaccgtgaagggcaacgtcaagccagaagatgttttccagacggtctccaagaccgggaagaagaccgccttctgggaggcctaagccactcctgcaccggacgctaccccggccgctcctgcagcggaggcagccccggcagcagacgccgcgcctgcaccggaggctgccccagcagcagacgccgcgcctgcaccg

SEQ ID NO: 6103 - DNA, 206 bp, Triticum aestivum
  Clone ID: uC-tsro9316025b02b1
tatggctatgttttgagccttgtgtggtctgggagaggctgcgttagtcctcgcccagaaataatggcattattattggtttgagtgaggaggtgtgcttttccagatacagttttgtctcgtgtgttctgccatgtctgaaatacttcgcaagctgttgctcatatttgtgcgtgttttgttaatgatcctggccctacatgatt

SEQ ID NO: 6104 - DNA, 459 bp, Triticum aestivum
  Clone ID: uC-tsro9316025b03b1
tttgctccgccgccgccgccccgtgcttttcgcacgtgagcctcaccttttcggttggccaactggaagggggcgttttacctggactaaaccgccactatcgcgacttcttgattcagcggctcgtgcagttcttccaaggcgccatcaccgtgaaggatctcgtcttgcggtttactgggccagagatgtggatcatgccgaagaatcccttctctgcaatgtcgaacctgagaaggctgctggtcgccgacgtgccttcctcatgggacgcctcatggccgcgcctgctcatcgaggcggcgccgttacttgagagcctatatgtgcatgtctcccacagcgaagatgagccgagacaggaggtgccgggggagacctcgggttcgcgccattgccatttgaaggagctggttgccattggattccagaggacggacaggcagatgcaccttgtga

SEQ ID NO: 6105 - DNA, 347 bp, Triticum aestivum
  Clone ID: uC-tsro9316025b04b1
agattcattgataatctcgtggtgtgttcaggcggtttggcgagatctgtcaaggagggcattcccgctgatgaagcagatctgcgtgacatgataacgtctctagagagtctgttacgtgacgggatccagcctcgcgtggggcggtatgctgaacaagagttacgtggttttgataccaccttcaagagtttgttacctgatgctgctgcagctaccaccatcaaggaagagccggataatggtgatgccaccagtagctgccgtcaggatcaggaaggggcggcgagccactgatgaacgccgtacatcaaggatgctgggatcttggagtcttctacagcttt

SEQ ID NO: 6106 - DNA, 454 bp, Triticum aestivum
  Clone ID: uC-tsro9316025b05b1
ggaagcacaatgggctactgcacatttttcactccatggccttcatttttctccgagccggcctcccatacactgttcaacgacaagagcagctaccgcgagctctctgagatcgctgagcaagcaaagagaacagctgagattgcaaggtatattatctttccgcttccaggttgctaatagatcagacgagtcaggctagtcgttgatttgctaatgcccttttcctgatgattatgtgcaggctgagggagctcaacacactcaagggccacgttgaatccgcggtgaagctcaagggccttgacatcgacaccatcaaccagaactacaccgtgtgaggagtatcgacattggaccaacaaacatgacatccgtattggagcgagattggaatggagctccgctttaagatttttccggtgaatgaatgaaacaaacatggctgatctga

SEQ ID NO: 6107 - DNA, 351 bp, Triticum aestivum
  Clone ID: uC-tsro9316025b06b1
ccacgcgtccgggcgctcgtcaagtttctgcgcaaggcgctcaaaggtctctcctgctggcgagaagcctgagccagtgaggacacatcttcgtaacatgatcattgtccctgagatgattggcagccttatcggtgtctacaatggcaagaccttcaaccaggttgagattaagcctgagatgattggccattaccttgcagagttctctatctcctacaagccagtgaagcatggcaggcccggtattggtgccacacactcttgccggatcattcctcttaaatgagttatgccgctttctactttgaaagaattcagtacggaccatctggtggcatggccatctag

SEQ ID NO: 6108 - DNA, 303 bp, Triticum aestivum
  Clone ID: uC-tsro9316025b11b1
ctctccaacagaggagaaaggtaatagtaagagggtgccccgatatctcctctccgccgagggtgctgccggatggggaagagatggggaaggtgctcccagctctactataagtagtaggactagcttaggtgtctacttagtggcgactggcgcgacgccggagattgggtttatgactatggaggcctagtctcttgcgcgccccagccgcttccggtggctgctggagctcacctccataattggggtgagatgccatgagcgcaaagctgctcacttatgcgcagttaacagccatac

SEQ ID NO: 6109 - DNA, 289 bp, Triticum aestivum
  Clone ID: uC-tsro9316025c04b1
ccacgcgtccgcccacgcgtgcggtttttcccgcggctactcaaggttgtgtcagggcaacggcaggatcatggacatggtggagctggacgaggtggagctggagaaggcccaggccaacggcaaggcggtcaccatctcggtgccggccgccggcggggaagccggcatgtagcgcgacaacgagaactgatcgctggagcaagagatgggtggatcttgatgctgtggtggtgtgcgtagcttaaagatgagctcgatgacacgaggcctaagcttggcactggcc

SEQ ID NO: 6110 - DNA, 262 bp, Triticum aestivum
  Clone ID: uC-tsro9316025c08b1
tctggctacgatgatgcaggagagctttgctacctggcttacgggttttatgattactctagagggagtggtgttggcatcccttcgttcttcctggagggattgtatcatattgcattggcatgaaaaccacaccgcataacatacatggggctagactgctacggtgctagctgatgctcccctgtaacgtatcattatggtgtctggtgagatgctggcgctctactgttgaacggaactcgagacatgaaggcagact

SEQ ID NO: 6111 - DNA, 463 bp, Triticum aestivum
  Clone ID: uC-tsro9316025c09b1
ggcggacgcgtgggccaagtgcgcccacttcgacgtcactgtcgactgtttagcccgccggccccacgggcggcatgctcgtcttcgtctccggatccctccaagtcgacggcgagcaccacatcaagttctcccagatgttccacttgatgccaatcggaccagggaacttctatgtgcacaacgacatgttccgcctgaactacggctaagaatcttaccaaaggtcgtgcttccccatggaagacagaatgttctgcaaaacaaacaattcggttgtggtttttgtgtttgatggtgaaaaactttgtggtgctttcatgccaacagcttatgaaatccactgaggatgaaacataacataacaccctgtactatgggtctgcgtctgaaattgtatcgcggcttttcttgtatcaatgctatgtggaggccatgggaaaaacttagcagttcagttctt

SEQ ID NO: 6112 - DNA, 318 bp, Triticum aestivum
  Clone ID: uC-tsro9316025c11b1
taccaccgagcgagctcaggtgttttttgagagcacctgccgttgttgccggagccggatgagcgggtgagctagcacctggcatgctgatggccgtcttgggccacctcgtctctgaggcggagcgcatggcccaagatgaacccatctggctccacatggtcctgatggaagagcactacggtgctaatataactgattggagctacaagaagagctagcgctgcgagtggcacaaatgcatgaggagactgatatcacaagggctcaaattgcgactattatgtagaggacaacggcaaaactggggaaacacga

SEQ ID NO: 6113 - DNA, 118 bp, Triticum aestivum
  Clone ID: uC-tsro9316025c12b1
gacagagcgggcggggaggattttttcagaaggttcagcgattcttgccacgcacgcagacatggtggggaaagcgccggcaggggctgcaggcggctactcggacgatggttcaaag

SEQ ID NO: 6114 - DNA, 98 bp, Triticum aestivum
  Clone ID: uC-tsro9316025d01b1
ctggcgcaatcatggaccgggggggccattgagggtatccagaggagcccacgacggaagaagaaccgatggtccccattcggtggccggaagaacaa

SEQ ID NO: 6115 - DNA, 343 bp, Triticum aestivum
  Clone ID: uC-tsro9316025d02b1
cggcacacgcgcctcggcggcgggcccttgtccgaacggtctccttgttttccctgccgagcaagctttatttatggacgtctctctgcgcggcggaacgtgaacggcattgtggctttcgcattatggctagcactctgtaatgcactcctgtctcctcctggtgtccgactgactgactgtcttacagtcgcaaccggtcatggtatcgagtaagcgtcggcctctggtattatggcactaaaaaagagcatggaaaacatcgggcgctactttttcgacagcaccgtcaacaagcggcgatgcccctaaagaacatcttggggctggcagctcagaggac

SEQ ID NO: 6116 - DNA, 409 bp, Triticum aestivum
  Clone ID: uC-tsro9316025d04b1
cggattgattcgaagaatctgattggtgtttctaactgtcatatctgtctttaaagcttcagcaccactgcaaatgcgctgactgaacctattgatgtatacagcgaatggatcgatgagtgcgagcgcgtcaacactgttgaagatgatgatggtgcatgagcatgtgtaactataatactcgtatggcctcaatgtgttgatgtcatttactgccaccgtcagccatatctgtagtagcattgtaacaatgtactggccgatcgaaacgttagtaggcagtttgtcccgtgcttaatacacaaccgatgatattgtgtacctgtatttgtaaaccttgatatagcggctgagattacacctaatctcggtacctgcaaagaaatttatacttatgcttaaataaaca

SEQ ID NO: 6117 - DNA, 429 bp, Triticum aestivum
  Clone ID: uC-tsro9316025d07b1
cgagcccaccgaattcctcgcgattcctttaccctcgcctcctcgtgcttcccctcctaggggatcgccggagaggaatcgcgacgagggcttcctcctatcagttaaatcaaagccatggagcacaaggagaccggctgccagtctcgggagggccccatcctttgcgtcaataattgtggcttcttcggcagcgcggcgaccatgaacatgtgctccaagtgccacaaggagatggcgatgaagcaggagcaggcaaagctggccgcctcctctttcgacagcatcgtcaacggtggcgatgccgcgaaagaacatcttgctgctggcagcacggcggtggcagctgctcacgttgaggcgaagacgcttattaccgcacagcctgctgatatcgctggtccaagcgagggggcgatggacaacccc

SEQ ID NO: 6118 - DNA, 409 bp, Triticum aestivum
  Clone ID: uC-tsro9316025d08b1
atctttctccatgaaccaggcggggtcatttaggaggaatgtgcccaccgtcgctgctcgcccgaatcctcaaggatcatttcactacggcgaaatcaacgtgacccaagtgtacaagctgaggaacatgccacctgttaccatcaatggcaaaaggcggaccacactgaacggcatctcttactccccgcctgctactccattgaggcttgcggatctctatgacaagaaagaagtctacacactggacttcccaaccatgccgtctgatggaccgccggcgatcggatcttctgtcatcaactcgacgtacaaaaacttcatggagaatgtgtttcagaacaacgacacgaaagttcagacctaccacatcgacggataccccttttgggtcgtgggaatggactat

SEQ ID NO: 6119 - DNA, 167 bp, Triticum aestivum
  Clone ID: uC-tsro9316025d10b1
gggcggacgcgtgggaaaagaaggattatatatagaagacctccttattttttcagacaaagaagagaagaagaagcgccaacatgcgttataatggtggtcctgggccgcctgttgaatctgtggaggaggccatcactactgaagaacatattgccgccctcctg

SEQ ID NO: 6120 - DNA, 303 bp, Triticum aestivum
  Clone ID: uC-tsro9316025d11b1
ggctatccggcgcgggagtgtaccattttttaggcagcaccgctgttgttgccggccgaccctgaggaggtggtgtccgtacaagtggcgtaatgatggcccttgggggccattgcttttctgtggaggagttcatgacggatgatcaactggttgccctcctccggttggtgggtgaacaactgcaccgtgatggcatgctggcggcgacgaaagaagaactggtgctccgggcggcacagctagaagaggaggttgatgacaggaggactaaggttggtactggtcgttgtactacaacgt

SEQ ID NO: 6121 - DNA, 250 bp, Triticum aestivum
  Clone ID: uC-tsro9316025d12b1
ggctcacgtgcgcggagaaggacggttttttcggcggatttctagtgtctatcggaccacagagactgcaagtgcatcttgctggtgtggtagacggcgctcgagaatgccgacgctacacgtaaggcggccaccatctgggtgccggactgaggcagggaaagacggcatgcaaagcgacgactagaactgagcggtggagccagagatgggtggatcttgatgctgtggtggtgcgcatgtcttgtgc

SEQ ID NO: 6122 - DNA, 438 bp, Triticum aestivum
  Clone ID: uC-tsro9316025e04b1
cgtctcgccccacgccaccggcgcagtttctgcaaagatgccgttcttgaggctcgtcgagatcgggcgggtggccctggtgaactacggcaaggactacggccgcctcgtcgtcatcgttgacgttgtcgaccagaaccgggcacttgtggatgctcccgatatggtcaggtgccagatgaacttcaagcgtctttcgctgaccgacatcaagattgacatcaagcgtatccctaagaaggccactttgatcaaggccatggaggaagctgatgtgaaaaccaaatgggagaacagctcatggggcaagaagcttgctgtccagaagagaagagcatcgctgaatgactttgacaggttcaaggtcatgttggctaagattaagaggggtggtgctatcaggcaagagattgccaagctcaagaaggaggttgctgc

SEQ ID NO: 6123 - DNA, 433 bp, Triticum aestivum
  Clone ID: uC-tsro9316025e05b1
agcataggtggccaggcaggtgtgatatgttaagatagatttcccatttttcatgaataccaccatggcgcatatggaagaagttgcttatagctttacctgacaggcaggaactctagcattttctgcttgctgcttttgtagataagaattgtgccagatagatttcgagacgacacacggaacagagataaggttgcacatagcagttatgagtctgcacattgttgtacaaattttgtgattttacatactccctctgttcacttttgtaagacgttttagacagctgaaatcgaattgttctaggtgtggtctcagatgtgtaaaacatgtgacagatgggaactccgggagcagcagataaggctgggcatagcatgtatgcaattgcatctgtcatgattagctgctggtagagaaacagatttgt

SEQ ID NO: 6124 - DNA, 188 bp, Triticum aestivum
  Clone ID: uC-tsro9316025e10b1
tgttggctgagtgctacctcgtggttttttttgagcacattatctgtttgttagactttactgttcatgtcgatctgtgcttccactatgttgtatttggtgaacatttgttctctagaacttttgtgcttcttggttatcaaattatatgttgctgatgagacagtttgactagttctagatcgcga

SEQ ID NO: 6125 - DNA, 528 bp, Triticum aestivum
  unsure (1)..(528): unsure at all n locations
  Clone ID: uC-tsro9316025e11b1
ctataaaaaattggtatgctcgccgttttctagaattctaggtttgttattattttaggctgccgatggctatactggaaatgtgcagtttagagatgctacataagaactgtgtgagcactcatgttttacaaattaggatcacaacagtgacactaaagaagtgaagatgcaagtatctgtttccgcgaagtcactcctttgtacttgtattgtttcgttttactcaagtgccttgatacaagatacttaagtatttttcggttttacctcgttccttattactaacccacaaccgtacttncggttaatgtggtctggactgtcattcaggtgcttgctggagcttccagctacaggtgccatggaaggaataaacatgatcacaacgggctctcttctcatccttcctgagtagaaactaatcggctgtgacagatcccacaatgctggctgtggccggtaggctcatgaactatgcttttagtttgtgattaataatggcggagtgacacgaaggatgacttc

SEQ ID NO: 6126 - DNA, 469 bp, Triticum aestivum
  Clone ID: uC-tsro9316025e12b1
ggagcatgatatgggtctggtggcattatctgagggtcatctgggttttactggcccagactgtctgtgtgcacatctgtctgataacatcttgagcgagccagaatgctcgagtgacacgaaaaatgccatcagaaaagcatatctacttaccgatgagaaaatattggaaaaagcagctgagttgggcagaggaggctccacggctgttactcgcatcttaataagcaggagcgatagtgcgaagctagaggtcgcgaatatgggagattcacgagcagttattagcaagaatggcaacgcagagcagatgtcagttgatcacgagcctagcatggagggagaaattatcgaggaaaaaggcggatttggttcgaacctaccaggagatgggccactagttgaagggcacttggctgatgcaagagcattgtgagaccggcgcttgaatagcacctcacctctgagc

SEQ ID NO: 6127 - DNA, 371 bp, Triticum aestivum
  Clone ID: uC-tsro9316025f07b1
aggagcgcatcaaggtcgccggtttttaggccggcaacctgggtgtctccgtcaccgccacgcgcgacaagagcaaggtcaccgtcacctccgacggcgccttctccaagaggtacctcaagtacttgaccaagaagtacttgaagaagcacaacgtgcgggactggcttcgcgtgatcgcagccaacaaggagcgcaacgtgtacgagctccagtacttcaacatcgctgagaatgagggcgaggaggaggattagagcgcattgccatattgtagcgcttgccgagttttgacacttgatctgagtacctactagctatccacctatcttatgttgtgcccctatgaacatggatggtctaattcgaag

SEQ ID NO: 6128 - DNA, 392 bp, Triticum aestivum
  Clone ID: uC-tsro9316025f08b1
gcgctgcgcggatatgaaatgcaccgttttcggcacctgcggtggaccttgcaagaagcactgatcggttcatgccggcatatgatatgttccgcctaaaattaaataaaagctgggacgagatgagcagcgtcatcgtgcctatgcgtgtgtgtgtgaccaacaaatatgtataccagaatgtcgagtcttaggcgctgcgtttgctctctcgagaaaaagttggtgtcgctgggtgtgcagctatccgggatatccttcgcgcatagacacctgtagggactgggcgtggctgccaataatgtgagctgttttgaccacgcaataaccaaaaaataatgtgttgcaaaaaacaacccttttgaagctggcgaaataaaaaaaagacaaaa

SEQ ID NO: 6129 - DNA, 98 bp, Triticum aestivum
  Clone ID: uC-tsro9316025f10b1
tgttcttaaaaaaaagagaaaggatattttttaagagaaactccgatttttccaaaaaaccaaaaagagaaaaaagaaaaacaaaaaggctataaacg

SEQ ID NO: 6130 - DNA, 458 bp, Triticum aestivum
  Clone ID: uC-tsro9316025f12b1
gccgtccgccccgcgagcggacgaggttttagggagcaccgcgggtacttctggatcagcctgacgagcgagcgagcgagcagctagcatggcgatgaccggaagcgctcagagcctaccggtcgatgcagccaggaccagagatagactgatcatcaaggtagtggaggcgcgggcacaggctctccccctcatgcgcctaacggaagcgaccgacctgcaagacgagcacgctgcgggtcctgcgccagagcacgggcacatgaccatctaatacggagaccaggcgctggagcataacgaggtccctgcagaaagggtggccgagccgatcaggatagctgccacaacaggcaccgtgccaggggacggcgaccagcccatggggaggaaggcgctcgctgatcggaccatggagaagcgcagaggaagggttgccccgcgcgcagtaccttaca

SEQ ID NO: 6131 - DNA, 183 bp, Triticum aestivum
  Clone ID: uC-tsro9316025g04b1
tccggcgcgtgcgcgggggggtttatattagagcttctttcctttcttcccgagcaccaggagagagtgagtacccacaacgggggtagctgtcgccgttgagggccagtgcgtccatgtggtggaatccatgacctaagatgcactggttgctctgctgcggtgtctgggagaacagatgaa

SEQ ID NO: 6132 - DNA, 310 bp, Triticum aestivum
  Clone ID: uC-tsro9316025g08b1
gccgcggcttgcgcattgtgtgattttcacaggctcatccaagcttttgagagcatcctcaaggaagacaaaatgggcgagacggaaaaggcacagagcttcaaaaagctccatgccgcgggtaggaagctgaccttcatgacatgctgggctcatgagcagccaagtgaggcctggccatcgctggctcgcatcgctgaggtgcacaaagtggcttctgaggagcttgacagcggaagcggactgaggaaggcaggtcgaaagaacaacccacagtccaaggctcttatcgaggaggtgtaagcatatc

SEQ ID NO: 6133 - DNA, 227 bp, Triticum aestivum
  Clone ID: uC-tsro9316025g12b1
agcgagcgagcgatcagctggaatggcggcgacagggagcgctcagagcctacgggtcgatgcatctgagcagcagagatagtcggtgcaccaaggcggccgaggcgcgggcagaggctctcccccttatgcccggagcggaagtgcccgcactgcatgacgagcactgctgtgggtcctgcaagcggagcacgcgcaaatgaccatcttttactgcggccaggtgc

SEQ ID NO: 6134 - DNA, 322 bp, Triticum aestivum
  Clone ID: uC-tsro9316025h01b1
cgccacaaaattgagcatttatttacttgtggacccgggccacaattattgagcaacagcagaaatgggacgtccatgaagtggatatgcacaatattagggatcacaggtcatgtcgtagatcgatcctgccctgtgcaagacatcagaatatggatggatgaacactggtcgaaatcatatcatatctaccggcccattttgtctggtacgggagttcagttatccggcatttggagaaaggctgtggtgggatatatgatgatagcatgccctattatccgaaagcccgcaccggctcttctggccacacaatagcatt

SEQ ID NO: 6135 - DNA, 311 bp, Triticum aestivum
  Clone ID: uC-tsro9316025h02b1
ccggcgcgtgagtgcaccatgatttttttaggaccgctgtcgctgttttttgaccacgatgagtaggggaccgcccaactggcgttatgatgaccctcctgggccatcgttcctctgctgaggagaacctgacccctgaagaactgattgtcctgcctcgctgagctgcgggaacaactgatactcatgatggccggctgacggtgacgaatgaagaactggagctccctgtggctgagctgaaggaggaggtggatgacacgaggactaaactcggtactggccgacggtttacaacgccgtgactggga

SEQ ID NO: 6136 - DNA, 443 bp, Triticum aestivum
  Clone ID: uC-tsro9316025h10b1
ggctgcggcgcgcgcgtggaacatgttttaacgggcgagccggtggttgcccgccaggagggcttagccctcttcgacacgaacggcgatggatgcatcagcttggaagagctggccgcggtgactggctccctgagcctagatccgaccaaccaagagctcaatgacatgatgcgtgaagtcgacatggatggaaatggcaccattgatatacaggagctctggagcctcattgccaggaagatacaagatggatatggcgatgaagagctcaaggaagcttttcaggtcctggacaaggatcagaatggaaatatcttcgctgtcgagctgatgacggtgatgatcaaactccgggagaagatgaccgaccaggaggttaggcacctgatcagggaggccgacactgatggcgaccggcatgtgaactacgacgaatccgc

SEQ ID NO: 6137 - DNA, 432 bp, Triticum aestivum
  Clone ID: uC-tsro9316029a01b1
gttgtggcgatgagatccctttgcttgatggatcagcgcaagagtgggtggaggccattcggggtgcaggtctgtgtgcggccgaggatatcggtggacagaagttggagaaactggcacccaagatcgacgagcctgtttacctgtgtaaggacgattgctttgtagctgcattcccttcctcgcaaatccacatcacctatggaattgattttccaaaggcgccagcgattggttgtcaatggttcaatactttcctggatgctgatatatactcaagcaagatagctcctgcaagaactttctgtatttttgaagaggttgaaaaaatgcgtgatgcccggctataaaaggaggatcactggaaaatgctatggtttgcagtatgtctggtggttggcttaacccaccacttcgttttgatgatgaacc

SEQ ID NO: 6138 - DNA, 553 bp, Triticum aestivum
  Clone ID: uC-tsro9316029a02b1
cttattcgtccggaaagctatgcaaaaagcaacaaatatcgatgatgtcgacaagactatggacgaaattaatgaacagacagaaaacatgaaacaaatacaagatgctctgtcagctcctcttggagcttctgctgattttgacgaggatgaactggaagcggagctggaagagttggagggagcagagttggaatctcaactactggagcctgttgtaactattcctattcatacgacacccgtcccaggcaaggcacaaccaactcgtactgctccacagaaagcatcggctgaggaggatgagcttgctgcactgcaagctgaaatggcattgtgatcaggctcccagtgaagaaagagttgaaatgtataaatgattggctggacggtacgtggtcgcaggcgagtctggctacacatatatttgcccgtgtgtgtataatctcgggtgggagacatttgacgaacgaggcatgaaaggctgctccagtccagtgtttatttctatctagttgcttgatggaggtctgtttcccggacataatttttg

SEQ ID NO: 6139 - DNA, 55 bp, Triticum aestivum
  Clone ID: uC-tsro9316029a05b1
aaaaaaccgaaaaactttttaacacccggcgaaccggcgcgggcggccacgatga

SEQ ID NO: 6140 - DNA, 131 bp, Triticum aestivum
  Clone ID: uC-tsro9316029a09b1
tttattaagacatcatcgcaactaccgcttgaacgccaccgccgctcaacctgaacggaacctgatacctatgatatgaatctacggtccatgctatggcacctactgggcactgtatcaccagatgccgc

SEQ ID NO: 6141 - DNA, 457 bp, Triticum aestivum
  Clone ID: uC-tsro9316029a10b1
ttttggctttagtcataaggaggggtgacgaagatactgatcttgcttttcagtgcaatgagggttattcgtatggtgttttgtttagtcatggtcggttgaggagtaaattccatggtccttcctgggaacgattggtcagtgattatggtgttcgtcctcgtgatataatgaccattaggcttgaacactatggaacatggattggtattgattttaatcgtgttggtcgtggagatgcgttgtctcctttaccttctgttggtaaggtttatttttaaggaactttttagcttgttttattgcacatgatgatttgtctgttccctcgagactgtgtaattatattttgcagctcttgatggctcgagcgactccgagatggaacttattgagagttgttattacacccgtggtgtttttcttaattatcagcagatgtatttcatgaggtgtc

SEQ ID NO: 6142 - DNA, 474 bp, Triticum aestivum
  unsure (1)..(474): unsure at all n locations
  Clone ID: uC-tsro9316029b01b1
ttcacgcgtccggaagagagagagagaaaagcaacgagacgcgaatcaacggcggcgatggctctcccggcgtccagctccaccctgtcccgctaactctcctcccgccggatccagcccacggacgtcaccgccctcgccacctggggcatcttcgccggcagcgccgccatctacctcgtccagccatttgactggatcaagaaaaccttcttcgagaagcccgagcctgaggcataagtgtctatgggggtgcacggctacagcttttgatgcgtacattntcaggatgattctctgagtttggacaacccagccaataatatacaagaccctcgtgatcccttggttgattctccatccagatgtaggtttcctcttgcgttgcatgtaaccctcaccatgggaggggaatgatcatgtaaatttattttccgtcacagaggaaagaaactgtgcttttgttattaaaaa

SEQ ID NO: 6143 - DNA, 576 bp, Triticum aestivum
  Clone ID: uC-tsro9316029b02b1
ctttactcgtccgcttgccgagaagagagagagagagatggcggcgtcggcggcgacggcaacggcggcggcggtgggggcgggggaggtgatctccgtccacaccctggagcagtggaccatgcagatcgaggaggccaacgccgccaagaagctggtggtggttgacttcactgcatcatggtgtggaccatgccgcatcatggctccagttttcgctgatctcgccaagaagttcccaaatgctgttttcctcaaggtcgatgtcgatgaactgaagcccattgcggagcaattcagcgctgaggccatgccaaccttcctgttcattaaggaaggagatgtcaaggacagggttgtgggagctatcaaggaggaactgacgaacaaggttgggctacacgcggcggcccagtaatcacctagcggagtagtattcgcctaaataaaattgtggctcaagaagcggtgcctctaatggcaccttatatcctgtgtactgcttgttactcgtggtcggtgatggtgaatacgtgtgactttattcgtaaaatgttgatttcataggagctgact

SEQ ID NO: 6144 - DNA, 448 bp, Triticum aestivum
  Clone ID: uC-tsro9316029b10b1
ttgtctcaccaagtggcgatcggcgagctcaacaaccttcctccatccagggctgcttaccagaagacctgcaacatcttcttccgcaaggacatcaagtcggccgtggcgtcccaacagaagcaacttgatatcgccaaggcgaagctgcagaagctggatcaggcatcatgaaggttcactgcaggcagaaatttgaaattgcaacttatgctgcttcatccatccacctcgctgaattctctctaatcaagtgtcttcggagtgccagttgactaggatgcaacttatatagatttctgtgtaataatggtgtgtttaatagttacgagtgcgagacacatcatttctttctgaatatggtggagactggatacgggactgttgtcacaatagacccattatgaaggtgatgcgatgatttgatggagctaaaaaaaaacaaata

SEQ ID NO: 6145 - DNA, 469 bp, Triticum aestivum
  Clone ID: uC-tsro9316029b11b1
tttgttaaatattaggccggcggggcatggaaggcaggagcaaggccgccgcgatgccgtcggagccggtgaggctcatcagctgcttcgccagcccggtggtccaccgcgccgagctggccctgcgcctcaagggcgtcccctaccagctcatcgaggaggacctcaacaacaagagcgagctgctgctcacgcacaaccccgtccacaagaccgtccccgtgctcctccacggcgaccgctccatcccggagtcgctcgtcatcgtcgagtacgccgacgaggtcttctccggccagccgctccttcccgtcgaccccctcgcccgcgccaacgcccgcttctgggcccgctttctggacgaggagtgcaagaagccgctgtggatggcgctgtggacagacggcgaggcgcaggctgcggcggcgagggagaccaaggagaagctgacgctgctggaggcgcagct

SEQ ID NO: 6146 - DNA, 280 bp, Triticum aestivum
  unsure (1)..(280): unsure at all n locations
  Clone ID: uC-tsro9316029b12b1
ctagtatgtatctcccctcaggatacagttgcctcgtcctttgtacaaattcaggaaatgagatgtagtgaaaaacaatagcatttttgttaaaaaaaagagagaatggcatttcaggctgtacctgtnaaaaaaaaaaaaaaaaaaaaaaaaaaaaaaaaaaaaaaaataaaaaaaaaaaaataaaaatacaaactaataaaaaacatataacggggggggcgcaatataggatccaatgttccgtctgctgcgcaaacaacgtcacttgctttttttt

SEQ ID NO: 6147 - DNA, 93 bp, Triticum aestivum
  Clone ID: uC-tsro9316029c04b1
ttatttaaaaaaaaaaaaaaaaaaagaaaaaaaaaagaaaaaaataaaaaaaaaaaaacaaaataaaaacacaaaaaaagaacaaaaacaaac

SEQ ID NO: 6148 - DNA, 541 bp, Triticum aestivum
  Clone ID: uC-tsro9316029c06b1
gttctagatcgcgagcgccgccctttgtttttgttttttttgttttaaagtccaacatacttttaaatttgaagaagatatcactacaattacatatgaaaaatgtcagtcactctgaacttttataagggcaaaatcactgtctacttgcttatattaaagtacaacattgttcaaactttatattgatgaatatttggtagcgaattcagcgatattcttgtcggaacttccttcttcccgcattgcctccttggccttttgcatccacttcacagcatttcttttggacttatcatttctctccacatccatcatctctctaatgcacctctcaacctcctccatctttagatatccattattgtccttccgtacacgcacacccatgctccatgcactctccatatactttgcaatggtgggttggtctgcccaatgcggaatacccacaagaggtacaccattagcaagtgcctctagtgtcgagttccatccacaatgggtaacaaagcaaccaatagccctatgtgcaagaacc

SEQ ID NO: 6149 - DNA, 436 bp, Triticum aestivum
  Clone ID: uC-tsro9316029c08b1
ttttataaaaacaaaaaaaaaaaaaaaaagagaacagaaagataaaaaaaaaaaagatgatgatgctggcctgaacatgatgagaacatgtacatacaacaggcgaaatacatggacattatgtgccattgtttctttgcgtagggggccgtgtcttaagaggacccgtttgcccctctccgctcggtgggcgaaccacttttttttggggtcccccagatctatgtctcttggacgggtttgtcccatccgtgtggctgggcaaaacgtggtgtttcccaacctaaggcctttggttggcacttccccttcttcccctggttttaaaaaataaagggccctgccgtacccccctttcaacacttggccccccatttcgggtaaggggacccccccttttctggggctattaggccggggggttgtggggttcccc

SEQ ID NO: 6150 - DNA, 327 bp, Triticum aestivum
  Clone ID: uC-tsro9316029c10b1
tttggctccatcgaggccgcggccatcatggagcacatcctggccggcagcgccttcatgggccacgccaagaaggtcaacgagattgacacgcagctcaagcccaagcaagacaggtacgcgctccgcacgtcgccgcagtggctcggcccccagatcgaggtcatccggtctgccaccaagtccatcgagcgcgaggtcaactccgtcaacgacaaccccgtcatcgacgtccaccgtggcaaggcgctccatggcggcaacttccagggcacgcccatcggtgtgtccatggacaacacccgtctcgccatcggcaacattggc

SEQ ID NO: 6151 - DNA, 482 bp, Triticum aestivum
  Clone ID: uC-tsro9316029c12b1
ctgacgcgtgggcggcaatggcaggccaggcagagaaggtgtttgtccccaccgacacggagctgctccaggcgcagtcggacctgtggcgccacaccctctgctacctcacgcctatggcgctccggtgcgccgtcgaccttggcgtccccactgccattcaccgcctcggcggcgccgcgtccccatccgaactcgtcgccgccctatccctccccacgtccaagctgcccttcctcgcccgcctgctgcgccaactcgccacggcgggcgtcttcagtgcaaccgacgccggaacgtaccgcctcaacccgctctcgtacctcctggtagacggcgtccgcatcgacggcgacgctagccagacggccctcgtgcgcgccgtggactcgcgctactacgtggaggcggctatggggctggcggactggttcaggaaggacttcgatggagcccgtccctcgccgttcgaggacgtgcat

SEQ ID NO: 6152 - DNA, 109 bp, Triticum aestivum
  Clone ID: uC-tsro9316029d01b1
tttttataaaaaaaaaaaaaaaaaaaaaaaaaacagaaaaaaaaaaaaaaaaaaaaaaaaaaaaaaaaaatgaagaaaaaaaaataaaaaaaaaaaataaaaataacag

SEQ ID NO: 6153 - DNA, 512 bp, Triticum aestivum
  Clone ID: uC-tsro9316029d04b1
gtcgttctgatttgctgaagcaggagaacagttcacttaaggaagaattgaaacaacttcaggagaagtgtgataacttgacctcagaaaatacatctttacatgaaaagcttaaagcgcttgatagtgagaaaccaaatggaaacttgtgaagcagggcctcgctttctgactgctgatataaattggaggtgacatgataggccggagataattaggaggtgttcatgtgtgcaattagatttttggctgagatggtaggattgtatcataggattcaacatgatggctacagattcttcttcttccagtcgtggcagctgcggtgctctatggtgtgttttttttcctgcttttatgtgagatgctaccttagcagtatgcaaagatccccaagttatatttgagactttgcgggattagcttataagatgcttgttgtagagctgctggttgacctgaactgatgctttgctatagcgatgatttataacattcagagttactttacc

SEQ ID NO: 6154 - DNA, 645 bp, Triticum aestivum
  unsure (1)..(645): unsure at all n locations
  Clone ID: uC-tsro9316029d05b1
tttctctgatctatcaaagattcagttgagagaatgtgacaacaatcactcgagaaacttcatggcagtactaagagccctaagggagagggattcttcatgttaccagctgccccgtgtggtacggcaaggcgagcagccaagagaaggcttcctacttctgtccaacctcgtcgaggatcagatggcaggaacaagcagttacatggactggatactccaaatccaccgccaaacacagagctcgtgatgatgtacggcggatgttccagaaatttttgtttttgtgtaaactgctgcagattcggctgctgtgccagtccccggtcgccctcataaccattggaacaaaaaatggcgagccagccgtgttctacaaatgccatcctgttagcagcagcagcgctctcgctgtcggcgagcaatacaaactntattgttaatantttcgtcttgtgattatttntcgtgacgagacaaggatacacaagctgttgtaccagaatatgtaggcagcaccttttgtcaaatgtacaagcgtttgagtctccgttagggtttgaacgcatttgtatcgccacaatcttagctgcaagatgtgaaaactttgttgaaaaaaaaaaaaaaaaaaaaaaaaagggcgcc

SEQ ID NO: 6155 - DNA, 134 bp, Triticum aestivum
  Clone ID: uC-tsro9316029d06b1
ttctttcgtccggttcatagagtcaggattcgagaaaagaaaaggcactgtcgattggttgaatgatctccatgtgtactgccgctcccgcacggggatctctctgaattaatcgacataagcttctaccgttt

SEQ ID NO: 6156 - DNA, 292 bp, Triticum aestivum
  Clone ID: uC-tsro9316029d07b1
ttgttttactgtgcttaacttatggcgacgacggcagccttgttatgccgggctatcattgtgcctctgttgtcaactctatttcatttttacactgtcatgcttggagtttaatgcaagtgtattaaggaataatgatgattattgagctgggtagtccttgtggtgcagcttgtatagttctaaaaatttctggtatctaaaaaaaaaaaaaaaaaaataaaaaaataaaatatcaaaaatcatagtgcaaatctcaaaaaagtttcttttacactcgatatcaaacctg

SEQ ID NO: 6157 - DNA, 507 bp, Triticum aestivum
  unsure (1)..(507): unsure at all n locations
  Clone ID: uC-tsro9316029d08b1
tttgttgatttctattccaccatcaccagggccaggtttgaggagctcaacatggacctcttcaggaagtgcatggagccagtggagaagtgcctgagggatgccaagatggacaagagcactatccatgatgttgtgcttgttggtggttccaccagaatccccagagttcagcagctgctgcaggacttcttcaacgggaaggagctctgcaagagcatcaaccctgatgaagctgttgcctacggtgctgccgtccaggctgcaatcctcagcggtgaggggaacgagaaggtgcaggaccttctcctcctggatgtcaccccactgtctcttggtcttgagactgctggaggagtcatgactgtgctcatcaccaggaacaccaccattcccaccaagaaggagcaggtcttctccacctactccgacaaccagcctggtgtgctcatncaggtgtttgagggtgagaggacaaggaccagtgacaacaacctgctcggcaag

SEQ ID NO: 6158 - DNA, 148 bp, Triticum aestivum
  Clone ID: uC-tsro9316029d10b1
tccactcctccgaacgaatgtaagtgtactgcggatcgatttgaaaagaatctcacccgctggaagggtaaaaaaaaaaaaaaaaaaaaaaaaaaaaaaaaacaaaaaaaaaaaaaaaaaaaaaaaacacaaaaaaaaaaaaccaaaa

SEQ ID NO: 6159 - DNA, 407 bp, Triticum aestivum
  Clone ID: uC-tsro9316029d11b1
tttctgacgcgtgggcggccgcgtggggtcgctgctgcgaccaccgcacccatcgttcacaggttctccggtagtcaaaaggacttcttcaagaatttcgcggtctcgatggtgaaaatggggaacataagtccattgacgggaagggctggggagattaggaacaactgtcggagggtgaacaacaaaccctattgaagaatgagattaatgttatgagttgtgaactcattgtccttgtgtatatcattcttttaattaattctaactgtaagtgttcccttattattttctttggaaacacacgaggcctaaacttgagactggccagtcttttacaactttagtgtctgggaaaatcccgctttcccccacctcaatcgcctagcacttcatgcccctttctc

SEQ ID NO: 6160 - DNA, 453 bp, Triticum aestivum
  Clone ID: uC-tsro9316029d12b1
tgtctgctgccgtcgctgctgctggtggtggttgccgccgccgcgagccgcgaggttgctgctctccccgacgcatctgctctccgtggtcgttgccgagcaggggtggctgctgggcgtcgtgtcgctagcagtgttggtacttctggttcaggatcctttaacccacaagttgtgccccgcggttgaggtaaatcctgaggacgacatgcatgggagtcttgggagtagcatcttcaccgttttcacttcacgaaactcacacctattgtcctttaggaccgtgttttgagaacctagtatagttgtactttactacctgtggtggttcatcttgaattggagagataccctcttggtctgtatggcttagctaatttccccttaagactaacgctatcgcctaaagttaccgaggatgttctcggctatggtattgtagccttgtgctct

SEQ ID NO: 6161 - DNA, 563 bp, Triticum aestivum
  unsure (1)..(563): unsure at all n locations
  Clone ID: uC-tsro9316029e01b1
ttactgggcgcacgacccccacctcctcctaccttcttccccgcacgagttcgcacgcgcatcctcgcagccggcgcccccatcccgtggccttcttcgctgccggcgtaccccatccagccgctttcttcgccgccggcacgccctatcccgccgtctccttcatcatcggcgcgccccatcctgcgcccttcttcgctgccggcgcgccccatcacgcggcccttctgcgccgccggcgcgccccatcccgccgccttcttcgtcgtcggcgtgcccttcttgcggccttcgccaccacctcccgtcccactccaccctccctcgttcctccacctccttgccccgatccagaccgcccagaccccgacgcctccaccaacggcgcgcgcggacctccctccctctaccgcctccctcctctccagtggctggcttcccaaagcgccgacgcgcggccatctccccaatccccggatcagctagggggatcccgcgctcacagncgaccacagggccccgcgctaccatatgcgaactncgcggatcccggcctcctgatg

SEQ ID NO: 6162 - DNA, 354 bp, Triticum aestivum
  Clone ID: uC-tsro9316029e05b1
ctcactcgtccgcttctcctccccactcagtcctcggttcccggcccggttcggttcgttagggtttagtcgtggggaagaggaggaagaatggcggacgtcgagtaccgctgcttcgtcggcggcctcgcctgggccaccgacgaccagtccctccagaacgccttctccaagtacggcgacgtcatcgactccaagatcatcactgacagggagacgggccgttcccgcgggttcgggttcgtcaccttcgcgtcggacgaggcgatgcgccaggcgatcgaggccatgaacggccaggacctggacggccgcaacatcaccgtcaacgaggcccagtcccgccgctccggc

SEQ ID NO: 6163 - DNA, 459 bp, Triticum aestivum
  Clone ID: uC-tsro9316029e08b1
ttgttacgcgcccgggattatcccaacagaccgccatcagttaggatgacttatgcgatgtggtatccagacgggtatgctggcgggcgtgtgtgcatttctattgttgatgcacctggtgatgacccgaatggatgcgagcttgcaagagaacggcggacacctgtgcgcacagttgagagcatagttttgagcattattaggatgctctctaggccaaacgatgagactgcagcagatattgacgggggtgaagactggagagaaaagagggccgaggtcaggagactggtgaggagccttgatggcatgcttcaagaaatgctgtgcatatggaggagcatacgggggagtccacaagcgctggaatactataggtggcaccaagatggcgcacctggtgccagcacttggactattccccatgtaatgttccattcatggtgagtcgaatggtga

SEQ ID NO: 6164 - DNA, 549 bp, Triticum aestivum
  Clone ID: uC-tsro9316029e10b1
tgttgccaagaagaagtgtccaattgcccttgaagaacggaatgatcgcaagtcatcacaagccgctcattcttcatctattaggagtcaaagggatatgaagagtagcattcgtgaggaaatgtttttctctggtccacaaccttcgcctgagcctaggaaccgaaatgttcctcttctttcgggctttgaacgtagagtttgggttgagcttcttgcttggcgcttccatacaggaaagttttgggctttgtataagctcaagaaacatttgttcagtgctttgcattatcaggattataacatggttatgtccatttacaatgatatggacatagataattatgttttccaattcggttgttgggctgattgtccctcttggagatcttgtatccatcgtggttctatttctggcaactcaactcagccactttaccattatcaaggaactccacgtgagttccttgatgaagggtctgagactgggtctgatatagaggagcagatggccttcggttctggagtgccctcttgtccaattgaagc

SEQ ID NO: 6165 - DNA, 491 bp, Triticum aestivum
  Clone ID: uC-tsro9316029f05b1
gttttagatcttggcggactcgaatccaatccaatccaatccaaggcggaggtcgcgatcaaacctaccggagatgaagttcttctcggcgttcgacccgtggccggtgttcttccgccgggagtggggccgcacctggcccttcctcgccggcttcgccgtcacgggggccctcatcaccaagatgaccgccggcttcaccgaggaggacctcaagaactccaagttcatccaggcgcacaagaagaagtagtcgccgcccgcccggtccgtgcgacgacaggtcacaggggcagcagctgagtaaccagcatgtgttcttgatgcagggagccagtgctcaccctcactattgtgattgagctattatgttttttttttcaaatccaactgcatgcattttctgctgctctggtttgcaatgtaataagcaacatttgaatcgtttgatacaagagaaaaacggctttggataaagtagctgccatggg

SEQ ID NO: 6166 - DNA, 117 bp, Triticum aestivum
  Clone ID: uC-tsro9316029f06b1
gaaactactccagtttacaggttgagcagctgcgcatgagtcgtggtttttggtttgtgtccaccgattattatttggagatattatcacgattcatagaacatattttttatgttc

SEQ ID NO: 6167 - DNA, 324 bp, Triticum aestivum
  Clone ID: uC-tsro9316029f08b1
tttgttgatcacgccctccgtcctctccgagcgcctcaggatcaacggctcgctcgctcgcagggccatcaaggacctgatggagagggggctcatcaggatggtgtcaatccactccagccagcagatcttcaccagggccacaaacacctgatttacctcatgtgttggctgcctgttttctagtccagtagactgagatgtcgctgttatattgacgttcattatgttcagcgaggcactttggcactcgtgccacaagtatgttgaattgcttttgagtttttggtacaatctaagacgcaatgaaatctaccttatatt

SEQ ID NO: 6168 - DNA, 395 bp, Triticum aestivum
  Clone ID: uC-tsro9316029f09b1
acacagggcgacagcaccaacgaataagcgggtcgacccaaacacttggttaccaccgccgacccggcgcgagagacgaccaagaatcaacaagcaccgcggacgcagggggatgaacgagatgagggagagggcgcacaacaggagggagcaaggccactccaggccaaagattcgcagcaggaggacaccaaacgaaagacgaaatgagtgggcggcccggctcgcagggcgaacaactgaaccgagatggcagcctgacggggacaaaagaagaacgggggacccgggcggcagagccaaaagaggagcgagatgacaccaagcccaaggcaggcacaggacgcaaagaacaacaccgtgactgggaaaacccaagagcggcccaacagaac

SEQ ID NO: 6169 - DNA, 590 bp, Triticum aestivum
  unsure (1)..(590): unsure at all n locations
  Clone ID: uC-tsro9316029f12b1
tttttgtcagacttcctcggccggttgcatctttagggacctgcttcatatatatcgaattattccgaagacatcagtttaaatcgaggcatcttggaaaactgctgctttatctccaatttttttggtggttgctttgtcgccaaacatacaaagaaaattcgaagttcgctgccggacgcctggatgaccttgtagcgctattgaccagtgaaacaatggaaaagaagttatgctgcgagtacttgaaaagtgaaaaaaattacaataattagaactgctgaaacgcctttccgtatgcactttgtgttgcttcctgggtggtcaccagtgattcggtagaacgttacctggccattgtgcgaacgaccggtgtgtaatactcatttccaaactgccattcccctgttgaggaaggctaccgcaccaacaactggtgaactgagaccgtttggttgtataacgtgtacgctggaggaaacaggaaaagaattcacagaatcgctctatacttgatngtatgaagtttgcttggtcagatgcttgcccatgaaatatgattgcacttgatcgtgttttaagctcatgat

SEQ ID NO: 6170 - DNA, 97 bp, Triticum aestivum
  Clone ID: uC-tsro9316029g02b1
ttattaaaaacaaaaaaaaaaaaaaaaaaaaaaaaaaaaaaaataaaaaaaaaaaaaaaaaaaaaaaaaaaaaaaaaaaaaaaaaaaaaaaccataa

SEQ ID NO: 6171 - DNA, 273 bp, Triticum aestivum
  Clone ID: uC-tsro9316029g04b1
gtgtgtccgcgcgccgaggcacatttggggccggcgcggcctttgccttgatcaccggtgtgctcaccgggttctactactacaacttctccaaggcacgggtggcctaccaacgcccggaggccgccatcgacatgagccggtatagctgaagattggtgcctggttgaggggctactcgagtctctatgaagctgctgtaacgcattgtggggaacgattcactatgaactagctcaacagttttgataaccgttatgtggccattttttt

SEQ ID NO: 6172 - DNA, 546 bp, Triticum aestivum
  Clone ID: uC-tsro9316029g05b1
ctaccagctccagaggtggctgtaaactattacatgaatgaggatctctacatgtttgatgagtttcaaacatcaagagctccaaattctaggaggcctaaagttgataacttgtatgatgtattcgtgaatgtacgggacgatgaggcggagcattgcaagacaatgaaggcttgtcaaacgcatgaaaccctccgttctcctcatgccgtgcagagctcagtagaagctgatgcagaatgattctgtcaagaagtcccttggaaatgaagactgaccggttgtacgtacctccgtgctatagcgtcgtagagtatcatactaaattttggtgatatattgtattccatcctttttctcccttctcttcgtatgtagacattagccagactttcgtacttgtgaatcttacatagggaatataggtttataaatgcatcacagatttacaatgagagacgtgcattgtttgtcaggcattaccgcgggccatgaacggtgtaatccagctgtgttgtggtctgtgtaacatcaaggggtttgatg

SEQ ID NO: 6173 - DNA, 524 bp, Triticum aestivum
  Clone ID: uC-tsro9316029g06b1
cttgtatctctccatgacgtttccgcgcttatccaacctcaccattgaccattgcgtagatctgaaggagctgccacctagtgtatgtgaaatcagctctctggaaagcatctccttgtcaaactgccatgacctcacagagctgccatatgagctgggcaagctgcactgcctgagcatcctacgggtgtacgcctgcccggcactgtggaagcttccaccgtcggtatgcagcctgaagaggctgaaatacctggacatatcgcagtgcattaaccttacggaccttccagaagagcttggccacttgacaaacctagagaagatcgacatgcgggaatgctcgcggctgaggagcctcccgaggtcctcctcgtcgttgaagtccctcgggcacgtcgtgtgcgacgaggaaacggcgatgctgtggagggaagccgagcaggtcatccccgacctccgtgtgcaggtagcagaagagtgttacaacctcgactggcttgtagactgatgttctggatgct

SEQ ID NO: 6174 - DNA, 502 bp, Triticum aestivum
  unsure (1)..(502): unsure at all n locations
  Clone ID: uC-tsro9316029g07b1
ttcgtcacgcgtccgctctccctctccctctcccgtgccgccttcacgatggcgaccgccgacggccagtcccagcctgcggccaccgaaccctccccatccccggccaagcgtaagacggacaccgactccgagatctctcccctcgacccacccgccaaggccgcccgccccggcgctgacgaggaggccgccgccgaggccaaggcccgggtcgcggacaaggggaagggcaagatggtggtcgatgaggaggaagaaggcgacgaggaaagcgacgaggaggaggatgacgaggaggtcgagggagatggcgacgagagtgacggcttatgcgaggatcccctctccgaggtcgacctcaacaacatcctgtcctctcggacccgccgctgctccccagcacagcctggggcgtacctggtgccaccagaggaggcagctgaggatgacgaggacgatgaggacgcatacgtcgacatggcttccggngaggagagcg

SEQ ID NO: 6175 - DNA, 376 bp, Triticum aestivum
  Clone ID: uC-tsro9316029g10b1
tctgttcacgcgtccgctttgtttgggtccttgaagtaggccttcttagaagcacaaaggagatgtggagatttgggttaaactctccatgtgtttgtacaaacgaaacagttatattgattgttgattacttatcaaaaaaaaaaaaaaaaaaaaaaaaaaaaaaaaaaaaaaaaaaaaaaaaaaaaaaaaaaaaaaaaaaaaaaaaaaaaaaaaaaaaaaaaaaaaaaaaaaaaaaaataaaacaaaaaaaaaaaaaaaaaaaaggggggggcctttttaaagtacccaattttacctccccgggctggaaagctaaaattttttttttggggaccctaaaataaaataactgggccggtttttaaaaaccctg

SEQ ID NO: 6176 - DNA, 102 bp, Triticum aestivum
  Clone ID: uC-tsro9316029g12b1
ttgttcattagcgttataaacttgtcaacaagtctataacttggtagttttgccaagctatatttgctgcaaggacaaagggcaactccaacgggttgacct

SEQ ID NO: 6177 - DNA, 439 bp, Triticum aestivum
  Clone ID: uC-tsro9316029h01b1
ttcacgcgtccggggttggaaagcagctcgtcaacattccttctttcatggtgagggtggacactgagaaacacgtcgacttctcgctcaccagcccccttggtggtggccaacctggaagagtgaagcggaagaaccagaagaaggcctcaggtggtggtggtgatgacggcgaggaggaagactaagcgctcagcctcgacccgcaaacttccgttgcagaaatgttgagattgccttgtggatcttgcaacgggaaatgattcaaactttggttcgttcttagaaacttagtggtgtagagctttcgttgcttcagaatcatttggctatcgattctaaaattaaacttatgtttgttggttctgcttggttagtgactaccgagcagaagaagtgaactcagtgatgctgctttcgtttttgtgaaccaaacgta

SEQ ID NO: 6178 - DNA, 175 bp, Triticum aestivum
  Clone ID: uC-tsro9316029h02b1
tcgttgtttcgtggggtgtaagagatgtgcgttctgacttgtggagttgtgttgttaatttacacacgttacatgtagtaagtactacttgtatttgtacttggagtaatggtatgtaagagaaataatgtgtgaaaaaagagtacatgacgaaagaatgaatgtgattgataac

SEQ ID NO: 6179 - DNA, 78 bp, Triticum aestivum
  Clone ID: uC-tsro9316029h04b1
atatttaaaaaaaaaaaaaaaaaagagaaaaacaagaaaaaaacaacaacgataatgctgatgactagaccaagaagg

SEQ ID NO: 6180 - DNA, 97 bp, Triticum aestivum
  Clone ID: uC-tsro9316029h06b1
cgtacgcccacgcgtccggccacgcgtccgcccacgcgtccgcccacgcgtccgcccacgcgttcgcccacgcgtgcggactagttctagatcgcga

SEQ ID NO: 6181 - DNA, 435 bp, Triticum aestivum
  Clone ID: uC-tsro9316029h07b1
tcgtgcctcgcagcatcaccagccctgcttcagcagttctattgtctctgtgaaatcgaccgcggcgtggaccatgagctacccggcaccgggcaccgggtacccgccggcgggccaggaggcctacccgcctccagggtacggcgcgccgccggctgtcgccgctaactaccagcagcaagccccgccgcaggactcgcaggaccgcggaggcgacggcttctggaaaggatgttgtgctgctatttgctgctgctgcctgctcgacatgtgcttctgatcacaagttcctactgccaacaccaggaaatcccacgatgatctactcactcagagctgctcatagctgatcatggttatttctattgtagtatttgtgctgtccgggtggagatttgtatgggctcgttgtgctagttaatactgcatctggat

SEQ ID NO: 6182 - DNA, 529 bp, Triticum aestivum
  unsure (1)..(529): unsure at all n locations
  Clone ID: uC-tsro9316029h09b1
ttcttcacgcgtccgcccacgcgtccgggtgaacttagtgaaccaatgtggcctattgaggcaaggaatgctgcaattgcaaatagctactttgtcggatcaattaaccgggtaggcacagaggtattcccgaacccattcacttctggtgatgggaaacctcagcatgccgacttcggtcatttctatggatccagccatttctcagcgcctgatgcttcctgcaccccatcgctatcgcgctaccgagatggcttgatgatatctgacatggacctgaacttatgccgccagatcaaagacaagtgggccttccgcatgactgctcggtatgacatgtatgctaacttgctttcagagtacttgaagccagattttaagcctcaagtcatcgccgatccgctgataaataagagggcttaattctggatcagttgggtctaagcagacgaagtcgatgccctctcccttcttttctgtatatgtngtataattataaaaataaatcagtaaacatcttttgatcaaa

SEQ ID NO: 6183 - DNA, 484 bp, Triticum aestivum
  Clone ID: uC-tsro9316030a02b1
tgagcctttcttctactggtgagtgctacagctcaactgattgtggttgttggagtttctgaacctttggtcagatcaagagatgatgaagttatgaccttatggactgatgatcaccatgtttggttctttaggctcgacatcggagagggcaaggagatcaacctcgaggaccgatgcccgcggtcgaagcttctcagccagtgcatcaagtatcttggtccggtaagcttttgcaaacagtttagtacatgggataaatttagagaatgcaagtccatgagagttcagaaggactaatgattcaaactggatttttgttgtgcctgcagaaagagagagaggaatatgaggttgtgatcgaggatggcaagttcatgtacaagaacagcaagcagatcctcgactcctcggcggtccgagggacgcaaagtggatctttgtgctgagcacatccaggaatctgtatgttgggcaggtaatg

SEQ ID NO: 6184 - DNA, 308 bp, Triticum aestivum
  Clone ID: uC-tsro9316030a04b1
gcggaattggggggtcgaacgacgcgtgtgaccacgcgtccgcccacgcgtgcaggggcgcgtacgttccattgaacaaaagaacatgcacgtggaaaaccaggcgaaaacgaatgcaccacagacgtcagacaaatggacgcacgcgacgcaaaagaaaaaagaggagacacgaaacatcgaccgaaagatacaccaccccaaaggagggcagcataaagaaagcatgtaacgattcacagactaggacataaataccgcagcagaatagctaaccgaatcgaactaaggagctcagagacacaaag

SEQ ID NO: 6185 - DNA, 202 bp, Triticum aestivum
  Clone ID: uC-tsro9316030a05b1
gggaaagccggcggaagcggggagggttacagggagcgacgccaggcccgcgggcgagcgggcacaagagggccggcgcaccgagcacgaaaaaaaaaaacccaccggggaggaccacaacaacaagagagagccgccgggggcgggcgaccccagaggcccgacgcgccccgcgcgggcaacacggcgaccgaaccatccc

SEQ ID NO: 6186 - DNA, 198 bp, Triticum aestivum
  Clone ID: uC-tsro9316030a06b1
cgcagagaccgggccggaatatctgggtttttccacacgcgcctcccggccacggatatggcagcagatccggtgaagctcatctgctgcaccggcagcccactggatcaccgacccgcgatgcactatggacttgagggcatacgcaactagatgatccagaaggacctcatcagcaagatctaccacctgccaaca

SEQ ID NO: 6187 - DNA, 412 bp, Triticum aestivum
  Clone ID: uC-tsro9316030a07b1
gctgggctcaactacgaggagaaggatggagcaatcgatatgatattggaattgtcaagaatttccaacaaatattcggagttgacaaatctcccactacatggctattaccgggcaaacctgatattggtgatggtcatcgattccccaccttggcttcattaacctctcttgctgaagaacaagaacttgctcgagctgttcaaccttgacctccactagggagcattaaccaagttccacgctttaaccaaccttttctgacccccgcccgcattctcaagctacattaacaacatgacaatcggataacggatgggcaggcagtgcagtgctatcgatgccacaactgatgatcactaatcaagatgaatgtgtagcatggaccatcgatgacacaatgataacaatc

SEQ ID NO: 6188 - DNA, 88 bp, Triticum aestivum
  Clone ID: uC-tsro9316030a08b1
gcgagaggaggcaagccttcgagcgggagcaggcgacgccccagcaacggtaaagagagacgaagaagcaagccaaaccccgtcgaca

SEQ ID NO: 6189 - DNA, 100 bp, Triticum aestivum
  Clone ID: uC-tsro9316030a11b1
cctcgagagttggtaccaccccttcccatcccgaacaggaccgtgaaacgactccacgccaatgatagtgctgcaaccagtgtgttgtctcattgatcat

SEQ ID NO: 6190 - DNA, 322 bp, Triticum aestivum
  Clone ID: uC-tsro9316030a12b1
tttattttcaggcatatgggagtatatagtatctaagttatcttctttacatgttgtttactctattttttacttcccatgcactatggatttgagggtatatgcatatttatgttccggaggtaagtcatatgcagattttactactgaccatgatggtcgacttgctttttttccttttgctgaattccacaataatttcctctatacttcccctttggtaaagtgttccatgtaaactttaggtaagagtatatagtatggatgcatatatatgttattcctaaaagtcaatctttcctatggtcgatggcagatcact

SEQ ID NO: 6191 - DNA, 405 bp, Triticum aestivum
  Clone ID: uC-tsro9316030b02b1
tctttacgcgtccgcccacgcgtccgaccctctctccccagccccacccgatttccaatcatggcgctcgcgtccggcacggcgacccgcccgctcctgggccgcctcccgggcacggcgcggccccacctcgccgtctccccctcgccctccgccccggcctgcacggtccgcttcgccgcccgcagcgggggctcccgcgccgtctccctccgcgccttcgccccgccagctgctgcaacagcaacgcctggtagtatcgcaccagctatctcattgacagagaaggccttgaagcatctgaacagaatgaggtccgaaaagaatgaagatctctgtttgaggattggagttaaacaaggtggatgttctggcatgtcttacaccatggagtttgagagccga

SEQ ID NO: 6192 - DNA, 250 bp, Triticum aestivum
  Clone ID: uC-tsro9316030b05b1
cagggaaggaggcaacaacgccgccggccgctacgcaaaaaaagtctcgagaccagcggagacgcggcgcgagagcacaccatgacacagacagcaccggtgacgctggggggagaccgagaagagacggtgccgcacaaacgggggaaacaagggccctccggggccatggccccccgggggaggagcccaggacaaaggaggaacggatggcccgcctccgttggcggggggaacaaccgaaccggga

SEQ ID NO: 6193 - DNA, 423 bp, Triticum aestivum
  Clone ID: uC-tsro9316030b07b1
accacgcgtacgaccctgtgtaccctgtcccacccgatttccaatcatggcgctcgcgtccggcacggcgacccgcccgctcctgggccgtctcccgggcacggcgcggccccaccttgccgtcttcccctcgccctccgacccggcctgcacggtccgcttcgccgcccgcagcgggggctcccgcgccgtgttcctacgtgccttcggcccggcaggtggtggaacagcaacgcctggtagtatcgcaccagctatcttaatgacagagaaatggcttgaagcatctgaacagaatgaggtccgaaaagaatgaagatctctgtttgaggattggagttaaacaaggtgggatgttctggcatgtcttacaccatggagtttgagagcccaggaagcgccaaccctgacgaatcagtcatc

SEQ ID NO: 6194 - DNA, 271 bp, Triticum aestivum
  Clone ID: uC-tsro9316030b08b1
ccaacgaaccgccgcgggaggtgaccaccattcagcaagcaccgccgatgctgctggcggacgccgatgaggaggtgccgccccaacaagtggcgtcatggtgccccggggccaccagagctctgcggaggagctcaccacgaaagaagaactgcttgcccccctccgcccgccgggggaacaacagaaccgcggtgtcagcccgccggggaccaaagaagaacaagggctccccggggcagaactgaaagaagaggttgatgacaccagg

SEQ ID NO: 6195 - DNA, 311 bp, Triticum aestivum
  Clone ID: uC-tsro9316030b09b1
tatcagcgttatgattaaggtggaaattacataaattaaaaaggatcgaaatgatggaatgacagaattaagtaacaaaacgaaaggaataaaaaatgcataataaaagctcaaaaagcggaatataaaaaatgagatattacagaaaaaacaaaaagttttaagagtcagacaaaataaaagttatacaacgtgatactaagcagcagacaaataagatcaaaaattgacaatgaaactctgagacagaatgacctgagatatgtgcaatatagctactctaacaagaactaaaagccgacgatttacaa

SEQ ID NO: 6196 - DNA, 281 bp, Triticum aestivum
  Clone ID: uC-tsro9316030b11b1
agggaaggaagcaacaacgccgccggccgctacgcaaaaaaaagcgtgcagaccaccggagacgcggcgcgagagcacaccagtgacacagcacagacacgcgtgagatcgccgcgtggcgagacccgagaagagacacgtgcccgaacaacgggcgaaacaagggccctgcggggccatggtccctcgggggaggagcccaggccaaaggaggaacggatggcccgcctccgttggctgggggaacaactgaaccgagatgaaagcctgacggggacaaa

SEQ ID NO: 6197 - DNA, 239 bp, Triticum aestivum
  Clone ID: uC-tsro9316030b12b1
tcctcacgcggccgcccacgcgtgcggccacgcgtgcgttatattgaaaaaaaagaagcagccggaagacccagaagagaaaagagaacgacaaacaggcgaaaacaaggcccaaaggggccacagaaaacacagaggaggagaccaagacgaaagaggaacaagaaatgcccaacaacggggggcgggtgaacaagagaaccgcgatgccagccggacggggacgaaagaagaactgg

SEQ ID NO: 6198 - DNA, 285 bp, Triticum aestivum
  Clone ID: uC-tsro9316030c01b1
tttgtcgcgtgggtgctccttctgtccacatttactcaagctcaaacagagaaaaggttcaacaacgactacatgggtcttttgcacaagtaccaagtccagaagaggttcaacaacgacttctatggcatgcttggcaggtatcagcagcggccatacaaaaggatgatgtacggtgactactacaactggctaaggaactaccaagatcgcctaacctactagagagacagagagcttgggtaaagatggagctgttataaaaaaagactggccctatgcacc

SEQ ID NO: 6199 - DNA, 260 bp, Triticum aestivum
  Clone ID: uC-tsro9316030c02b1
tgtgtacgcgtgggtgctccttctgtccacatttactcaagctcaaacagagaaaaggttcaacaacgactacatgggtcttttgcacaagtaccaagtccagaagaggttcaacaacgacttctatggcatgcttggcaggtatcagcagcggccatacaaaaggatgatgtacggtgactactacaactggctaaggaactaccaagatcgcctaacctactagagagacagagagcttgggtaaagatggagctgtt

SEQ ID NO: 6200 - DNA, 287 bp, Triticum aestivum
  Clone ID: uC-tsro9316030c03b1
tccacgcgtccgcttatataaaaaaaaaaaaaaaaaaaaaaaaaaaaaaaaaaaaaaaaaaaaaaaaaaaaaaaaaaaaaaaaaaaaagaaaaacaaaaaaaaaaaaaaaaggacaaaaagagcaaaaaaaaaaaaggggggggccgccttaaaggatcaaattttacttccccggccatgcaaggtaatagctcttctttagggccccctaaatcaaatcaacgggccgtggtttaacaccgctgggacgggaaaaaccctggggtgccccaagttaaccgccttg

SEQ ID NO: 6201 - DNA, 392 bp, Triticum aestivum
  unsure (1)..(392): unsure at all n locations
  Clone ID: uC-tsro9316030c04b1
tnctcacgcgcacgcaaaaatcttcactggcaatgcactatatacaaaataatagtacaaacagctatgggtaagtcaaatgcattggctgcaacactcggtgcttgtcatggcggtgtacctcgccacactagagggtgtacatggcgtctgcggcatgtcgaatgatgaattcaagctttgccagcccgcggcggcagtgaataacccgacagagagtccgtcgggtgagtgctgtgctgcgcttgggaaggccaatctatcatgcatttgccgctacaaaggcatcgccggcatatggctgaaaatgtaccacatcgacgcaaagcgcgccatggctctgcccggcaagtgcgggctcaccatgcccaacaactgctcgtgatgattgg

SEQ ID NO: 6202 - DNA, 329 bp, Triticum aestivum
  Clone ID: uC-tsro9316030c06b1
ccggaccggcattctcctggccgtcccacgcaaacctcaataccaccaatgaaccgggagctgcggacaccttttcacaaagcgcaccaattttgctggaggttacccgtggagagtacatgtacgtacaagtggccagaatcatggcactgtcggagccattggatcatatggggtcgaatacatgacgaaaaaggccctgctggcccagctccggacgctgggataacaactgccaccgggcatgaccctgacaggaaccaaagaaaaacttgcattgccgaatgtagaacttaaataggaccttgattacacaaggcctaaccttg

SEQ ID NO: 6203 - DNA, 402 bp, Triticum aestivum
  Clone ID: uC-tsro9316030c09b1
ttaccacggtgtccttctcgtcggctacggggcgtccggcttcgcgccgtcccgcttcaaggagaagccctactggatcatcaagaactcgtggggtgagaactggggggacaaggggtactacaagatctgcaggggctccaacgtgcgcaacaagtgcggcgtcgactccatggtctccacggtgtctgccacgcacgcctctaaggaggagtaggctctgttctgatctgatcggcagccctcctggagccgatcttggtttcggtgtatcgctagaaagaagctttaatatgtagtagtcggctaggctccatcgtcgttgtggtatcatcagcagcgaagatgcgaagccgcaacagaatgctcgctgtataacttatgcatttgctaaatttgcta

SEQ ID NO: 6204 - DNA, 498 bp, Triticum aestivum
  Clone ID: uC-tsro9316030c10b1
ttggcacacatgcaagccatccccttccggaggtactgtcgtggtgttggacgcacagcccaggtgaagaaccgtcagcccaatggtcagggacgctggcctgccaagtctgctaagttcgttctggatcttctaaagaatgctgagagcaatgctgaggtgaaaggtcttgatgttgatgctctctacatttcacacatccaagtgaaccaggcccagaagcagcggcgccggacctaccgtgcccatggacgcatcaacccctacatgtccaacccatgccacattgagctgatcttgtcggagaaggaagagccggtgaagaaggaggctgagtcccagattgccaggaaggcctagagaagggaagctttacataacctatctgcctttttcgttgagcagtttggagcatcctggcctgcctgagtcgaaatttttggccaattatctgtcgtttaaatactgctaggctatactttgtgaaaccttttgatg

SEQ ID NO: 6205 - DNA, 354 bp, Triticum aestivum
  Clone ID: uC-tsro9316030d02b1
tttttacgcgtccgcccacgcgtccggggcgaagcgccatgcgggagagagggagaggatcagaggaggggcttagaattagattgatcgattagctatcaaactggcggtgccagagttagctgctgcttaatttgctgacggaatggctgatgctttcgttctggaactgtgggatgactgataaacgtacgctgccacgcgcgaccgatacatgcatgtaaatcttgtttaacaccttattaattgaaatggttaccagtttgtaaaaaaaaaaaaaaaaaaaaaaaaaaaaaaaaaaaaaaattaaaaaaaaaaataaaattaaaaaaacaattatattaccaaacttaa

SEQ ID NO: 6206 - DNA, 349 bp, Triticum aestivum
  Clone ID: uC-tsro9316030d09b1
cagagctcggtggacaggcacagattcagctaggaggagagcaggagctaggtagccatggccgtcctgcgcgccctcacccgcgccctggaggacctggcccacgccctggacgacgtgatgcgcgcccttgcctacctggccagcctcatgacccacgccagcgcccgcgccttgcccaacgccataagccgtgccatcggcgcctgatttgtataccctccggcggtacctttgcaccggatcgtcgctcttcgttagaggtactccaccgaaagagagtagttcggtcgcatgcggaccttttcatcgttattgagacaatcgggcatgatgagtgtgatttaaa

SEQ ID NO: 6207 - DNA, 252 bp, Triticum aestivum
  Clone ID: uC-tsro9316030e06b1
ctccacacgtccgcccacgcgtccggccctgatacccgttgaaacacctctcccgaacaatggaaggtgttgacgattgcaccgcctggatgcatgcctccatctagttagcaatacaagctattgccacgaccttatattgaacccatagtaatatcgtctcgtgtgcttaaatgtttactagtccgaataaaactggatgtctgttgtttggttcagaaataataaagatggacggtgtttctaacgaat

SEQ ID NO: 6208 - DNA, 309 bp, Triticum aestivum
  Clone ID: uC-tsro9316030e07b1
tggctgatgacgcgtgggtgctccttgtgagcacaccatgtttaactcagacagagtaatggttcaacatcgacctcatgggtctgttgcacaagtaccaagtccagaagaggttcaacaacgacttgtatggcatgctgggcaggtatcagcagaggacatacaaaaggatgatgtacggtgactactacaactggctaaggaactaccaagatcgcctaacctactagagagacagagagcttgggtaaagatggagctgttgaaacattgatgacacaaggcctaagcttggcactggccgtatat

SEQ ID NO: 6209 - DNA, 455 bp, Triticum aestivum
  Clone ID: uC-tsro9316030e10b1
cctcggaggaagttgtgtctcatcagcattgcgttctgcttctatataaagcacatccaagaatcactgtccaaggtctctctttcgattgatagcatcggtagcaggatataacatcaggttacaagcctttgtggtacaggaaggaccgaaggaggaagttggtgagatacagagggaagttgaattgggacgagggatagagatacaaccagcaaatgcgccgaggaacagtaaggtgctattttcttcaccagttaactccttcaagtatgcgttcttgtcatcagtacacacagcctcctattgcaggtctctaacactttcgcccaatggtccgatgcagacttatactgacattatcaagagaaagaatacgttgatgtagcatatttgcactgttcatgtacaactgaaagggactaaactctaattgtttttgcccttgccaactt

SEQ ID NO: 6210 - DNA, 232 bp, Triticum aestivum
  Clone ID: uC-tsro9316103c06b1
cacactataaatctaatatagggacagcgagcaaaaggataacaggacgctgttggacagctggaagactggagctgatgcttcaaaataagatgatggttgtcttttggagatgtttctatgtttaatgctttaaagtcttttggctgtactggactatttaaactttgaactatgctgtgatggttgaactgatgctggacgggtaagggtttatgtcagaggcaacttt

SEQ ID NO: 6211 - DNA, 519 bp, Triticum aestivum
  unsure (1)..(519): unsure at all n locations
  Clone ID: uC-tsro9316103c07b1
tttttacgttgtggtcgaggccgcgctgggcgcgctctgtacgctcatggacgaaggcgtggacgtggtgggcggangttntttnnttntntatattattattaattttttttttttttttatttttttttttatttttttatttttaatttttatttattatttttattttatattatatattattattttttttattaatattttttttatttttattttttatatttaattataaattttttttttatttatttttatattatatattttttttatttttttttttatcttttatattttttatttttttatatatatttttatatttaataaattctttttatttattaatattttattatattttatatattttatttttaatatatttattttttatataattatttaattataattttttaataatatttttttttaattatacattttttaatattttaatattataatatattgctttattatataattttttatttttttaaatttttc

SEQ ID NO: 6212 - DNA, 284 bp, Triticum aestivum
  Clone ID: uC-tsro9316103c08b1
ttcacgcgtccggtttcattctgcagctagtgaatgttatcatcgggaacttgttctaaattttgttttggggctggaaaaagagaccagcggatggctttgatacctggtacttgtttgcatgatatgctgttcagtgttacccttgttggcataattcgtggaggtcaaccagtattattctctgatttaaaaaaaaaaaaaaaaaaaaaaaaggaaaaaaaaaatgaaaaaaaaataattaaaaaaaaaaaaaataaaacgaaatagatgttatatagtgt

SEQ ID NO: 6213 - DNA, 227 bp, Triticum aestivum
  Clone ID: uC-tsro9316103c10b1
ggtgcaactcggcgggggagctgcatgtgaacgtcagcgacaagcactacgacccgctcttccccttcgggttcggcctcaccaccgaggccaacaagtgagtcgggtactcgggtgagatgggatgtactatctcggctgggctgtgagagatgggatacatacatacattgagttttgtggttgatttgttatgttagcaataaaagagcgatgcgttcttgcgg

SEQ ID NO: 6214 - DNA, 264 bp, Triticum aestivum
  Clone ID: uC-tsro9316103d03b1
ttacgaccgtgatccgcgggggcgtcgaactgcccgcgcggcgcgaggagatcgagctgcacaccgccgacggcctcacgctggtgggggagctcgccacgccgctcgaccggacgcccgtcgcgacgctggtgaccctccacccgcttccgaccggcggcgggttcatggactcgcacatcctgcgcaaggccgcggggcggctgcccgcgctggccgacatcgcggtgctgcgcttcaacacccggggaacggcctcaccgc

SEQ ID NO: 6215 - DNA, 559 bp, Triticum aestivum
  Clone ID: uC-tsro9316103d06b1
gtaggaagtcaatgccaacttcaccgcctccggtttcagaacgcgaagtggaacaagagccggagcccgaaccagaaccagagccagtaaaagaggaagcacctgctgctgaaccaacagacttgctgggtctgaatgaaacacaccctgctgtggccgagatagacgagaggaacgctctagcgctggcaattgttccaatagatgacgtgcccaaggccgctcctgcttttgaaaatggagtcacaggctgggaactggcccttgtcactgcacccagttcaaatgaaactgctgtcgcttcaggcaaaaaattggctggtggactggacttgctcacccttgacagcctatacgaagacgcgaaccgacgagcgagccagcccgcaggttacaacccctgggagaccaccggtgccgccccggccccgatgatgcaacaaccagcagcaatgcaggacccgttctacggctcgaacggtacgcagcaccccatgctgtgcagatggcagccatggccagcagcagcaggctttcatgcttcagcagcagatgatga

SEQ ID NO: 6216 - DNA, 433 bp, Triticum aestivum
  Clone ID: uC-tsro9316103d09b1
gcatgcaatggatagccacacatatcatagatacgacacagatttaacttaatggataacgaaacgtcaggtagaacagactacccagacccaacggacttgacatggcaagagtacattcatacgagttcaacaggggcacgacggcctcaaaagtccattcacttcgtcgcagggtggggtgatactttggctggttatttaggtgataacggttctgggctcggcgcatccatggtcaccagctggccgtccaggctctagcccatggcgtacttctgtgtccaggagcgtgccgtggactcatacttggcccgatcagtcttgtacatgtgagcgatctcaggcaccaggggatcatcagggttggggtccgtcagcaacgaacagattgacaggaggacctttgatatggtcaaagccgggctccact

SEQ ID NO: 6217 - DNA, 567 bp, Triticum aestivum
  Clone ID: uC-tsro9316103d10b1
ttcacgcgtccgtccccatctcgctctcgcggccgagagatcgaatcggagaagaaggagcggagaggcctctgctgccctagctccgccgcccccgcaccggccatggcgctcgccgctcgcctcgtatcccgctcccgacagttatattctgtccaagctgctttggccaatggaggcgtcactcaagtccgctcatttgccaaggaggcagctcctgtcagcggagatgacctattgaagggcatcttttttgaggtgaagaaaaagtttgagaccgcacttggggtccttaagaaggagaagatcacgatagacccagatgacccaacagcagttgctaactatgcccaagtcatgaggactgtaagagaaaaggcagatcttctttccgatcctcagagaattaaacatactattgagactttcacgaagggcatccctgatgcaaggacgtacttggatacccttcagcagctcaggaaaaagagtggtctcatagatgatattgggtattgaggatatgatggatgagcctcttgagaaaagtgagaaggatattaagaa

SEQ ID NO: 6218 - DNA, 512 bp, Triticum aestivum
  Clone ID: uC-tsro9316103d11b1
gtcgttgctgccgcgccatcatcgtcctcgcggccactggtctccccggcgcccgggaggatgtccaggagcttcagcatggacgactccttcgtctgcttacttcgattcgagtaggggcgcaccggaagctcgccatcgcccgtcttcttcgccacggccgccgacgttcgtcgtcagatgcgccgcctcccgaacgcccccgaccacctgaccgcgtccacgagctccgtgatgatggatctcaggagccagacgacaccactgatgactactgttaccccgagggtgcctactactacgtgacgaccgctgacgacttggagtagttaggaggctcccaggtaggaggccttgccttttcgatcgatgttgcctttgttctagccttcttaaggcaaaaacttgtctaacttatgtctggactcagatattattgcttccgctgactcttgtgtagtcgagcttatgtattcgagccctcgaggcccctggcttgtatataaagcttg

SEQ ID NO: 6219 - DNA, 359 bp, Triticum aestivum
  unsure (1)..(359): unsure at all n locations
  Clone ID: uC-tsro9316103e03b1
gtatgaaaccttaggttctattctagtgaaatatttattctgcgattatgtattagtcagtaatgataccactgttgcccctacggagtgtttttctggtaccatgactattgctggttgtccctaattattcttgaccttcaatcaataagaacacgaaacatggngaaaaaaaaaaaaaaaaaaaaaaaaaaaaaaaaaaaaaaaaaaaaaaaaaaaaaaaaaaaaaaaaaaaaaaaaaacgggaaacaaaaataaaaaaagaaacaagaaaaacaaaaaactaaaaatggggggggccctttttaaagaaccaaattttctggccggggcttggaatctcaataattttttttttt

SEQ ID NO: 6220 - DNA, 134 bp, Triticum aestivum
  Clone ID: uC-tsro9316103e05b1
ctgacgcgtgttcggacgcgtgggcggacgcgtgggcggacgcgtgggcgagagtggaggattcaaattttgccgaacaatgaattatgtccatcgatatataaatgttgtatgattaaatttgtattgctgtt

SEQ ID NO: 6221 - DNA, 439 bp, Triticum aestivum
  Clone ID: uC-tsro9316103e07b1
ctcacgcgtccgcggacgcgtgggctcgcgccgccgccgccgcagcttcctccccgccgtcacgatgccgtcgcacaagaccttccggatcaagcagaagctggccaagaagcagcgccagaaccgccccatcccctactggatccgcatgaggaccgacaacaccatcaggtacaacgccaagcgcaggcactggcgccgcaccaagctcggattctaagcgggggatgacgacgatgacacccgttgccgccgacgggagaagggtctagggtacctagggtttatgacgtctcgttgtttttgcaagctagcatgtgactccgggatgcctgttttaagatttcgcttgtgttgaaagatattattatttactgcttgtagcctacctgggataccatcatattttgctgattatggaactacttttatcctgctt

SEQ ID NO: 6222 - DNA, 518 bp, Triticum aestivum
  unsure (1)..(518): unsure at all n locations
  Clone ID: uC-tsro9316103e11b1
tttctctccaagtccaaccccacgaccatggcgaccaagcagagcctcctcgccgtcgcagccgtttgtctcctcctcctccccgcggcctacgccgtcaccgatgtcgagtactgcaataagggcaaaaactacccggtgaaggtgagcggcgtggagatcgtacctgatccggtcgagcgcggcgtgccggccaccttcaagatctccgctacaactgataaaaacatcaccgaggggaacctggttattgatgttaaatattggattttcaatgtttactctgaaacggatgacatctgtacgaagacccaatgcccggcaacttctgatttcgaactatctcactcgcaaaccttaccatcaatcactccaccaggttcttacaccattcagatgaagatgcttggaaagcacgatgaggaattgagctgcatctccttcgggttcagcattggcttccttgcgccggntgcctcgagttgaaggcatgcacgggttgcatgcgcaactacaca

SEQ ID NO: 6223 - DNA, 435 bp, Triticum aestivum
  unsure (1)..(435): unsure at all n locations
  Clone ID: uC-tsro9316103f01b1
cgttcgcgttgtgtccacacacatcagaaatgggaagccgtctcatgttttcaatgctgctggtgtcactggaaggccaaatgttgactggtgtgagacccacaaacaggacactatccgcaccaatgttgtaggcaccttgaatcttgctgatgtttgtcgtgagcaggggttgctcatgattaattatgctacaagttgcatatttgagtataatgctgaacaccctgaagggtctggaattggttttaaagaggaggacacgcccaactttgtaggttcattctattccaaaaccaaagccatggtggaagagttattgaaggactatgataatgtctgtactcttagagtcaggatgcccatatcatcagacctgagcaatccttgttacttcatcacaaaaatagcccgctatgacaaggtggngaacat

SEQ ID NO: 6224 - DNA, 136 bp, Triticum aestivum
  Clone ID: uC-tsro9316103f06b1
tccgtttacccgtcggttgaaccccaggcggcccttttataggggccaggtttaggtaccgttgcaggctacttataaggtctcttatagggaaaccaaaggccaatgaattgcccgtcgtttaccaccgaaaccg

SEQ ID NO: 6225 - DNA, 480 bp, Triticum aestivum
  Clone ID: uC-tsro9316103f09b1
ttcacacgcgcgacatgagtgcagaactaagcagccagctgcagagacaggctgcggaacaggtcaagggtcctgacctgagccaaatgatctcaagagctgaggcgacggacatggacaatgatgacaacgaggatggcaacgatgaaagagacgagccaaaggacatcgcgctggtgatgacacaagcggccatctcaagggccaaggctgtgagggctatcaagtatgccaatggagacattgtcactgccattatggaggacacaacttacgagtatggcgacagttgtggaactagttgaaccattactctttgagcgagttgcagcttgagttggtacagagtttgctttgcatctctgatacggtcgcctggacatgatcctgcctgcggataagttggtacagcgatattagcacggacatgatagtggtggcaattttctggcatgttcttcacctttgactgaaatatta

SEQ ID NO: 6226 - DNA, 415 bp, Triticum aestivum
  Clone ID: uC-tsro9316103g03b1
tttacccgtttacacctgggcggacgcgtggggtgttatctgtagttatctgtactgcatgccgtctgcaccaggagacgatttctatggcgccatggaaattaaggagagcatggaccacttggcgtgtcagttgccggttgaatacattgaccatcatactttaatatcatagcggaccatgctcgtttgcataatcattgaaaattgagtccgcatccggcggtggacggaatagccatgtgtgaaccagcctgtatcttttaggagtgagaaatatgcgcgttccctatatttaggcgggaagcactcattcacatcttctggatacgctcactgccaatcttattatatcgcgttaatacatgctgaacacctgactttctggacgagtggggttgctctttatgacaaa

SEQ ID NO: 6227 - DNA, 270 bp, Triticum aestivum
  unsure (1)..(270): unsure at all n locations
  Clone ID: uC-tsro9316103g04b1
gtttggttttacagcgcaaagatccggttggtccgcaaggagattggatgtatgattctaggaggttaaactgttgggaaccttcattttgtgagacacgatgaacagcataggcggatattgtcacggtttaccctaccacctttgtcggctctagtcttcgttgcatactactgtactacgcacgtgtcaacatcctgtaaatactttggtgttcagactacttgcccctgttatatctgaataaatccggagcctataggtggtnna

SEQ ID NO: 6228 - DNA, 232 bp, Triticum aestivum
  Clone ID: uC-tsro9316103h03b1
gttttacgtttttatactgtgccttctttgataaccttcataatttggtgcgagatatgggtatataacatcatcttatctaaatgcgggtgatgtacaacaggacttcaatctctgtatctattgaggaacgacaatatgacttcatcgaaatgcatatggcattataacacttcgtatatactgaaaagattcgcagctaagccgtctatgggaagccaaagtcgcctgt

SEQ ID NO: 6229 - DNA, 591 bp, Triticum aestivum
  unsure (1)..(591): unsure at all n locations
  Clone ID: uC-tsro9316103h04b1
cctacccgtccggttgttgttggttgttgttgttgttgttgttgttgttgtagaggttgnaattgtcgaagaagatgaaattgttaatgaaaatgaagaaaaataaaataaaaaataaaaaataaaaaaaaattattttattattaaaaattcaattataaaaaaaataaattaatattccctcttatcattaatttaaaaaaaaaaaaaaacatttatttaaaactaaaatgttaaaaaaaaaaaaaaatttaattatactaattttaaaaaacataaataagaaaatttaaatatataaaaataaaaaattataaaaattcattaatataaaaaaaaaattgtaaaatttaaaaaaaacatataattaaaaaaataaataaattttatttaaaaaaaaaaacaattttataaataaatgctaaaaaataaaaaaataatcataaaattaaaatatatattttaaaaaaattattaaataaattaaatttaaaataaactaataaaataaaaaaaaaaacatttaaaaaaaattttataaaaataaaaaaaaattaattaataaatataaaataaaattatttaattaat

SEQ ID NO: 6230 - DNA, 513 bp, Triticum aestivum
  Clone ID: uC-tsro9316103h09b1
atgtacgactgtgccttctatgagaaccgcctgatggtgttgcaggagatgagaatcaaacaacaactagtccaaaagcaggtgtggtacaacagggtttcgaaccctgttgctggagagaaacaacaggaaagtctccaacgggaagccaaaggtgtctgcaccgaacggtgccaatggatagaaacagcacgatgccgtcaatgggaagccaaaggcgcctgtggcgaatggtgctatcggcgatgctaaggttccggggataaagaaactccaccactgctcattcagtcgctacctaccggacaacgttgcccaaacatgcagcggtcgataagaagcctgtggcgaccgagatgaagactgttgtcgccaacggagctgtcaagaccggagtcgctgtttgatcgcattacccgatcctcccagctaggcatgaacaacaaacggacggtgctgttgaaccacgctagacatgcgggtttaaggtactgaccataaagtggcgctgga

SEQ ID NO: 6231 - DNA, 432 bp, Triticum aestivum
  Clone ID: uC-tsro9316103h12b1
gtcgccgccgccgctcccagctcgcgctccctggcccagctgccgccgccgccgcctcgtcggagttcttcctacccctttcgccaacatgggtaagacacgtggtatgggagctgggcgcaagctcaagacccaccgcaggaaccagaggtgggctgacaaggcatacaagaagagccacttgggtaacgagtggaagaaacccttcgccgggtcatctcacgccaagggcattgttttggagaagatcggtattgaggccaagcagcctaactctgccatccgtaagtgtgctcgtgtgcagcttgtgaagaacggaaagaagattgctgccttcgttcccaatgatggttgcctgaacttcatcgaggagaatgacgaggtgctgattgctggattcggtcgtaaggggcatgccgtgggagatattcc

SEQ ID NO: 6232 - DNA, 237 bp, Triticum aestivum
  Clone ID: uC-tsro9316104a02b1
gttcctatcgtcttttgcctttggttgttcgtgcgttggtggtgatctacgagtggcgttgttgttgattcgcgagctgctctgccgcagctttacctaaagatattgacgatgtattttggggtgaatcatgctaatactatgtggcttatttaaaaaaaaaaacaaaaaatcctccccaaaaaaaatatcaaacaaccataaactctaaaaaacttctactaataaaaaaacgaa

SEQ ID NO: 6233 - DNA, 447 bp, Triticum aestivum
  unsure (1)..(447): unsure at all n locations
  Clone ID: uC-tsro9316104a03b1
cccacgcgttcgcccacgcgtccgaccgccgcccaccactgacgtagcacgctagtacgtagctcgtctgtgcactgcactcatggcagcttcgctgggacttaccggccatgagaccagctacccggcccacccggcggcctcctccttgtacaacttccaagccggtgatcccttcgcggcagcggcgggcggtgccgcggagctgagcttcccggagctcgtggacgccgctcggccctccgactactcgctgcttccggcgttcggcgccgctggaggcgaggcgatgaacatgtacgagcggagntgtcgtcttccctatgacgacctcctactactgcgacggcgcggggatgttcgacggcgacgcttcggcgagggcgagaggagaggggaatccggtgctatggcggggcggccgacggggaggatcgggtttcggac

SEQ ID NO: 6234 - DNA, 328 bp, Triticum aestivum
  Clone ID: uC-tsro9316104a04b1
cttacgcgttcgggctttctaagcaggaagcaccagggaggaggggttagatagttggcatttgcaagcggtaaccaaatgcgcattccattgagtttgtatggtggctgctctttgcacaagctgtgtgcttatgaggtgttggtacttgtcgaggacagcaggggggtagcgtactcgtggtgttgcactatgttttgtttatttgttttatttttgagtgtttgatctgtttgagcctttgtgatccgagaaaataaaaataatatgagtttacctttgttaattaatttaaaaaaaactgaccgaaattttttttctctatgaa

SEQ ID NO: 6235 - DNA, 60 bp, Triticum aestivum
  Clone ID: uC-tsro9316104a09b1
cccacgcgtccgcccacgcgtccgcccacgcgtgcgcccacgcgtccgtctagatcgcga

SEQ ID NO: 6236 - DNA, 274 bp, Triticum aestivum
  Clone ID: uC-tsro9316104a11b1
tttccgcttacgcgtccgagaagaagaagatcatgaagaagaagagcaatatggatgtcatgtgtttgcctggacttggattagatgggtcggtcgatggggtgttgcatctgttttgctatgacgcctcgtgtcttgagatgggcgcgcttgatgatgaactgccaagtgttatgtagttgcttgacggctgaattgttattccctgtctgggacgaaacggagattaggttgccctcatttggccattgagctcatgtcattgtgttgtttt

SEQ ID NO: 6237 - DNA, 428 bp, Triticum aestivum
  Clone ID: uC-tsro9316104b06b1
ggtttcctcttccgttgcccaacagtggaacccggttccaattcattctcttggcaaatcgtccagttcatcccaaattaccagctctcatccgcttctcttcctccaaatcgtcggcgtttcttgatcgacgagggcatggcgacgacggtggactggcgcagctataggcccgatcttccggcggcgatgtaccacatggtggacggcagagaccaggtaatgcacgcgttcgctccgccgacggcgcagggcgcggcgccgaccatcttcttctccttcccctgccccggtgcggagcagagcgccggcctgcttcgtggcgccagctacctcactcccgcgcaaatgctccagctccagtcgcagcttcccacgtgcgccgggcgcccggcgcggccatggcagtggcggggcagcccatgaag

SEQ ID NO: 6238 - DNA, 403 bp, Triticum aestivum
  Clone ID: uC-tsro9316104b09b1
gtgtttccagcaaacgaaatattgtcgaaaattgaagcagcagcaggacccatgggcttcaacgtacagaagcgcaactacaagctgaagttgcaaggagagaatcctggaaggaaaggtcagctggcaattgcaacagaggtttttgaagtgacaccctcactctacatggtggagctccgcaaatcgaatggcgacaccctcgaattccacaagttttaccatagtatctcgaatggcctgaaggacgtcatgtggaagccagagggtagcatagccgaaggcgatgagacccgccaccggaggtctccatgatcatatctaaatgttaggagatagtagaagataaaactagtcaggaatttcaggaaaggcatggggatgttttttcaagttctagccg

SEQ ID NO: 6239 - DNA, 407 bp, Triticum aestivum
  Clone ID: uC-tsro9316104c03b1
gcgggccggtttagagtaccacttcagaatgatcagctgcagagcggcagagattgaggcatccaagctggggtgcgagcccggggaggcgctggccgtcaacctggccttcgcgctctcgcacgtgcctgacgagagcgtctcgccggcgaacccccgcgacgagcttctccgccgcgtgcgcgccctcggcccgcaggtggtggcactcgtggagcaggagctgaactccaacaccgccccgctggccacgcgcttctcggacgcgtacttgcactacggagccattctcgatgcactggactcgacggtcagccgggatagcgcggacagggcgcgggcagaggaggcggtggcaaacatgtcggcccccgcggttggccgggagggcgccgaccggctggagc

SEQ ID NO: 6240 - DNA, 370 bp, Triticum aestivum
  Clone ID: uC-tsro9316104c06b1
tcgttgaccactttttacccatccagttggttcaccttgatttaggaacctccgctgattctgcatgatgacacagaagagcaagggtgcggacatgtgccgtactaatgagactgcgcggacgtcgaccgtctgcaggggagcccataagcagctagccaccaaggtggccaggtaagctgcttcgcgaccgctggagcgaagaagccccactgactacaggccaaggaccgagtggctctgggagagccgcaagtaccagaagagcacggagctgctgatcctaaagttgcctttgcgcgctctggtccgagagatcgtgcaggacttcaagacggacctcaagtttcagagcttttgccgtgctggc

SEQ ID NO: 6241 - DNA, 496 bp, Triticum aestivum
  Clone ID: uC-tsro9316104d01b1
ttacgcgttcgtccacgcgtagcgtccacgcgtgcggtcattgcatgtgttggtgagactcttgagcagcgagaagctggatcaaccatggcggttgtcgctgaacagacaaaagcaattgctgacaagatcaaggactggaccaacgtggtcgtcgcctatgaaccagtgtgggccattggcaccggtaaagttgcatcaccggctcaggcacaggaagtccatgccaatctgagggactggctcaagaccaatgtgagccccgaggttgctgaatccacgcggatcatctatggaggatctgtaactggcgcaagctgcaaggagttggccgcgcagcccgacgtcgatggtttcctcgttggtggagcttccttgaagcctgagttcatcgacatcatcaacgccgccaccgtgaagtctgcctaagcaagatcttgacgtggcttctttcggcgtggagttagacaggtgaaaatgaagagactcctttttt

SEQ ID NO: 6242 - DNA, 443 bp, Triticum aestivum
  Clone ID: uC-tsro9316104d02b1
cttacgtcgattacgagctctcccctctcgtcccgtcttctccccctcgcgacgccaccgccgcgtcgccggtcgcgggctcgccgccccaggtaggacgtagctagtcaccccgcccggccccgatggctgaggagctggtgctcgacacggcgatccgggactgggtcctcatcccgctctccgtggtcatggagctcatcggcgtgctccgctacttcgtctccaagctcatgcgctccccgccgtcggcctcccccttccccgaccccaagaccgttaaggaggggcaggttgtcatcagggcgaggaaacctgaggaacggcgcgcagtttaatccgccaaggcctttaaggtccgcatgctttattacaccaacggggaagccggattgcttcatgttcctaaagaggatgcccagaggtctcagcggttattcttt

SEQ ID NO: 6243 - DNA, 336 bp, Triticum aestivum
  Clone ID: uC-tsro9316104d03b1
tttttgacgttttgctgacctgacctcttaaggtcaaggaggcctcaatttgaccccaattctccttggaagcacgagtacagtactataaagccgaaatggctcatgctactgtccgtgcgcacccgccatacactcatttgtctgccttgccgcccacaaaagtgtggggggtttgccgcatcagtgtacattcatttctcctcctgctgcaaataggatgtgttgcggcgtattgattgatcgattgatgatggcagtgcacaactcgtatgatgcataatctagctcccattatttgtcctaacagcttgaaattttatttcatcatgtaaa

SEQ ID NO: 6244 - DNA, 365 bp, Triticum aestivum
  Clone ID: uC-tsro9316104d09b1
gtatcgacgaagtcatcgccaaggcagagaagatcgccagcgagaatgcctgatgacgaggtgttaccaccgctctgtacaagttaaattttttgggtttcagctgttcgcccgagacttgctcacgagcaggagtgtgccagctcctgctgagggatccttgtttttgttcgtttttactccaatttacccgtaataagcaactgcagtgacattggtttagtctgcacaacagcaacactactcttggcttggaaaacacttgtgccctttgtaatgcagatccgacagatcatgaattggtttagtttattgttgttggcgaaccaaaaataacttatctatttatttattttataatattg

SEQ ID NO: 6245 - DNA, 178 bp, Triticum aestivum
  Clone ID: uC-tsro9316104e01b1
cggaatttcccgtctgacccacgcgaccgattactcgtgtattaccggtgggcttctcctcgggttccgggtcaggttctgggtaggtccgggtccgccagtagctacccataagcagggttcccgtcaaccggagagaacatgggcgcttcagagccatggcggagacggaataacg

SEQ ID NO: 6246 - DNA, 358 bp, Triticum aestivum
  Clone ID: uC-tsro9316104e02b1
cattctacgagttgatcaacttcgacaaggaggcggacgtgcactgcttccccggcgggcagctcgggctgtaccgcgaccgcgacctcatcatcggcccgcacccgacccgcaacccgcgcaacctcaccatggtcgactacaaccggttcctccgccgcgccttcggcctgccgcgggacgcccccgcggtgctcggcgacaagacggccgtcaggcccaagatgctcatgatcgagcgcaagggcacgcgcaagctgctcaacctgcgcgccgtccaggccctctgcgaggagctggggttcgaggtcaccgcggccgaggccggcgccgacgtgcgcgcctatgtcgtgacggt

SEQ ID NO: 6247 - DNA, 67 bp, Triticum aestivum
  unsure (1)..(67): unsure at all n locations
  Clone ID: uC-tsro9316104e05b1
cttacgcgttcgcccacgcgtncgcccacgcgtccgcccacgcgtccggactagttctagatcgcga

SEQ ID NO: 6248 - DNA, 453 bp, Triticum aestivum
  Clone ID: uC-tsro9316104e08b1
ctaaaccctaccatcttcggattcctctccaccggcggcctcccccgtcagatcaccatggtgagtcgacggagaagaagcagttgaacccgatgcgggagatcaaggtgcagaagcttgtcctcaacatctccgtcggggagagcggcgatcgcctcactcgcgctgccaaggtgttggagcagctgagcgggcagtcgccagttttctccaaggcgaggtacactgtcaggtcttttggcattcgtcgtaatgagaagattgcctgctatgtgacgatcaggggtgagaaggcaatgcagcttctcgagagtgggctgaaggtgaaggagtacgagcttctgaggaggaacttcagtgacactggttgctttgggtttggtattcaggagcacattgatttttggatgatttttacccatcaaccgtgatttactgcatggacttttttgt

SEQ ID NO: 6249 - DNA, 274 bp, Triticum aestivum
  Clone ID: uC-tsro9316104e09b1
ctcacgcgtccggagagcgccgccgccgcgtacgagcagcggctggtggctcacggtggctgcgtctcaggcaaggctggctggcggccagtcgctgccgaggggcgtgctgctggctcatccaccaataagctcgtctggtcccctgttctggaggctctccgctacttctctagctcgtggcgtcgccgtggtggtgaagaccaagagctgaagagatggagaaccagatcgggtcagtgctcttatccggtggctgtttgggcgtggcctt

SEQ ID NO: 6250 - DNA, 461 bp, Triticum aestivum
  unsure (1)..(461): unsure at all n locations
  Clone ID: uC-tsro9316104f03b1
tccggaattgacccggacggacccggtgtctccgttcctctcccccgccggcaccccttccccgcatcgtctcccacgccaagaccgccgccgttcgtcaagatggtgctgcagaacgacatcgacctcctcaacccgccggcggagctcgagaagctcaagcacaagaagaagcgcctcgtgcagtcccccaactccttcttcatggatgtcaagtgccagggctgcttcaacataacgactgtgttcagccactctcagnaccgtggtggtgtgccctggctgccagacggtgctctgccaacccaccggaggaaaggcgaggctcaccgagggatgctccttccgccggaagggcgactaagctgcacgcctgtttatgggaaaaatgaagccccgctgaaccttacttttcaagtaactagttatccccgatgtgtactggtcaattttttgaaaat

SEQ ID NO: 6251 - DNA, 395 bp, Triticum aestivum
  Clone ID: uC-tsro9316104f04b1
ttttggctttggcaaatgctgaggatgctggggcaggctccggcccaaaagattatgtgcatgtgcgcatccagcagcgcaacggcaggaaagagtctgaccactgtccagggcctgaagaaggagttcagctacaacaagatcctcaaggatctcaagaaggaattctgctgcaatggcacagtagtccaggatccggagctaggccaggtcattcagcttcagggtgatcagcgtaagaatgttgctactttcctagtccaggctgggattgcgaaagaaggagcctcatcaagatccacggcttttaagccgaagccgcctccgataaatgctcgaaccgccagccggctcttctctatattgaaggcataaggcatatatatattgccgcc

SEQ ID NO: 6252 - DNA, 200 bp, Triticum aestivum
  Clone ID: uC-tsro9316104f06b1
tttaaccgttctccccacctttttgattgacataccgccttagcagctaagccaagccagcctcgccgtctcgcatcccagcagcaatggcgtctcgcgcagccgtggtggtcgtggccgagaccgcgctgctgttcgcggcggcgtccgcgcaggagatggacgcgagcatgccaccggccccggccccggtcacgggc

SEQ ID NO: 6253 - DNA, 460 bp, Triticum aestivum
  Clone ID: uC-tsro9316104f08b1
gttcttcaccctggaggaggtcgccaagcacagctccaaggacgactgctggctagtcatcggcggcaaggtgtacaatgtgaccaagtttctcgatgaccaccctggaggcgacgacgtcttgctgtcttcaacagccaaggatgcgaccgacgacttcgaggacgtggggcacagcacgaccgcccgggcgatgatggacgagtactacgtgggcgagatcgacgcgaccacgatacccaccaaggtcaagtacacgccgcccaagcagccgcactacaaccaggacaagacccccgagttcgtcatcaagatcctccagttcttggtccccctcgcgatactgggcctggccgtcgccgtacggatctacaccaaggcggagtctgtctagcaccggcgtcttataccagtcagtcagtcagtcattcggaagtgtccaagagctgaataagtttta

SEQ ID NO: 6254 - DNA, 467 bp, Triticum aestivum
  Clone ID: uC-tsro9316104f11b1
tttccggttggtccgggcgttcccgacgaggacccgagagctgtccctgttgcttatctcttcagcttatcgagtgggactatccagttggatataaattccgacacaacactcctcactcctcagtgcaatccatcgtagctagacaccggatcgaagacaccaatatcgcaatggctgcgcgccgctaccgacgacgccgatgccggcttgacgggtaccgcagcgttgccgctcgacggacgcgtggccatcgtgaccggtgcgtcacgcggcatcgggcgcgccatcgcggcccacctctcctccctgggcgcgagcgtcctcctgggctacgcgtccagcgcggccgaggccgacgcgctcgccgcggagcttccgcgggccgtggccgtgagggccgacgtgtccgacgaggccagcgtacggtccctcttcgatgccgccgagtcagcctttggctgtgc

SEQ ID NO: 6255 - DNA, 412 bp, Triticum aestivum
  Clone ID: uC-tsro9316104g02b1
cccacgcgttcttccacgcgtccgctcatccgctgcggcatgtccgttctgctcgttgcttcatcgctgacgctattattgagatatctaacctgatgcctcacatagctcagaacacccagtcggaacctgcaggagccatcttcaccttaatctgaaaatagaaggttttccttttgctagacctctgaaaaatctgcagtggagtaaccgctcacattacctattgctctggttttttaaggaggcttagcaggcctgacttaagatcgaaccctgacggtgtttaggcatggtccggctggagagcttatttccagcgttggaggtctttttaagcttatctaaagacttgttcaagttaaaccacgagaatgccatgggctagcatggctaccgcggagaagggcat

SEQ ID NO: 6256 - DNA, 513 bp, Triticum aestivum
  Clone ID: uC-tsro9316104g05b1
cctacgcgttcgatctgcactactcacggtaggaaccacaaccaccacaagtgagtgaccatcggagcaaggaaagaccaggagagatggcaatgaggccgcttgtcgtcctggccctggccgtggcgctcgccggcgtggcactgggagggggcgcggcggagggggccggcgagtgcgggaggtcctcccccgaccggatggccctgcgcatggccccgtgcatctcggcggcggacgagccggactcggcgccgtcgagcagctgctgtccggcggtgcacaccatcggcaagagccccagctgcctgtgcgccgtcatgctgtccggcaccgccaagatggcccgggatcaagcccgaggtcggcatcaccatccccaagcgctgcaacatggccgaccgccccgtcggctacaagtgcggagattacacgcttgcttgatggcccggcaatgctgccgatgaagatgaatgctgttgaaggcgtcgtcgtgtgggaaataggagtggt

SEQ ID NO: 6257 - DNA, 407 bp, Triticum aestivum
  unsure (1)..(407): unsure at all n locations
  Clone ID: uC-tsro9316104g07b1
ctgttcaagaactcaagatggccaaccacgttgcacttctcctcctgctgtctctccagctcaccgcgtcattctctcagcagcccggcgacgacccggacctccggaccctcctcaagatcaaggagcagttcggcgaccaggccgcactggtgtctttgctgcccggcaccgaccagtgcaactggccgtacgcctactgcaaccagcaccgccgcgtcgtcgccatcttcctccagaacgtcaacatcacctccacgatcccaccggccatcggcgacctcgaccagctccacaccatcagcatccacagcatcccgggcctccatggccccatcccggacacattcggcaagctctcgcacctctccatcttcaacatcatgcgcacctncgtcttgggctcc

SEQ ID NO: 6258 - DNA, 517 bp, Triticum aestivum
  Clone ID: uC-tsro9316104h04b1
attattttaataaatgttttggcaacgccgttgagcaaagggaaaatttaaaacgatttagctgataaaacccgattactccttttaagaattagtgccccaatttttggtttaaaaaaataaatttatattttataaatgagagaaaaaaaaaaaaaaataataaaggggggggccctttttgggggtcaaatttttcttccccgggattggaaaattaaagtttttttttgggggccccaaaaaaaaattaatgggggggggtttaaaaaaggggggggggggaaaacccgggggttccccaatttaatttttttggaaaaaatcccctttttgccggggggggaaaaaaaaaaggggccccaccaaatggcctttttaaaaatttggcaaccttaattgggaattgggcctccccttttttggggtatttaaaggggggggggggggggggttttccgacatggggccctttcttttttaacgggcctattgccgcgttttttttgtttttttc

SEQ ID NO: 6259 - DNA, 55 bp, Triticum aestivum
  unsure (1)..(55): unsure at all n locations
  Clone ID: uC-tsro9316104h05b1
cctacgcgttcgtccacgcgtncgcccacgcgtgcgcccacgcgtccgatcgcga

SEQ ID NO: 6260 - DNA, 411 bp, Triticum aestivum
  Clone ID: uC-tsro9316104h06b1
atttgttgtttaggccaagaggagggccgaaattgcaagggtgaggtagcttcatacgctcaaagggcacgtggagtccgtcgtcaagctgaagggtctcgacatcgagacgatccagcagtcctacacggtctgatgctctgagctgcccatgagcgaagagtggatcctcttctttgctatgaacttcactactgtaatcgaccgtgcgcgtggtactgagacataactactctagttaaacgttgcccgctggtgacatagtttcgcaccacctaagtaaccgcgtcgccgtttttttttgtttgatttttttttacgttttcagatagtatgtatattatgttttttttccaaaacacatactccttttttcagctgggttaattgctaaaaggcccgtactcgatc

SEQ ID NO: 6261 - DNA, 402 bp, Triticum aestivum
  Clone ID: uC-tsro9316104h07b1
gatgcttatggagagaaggtacatggttgagctgaagaagtactacgccatcttcgatgagaagtgcctgtccaagattcccaagggcccgtccaaggataagaagcagcattagaacggtagagagtaccctgcgcagatttatcttcaaagttgatcactactcgtcggttttcaaggatggttgtgattccatgtccgtagttgatagtagataccactatcttgtcaaaaacctctggcacggtcagtagtcgtgacgtgcaacttctacgaacttaaaaagtcatgccagcttttgctgaatatcctctttccaatgctatggttaacgtagcatcctcacttgcaagttgtgttggtgtaatatggcattgatgtttgtgaccttagtagacttgc

SEQ ID NO: 6262 - DNA, 274 bp, Triticum aestivum
  Clone ID: uC-tsro9316104h11b1
atttaaaaaaaaaaaaaaaaaaaaaaaaaaaggggcggccttcctagattactcacggctgcatacgcatgcatgaaaagaaattattgttccctagttgccatggatgatgcgtcatggtgcttggtgtggatgatatatggcgtgtatatcacaggatttacctgctgtattaaaattgggtgcatacaccattctgatattattttataattggaataacagctagggtatgatgcttccgcacagttgatcaaactgaatggcgaatggt

SEQ ID NO: 6263 - DNA, 285 bp, Triticum aestivum
  Clone ID: uC-tsro9316105a03b1
gtgttcccgcatgtgaaggcctggtggactgacctgctggcgaggccgtccgtccagaaggtcgcagcgctgatgaagccatgatcttaattgctggtgctcgttcgtcgcgaaataagccgaggtgtgtgccccccgatgtgtgcctgtacgagtgtgtgttcttgtgatgtctcctcgcgttgaatgttcaggcttgtgcttgcgatcctgtctcatcttttactgaaatgagcgttcctatgctctggtttaataataaattgtgcctagctctaaaagcaa

SEQ ID NO: 6264 - DNA, 329 bp, Triticum aestivum
  Clone ID: uC-tsro9316105a04b1
ctaaaactatagaaatatataaatcaaaaaataatataaaaccctttggaataggaacaaaaaaaaaaaaaaaaacataaaaaaaaaaattctacatcctactatgggctcgcgatctgtgtcggccgagggtgaattcatgagatcggcctcggctcaagtgttctatcgtgcgatcggggttaccatacaattctctcctagtaacctgtcggaattggaaaaaccttggggggccccattttatctggttagcaggaaaatcccccttttggtcccgccgctttattttcttaagggctcttccccttttccctttccaataagtt

SEQ ID NO: 6265 - DNA, 324 bp, Triticum aestivum
  Clone ID: uC-tsro9316105a06b1
cgtaactgctgcattgacactgaaaaaccagctggcatgtcacatgtcaactgttatggcagctgctgtatttggcgtcagattctcacttctgctcatcacataatgtccttgagtctcgtagtgaagctatggtcaaaaaaaaaaaaaaaaaaaaaaaaaaaaaaaaaaaaaacaaaaaaaaaaaaaagcaaataaaaaaaaaagacaaaaatacaaaaacaaaaaaaagaacctatccttggggggggccctttttagggaccccattttttccccccgggggtgggaaggattttgtttttttttggggaccccaaattt

SEQ ID NO: 6266 - DNA, 238 bp, Triticum aestivum
  Clone ID: uC-tsro9316105a07b1
tatttttgtacgggagtactattgcctgtgttgagcattgttcactactgtatctttcatgtgcacacataagaaaggcttaagctatgtgcttcggcattttgcctcctgttaagaatgaatatcattctagtccggaaataaagagcatgttaatctgtcctgcatatgtgtactcgctggaatttggacgatcaactttgtatgaataaaacatcgcatgaataaaaaatacaaa

SEQ ID NO: 6267 - DNA, 300 bp, Triticum aestivum
  Clone ID: uC-tsro9316105a09b1
tgtcaacattgtgccgtcggtggtgtacctcaagccgcccaagccgaagcagggcatccggctcgtgctccagtgcgtcgaggagccgcacgccgccgtcttcacccaggagctggagaagctcgcctaagagggcttgcgttcgtcatggttacctccatactttacagaattattacaggtgggatttggagttgctgttgttgttgtattcttcatcttgttgtgtgttgtagttgttgtattccacaccaggttttgcttccaacaaacaaataaatcactgaggggttcttcttt

SEQ ID NO: 6268 - DNA, 132 bp, Triticum aestivum
  Clone ID: uC-tsro9316105a10b1
gctgctagtactttgttatctatctatctatctctattataataccctttggaattggaactgagtggtggctggaacttagattccggtttgctcatccgccctatctctatgaatgaattggtttgggtt

SEQ ID NO: 6269 - DNA, 250 bp, Triticum aestivum
  Clone ID: uC-tsro9316105a12b1
ctacctagcctgatcccgagggaagggaagggagaaaccgttgagctgttagtgttgatgcgtttgttgttgaatcgaacaaaaaagccgctgtgattcggaattggaattggttggtggaatgctatggtcaaaaaaaaaaaataaaaaaaaaaaaaaaaaaaaaaaaaaaaaaaaaaaaaaaaataaaaaaaaaaaaaaaataaaataaataaaaaaaaaaaaacaataaatatcggggggggcgttt

SEQ ID NO: 6270 - DNA, 348 bp, Triticum aestivum
  Clone ID: uC-tsro9316105b01b1
tcggtgtttatctaacatcatccacatgcagaacaagaccctcaagttatatactggaaattatgaccagtatgttcaaactcgctctgagcttgaagagaatcaaatgaagcagtacaaatggcaacaggaacagatagctaatatgaaggagtacattgcccgatttggtcatggatctgcgaagcttgctcgtcaggctcagagcaaagagaagactcttgcaaagatggagcgtggtggtcttgctgtgaaggttgtcaaatgacaggattcttgttttccgctttacagatggtggctaacttccaccaccagtgctgcagtttgctgatgtgacatttggtt

SEQ ID NO: 6271 - DNA, 442 bp, Triticum aestivum
  Clone ID: uC-tsro9316105b06b1
gtttgtgtaccccatggaccagctctccaccgacggtgccgtcttccaccgcgcctgcttcaagtgccaccactgcaagtccaccctctcctttagcagctactcctcctttgaaggagtgccctactgcaagccccatttcgcgcagctgttcaaggagaccgggagctacaacaagagcttccagtcacaatcccccgcgaaatctgcgacggagaagttgactcctgagctgaccagatcgccaagcaaagctgcgggcatgttttcgggaacgcaggacaagtgcgccacttgtggtaaaacagcataccctcttgagaaggtgacagttgaagagaagtcctaccacaagtcctgcttcaaatgctctcatggaggctgtgctctattcgcggccaactacgcggccttggaaggcattctttactgcaagcaccat

SEQ ID NO: 6272 - DNA, 515 bp, Triticum aestivum
  Clone ID: uC-tsro9316105b07b1
tcgtccacgcgtccggctacccttgccgcaagataaaccatgggtggggtacttggtttgatacagattgatcaatcaactgtagccatcaaggagacttttgggaagtttgatgcgatcctgcaacctggatgccactgcttgccatggtgcctagggcagcagattgctgggtatctttctctgcgtgtgcagcagcttgacgtccgatgcgaaaccaagaccaaggacaatgtctttgtcaacgttgtggcatctgtgcagtaccgtgctcttgctgacaaggcatctgatgccttttacaggcttagcaacaccagggagcaaatccagtcctatgtctttgacgtgatcagggctagcgtttcaaagatgaacttggatgatgtatttgagcagaagaatgaaatagcacgggctgtggaggatgaacttgaaaaggcattgtttgcctacgggtacgagaatgtgcaaactctgattggtgatattgagccagatgatcatgtgagaga

SEQ ID NO: 6273 - DNA, 459 bp, Triticum aestivum
  Clone ID: uC-tsro9316105b11b1
tttacacggtcgccctaatgtcacccatgccgtcggtcacactccccaccgtgccgcaggtgaccctgccgcccatgccggccatcgtcgtgcccaaggcggtgctgccgccgatgcccaaggtcaccctccccacagtgacgatggcaccgatgcctgggattgtcgtgcccaaggtgatgctgccgccgttgcccttcgtcccgaatgtgaacgtgcctatgccgatggcggcgccacccccgtcgacgtaggcgcgcccatgtgagagtggcgccaggtcactccgtggtcacgacgcatatatatgttctttacatgcaaagctctgcgttttaagcgtgatgtattagtagatcctacttttgtttacgtctcagtgtatctatttttagtctggtgctgctagtgtttgactgtaggggttggcccagtgtctatatgtatttttgcgggaaa

SEQ ID NO: 6274 - DNA, 463 bp, Triticum aestivum
  unsure (1)..(463): unsure at all n locations
  Clone ID: uC-tsro9316105b12b1
tcccacgcgtccgcaaactcgttgcacaagaattcctcccacccccaccgtctcgccgccgccaccacagctagataagaaaaaaagagagagcagaactcgttgggagtgctcgagatctgtgtcgggagagggggaattcttgagatcggaatcggaacaagcgggcgcgctcgggatcggggttaccatacaatttttcccaggaacctttagtgaatgtgctaatggagtcaaagggtggcaaaaagtctagcagtagtagttccctgatgtacgaagctcccctcggctacagcattgaagacgttcgacctgctggaggcgccaagaagttctctgctgcatactcgaactgcgcgaagaagccatcctgatatncgttttggcatccccttcccgtagtttaggatttttatgcaattttattctgactcttttctcccaccatctctttggcctg

SEQ ID NO: 6275 - DNA, 242 bp, Triticum aestivum
  Clone ID: uC-tsro9316105c03b1
atgggaacaagggtgtggggagactgatactcctgcactcgcagggcaggccttagagatctttttgagattttgtctcgtcctttagtttgtaattcttttctgccttgctattagtacatactctagattgtctttaaatgttaattcacagacttaacgacagcgtataaaagttctctgtcagtttttgctggatcaaaataaaacaaaaaaaaaaaaaacaaaaaaaaagaccatca

SEQ ID NO: 6276 - DNA, 169 bp, Triticum aestivum
  Clone ID: uC-tsro9316105c07b1
tgttataggacccgattgcttttcttatctggttgttggggtcctctttgtaaaagacagggaccagtgtgttatttgcagttagttctgggtccgtctgtaaaatgctgtgtacttcatgttcagtgttaatgcagcatcagggtccttctggacccgtcttttgttc

SEQ ID NO: 6277 - DNA, 373 bp, Triticum aestivum
  Clone ID: uC-tsro9316105c09b1
cttgtaacaaagtaagcaccacatccacctcacctcagccacctcgccagagaagaagaagaagaagaagaagaagaagaagaagaagaagaagaagaagagaaggagatcccgtcatgggcaaggggaaggaacctgcaaaggatgcccctaacaagaccaaggcaccgtcaatcagtacccagttgacaaaaccaccgtcgttcaagaagaaccaggtgcagtccaggaataacccgatgctgacttagaagaagaacaggaagctgccgcctaagaataaaaagtgagagtaagcctccaaaggggtgagaccacctgatctccgacatcgtccgaccaggacgaagttaagcggcgtgtttgcgtcaag

SEQ ID NO: 6278 - DNA, 492 bp, Triticum aestivum
  Clone ID: uC-tsro9316105c10b1
tatcagaagatcatgttcgcgctgacctccatcaagggtgtgggccgccgcttctccaacatcgtctgcaagaaggccgacatcgacatgaacaagagggctggagagctttccgcggaggagatggaccgcctgatggcggtggtgcacaacccgcgccagttcaaggtgccggactggttcctcaacaggaagaaggattataaggacggcaggttctcccaggtcgtctccaacgccgtggacatgaagctcagggatgaccttgagaggctcaagaagatcaggaaccatcgtggtcttcgtcactactggggcgtgcgtgtccgtggtcagcacacaaagactaccggcaggagaggaaagactgttggtgtctccaagaagcgaatagctgcttcacaaagatcccgcatagctttgctactactgtgctggtccatttccacaatcttaaggagtgctcttggttagacgattaccttggatgat

SEQ ID NO: 6279 - DNA, 256 bp, Triticum aestivum
  Clone ID: uC-tsro9316105c11b1
cctacgcgtccggccgctactcccctgcctcccccagagctcgttagggttttctcttttttcgggggagaaatctcaagaggcggcaccatgctcgtgtaccaggacaagctttccggcgacgagcttctgtcggattcgttcccttacagggagctggagaacggcgtgctctgggaagtcgatggccattgggtcgttcaaggagcagttgatgtggacattggagccaatccctctgctgagggtggtggtg

SEQ ID NO: 6280 - DNA, 194 bp, Triticum aestivum
  Clone ID: uC-tsro9316105d03b1
ctttctcgtgggaaaaaaaaaaaaaaaaaaaaaaaaaaaaaaaaaaaaaaaaaaaaaaaaaaaaaaaaaaaaaaaaaaaaaaaaggaaaaaaaataaaaaaagaatccaagataaaaatcaaggggggggcccttttaggggacccaagtttacttccccgggcttgcgaccttttactttttttttgggggcc

SEQ ID NO: 6281 - DNA, 454 bp, Triticum aestivum
  Clone ID: uC-tsro9316105d09b1
tccacgcgtccgcccacgcgtccggaatatatccatccatatacagcagcaagcataccttcctcgcctttctccttgaggttcatcgcagaaacaagaaactcgcagccatggacagatctgctgtttctcaggcccttccggtgcaccaggaagacgaggacctgttcgagacctcctcctccttctcctgcgactccgacgacgaggcccagttctcagacggcgaggaccagtttgtgccggcttccccgccggtgcggagactcaactctgacagcgtctacgatctgtcgtccatgaaggccgaactcttcgccaagaaagggttgtcgaaatactacgacggaaagtcccagtcgttcgcgtgcatgtccgaggtgagatgcctggaggacctgcccaagaagagcccctacaagaagatcaagtcgtgcaggagcaacattgatct

SEQ ID NO: 6282 - DNA, 404 bp, Triticum aestivum
  Clone ID: uC-tsro9316105d11b1
tttgtaagctcgaggtccatttagctgctcaccgaatcaaggatgagctgcgccgccccaaaagcccccgccggagaggagaagaagacgtcatggccggaggtagtgggaaagtccatcgaggaggccaaggagatcatccttaaggacatgcctaacgccgacatcgatgtccttcctgctggctcggcgatgaccctcgacttcaggaccaaccgtgtccgcattatcgttgacactgtcgcgaccaccccttccattggttagcaagctttgcgagcgagatacaaaatggatgcacttatgcattctgatgaataagtagttttaataatcatggatgaataaatacacgcagatcaatggcgtgtgtcgatgtacttatggtgcaatggacttgccta

SEQ ID NO: 6283 - DNA, 484 bp, Triticum aestivum
  Clone ID: uC-tsro9316105d12b1
tcttgaccgcggccccttggccgagcgattcggggtggacgacgacgggacgctgccccctctgcggctgggaggagagcggggtcaccgtcgccctcatcttcgagcacgcgtcgcgctgccgggagaggcgattcgagatgctgcagcgccaggcggaggagcggattgccggtgagcaagcaaagaaaggtcgccgccatgcgcatatcaagcttcggaagaactagtgtgctggcgcgtcaacgaggaggatcgacccaacaccggagtggaagagttccagaggaccgactgcatgagtagtttaggttttatattagccctgtcccgtaggactttgttgaactcacgtagagttttagcaaaattggcttaggaagccatatactagaacaaaaaatgcagattttactgcacatatgccactatactggaatcattgatgcccataaaagatggcattttctgtagatgttccttt

SEQ ID NO: 6284 - DNA, 253 bp, Triticum aestivum
  Clone ID: uC-tsro9316105e01b1
gtttaatatgtcgtcgtcggtcggaggcggagggggaggcggcacggctttggccggaggggacgtcgctggccttctggacaaggccaaggagctggaccagctgcggaaggagcaggacgatgtggtcaccgagatcaataagatccacaagaagatcattttctccccagagatggtggataaatcagtcgatgccatgatggctaggcttcgtgggttttatgtacaagcaagagaactctctgagagt

SEQ ID NO: 6285 - DNA, 80 bp, Triticum aestivum
  Clone ID: uC-tsro9316105e05b1
tattctggcagacaaaaaaaaaactaataaaaagggataaaataaaaaaaaaaaaaaatgaaatcaaactaaaacaaaaa

SEQ ID NO: 6286 - DNA, 505 bp, Triticum aestivum
  Clone ID: uC-tsro9316105e12b1
tttttcgcgttgccgttcctcccgcggccgtcagccgtcgtcttcgccgccccggttttcctcccgtggccgtcagacgccgtcggagccgccctaccccacgccccgccggagccgcccccttcgccgcgggagccgcgggccgctggagccgcccttcgccgccccgccgctcagcttgccggagccgcccgccgccctacgccacgccccgcgggagccgcccccttcgccgtgggagccgcgggccgttggagccgaccttcgccgtcccgccgctcagcttgccggagccgtccgccgcacccccttggccacgggagccgagtgccgccgagccgttcctccacgaccaccacaaccaaggtagggagcgctgctccaaccttctctcctatgactccaagtctgacgacgcccgcgaccaggcgtgctcccctacatgggacgaggaacgtcgtatacaatattgggtaacagcttgtgtgacggaattgccgagttt

SEQ ID NO: 6287 - DNA, 444 bp, Triticum aestivum
  Clone ID: uC-tsro9316105f04b1
gtgtgctgccaacctccagccaagtccccagatgcactctggggtggcagccattgccggcgcccccaaccccgcgatgcacgtgctgggatcatcgacggggctctggctagacggcggccagcccctcgacgatcacccgcggttccaggtcttcgagcgcttgggggaccatgacagcgagctccagctcccaaagccttcctacgaccatgcctcgcacttcgaccggatgcactgatgatggctccggtccactgggtgcgtgattttgtcacgcgatcgacgccgtttcttcggcctgaaactcggaatgctgaatttactttgctttgacgccgctgcctgcctagaggcctaaggttttggcaatgcctagaataaaggcgcacaacaacagacttaggatcaaattgcccagatgtgttgccatggaaaagattt

SEQ ID NO: 6288 - DNA, 328 bp, Triticum aestivum
  Clone ID: uC-tsro9316105f09b1
tatttaaacaaaaaaaaaaaaaaaaaaaaaaaaaaaaaattaaaaaaaaaacaataatgaagatggcatactcttaaagaagttcgagttccatcagctggcgcggtcatggccctccgtggctctggctcctctgaggcggagtccctgcctttctgttgtattgcttgactacctgcgatcgctgggcgttccacagatccgtggcgtgggactgcctgggccttccgacagttttggtcctgccggtggaggcccctttccgcggcgcttgatgacacgaggcctccccgagggactgcccgtcccttccttcgctcggcctgtt

SEQ ID NO: 6289 - DNA, 440 bp, Triticum aestivum
  Clone ID: uC-tsro9316105f11b1
catcagaccaaacttatccattcgagaaggaattgaaattatcgtttcaggaggaatgaccatgccacaggtaattgcatcgctagatcccatgccaaggaagagccagagcatccgcctgaatagaataatgacatgagaacgtgtgagtcatcaaaacaatgggtcgcgaatgggtggatgggactccagtgctggtctgtttgtgctgctcgttattacatgtaaaatgtccaggttggatacgggaacgtgatgaccaatgctggacggaagcatcgtatcgatgccctggaatacctgaatgtgacaccatgttgattctctctgtttgctgactggatcaaagtgttaactttgatgcaccggtggggtacaactagtgcgcctgattacattcatttggtagagcgtgtcgggtattaccttgtctgactttt

SEQ ID NO: 6290 - DNA, 483 bp, Triticum aestivum
  Clone ID: uC-tsro9316105f12b1
tctacgcgtccggaacgccctcgcctacaaccggaacctgctggtgcggcaggtgggcaacgagggcacgccgctgcgcccccgccagcgcctcgaggtctacctcttcgcgctcttcaacgaggacatgaagcccggccccacctccgagcgcaactacggcctctaccagcccgacggccggatggtctacaacgtcggcctcgcccagcagcagaccacgtcggcggcctccctctccctcgccgcctcctccgcgccccccgccatggatgttggaaaggacttgacgagcctgtgcctcatctcagctctggccatcctgctcacctcccaggctttcttactgggatagcaaaagcacccaagagtgcggccatatgcaagcaagcaaaatggccttgacttttgtggaccaaaagccttgcagaccaaagggcagagatggtgcaccatttgaagggggcaaaggaaagcatatgc

SEQ ID NO: 6291 - DNA, 236 bp, Triticum aestivum
  Clone ID: uC-tsro9316105g01b1
ggccggcggaaggcgaggcggcgcgggggacgagtactccaccacgacgtgctgcgaggaagccagcggcgacgcggcggaggccggggcgcccccgctgctgaacctcttcaactgagagactgagtgtaaactgtaattgcgcagttcgtgtgtgggttaattagttgcatcgggggtagtccatgaagctttttgggacgctgccactcggtttaccaaccacagaacctcgt

SEQ ID NO: 6292 - DNA, 212 bp, Triticum aestivum
  Clone ID: uC-tsro9316105g03b1
ccttcttttacggcggccctcagtgatcgaagctggaagaagttcgcgaccatagcgttatgtaactcttgagacttcttattatcacatacaaggagtgcctgtttgtttgcgattcaaataaactcgcgatgcatgagcgcctttatggatctactttaggatcaaatcctatggttatagacatcgtttgttctcctttttggtttcaa

SEQ ID NO: 6293 - DNA, 427 bp, Triticum aestivum
  Clone ID: uC-tsro9316105g04b1
actatattccatcacgcaattccgatcaatctcttaagcttaattagctttccagagctacaggcgatcgaactcaacctagctagcgagcacctgccatcaaaaaccggccattagtgaaccttcggtcatgaggtcgtcgccatggatggtgttcgcgtcggcagcggttgttctgctcgccttggccgcctcgtcggcggtggtggacgcgtcgccgccgtcgaagtctttggaggtcgggttctacaagcacacgtgcccgcaggccgaggacatcgtgcgcgatgccgtcccgcgcgccttgggccggaaccccggcctggccgccggactcatccggatgcacttccacgactgcttcgtcaggggctgtgatgccttggtgctgatcaactcgacgccggggaacacggcggagagggac

SEQ ID NO: 6294 - DNA, 184 bp, Triticum aestivum
  Clone ID: uC-tsro9316105g06b1
ggatttgccggccaggtcggcgaacgtatgcgccgcggtgcgcgcgggatgcaggatcacctccaccacgtcgccggcggccgtggtcaggtcctgctgcagcagggcgcgcaaggccgcggcgctggccagcggctccatgaacgggaaaaaaaaacgaaacaataagaaagaaaaacaaaaa

SEQ ID NO: 6295 - DNA, 516 bp, Triticum aestivum
  Clone ID: uC-tsro9316105g12b1
gttgttacatcggaatagagctgtggcaggttaagtcaggaactttgtttgacaacattctcatcactgacgatgctgccttggccaagacatttgctgaagagacctgggccaagcataaggaggctgagaaggctgcttttgacgcggctgaaaagaagaaggaagaggaggatgcttccaaggctggtgaggacgatgatgacttggatgatgaggatgccgatgatgaggacaaggatgacaaggctgggtctgatgtcgagtctgatgacgagaagcacgatgagctttagatggatggtgaggatgagaggaggccgtctgcctttgcgccggtgccatgatttattagttgtctcttattctgatgctcccctttttgcgatcagaaacttgacaaggtactgtgtgtagaagaacaacatactcgggggtctttgttgcgcttttgtagttcaatttttcccgaagggaactttatagttgttaaacgggcaaaagtaaaaaataaaa

SEQ ID NO: 6296 - DNA, 408 bp, Triticum aestivum
  Clone ID: uC-tsro9316105h01b1
ccttcgcgtccgcccacgcgtccggcgagagctgggctgatgaacccgcgggtgctcctcctggacgaagccaccagcgccctggacgctgagagcgagcaccttgtccaggatgcaatggactcgttgatgagagggaggacggttctcgtgatagctcaccggctctccaccgtgaagaccgccgacaccgtcgccgtcatcttcgaggggcagatcgtggagagcggtacgcacgacgagctcctcggccgcgacggcatctacacggccctggtgaagaggcagctgcagttgcccatgttagactatgtatagcttcctgacctatgtaccgatatggacatatttttacacaaccattatatattatgggtaaggccttcctaaggggtggggctgggtccc

SEQ ID NO: 6297 - DNA, 582 bp, Triticum aestivum
  Clone ID: uC-tsro9316105h02b1
ggcggttttgttaaataaacgatagtcaatcaccggttagaatatttaaaacacggggggttccataccaaccctgaaaaagagatcctcgaccttctttcatccgtctccgtttcgggggcccgcgtctgggtcccccgctttgctccctctcttgccctttgggggggccctttttggggggcccgggtttctttccggggcggggcgaccccatgctttctttgggggggcccctcttttctctttccggggcgggcgtttccccccgggggcgtggggaacccctggggggtcccccacttttgtcgtttggggcgcccttccccttttccgcgtggggggatttgcgcaggggggcccccccctttccctttcccccaggtgggcccccctttgggggggacggggcccccccttatgcggttttattgcgcgggggggggggggggtccctcctgggggcctctcttttttgggggctgtccccccgtttttgtttttctcttttttttgcggggggggtttcccggggttttttgggggtttttggggggtttttgtttttgcccccccccaatt

SEQ ID NO: 6298 - DNA, 62 bp, Triticum aestivum
  Clone ID: uC-tsro9316105h03b1
aattattaaaaaaaacaacaaaaaaaaaaaaaaaagaaaaaaaaaaaaaaaaaaaaagaaaa

SEQ ID NO: 6299 - DNA, 53 bp, Triticum aestivum
  Clone ID: uC-tsro9316105h05b1
cttcttaatttttttaataataaagcacggattgggtctccggattcaccgtc

SEQ ID NO: 6300 - DNA, 82 bp, Triticum aestivum
  Clone ID: uC-tsro9316105h06b1
ggagccccacagggcgccggcaacaacgacccgcaccgacacaccacacgccctactaacgccaaagagaccgagcccgagg

SEQ ID NO: 6301 - DNA, 228 bp, Triticum aestivum
  Clone ID: uC-tsro9316105h08b1
tttgccgccgccgccgcgtccaagtgcgtctggcagagccgccgccccgaccgcgcccgcaactccctccccggcctcgtcctcgccctctagccgcccaagccaagccaaagccaagctggacgacgcccaccacttgggcttgggcgtacgcatgggctgacgttgcttcttcaattcttcttcatcccctgctctgctctccctagcctggtgattcttgtttgc

SEQ ID NO: 6302 - DNA, 179 bp, Triticum aestivum
  Clone ID: uC-tsro9316105h09b1
tttatcgcgtgggagctagtgctgtttttgagcaaataaggcgcctcaactcaagcaggaaggcgtcttatgttggttcaaagggtaataacaagaaatgaaagaggaatgatgatgatgagaattttccagcaaaaaaaaaataaaataaaaaaaaaaaaatacttaaaaaattaaat

SEQ ID NO: 6303 - DNA, 406 bp, Triticum aestivum
  Clone ID: uC-tsro9316105h12b1
ttcttaggccaaagagaccgagcccgaggctgtccaaccggcggcagccgccgaggaggcgcctgctgtgccggcagtgactgagaccaaagagccggaagctgcccctgccgagggaacagagaccaaagtagtggagcgtgaggcagcaccggctgaggtcgagaccaaggaatcagagcaagaagctgctccagctgagactgagaccaaagaggcagagccagccgctgccgaggccgaggccaaagagccggtggcagaggagacaccggccgaggaggaggcagttgccccggaggccgttgtggcagtgcaggaggaagcagctactgccgaggcaccagtggagcctgccgtcgccgtcgaggcagcaccggtagagacagaagcaccagctgctgct

SEQ ID NO: 6304 - DNA, 393 bp, Triticum aestivum
  Clone ID: uC-tsro9316106a02b1
tttggttggtgtgatcccagcagcctggcctccatgtgtgataaaaaaaaaaaagaacataaaaaaagcccaaaaaaagaagcagagaagacatccagcatactcacaggacggctggcgccaccagagacacgaacgaggggggggccgcccaagaggacccaagggcccggccgggggccccggacgacaaacctctcctaagggggcacccaaatccaagtcacgggcggccgtttaccaccctcggggccggggaaaccccgggggttccccacccaaagggcctgggagaaaaaccccctttcgccggggggggaaaaagcaaagggggccgacccggacggccttcccaaccgtggcccacccggaagggaaaaggggcccccccct

SEQ ID NO: 6305 - DNA, 307 bp, Triticum aestivum
  Clone ID: uC-tsro9316106a03b1
ctttgtactcgccacccggggtcgtcctggcgctcctgctgccggccgagatcgcgctctcgttcgtccgctccctatccgcgctggcgcccttcagcatcctcgccgacgcctgcaccgagctggccgtggccgccgacgtcaaggaggacgtccagctgctggccgagcgcgggcgcccgttcgacggacggagcgcgttcgctgggctctggggcgcgccgagcgactgcggcgctcccgtggtctgcttcgaggggttctgcctcacgctggaggtggaagcgtgcaagtggaaccggggcag

SEQ ID NO: 6306 - DNA, 217 bp, Triticum aestivum
  Clone ID: uC-tsro9316106a05b1
gttcagtcttatcacagccgccgccgccgtcgaggaagaagaagaagaagaagagaggaagctaccggaccaagcccggcgggcgaagatgaagacgatcctggcgtcggagacgatggagatcccggaggaggtgacggtgaaggtgccagcgaagatgctcttggtgacggttcctcggtggacgctgacgcttaacttcaatcactttaactct

SEQ ID NO: 6307 - DNA, 286 bp, Triticum aestivum
  Clone ID: uC-tsro9316106a08b1
ttgttaccaccggcgccccggcgcgagagtagacggggattcagacaaaaccgaggatgccgaccgccgacccagaggagcccgggcgcggacaaccggcctaaacaaggcccacaggggccagagagaacccgaggaggaggaccacgaagaaagacgaactgacctgcccgccatgcccacgaagggcgaacaaactgaaccgcgaagggacccagacggggacgaaagaagaaccggacgccccgggaagcacagcagaaagaggagcgggaagacacaaggc

SEQ ID NO: 6308 - DNA, 152 bp, Triticum aestivum
  Clone ID: uC-tsro9316106a11b1
ttgataattattgctggggatcttgctcaaagtgaactggtcaccaaattatgaatatattgattggcttagcatacaggtcacccaaacaaaaaatagttgaccacatgacacaacgaaacccaacccccccccccgaggcactccctaag

SEQ ID NO: 6309 - DNA, 144 bp, Triticum aestivum
  Clone ID: uC-tsro9316106b01b1
tatgctggttaattcaacatcgcttccccaactgtccaccttggaaatagaggtggaagaactgcaagcggatgacattcagatcattgggatgctgcctgctcttctgtgtctggttctgttcgcacgtcacgtgatgggaac

SEQ ID NO: 6310 - DNA, 92 bp, Triticum aestivum
  Clone ID: uC-tsro9316106b03b1
gctgctactggcgatccggggcgtgagtgcaccatgagtcagtgagcaccactgatgctgatggcagaccctgacgagatagagtacggaca

SEQ ID NO: 6311 - DNA, 93 bp, Triticum aestivum
  Clone ID: uC-tsro9316106b06b1
gatatttttcggactgctccagaagtggcccgcgtgatgaaatcatgaacgaacttacctttcattgaccccgagaaggtctggctcgtgcag

SEQ ID NO: 6312 - DNA, 270 bp, Triticum aestivum
  Clone ID: uC-tsro9316106b07b1
tttgttaccaccaggcatgctacaggcgagtagatagacattgatagaaatcgggattgacatctaggtgacaccgcaggggggcgagtcgtacaccatggactactctgaccctcccccgtcatcgatcgtgtacgtagaggagcataccaaatggtcgattgaccgcgcggcgatcgccgagtgcgtgacaacggtactgttgctctacatcagcgtggccaccatgatcaactacatgcacgagtacgacctcttcgtaaagaccac

SEQ ID NO: 6313 - DNA, 73 bp, Triticum aestivum
  Clone ID: uC-tsro9316106c02b1
gctatttccggcgatccggggcgtgagtgcaccatgagtcagtcagcaccgttgatgctgacggctgaccctg

SEQ ID NO: 6314 - DNA, 94 bp, Triticum aestivum
  Clone ID: uC-tsro9316106c03b1
gttactaccggggagccggggcgcgagcgcaccatgagtcagtgagcaccactgacgctgccggctgaccctagagagttagagtacgaacaac

SEQ ID NO: 6315 - DNA, 94 bp, Triticum aestivum
  Clone ID: uC-tsro9316106c04b1
gtttctattggcgagccggcgcgtgagcgcaccatgggttacttagaaccgcagacgccgttggctgaccccgacggggtagcgtacgtacaac

SEQ ID NO: 6316 - DNA, 74 bp, Triticum aestivum
  Clone ID: uC-tsro9316106c05b1
gttactcctggccagccggcgcgcgagcgcaccatgggttacacagcaccagagatgctgatggcagaccctga

SEQ ID NO: 6317 - DNA, 260 bp, Triticum aestivum
  Clone ID: uC-tsro9316106c07b1
ttggttaccgaccgcgagccgccgcgcgagaggacccaggctcacgcacgcgcgcaggcgacgccagaggaccccgacagggccaccgaagtacaactcaccggaccggcggcccacaaccggccagaccgggaacaacggaggcgctacccaacacaagacgcctagcagcacatgacccctgcacgccagcgcggcgcaaccagcgcacgaggcgccgacaccagaccgccccccaaccaaacagaacgcgccagcca

SEQ ID NO: 6318 - DNA, 115 bp, Triticum aestivum
  unsure (1)..(115): unsure at all n locations
  Clone ID: uC-tsro9316106c11b1
tgnacaccggggccccggcgcgcgagcccacggtgttgtttgcaggggcgttgctgtctctggccgaccttgttgagctcctatttcctcacctggcgtccctatagctccttag

SEQ ID NO: 6319 - DNA, 95 bp, Triticum aestivum
  Clone ID: uC-tsro9316106d01b1
tatactacaggagatccagcgcgcgagggcagggggagttagatagaaccgttggtgtttggacctgacacaagcagggaagaggacagacaacc

SEQ ID NO: 6320 - DNA, 303 bp, Triticum aestivum
  Clone ID: uC-tsro9316106d03b1
gtacttccggggacaccggcgcgagagcgcacgatgagcagatagcaccgctgacgctgacagcagacccagacgagttcgagtacggacaaccggggcaacacggggcccaggagccaaagactcactgtggaggagcccatgacgaaagacgaactgacggcccgcctacgcacgctgggggaacaacagaaccatgaagacagcctgactgggacgaaagaagaactgaacacccaaggggaaaaacctgcaaaaggagcccgaaaaaaccagcgcacaaaaccaaggcaacgccgccaa

SEQ ID NO: 6321 - DNA, 60 bp, Triticum aestivum
  Clone ID: uC-tsro9316106d04b1
acccggttatttagcaccaagcgcggcgagggcccaccaggggccaagaagaaccaacga

SEQ ID NO: 6322 - DNA, 82 bp, Triticum aestivum
  Clone ID: uC-tsro9316106d07b1
atttataccaccggccagccgccgcgagagagggccaaaaaacacacagaggcgcagacgacgccagcagacccagaagagg

SEQ ID NO: 6323 - DNA, 166 bp, Triticum aestivum
  Clone ID: uC-tsro9316106d08b1
tactggccgaccccgcggcgatcacgacggtgaccgtggcggccgaagaggaggaggagagcttctacttcgggtggttcgaccagcacccgacgtggcacctgacggcgctatacgtgccgtagttcgacgtggcgccgtctccggaggactgggagcgcgagct

SEQ ID NO: 6324 - DNA, 83 bp, Triticum aestivum
  Clone ID: uC-tsro9316106d09b1
ttgctacagaccaaagtttttgccgctggaccgttgttacatacatcctagcttggaggcaacggtgtgggtgggaatacatg

SEQ ID NO: 6325 - DNA, 97 bp, Triticum aestivum
  Clone ID: uC-tsro9316106d10b1
cttcgttacccccaccgagccgcggcgagggaacacggacactcagagaccggcgcggccgcagccgcaggacacggaggaggccaagcaccaacaa

SEQ ID NO: 6326 - DNA, 58 bp, Triticum aestivum
  Clone ID: uC-tsro9316106e03b1
gtttactaccgccgatacagcgcgcgagtgcacgatgggtcagtcagcaccgatgacg

SEQ ID NO: 6327 - DNA, 67 bp, Triticum aestivum
  Clone ID: uC-tsro9316106e05b1
gttacttgcggccatacggggcgagagcccaggggggactagttagcaccgctgatgctgatagctg

SEQ ID NO: 6328 - DNA, 69 bp, Triticum aestivum
  Clone ID: uC-tsro9316106e06b1
cttactcgagaccacgagcggccggccaagaggagggaagacaacgaacgcgcgcaggcgacgacacac

SEQ ID NO: 6329 - DNA, 428 bp, Triticum aestivum
  Clone ID: uC-tsro9316106f01b1
cttacttttccgcccacgcgtccgaaaggatcaatatggaattgaacctcggacatttgaacaacatattggcgaggctgtttttattccagctggctgtccttaccaagtaaaaaatctccagtctacggttcagttggctctggattttttgtcgcctgagagtttgcgggagtcggctcgtatggcccaagagatacgctgcctgccaaatcatcatgatgcaaaactgaagatgcttgagggtggaaaaatagctttatatgcagcaagttccgctgtcaaagaaattcagaaaataacccttgatccccaagttaatttggatatcagatctgtggatcataaccctaacccgggcagttccagagaactttggctagagtcactaaaccaacgaaaggggtctttgtggttgacattttcca

SEQ ID NO: 6330 - DNA, 84 bp, Triticum aestivum
  Clone ID: uC-tsro9316106f02b1
gtacttttgggcggacgcgtgggacctatcgccggagcctccaccgaagccaagagaggagcagggccaaaggaggccgccgga

SEQ ID NO: 6331 - DNA, 60 bp, Triticum aestivum
  Clone ID: uC-tsro9316106f03b1
gttacttttggggacacggcgcgtgagcgcacgaaggtgcagacagtaccgcggatgccg

SEQ ID NO: 6332 - DNA, 387 bp, Triticum aestivum
  Clone ID: uC-tsro9316106f04b1
gctactttgtgtgagaccgcgcgcaagtaaacagggacctagcaagcgaaaagaaccttaagatatgacagcttgacaaggaggtgaggaccatgctggtgatcatggtcaaaagctgccttggcacctatgacaccatgggctacagcagcgatctgcttgggcttatgttgcaggcgtgcgcggaacaaggtgggcataaatgcgattctgattgtggacgaaagaataacatgagggcaagacctgcttccctgccagaggtgacagcagatagcacgtgctaacatggaccatgtccttgttgaacacacaccctgagtggcaacagaagctgaggccggaggtgctcagatagcgtggcagtcaggtttccaccggtgacat

SEQ ID NO: 6333 - DNA, 300 bp, Triticum aestivum
  Clone ID: uC-tsro9316106f07b1
tttattagagaagttccaaactcatttcagtgagtacatcaagaggggaatctcagctgatgacatggaagcagtttacaagaaggttcatgctgccatccgtgctgatcccaccatggcccaatcaaccaaggcgcctcccaagactcacaagaggtacaacccctagaagctgacctatgagcagaggaaggccagcctcgtcgaaaggctcaacgccctcaacaactctgccggtgccgccgatgactaccaggacgactacgagtgaatagcgcttttgtccaccccagtgtattc

SEQ ID NO: 6334 - DNA, 246 bp, Triticum aestivum
  Clone ID: uC-tsro9316106g02b1
cctcccgcgagaaggtccacttctccctctccaagtgggccgacgagaagcagcagaagcccactgtgcgcacagatgatgaatgaagatcgggtgccatggtgattgatgttctgagaagttgttgagtcagggcttaagaacttgagaataaattcttgcggtgacaatggatctattccgatactatgttgttatatttactaattgctccttttctaaaaaagaaactccgagaggaaaaat

SEQ ID NO: 6335 - DNA, 120 bp, Triticum aestivum
  Clone ID: uC-tsro9316106g04b1
ggtcattccacagagcatcagccggagcacttgtatgtccactttgatcttcatccggctccggcgctctcgcacgcgcgaacgagcgagaccaccacctcgaaaaccaagaagagatgg

SEQ ID NO: 6336 - DNA, 261 bp, Triticum aestivum
  Clone ID: uC-tsro9316106g06b1
gatacttccgcccacgccgcccaggagccagcggagggttatttggcaccgacctcgcacctcaccgacggcgccgagcgccatgcccaaacaaggggggaaggccaagcccctaaagcaggcaaaggccgccgggatggactcacgacagaaagacccgggaaacccccagaagaagaagggggagcacaagggcctgaaggagcatgaaggcccaggcaggacagaagggcgcgctgggaggatcgggtctcaagaaga

SEQ ID NO: 6337 - DNA, 241 bp, Triticum aestivum
  Clone ID: uC-tsro9316106g07b1
tttgctacccgcgccgagacggcgcgggagagggcgatgatttagtcagtaccgttgatgtttaatgctgacaccgatgagatcatgtccgcccaactggagtactcacggtccttcgacgcccacggagcatcctgtggcggagcccatgactgagagatgaactagattgccccgcgtaccactagcagggcgaacaaactgaaccgttgatgttagtctcgaccgggaccaaaagaat

SEQ ID NO: 6338 - DNA, 325 bp, Triticum aestivum
  Clone ID: uC-tsro9316106g08b1
tttattagctggggatactccctggagcacattgcccacaatttgcaatcgcagcgagggcctgggtgatgcattgttagggaacatcatattcacgggcatgttactcctgggagtacgatatatgctcaaattttcttgagacattacacggtagtcgagagattctgctagccgtcatcatttgaagctatttcaagacatttatgctgacaatgatggttcgggagatcccatgatctgctatatggattggctaaacaaggggcctgtcatcacaaggtgtagcccttgagagtggtgacgcggttcccaaaggcccact

SEQ ID NO: 6339 - DNA, 303 bp, Triticum aestivum
  Clone ID: uC-tsro9316106h02b1
tttcttacgcgtccggagatcctgaagctgcgcgaccgcctcaacaagatctacgccaagcacacgggtcagaacatggacaagatcgagcagtgcatggagcgtgaccttttcatggaccccgaggaggcgcgcgaatgggggcttatagacgaggtcatcgagaaccgctcggcctgcctgatgcctgagggcctcagtgccgttgacccgcctcaccacggagggggcgccggcgccaacggcgcggagctggacagggattttgaggagccctccgcgtacttggagtggccacgaagg

SEQ ID NO: 6340 - DNA, 213 bp, Triticum aestivum
  Clone ID: uC-tsro9316106h03b1
tctgtattacaggctgagggtgctatccaggctctgaattgcagcgggatgattttgggcacactgccagtcagggtgagcccttcaaagaccccggtgaagccacgtttaaattgggtggtgtcaaactgactgcttgggctacacactggattgtcgactggtaggctgcctgtccattagctatagttttcgcgatccattgaaaccatt

SEQ ID NO: 6341 - DNA, 407 bp, Triticum aestivum
  Clone ID: uC-tsro9316106h06b1
cttttagttgaatcaggagaagtgaccgatggagaaagacacggtggcgacggcgacggcggcggcggcggcgagggtgtgccggcggtgcaagtcgaagtactcgccgtcgggaaacacgccgcagtcctgcaggttccacccttccttcttcgtctgccgccgccacgacgaccagaagaggtactacgagcttaaggacggcgaccctccctacgccgccaagttctacgactgctgcggcgccgaggaccccgacgccgccggctgcgccaccagctttcacctcttctacgacgaccctgagtaacgaacctggactagtatgcttgcttgttcctctgaagcaaacgcactgttctgttactttgtacagtcagtagaacaaacacccatctgaattttgt

SEQ ID NO: 6342 - DNA, 450 bp, Triticum aestivum
  Clone ID: uC-tsro9316106h12b1
tctatcacgcgtccggcctcctgcgcctccacttccatcgccttcccaagatcgcagatccgctccggtgagaatccgtcgccatgtcttccagcgaggtcgcctgcacccttgccgccctcatcctccacgatgacgggatccccatcacttctgagaagatcgcgacggtggtgaaggctgccggaatcaaggttgaggcctactggcccgcgctcttcgccaagctcctggagaagaggagcgtcgatgacctcatcctttccgtcggatctggtggagggtggtgctccagctgctgctggtgctgccccggctgctggtggtgctgctgccgctgcagagaagcaagaagagattcaggtggcggccaaggaagagagcgatgatgaccatgggcttcaacttggtttgactaagcagtttaattttcagcttttctggggaatc

SEQ ID NO: 6343 - DNA, 556 bp, Triticum aestivum
  Clone ID: uC-tsro9316109a05b1
cttcgcgtccgactggccatagtcatggccgtggtggttgacgtctcggcgcagaacaccccgcaggacttcgtcaacctgcacaaccgcgcccgcgccgtggacggtgtcggcccggtggcgtgggacaacaacgtggccaggtttgcgcaggactgggcggcgcagcgcgccggcgattgccggctccagcactccggcgggccgttcggcgagaacatcttctggggttccgggcagtcgtggacggccgacgacgcggtgaagctgtgggtggacgagaagcagaactaccatcttgacagcaacacctgcgacgccggcaaggtgtgcgggcactacacgcaggtggtgtggcgcaagtcgacccgcatcggctgcgcgcgcgtggtctgcgccgggaaccggggcgttttcatcacctgcaactacaacctcgcgggcaactgcaacggcgagcgcccgttcgcgttcctcacccttgacgccgaagccaagtagtacgtgcgtgtgagtgtgatcatacatgcatacgtacgtgcatgtgtttatgttt

SEQ ID NO: 6344 - DNA, 446 bp, Triticum aestivum
  Clone ID: uC-tsro9316109a10b1
tttcaacgtgttggaagcggtggctgcggagctccactccctttcgtggatgacagtaagcccggtctacatggaaaggcgcagcgctctccccttccactgtgatatggttctgaggttgaggagacttctccactacgccgatcggcatctctctcagccaacagacaagggagatgttagctagcttagagaggtgattgctaattcacatgattgaaactatagctgtttgttttacacaggtaaaaaacaaggggtagatgccgcttaaacccaagtgcctgtctctgtgtatctagattagggtaggcaggtgaatggtgcgttgatgagcccggttctgctctgatagcaagagtgttcatttcttggcgtgaggatgtatgtaatagcaatacctctcccttgcatgatgtgtcaatcgtgcaacattgtagaactgg

SEQ ID NO: 6345 - DNA, 198 bp, Triticum aestivum
  Clone ID: uC-tsro9316109a11b1
atagaagaagatgatcaagattaaaatcaagacctcatatatgataggatatggaagaatacaccatctaccttaggaggtctttcctgaattctttacaatgcaagaatgtatctctcttattaagtatccatgtatgtcatacgccagataactttgtaatatttatccgattatcaataaagcttgaattatctt

SEQ ID NO: 6346 - DNA, 399 bp, Triticum aestivum
  Clone ID: uC-tsro9316109b02b1
ctggctgggaggcggccccccgggggaaaggcattaacgcctttgccggttacccgaaaaacgggtttaccacggggaacccgggccgggggtcaaccaggattaagtaagacccgttgaggctgttggttgaccttgataagtcggggtccgaccaactggggtaataatggcccttgggggccatggttcttttgggggggagcccatgacaaaggaggacctgatggcccgcctccgttggttgggggaccaactgaaccgggatgtaagcctgccggggacaaaagaaaaactggcgttccggggggcaaagctgaaaaaggagctggatgacccaaggcttaagttgggaattggccgcggtttaacaccgtcgggactggaaaaaccctgggg

SEQ ID NO: 6347 - DNA, 194 bp, Triticum aestivum
  Clone ID: uC-tsro9316109b05b1
gtattgcgaggcgaccggggggcaaccctaaaacccgccagtctacgccccctataccctccccctccctcgccgacgcccgtgggcgcggatggacaaagcccaggcgccgtcgggggagagggtgcctcagcgggcgactgctaggacagagcaagcgcagagccggcccctcgtcgctgagcgaacagctg

SEQ ID NO: 6348 - DNA, 343 bp, Triticum aestivum
  Clone ID: uC-tsro9316109b09b1
acacccgtttacaacaggaacaagcgccacacggacgacgagaacataagggccgccggggccctctaccccgacaccatcaagcggctcctgaacccgacgcaaacaccgcgggcagccgaaagccgagcgcacctgagccctgatcgcctcgatacaaggacactagcttgcgcatattagaaaattcaggaaagcccgcggataccagcaggcccgggccaacccaaacagaaaaatcggccgccctagactccaagacaaggccgggctcctaggcccccaggagcaagcacggccggggcgaacccaaccagcaccgagaaaacggaaaaccccgggg

SEQ ID NO: 6349 - DNA, 400 bp, Triticum aestivum
  unsure (1)..(400): unsure at all n locations
  Clone ID: uC-tsro9316109b10b1
acgcgtgggcggacgcgtgggcgagccgcaccggtgcctggaggtgccccacatcgactaccggcagaactgcatcgcaggtcgccccgaccagcggcccggcgagcagtgcatcgagttcctccaccggccgccggcccagtgtgccgcgcacgggcaatcgtcgccaccgccgatgtactgatacgtggcagacggcaatactgcaatttgtaactgtttgctgcctttgtgccgcgagaaaggataaaaatgtacacatttggtatatactgtaatctttatttttcggaaacaagaaataacaatggattgatagatttgcgttnaaaaaaaaaaaaaaacancnncaaaaaaaacacacaactataaacaacaaaaataataaaaaaacaacaag

SEQ ID NO: 6350 - DNA, 423 bp, Triticum aestivum
  Clone ID: uC-tsro9316109c03b1
gtctggtttggcattgttgagggtttgatgaccacagttcatgccatgactgcaacccagaagactgctgatggtccttccagcaaggactggagaggtggaagggctgccagcttcaacatcattccaagcagcactggtgccgcaaaggctgttggcaaggtgctcccagagcttaacggaaagttgactggaatggccttccgtgttcctactgttgatgtttctgatgttgatctgactgttagacttgcgaagccagcaacctatgatcagattaaggctgctatcaaggaggagtctgagggaaacctcaagggcattttgggctacgtggatgaggaccttgtttccactgacttccaaggtgacaacaggtccagcatctttgatgccaaggcccgggattgctctgaacgacaa

SEQ ID NO: 6351 - DNA, 191 bp, Triticum aestivum
  Clone ID: uC-tsro9316109c06b1
ttatttgaagagttgaactttctggaggggtcggtgttagatcgacaggggctagtagcagctatagtggactgtaacagcagcagcaatcagcctttctctagatggaaaatttggagggtgataactctgtggaggagaccatgacaaaagatgaaactgattgcccacctccggggggtgcgttatca

SEQ ID NO: 6352 - DNA, 175 bp, Triticum aestivum
  Clone ID: uC-tsro9316109c09b1
tcgtttacccctgggataggcccttgtgtgaagtgatgactggagcagcgaccgatgatgtgcgcttccttctcaatatacatgagaaaatgacggaggagttaagcatggccttttcatggcgtctggcactacgctgtgagctcttctgcatgggatgaagcataaatgacaa

SEQ ID NO: 6353 - DNA, 525 bp, Triticum aestivum
  Clone ID: uC-tsro9316109c10b1
gtctcgtgcgaccccgacacgtgtgcgttgctggtagttacagtgatagtgagccatggcgacgatgagggccgccgccgcgctgcttggcgccgtggtgctgctgtgcgcgctccgtcacggcggggcgcagcggtacgaggccatctacagcttcggcgactccatctccgacaccggcaacctctgcgtcggcggctgcccgtcgtggctcacaaccgggcagtcgccctatggggagaccttcttcaagcgccccaccggccgctgctccgacggccgcgtcatcgtcgacttcctcgccgagcactttgggctgccgctgctgccggcgtccaaggccggcggcgacttcaagaagggcgccaacatggcgatcatcggcgccaccaccatggacttcggcttcttccagtccatcggcctcagcgacaagatctggaacaacgggcccctggacacccagatccagtggttccggaagctccttccgtccgcctgcggtaaggactgcaagaggcatct

SEQ ID NO: 6354 - DNA, 370 bp, Triticum aestivum
  Clone ID: uC-tsro9316109c11b1
gtattacaaagcgaagctatcggatttcgggctagccaaagatggaccagaggaagacgagacgcacgtctccacccgggtcatgggcacgcagggctacgccgcaccggagtacatcatgacagggcatctgacggccaagagcgacgtgtacggtttcggcgtggtgctgctggagctgctcaccgggcgcaagtcggtggacaagagccggccgccgcgggagcagaacctggtggactgggcgcgcccctacctcaacgactcccggcgcctggaccgcgtcatggaccccaacctcgcggggcagtatgccggcggggtcgtgcagaaggtctcggccctggcgtacttgaggaagagccccaac

SEQ ID NO: 6355 - DNA, 324 bp, Triticum aestivum
  Clone ID: uC-tsro9316109d03b1
ttttctcgcccgctccgacgcctccgggcccacccccaccgccaccgcctacgacgagctccgcctccgtggcttcccgcgcggcctactcccggccaacgttcgcgggtacacgctcgacgccggctcgggggacttcgccgtcgacctggactccagctgccgcatcgtgctgccggcggggagctacctcgccaacttcaacgaccacctcaccggccacctcgacgaccgtcgcatctccggccttagcggcatccgcgtcagggctttcttccgctggtggtccatcaccgggatccgcgcccatggagacgagcttgt

SEQ ID NO: 6356 - DNA, 443 bp, Triticum aestivum
  Clone ID: uC-tsro9316109d04b1
ttctcacccccgccgccggtgccgcctcctcgcgagatctcgaccatggagggcagcagcggcctcgacgcggcgatcgagtcgctcctgaacacggagaagcagtgccgcctcgccggagatgtggccggcacccggaaggccgccgtcgacatcgtcgagctctgcttcaaggacgccgcctggaagacgctcaatgaccagatcgtcgtcctctccaagcggaggggccagctcaagcaggctattactgctgtggttcagaaagcgatggagtacattgacgtgacaccagacgtggagacacgtattgagcttatcaaaacattgagcagcgtcgctgctggaaaaatatatgtggagatagagagagctagattgatcaaaagacttgcaaaaatcaaagaggagcagggaaagattgatgaagctgctgaaatcat

SEQ ID NO: 6357 - DNA, 405 bp, Triticum aestivum
  Clone ID: uC-tsro9316109d06b1
tttaggcaacatcccttactttgagacatctgcgaaagaagggacaaatgtagaagacgcttttcagtgcattgtaaaggatgctctgaagaatgaaccagaagaagaattgtacattcctgacactgtcgatgtggtgggtggcaaccgcacccaaagatcatcaggctgctgctaagccatgccacgccatggccgtagcaaccattgaacatgctgtctttcctgcctgtataatatcatgttattctgtattccatttgtgacttgaccaatcaccccttcggtacgaaatcaaggatcgatgatctgtcctgttctgtctgtcatcttgtatgttgtgtagttagttgagaattgcggcgtgacgaatatttttgtccggacaaaaaaaaaaagaaaggg

SEQ ID NO: 6358 - DNA, 301 bp, Triticum aestivum
  Clone ID: uC-tsro9316109d08b1
ttgtttggatcaaagccaccgatttcggatgatgtcttagccacggcatttcaggtggagaaggatctcattcactggctccaatctcagttctgggggaacaccaactactaaatattctcttttatctgggcatatgagaagttaatatgtaatgatatatactcccatcatggagtagaataaatgacatgcaatatgatgcatgcatggttgcgagctgtgaattttcatttcctttctgaatcgtgacaagatatgttttttgtcggcacaaaaactaaaattaaaactaacccac

SEQ ID NO: 6359 - DNA, 447 bp, Triticum aestivum
  Clone ID: uC-tsro9316109d09b1
tgttctcctttccccaacccaaaccaggagcgccctccctcccccagccgcccgccccctccccacccaggaaaccagccatgaagggggccaaatccaagggcgccgtcaaggccgacaccaagttggcggtgaagagcaagggggcggagaagccggccgccaaggggaagaagggcaaggccggcaaggaccccaacaagcccaagagggcgccctccgccttcttcgtcttcatgggcgagttccgcgaggagttcaagcagaagaaccccaagaacaagtccgtcgccgccgtcggcaaagcggccggcgagaggtggaagagcttgagcgaatcggagaaggccccctacgtggccaaggccaacaagctcaagggcgagtacaacaaggccattgccgcctacaacaagggcgagagtgctgctgctgctgccccaaaaa

SEQ ID NO: 6360 - DNA, 450 bp, Triticum aestivum
  Clone ID: uC-tsro9316109d11b1
ttcagctggaccttcacaattatacttaacttttcagtctccatggcattatatgccttggtcatattctatcacttgtttgctaaggagctggcacctcacaagcctcttgctaagttcttgtgcatcaaagggatagtcttcttctctttctggcagggctgtgcgttggatgttttggctggtgtaggggttattcaatctcaccatttctggctggacgtggagcacatccaggaggcaatccagaatgtgttgattatcctggaaatggtcattttctcagttctccagcagtacgcgtatcacgttgctccgtacagtggcgctgacaaggcaaaattcgagaagaagaatgaatgacccgccaagcaacataagcagcttgctcttgtatggctttgtgtgtatgcgctggggatatgtcatagacatgaggacttacttatg

SEQ ID NO: 6361 - DNA, 380 bp, Triticum aestivum
  Clone ID: uC-tsro9316109d12b1
tttttacgcgtccgcgcgatgcacgcgtcgagcgccaaggaggagccgagggaggaggacatgttcttccagaactcccagtactgagcgacgagtgtcagaaatggcaaacgacaccactagacgtatctttatgctgtcatacgtaatggtactaggataggcgtacacacattcgtttatttgctggggggcccatggatgcacagggctgcacagaagggtgccccttccttaacacagcggagtaaagaaaatatttagggctgtagcatacacacaagataggtggttgaagcagttctgctttgccattgtttcacacttgcacacagaagtatgttgttgaattcaaattttagtaatagcagatatttgtc

SEQ ID NO: 6362 - DNA, 366 bp, Triticum aestivum
  Clone ID: uC-tsro9316109e05b1
cggacccacagggcgaaggcagaaacgactctgccggatacccgaaacaccggttgaccaccggcaacccggcgcgcgagcgcaccatgattcagccagcaccgccgacgctgccggcagaccctgaagagagcgtgaccgaacaactaggcgaaacagggccctaaggggcccacggacaaatgcggaggagaacacgacgaaagaggaacggaatgcaccgccccgaccgctgggggaacaacaggaccgagacgccagccggacggggaccaaagaagaactggagctccgaggggcagagccgaaagaggagcccgacgaccacccaggccaaaacgaggcacaggccgccgctaaacaacc

SEQ ID NO: 6363 - DNA, 460 bp, Triticum aestivum
  unsure (1)..(460): unsure at all n locations
  Clone ID: uC-tsro9316109e06b1
ttttacctgaaactgacgcaaatactgaggcagacgcagctaaaattgctcgttcagtggcagcgtcctccttggttaaagctgctgtatttggacgagacccgaactgggggcgtattgcttgctctgtcggctattcagggattcattttgatgcagatcaacttgatatttcccttggagctattccactaatgaaaaatggccaaccactcccttttgacagatctgctgctagcaagtatctcaaagatgctggtgacatccatggtacagtgaacattgatgtatcagttgggaatggaggaggcactggaaaggcgtggggctgtgacctaagttataagtatgtcgaaataaatgctgaatacacaacgtgaaattcgtattctccatgaaaactgcatttcttgatacacantccgtgtcttcatttgtctgagtgctctttcgatgcaac

SEQ ID NO: 6364 - DNA, 307 bp, Triticum aestivum
  Clone ID: uC-tsro9316109e07b1
tgtatcaccatctgagagccagcctacagcatcgatttgccatggtcttcatcttcatcctctgctctcaaatatgtccgagaagccgcggatgacgggcagaacgccatgctgaaaagcctcaagctcgtagggcaaccaagcatctttggcagatattacaacatctcctgaactcatctgtattttttcatgtaaacttctatgctggagagtgatggctacttgttggttaaaaaaaaaaaataaacataaaaaaaaaaacaaaaaacacaaaaaacaaaaacatacaaaataaatcaaaatg

SEQ ID NO: 6365 - DNA, 249 bp, Triticum aestivum
  Clone ID: uC-tsro9316109e12b1
tgtgctggatgatgacatctagacgggactgaagaagggtgctcgtttctgttttgtgaatggcaggcgttctatctgtcctggacaacctgaatcttggcctaaactctagtagcagcagtagtgaatgttgtggctggttgcagcctgtttatcattgttatggaatggacggaaagcagggttgatgtggtggtcaaataaaaaaaaattaaaatacaaatcaatactattaatttatttactaaa

SEQ ID NO: 6366 - DNA, 209 bp, Triticum aestivum
  Clone ID: uC-tsro9316109f03b1
tgctaatcagagtggtgtcgatcggacatggagcggcttaattctcatcatgggctgcatgtctaactatccgcttagacttattattccgccagatactgagtctattttgctccatagaaaatttcttctgttgagcctggctatggagaaagatgaccttattggcccgactccctttgctggctaagaacttcccctgcccaatc

SEQ ID NO: 6367 - DNA, 338 bp, Triticum aestivum
  Clone ID: uC-tsro9316109f07b1
tgttacgcgtccgatcgccgtcatcggcggcacagggaagtacgagaccgccaagggcttcgccgccatccgcacactgcaccccggcgaccagcacgccaccgacggcgtcgacagcctcctccagttcgatattcacctctcctgagctgagctgcttccctaactagtggtatcagattatatgatgctctgccgtcgcgctgaacatttgaaatctgaattttacggcctatgcattttactaccataacacctcctatatggtaatgcaaactaagtacctggtgtattttatgcattattttatgaaaaaaacttaggttttttaatgcctt

SEQ ID NO: 6368 - DNA, 352 bp, Triticum aestivum
  Clone ID: uC-tsro9316109f09b1
tttctcctttccccaacccaaaccaggagcgccctccctcccccagccgcccgccccctccccacccaggaaaccagccatgaagggggccaaatccaagggcgccgtcaaggccgacaccaagttggcggcgaagagcaagggggcggagaagccggccgccaaggggaagaagggcaaggccggcaaggaccccaacaagcccaagagggcgccctccgccttcttagtattcatgggcgagttccgcgaggagttcaagcagaagaacccccagaacaagtccgttggcgacgtcggcaaagcggaccgtgagaggtggaagaacttgagcgaattcgacaaaggcccc

SEQ ID NO: 6369 - DNA, 291 bp, Triticum aestivum
  Clone ID: uC-tsro9316109g02b1
ccctgcatggatgcggacgcacagggcgaaggcataaaggctttggccggacacccaaaaaacggggtgaccacgggcaatccggcccgggggtcacacaagaattaagcaagaaccgtgaaggtgttgggtgagaccttagaaggtcgggtgccgaccaacgggggaaacaagggccctccggggccatggttctttggggaggaagccctgaccaaagagaaaccggatggcccgcttccgttggttggtgaaacaccgaaccgcgagaggaagctggacgggaccaaa

SEQ ID NO: 6370 - DNA, 196 bp, Triticum aestivum
  Clone ID: uC-tsro9316109g03b1
cttttcgctcctctcctctcctgccgcactccacggctgcacgcctgcacacgtacaagagaaccccaagcgtcaggccccaagtggactgggctctcccatcggatccaagccgaatatgtcgtcgtctgtctgaagtggagggggaggcggcgcggatttggcctgaggggacctctctgtgcttgtgcacaag

SEQ ID NO: 6371 - DNA, 72 bp, Triticum aestivum
  Clone ID: uC-tsro9316109g04b1
ttttctcgtccgcccacgcgtccgcccacgcgtccgcccacgcgtccgcccacgcgtccgtctagatcgcga

SEQ ID NO: 6372 - DNA, 387 bp, Triticum aestivum
  Clone ID: uC-tsro9316109g06b1
ttgtctgcaagaagctctgtggagcgtcaattgaccatagtggagacagcacggataatgctgcgcgtgcttgctgaaggggataaaaacaggcaaaatcctaatacatcgtgttggagacaacggacaacaactcatatacaacaagctgcccagtgatattgctgaacggcatgttctacttatggatcctgtgctcggtactggtaactcagcaaatcaagctatacagcttcttagaagtacaggagttccagaggaccacatcatgtttcttaatcttatctcggctcctgaaggaatccattgtgtctgcaagcgattccctgatgtgaagatcgtaacatcggagatcgacgccggatttgaccaggattaccgtgtcgt

SEQ ID NO: 6373 - DNA, 380 bp, Triticum aestivum
  Clone ID: uC-tsro9316109g10b1
atcccccaagcaccagagcctcctcaacctcccggcgccggcgcatcgacggcatggcccgcaccaagcagacggcgaggaagtccaccggcggcaaggcgccgaggaagcagctggcgaccaaggccgcccgcaagtccgccccggccaccggcggcgtgaagaagccccaccgcttccgtcccggcaccgtcgcgctccgggagatccgcaagtaccagaagagcaccgagctgctcatccgcaagctgcccttccagcggctggtgagggagatcgcgcaagacttcaagaccgacctccgcttacagtcctccgccgtctccgccctgcaggaggccgccgaggcctacctcgtgggccttttcgaggacaccaac

SEQ ID NO: 6374 - DNA, 51 bp, Triticum aestivum
  Clone ID: uC-tsro9316109h03b1
tcggtttctcgtccgcccacgcgtccggccacgcgtccgtctagatcgcga

SEQ ID NO: 6375 - DNA, 332 bp, Triticum aestivum
  unsure (1)..(332): unsure at all n locations
  Clone ID: uC-tsro9316109h04b1
cttctagccagcttggttcagtggagttctgtctctgacgattcgatttcggtaccgcgacggctccgaaatggagagcgactgccagttcctgctggcgccgccgccgcgcatgtacgccgcgccgggggacgacggcctgttgctgccttgtctagctggttgatccggaccatgtagatcatcaggtcgatcggaccgtcatgtagaatcgtagaacagataggtaggatcccacatgcaagcagccacgaaatctacatgcgagaaatcttcccgccggccggccggcgatctgcttcgtcgactcanaccangaatgtgaaaaccct

SEQ ID NO: 6376 - DNA, 284 bp, Triticum aestivum
  Clone ID: uC-tsro9316110a01b1
cctgatgggggagtgcttagcgaaggccatcgagcgccactgaaaacctccctctatctcgtctcggctcgcctaggccactagcccgtccgtccgtccggctgacgatgccgccgatggcgaccacgacggcgacggcgacggcgactgacttcacggggcgccgcttcgccttggcctgcggcgtgctcagccagtacgtcaaggcgtccggcgtccaggaacccggctatcaggcggacggggcgcactgaaatggggagcttgtacacacggagggtaag

SEQ ID NO: 6377 - DNA, 222 bp, Triticum aestivum
  unsure (1)..(222): unsure at all n locations
  Clone ID: uC-tsro9316110a03b1
gtttttgttcacggtcattgcttttgttgcttcagactcttatcccgagcgagcaatgatctgtctgtcgtttaattactgtatttctattcctgcgtcggctaaactcctgtgcccctgagactgatttgttgtgaaatgcaagttattagattgcaacttgttagcttgtttttcaaaatananaaccaacttaacccttatttcatccctaacaatgac

SEQ ID NO: 6378 - DNA, 471 bp, Triticum aestivum
  unsure (1)..(471): unsure at all n locations
  Clone ID: uC-tsro9316110a05b1
tgggtgnatcaccaacgtatcctaaagtctgcagtgtgaattgtgttggagtgctggtcgcactgaaccttaagggcctgtttgatcatacattcaatttgtatagagaaatcatgtgttcttcgtgtggtgcaaccaaactactattactgactaaaaaaaaaaatgcccacctaaaaccactggaagaacactcagcaatgtaaagaaaaaataaacagtcactaaaagaaaaaccgttgcttaatgaggaaaaatattaaagaggagattgattacacaaggcctaaacattggggggggcccttttttaaaaaccaaatttctggcaccagccttggggtacccaaattttttttttttggaccacaaaattaattttccggccggggtttttcaacctgggggcggggaaaacccccgttccaccacacataatatctttttaaaaaaatcccctttttgcggggg

SEQ ID NO: 6379 - DNA, 109 bp, Triticum aestivum
  unsure (1)..(109): unsure at all n locations
  Clone ID: uC-tsro9316110b03b1
gngtgattcgcttagccatggcaatcgtgaaatgggtgtggttaaaaaacaaagacacaaaaaacaaaacccaaaagagaaaaaccccacacaaaaaacgaaaccatgg

SEQ ID NO: 6380 - DNA, 378 bp, Triticum aestivum
  Clone ID: uC-tsro9316110b04b1
gctaattaccttgacagacattgttaggtcttgtgttagtgaagctagctaggtaagaaaaaccatggcggtttcccgtgccttggctgcactgcttgctgtggtggtactcatggtctgctgtccggcgcctcgtgttctcgccactgaccccacccagctccaagacttctgcgttgctgatataatgaaccctgtgattgtgaatgggttcgtgtgcaagaacatgaagatggtgacggggaacgactacttcttgtccgggcttaacaagccggccatgtttaacgcttatgcctccgccgtgacacctgcgacggcgcgacatttgccgtcccctgatcactctgctcatttccatgttcctcattgactttg

SEQ ID NO: 6381 - DNA, 414 bp, Triticum aestivum
  Clone ID: uC-tsro9316110b05b1
gtgttatactcggggggcacgcgttggtcggacacccagggttagcgttgcacactctaggggaggtgtgactggcaatttggggaggccaaaactacatcaatggcccgcgaggtacaaacggcggtaattggaaaatccctggggggaacccaaaataaagggggtgggggttataaagtatccaaccttgtgaccacatccatacgaggccttaactcttctatggtgcaaacaaaaatcaaacccttgggcgcaaatttacaacaccggaactgggaaaccccaggcgtaacccagcttattgccctttgaaaacaaccccctttgggaaaatgccgtagtaccaaacaggcccgtcccgatgcacttccccctttttccgcagcttgaataccaaaggggacccccccc

SEQ ID NO: 6382 - DNA, 262 bp, Triticum aestivum
  Clone ID: uC-tsro9316110b06b1
agacaacagctaaattattcacccaaaagtatcaaccgacggcttaacaaaggggaggcacacgcacaccccgttaccccagttatattcagcactccattttaccgactaacaataacagcgcaccagcactatatccccatgtccaacgcgctggtacagattacttactgtatgacacagatttattggcaccacaagggggtatgggattgcattaactcttggcgatgtctgggcaggctggggcttccttcttttt

SEQ ID NO: 6383 - DNA, 433 bp, Triticum aestivum
  Clone ID: uC-tsro9316110b08b1
ccttgcgtccggacggtttgcgctcgcggatgccatggctgtgaaggaggcggtgtgtacggagatcatccaggagaacgagcttgtcaccacggagctcgaggagatcaccagttggtggtttgtcgatgccatgctcagtatcgacattgagcatttggacaacatgaacaagagcatggagcatgggttcctcggcttccgtaacaccatcaactccttcaatgcttggatcgataagatgaaggcttccaaggttgttccttgatgcttttattgccttgtatctattggtgggtacagcatgctatcgcatcccatgttattcctcatttatcaatttatttctgaaattagttacatcccattatttgtgccaaatgttgtaatctagaataagccagaaccaaataatgcttctcaagttgtgaat

SEQ ID NO: 6384 - DNA, 223 bp, Triticum aestivum
  Clone ID: uC-tsro9316110b12b1
ccctcctacgcgtgcggacaagctagtgagagaccagctgtgtaaaaatgtgtaaaagagaaacagctatgagctagtatgaacgttcttaggtgtagcttgagttgttgcaagctttgttgcgtaatttgctgctattggtttttgcagactaaataaaacaatgatcgaacattatatcttcatgaccaaaaaactgaaccataaaaaaaacgggtctgcc

SEQ ID NO: 6385 - DNA, 315 bp, Triticum aestivum
  Clone ID: uC-tsro9316110c02b1
ccctctcgtccggtggtgatcagacttggggggctaacacagctgagtacacagattaagtaactatttatcttctccaattgaatctctcgtttccaagggtgttccttgtgtgaaaaaaaaaaaaaaaaaaaaaaaaaaaaaaaaaaaaaaaaaaaacagaaaaacaaaactaaaaaaaaaaaaaagagggactaaaccgtaaagcaaccctgacagggaccacagaagaactcgcgcttagtttggctaaaagtgaaacaaaatgtagttgactggtggtctatgcctagcactgggcgtggaaaaaccccg

SEQ ID NO: 6386 - DNA, 385 bp, Triticum aestivum
  Clone ID: uC-tsro9316110c03b1
ctttctcgtacggtactattccgaccatgcataggccacgcgtgaacagctccgagcactgacccatgacacacacacacatacaacgccagggtcttattctgcactgtgcagagagaagagcagagagcagaggatgcgcatagtaatgccacatgaacggtgagggctccttggtgtgagaagatggcgctaaagacggggccggggccggtgtgagaggacatgaacatgcaccatcacatcgagcgacagggtgacaaggactggcggacgctgacgaagcaggccggtctgatgtgctgagcaaggagctgtcgcatgcggtagatgatgtacctgttcacggatatcatgcgcggacacgtgccagcgaggaggatga

SEQ ID NO: 6387 - DNA, 361 bp, Triticum aestivum
  Clone ID: uC-tsro9316110c04b1
accttcgtcatgaattactcgtattagatttttttagatacagatgtacctagacatgagtaataaacaagaacataggagtaacactttttgcttgttgatgaggaaaaggagtagagctcgtgagcagtactactgcaaggatcttggtacgtgctagaccacatcctcaccctttatttcttgtttggacggcttaagacgcgtatacgcatgccgaacgtttattctacataagtcatgcatgttctctgcatgcccatctcgatcaggcgcaaagcacctagcaagtgaggctgctccccgggtcgacgccgaactgcctgcagtaggccctgtagtagcccgcccgggcgttcat

SEQ ID NO: 6388 - DNA, 291 bp, Triticum aestivum
  Clone ID: uC-tsro9316110c06b1
gttgtcagggtttcctccgcttcgctctcgcagaatgcctcgctacgatgagcgtgatcgttacggtggcaacacaaggctgtacgtgggcagtcttccctcgcgcacccgcacaagggacctcgaagacctgttcggaagatatgggagagtgcgacatgtgtgtatgaactacgtggttgcattagcagcgtgttagtgaacgcagagatgctcgggaacgaaggaacaactgggactgcctgtggcataactgaaagaggatcttgttgacacgaggcctaagcttgg

SEQ ID NO: 6389 - DNA, 375 bp, Triticum aestivum
  Clone ID: uC-tsro9316110c08b1
gataaccttggatgtgccactggccaccccagcttcgtcatgtcctgctcattcactaaccaggttattgctcagcttgagttgtggaacgagaaggccaccggcaagtacgagaagaaggtgtacgtcctccccaagcacctcgacgagaaggtcgcggccctccactcgggcaagctcggcgccaggcttaccaagctcaccaagtcccagtctgactacattagcatcccagttgagggaccttacaagcctgcggcctaccggtactagttgtgtcagcgcgactagcggctggcctgagcctgagtccgtgcagtggcaccaatgggaaccctatcaactatcctcgtttctttacattatctaacatgc

SEQ ID NO: 6390 - DNA, 126 bp, Triticum aestivum
  Clone ID: uC-tsro9316110c09b1
ccatcccattgcccgccgggacaccaccacggcaatggcgtcggcgtcgcggatcctgctcgtggccgcgctgctcctggcggagtcggaaatgacgcccgagcagaaggcgaaggcgaccgagaa

SEQ ID NO: 6391 - DNA, 251 bp, Triticum aestivum
  Clone ID: uC-tsro9316110c10b1
ctctgtgtccaacccgtttctctacccctgttttgtattcctttttcatcttataatataggtttgtggaatagtaagtaacctgatgttacctgaagtggataagtatatgtgcagatggttcctgtataagatctgcttcttgcatatcagcttgagttgttcttggctcaagaatggcctagagcagtagatcttcatggcactgaaatcgacgatgttcttattttattaatgctggccagaacatc

SEQ ID NO: 6392 - DNA, 215 bp, Triticum aestivum
  Clone ID: uC-tsro9316110d03b1
gcctgtagctgttcgagagaggagaaaagggaggcgactcgaggtgcgagttggggctcagcccattcccgggcgctcgccgccggcgttgccggttggagagaagatgggggaggcgcccgcagctgccgtgaacatactagttgtagtagcgctgtttccttagtggagtttgcctttatgccggatctcggagtgatgacgatggggattgg

SEQ ID NO: 6393 - DNA, 539 bp, Triticum aestivum
  Clone ID: uC-tsro9316110d04b1
tttttccgcactagagggtgttcatggcgtgtgtggcatgtcaaatgatgaattcaagctttgccagcctgcggcggcagtggataacccgacagagaatccgtcggctgagtgttgtgctgcgcttgggaaggccaatctatcatgcatttgccgctacaaaggtatcgctggcatatggctgagaatgtaccacatcgacgcaaagcgcgccatggctctgcccggcaagtgtggtctcaccatgcccaacaactgctcatgatcattggatgtactactcatgagctgatgagcatctaggagtcggttgttctacatctgcatcgacacttatatatggctaaataagtggaggagcacttgaaaaagcattgtgctcctcggtcttattggtggtgtggaattcgaaaggtgtgattattccattaagcttttgataaaatagtatatgcctgttattctagaagggtgaggatggcaaaccgtgccttgcatgttggtccatgaaaattaatatcttaatatggtgcgggtcg

SEQ ID NO: 6394 - DNA, 158 bp, Triticum aestivum
  Clone ID: uC-tsro9316110d05b1
cactttttcttccaacttcctctaattatcgtaaatagataatttcttcacttgcatttactgtacaacaattctacctcgtatttatatgtatacaaataaataattaatttccttaaacaaaaaatccaattaaaaaaatatcatcacaataaatt

SEQ ID NO: 6395 - DNA, 279 bp, Triticum aestivum
  Clone ID: uC-tsro9316110d08b1
gatgaagagaggagagacgtgaggggagccacagacaaacccacatgcaaggcgcactcaccagcgcgcaggctacatgggaggaggcatgggacggggcaccgggctgtacatctggggctgcgagtggctctgcgagctgctcatcttgttcgtcgtcttctcctgctagataccttggtttattgctcatatacatgcatacttccatcttatttgcattagtgtgagagacagggagcgtgtcagtgatcttttaggcgaggatggccgggaggg

SEQ ID NO: 6396 - DNA, 60 bp, Triticum aestivum
  Clone ID: uC-tsro9316110d10b1
ttcacgcgtccgcccacgcgtccgcccacgcgtccgcccacgcgtccggttctagatcgc

SEQ ID NO: 6397 - DNA, 83 bp, Triticum aestivum
  Clone ID: uC-tsro9316110d12b1
tcttcatcgtccgcggaccccccttaaacctctcccccttgtaaccattattatcggttcaagaaagttgcttctctttctgc

SEQ ID NO: 6398 - DNA, 236 bp, Triticum aestivum
  Clone ID: uC-tsro9316110e01b1
ctcatgcgtccgcccacgcgaccgcccacctcgaggggtattcctcctctgccttgctccccccaccactttcggccaacgctcctccagccagatgagaccggcagcggggacctaccccaggccattcggcgtgcgcaactccggagcccccgccgactgggcccctccggccggctccatgcacggctactacgccgcgcaggccgcctactccggcgggtacgacaagatgc

SEQ ID NO: 6399 - DNA, 409 bp, Triticum aestivum
  Clone ID: uC-tsro9316110e03b1
gtggttacagaaggagctcaaggatctgcagaaggatccccccacctcatgcagtgcaggtcctgtgggtgaagatatgttccactggcaggcaacaataatgggcccatctgacagcccatattctggtggagttttcctagttactatccacttccctcctgattatcctttcaaaccaccaaaggtggcattccgcaccaaggtgttccatccaaacattaacagcaacgggagcatttgtctggacatcctcaaggaccaatggagccccgctctgactaattccaaggtgcctgctgtccatctgctacctggttggggacccaaaccctgatgaccctctggttcctgagatcgcccacatgtacaagacggaccggcacaagtacgagagcacccgcaggac

SEQ ID NO: 6400 - DNA, 427 bp, Triticum aestivum
  Clone ID: uC-tsro9316110e04b1
gtttcgtcgtcctcacgcgaccagcagcttgactccctcccgcaccgcacgcacgagcagcaggaagatgcagatcttcgtcaagaccctcacggggaagaccatcaccctcgaggtcgagagcagcgacaccgtcgacaacgtcaaggccaaaatccaggacaaggaagggattcctccggaccagcagcgtttgatatttgctggcaagcagttggaggatggacgcacgcttgctgactacaacattcagaaggagtcgactcttcacttggtcctcaggctcaggggcggcacgatgatcaaggtcaagactctcactgggaaggagatcgaaatcgacattgagcccaccgacacgattgacaggatcaaggagcgcgttgaggagaaagaaggcattccttctgtgcagcaaaggctgatt

SEQ ID NO: 6401 - DNA, 223 bp, Triticum aestivum
  Clone ID: uC-tsro9316110e05b1
cccatgcgtccgcaatcaatcaatcccacctactccacctctcgccggagccccagcaaggagcaagcaaggaagatggacgccggcaagctgaagaaggtggccgggaagaagttcggcgggccgaggaagaagtcggtgaccaggtccgtcaaggccgggctccagttccccgtcggccgtattggtcgcttccttaagaagggccgttacgcccagtgcg

SEQ ID NO: 6402 - DNA, 107 bp, Triticum aestivum
  Clone ID: uC-tsro9316110e07b1
tttcacctacctgactgaattcaagtgtcatattgtgaagtgatggcagaaggcctctatgggtctatgggtgcacccatccaacaaattaatagagatgggaactg

SEQ ID NO: 6403 - DNA, 251 bp, Triticum aestivum
  Clone ID: uC-tsro9316110e09b1
ggtgaagttcaaggaagccatggtaaggatgggcgctatcgaagtcaagaccagggacgattttttcaatggtgccgctgttgagatcaggaggaattgtcgcatcgtcaactcatactaaacttgttgatcttatcgcatcatcgctagtttttcaacagtagattgagaataagctcgtgctttctcgggtttccattgatgtttattttgattacttttgtaatgttattattttttccctataataa

SEQ ID NO: 6404 - DNA, 259 bp, Triticum aestivum
  Clone ID: uC-tsro9316110f02b1
cggtctcgtgggcggacgcgtgggcggacgcgtgggcagctaccctggctgggtcactcttcacattgcactgctcccagatccatatcgacatgcccacgctgtctgatgaggataaagatgttatgaaaaaatggggtgctccaaacaagattgacttcctctctctttcttatacaaggcacgcagaagatgtgcggcaagcacgggagttcctctcttagttaggtgaacctagccaaactctgaattttgccaa

SEQ ID NO: 6405 - DNA, 575 bp, Triticum aestivum
  Clone ID: uC-tsro9316110f05b1
ctcatgcgtccgcggacgcgtgggggatgctctgggtcctttcagaccaataaaaaaaaaataaaaaaataaaaaaaaaaaaaataaaaaaaaaaataaaatatttttttattaattatttattatataattattaaatttattataataatttttttattttataatttaatatattttattttttttatattttttttttcatctttatttttttttttttttttctttatattattattttatttatatttatttttttttttttatcatatttttctttttttactttattttatatatttttttattttttttttattcattatattttattatttatttttaattatctatctttttatttaatttatttttttatttataaattctttttttctttatattttatttattatattttttataataattttttcttatatttttttttttttttttattattatttttacttttttattttaaattttatatttatttttttttttttttttttttttattttttttttattattttatttatttcttatatttttttttatattttta

SEQ ID NO: 6406 - DNA, 433 bp, Triticum aestivum
  Clone ID: uC-tsro9316110f12b1
tttatgcagtcgccgtcgatgccgacgaccccggccacgcctttgacgccgtcgtcgtcgacgcccccgcgcggcggcagcgtgtggcggagcgttttccaccccgggagcaacctggccaccataagccttggcgccaacctttttgaccgcccgcagcccaacttccccaccgtctacgactggctttacagcgacgagaccaggaccaggagcaaccaccgttaaataagagccgtcggccgaagaagaagagagggtgctcatcatcttctgcgacgctcgccatgtttgctgctcttttggttatctaatcctgcatagcgtacgttgcctgtcgaggctgtatgtgggttgtcttgagcttcgtactactggctacttgtgcttgtaactttttttttttttcccggtctgctcactgtcatgcttt

SEQ ID NO: 6407 - DNA, 377 bp, Triticum aestivum
  Clone ID: uC-tsro9316110g03b1
cccactcgtccgcggcggattagggtttcacttgcatccattctcaatgttagcaggagcgagtgggagtccggccatggcgccgtcgcagcccaagtcagggctcttcgtgggcatcaacaagggccacgtcgtcaccaagcgcgagctgccgcctcgcccgtccgaccgcaaggggaaaggtacaaagagggtgcattttgtcaggaacttgatcagggaggttgctggatttgctccctatgagaagcgtatcactgagcttcttaaggttggaaaggacaagcgtgcactcaaggtcgccaagagaaagcttggtactcacaagagagcaaagaagaagagagaggagatgtcaagtgtccctaggaagatga

SEQ ID NO: 6408 - DNA, 341 bp, Triticum aestivum
  Clone ID: uC-tsro9316110g07b1
gatacccaaaccctaccgagctcctcctccccccatcccctcgttgcggcggcgacagagaggagagagagagagagagatggcgaagtctctgcggtccaagcgggagaagcggctgcggacgctccggcgggagatcgcggagcccttctacgacaagaaggaggccgccaagcaggccgcgcaggccgccgccctcgaggcccccaagcttcccgtccgcgtgcacccgatgtacgaggagtgccttggcgacgccgctgccgccgacgtcagccgggcctcggccttgaggttgatggaggaagcaagaagtctgcattcttcctgtagccaatggg

SEQ ID NO: 6409 - DNA, 262 bp, Triticum aestivum
  Clone ID: uC-tsro9316110g09b1
ccctcgcgtccgcatggcggcgaggagcgagaacgagtcggacggcgacgtgggcaccaaccccgccgaggggggctcgtgcctgtccctgccgcctctagctgccggtccagccgtgtgcgtcctccggtccgccggggacttcgccggcggggcctttgtcggatctatttttggatatggacaagggttggtatctaagaagggtttgaagggcttacttggcaatgcagggtttttttggcaaaggtttgcaggtatt

SEQ ID NO: 6410 - DNA, 382 bp, Triticum aestivum
  Clone ID: uC-tsro9316110g10b1
ctttctcgccctcccccgcccgccaccggcagccatggcgacggagctggcctacgcgccgccgatgaagtcggggaagctcgggttcgagggcacccaggaggtgcagcaccgcatccgcatcaccctctcctccaagtccgtcaagaacctcgagaaggtgtgctcggatctggtgaagggcgccaaggagaagcagctcaaggtcaagggccccgtccggatgcccaccaaggtgctcaacatcaccaccaggaagtccccctgcggagaaggtaccaacacctgggatcggtttgagatgcgggtgcacaagaaggtgatcgacctcgtcagctccccggacgtagtcaagcagatcacctccatcaccatcgagccc

SEQ ID NO: 6411 - DNA, 252 bp, Triticum aestivum
  Clone ID: uC-tsro9316110h01b1
atgtgtatctggtaatatcacggacgcagctcctctgacgtgctgtcagcccactgacatgtgggcccggccccacgcgtcagtgagccaacggcagggtgcagtacggcagaggagccctaatatcactgtactggaacatggttaggtgtttatggtgtgctggaaatgctgcatgttgttggcattgttccatttgagtctcggatgatgtcgcttgttgcttatttgttttcagttagtggggtcctt

SEQ ID NO: 6412 - DNA, 177 bp, Triticum aestivum
  Clone ID: uC-tsro9316110h03b1
ctactcgtgggcggatatctcggctctcgcatcgatgaagaacgtagcgaaatgcgatacctggtgtgaattgcagaatcccgcgaaccatcgagtctttgaacgcaagttgcgcccgaggccactcggccgagggcacgcctgcctgggtgtcacgcaacctgattgtttgttctc

SEQ ID NO: 6413 - DNA, 498 bp, Triticum aestivum
  Clone ID: uC-tsro9316110h04b1
aattttctcctccccatcccctccatccctcgaaccatccgtccgtcggccatggccaccgccgccgcgtcccaggtggccttctccgcgcccgtcggccgctcggaccgcgccgtcaggagctccggaatccagggcatcaacagtctcagcttcagcaacaaatcatggatcggcaccgcattggcgtgcgacagcaaggccgcggcacattcgaggcatctctgcagggcggtccagcagtcgagcaagagcaaggtcttcgtcgcgccccttgacctggagagcgccaaggagccgccgctcaacacctacaagcccaaggggccttacacggccaccattgtctcggttgagcgggcggtaggccctaacgccccaggagagacgtgccacgtcgtcatcgaccatggtggcaatgtgccgtactgtgaggggcagagctatgggattatgtctccgggagagaacccaaagaagcctggaaacccacagaat

SEQ ID NO: 6414 - DNA, 132 bp, Triticum aestivum
  Clone ID: uC-tsro9316110h09b1
tgataagatgcaatcatcaagccgctcttcaggaggcgatgcctggtggaatgcccggtggcttcccattcccaggaggcatgggtggaatgcctggtggcttccccggaggaatggggggtgtgcttccct

SEQ ID NO: 6415 - DNA, 551 bp, Triticum aestivum
  Clone ID: uC-tsro9316110h10b1
ctttacccctcccatggccgcccccagttcctgggcctccccgttccacgaaaagagagcttagcgctaccaagccctccgttctttccagttctcggctgctttctccgtcccggtcatcaatcttcgtcgagcagagagaggaaggaggtcgtcagattcgcgcgagatccatggggaagtacgtggagctgctggatatgggggtgcgcatcgccgcgcggttccactcccactgccctcagacggcccggatgtactaccaccctcccgcttcctcctcggccgcccccggcgccgtcgacggcggcgggatggtgcccggagaaggcgccgtggccatggccatgatgaagaggcagcagcgggccgccatcgacgccacggagattattctctacaccgtcgtctaggccggttgcttctgagctcgtccggatttatcgcgccattgaagagagaggagaggtgttatcttcttttattgcacttactgtctacttccgatcgagagagggaaatgaaagatgggagacaatgtttgattgatt

SEQ ID NO: 6416 - DNA, 335 bp, Triticum aestivum
  Clone ID: uC-tsro9316110h12b1
tggtctcgtgggttgggacacaagcggataaggaggatgtgttagcacacattcaagaggagccgctgggatgagatgttcgagtacatcaaccgcgccagatataggatactcgagacttatattgcctgctggattaaataagtggtgtgttgtaacccaccaccatcaagtcattctgcgctatataatgtcaagatcaatcaagatttgggtatgatgctcatgtaaatcttgtgatttgttctgacattacttttctggcttgtatggatgataattgtatgcgtgagctggttgtacctatgattgcgtgatgatatataactaaaatt

SEQ ID NO: 6417 - DNA, 454 bp, Triticum aestivum
  Clone ID: uC-tsro9316113a03b1
gtggctattcagtgatggtagtggtggttgccttcaccgtctacgatttgacgctacttcttcttacatctggtagagatcctggtataatacctcgcaatactcaccctcctacacctgaaagcatctatgggagcaattatattagaggtcaaacaccgctccgtttgcctcggacaagggatgttgatgcaaacggaattaatgtgaaggttaagtattgtgacacctgcttgctttaccgaccgccttgatgctcacactgttctatttgcaataactgcgttgaacggtttgatcatcattgcccatgggttggccaatgcattgagcagcgtaattatcggatcttctacatgattgtattctccaccatgttaatctgcctttacgtaatcgccttctgttgtgtgtacataaataagaatagtgatgctgagcagttgtcaattgg

SEQ ID NO: 6418 - DNA, 275 bp, Triticum aestivum
  Clone ID: uC-tsro9316113a09b1
gcggtctcgtgagcgcccacgcgtccgggaagcgtaagaggcgtgtctactgctgttactatgcgatcagggtgatcttgttctgcgttagactaggggtcagtgtgaacctgcagactgctaagtaattatctgtgtaataatgtccgctggcttgaggccataccttgtactctgtcagtggtttgtgtgccgttgcactcgatcgcctttatgccacacatctatcgaatgaaatgcagtagtgacttttcatggtgaaaagcttgatgaca

SEQ ID NO: 6419 - DNA, 505 bp, Triticum aestivum
  Clone ID: uC-tsro9316113a11b1
ccctgcgtgccccgccgcggaatccgggggtcgccccacgcgtgcgccctctcgtgcgtccacgcgtccgcccacgcgtccgcggacgcgtgggtgcctctgttcagccgtacctgcatgagtcccggcaccagcacgcgatgaagcgggctcggggaacaggcgggcggttcctcaacgcaaaggagaagtctgaagcttcaggcggaggcaatgcatcagcgaggtctggccacgccggcgttcccccggatggcggcatgttctcgaagcacgaccacaccttaccatccggtgacttccattaccgcgcgagagggggcgcctagggtgggcacgcagttgccccctggcaaatcatccttggcttatgcgtgtggcgaatgaccgtcaactcggtccagtgatattgtacaattgaatttagagtctgtgcaattgtgttacttgcgggtttggaagacaggccttgcttttggggaggggacgatgcagctgcagctgc

SEQ ID NO: 6420 - DNA, 549 bp, Triticum aestivum
  Clone ID: uC-tsro9316113b02b1
cggatttgtgggcagcctcctcctccctcacccgccgctcgccgcccgccgaggttggtcgccggacgccatggctcccaccaagaagtcgaagaagagcacggagaacatcaacaacaagctgcagctggtgatgaagagcggcaagtacacgctcggctacaagaccgtcctcaagacgctccggagctccaaggggaagttgattatcctcgcaaacaactgccctccgctcaggaagtctgagatcgagtactatgctatgctgtccaagatcagcgttcatcatttccatggaaacaatgttgaccttggaactgcctgcggcaagtactaccgggtctgctgtttgagcattcttgaccctggtgactcggacatcatcaccaccgttcctcagtgaagacaagcttacctatcctagcctaagatgatgtagtgtggagagtcgtgcttacaaggccgatggccgtctcgttatcgagccagagctgccaaacgcagtttcaaccaaacatggctgtttttgtaggcaatcctatgggtttt

SEQ ID NO: 6421 - DNA, 533 bp, Triticum aestivum
  Clone ID: uC-tsro9316113b03b1
ctcatttctcctaccacctcggcaccaccagcccaagcagagccatggcgcccaacggagacaacaccgtggccaacgtccacagcggcatcgacagcaccaacaagacgctgctcaagagcgacgccctctacacctacatcctcgacaccaccgtcttcccccgtgagcacgagtgcatgcgcgacctgcgcctcatcaccgacaagcacccatggggctacatgcagtcgtcgtcggacgaggcacagctgctggggatgctgatcaagatggcgggcgccaagaagacgatcgaggtgggcgtgttcacgggctactcgctgctggccaccgcgctggcgctcccggaggacggcaaggtggtggccatcgacaccgaccgcgagtgctacgaggtgggccgccccttcatcgagaaggccggcatggcgcacaaggtggactttcgcgagggcaccggcctggcgcgcctggacgagctgctcgtcgaggacgagggcgcggccagctacgacttcgcgttcgtggac

SEQ ID NO: 6422 - DNA, 374 bp, Triticum aestivum
  Clone ID: uC-tsro9316113b04b1
cccatgtttccggtaactcttccagggggtccagttccacccagagagcatcatcacccctgaaggcaagaggatcatcctcaactttgcgagatacgtcgaggagtttgagaagcagacctccgaggggaagtagatgattcaggaatcagagcagttagaggaagtagagactattgttgagagatcaggcaggcaggaaggggcctaaaagccaagcagattcagagaggaataagggaacagagctttccgttgccattcgtttggttcattgtaatatatcattgtggatggagatcccgtatgaacttcattcggtcagttatgtgcgtcgtggtgctcttcctcaaataataaatcggtggaagctg

SEQ ID NO: 6423 - DNA, 393 bp, Triticum aestivum
  Clone ID: uC-tsro9316113b05b1
gcgtttttccggatgccaaatttcaatagcgttcactcggagtcggaaacaacgacccaaccagacacaccacacgccaccgattaccattcttgcggggctcggcggagggtgtaagaatgggctgcttgtagtgcacgcgcgggccgttgatcggcaggggctcctcggccacggagaagatcgccgtcaaccgtcggaccgggggggaactagcgggcaagagagtggccgccgatcgggacgccgagctgaggggcgagcggggcatcctccgaggactaagatcgccggacgtcgagcgctgcctggacacgcaggacaggagcggaggacttctcaacatgataatggagaacgcgttcggaggctcgctgtcggacgagatcaggc

SEQ ID NO: 6424 - DNA, 475 bp, Triticum aestivum
  Clone ID: uC-tsro9316113b06b1
caggaggcctcagatgaagaagccttcatcaagtagttctggaatggaatccacagacgatgatcatgatgctgacttctctcagcgcaggtccgggcaaagggggtctaggcagcatgcttctaggccagaagcatcacctttggactttggcattcgtccacagtccaaaattgaccccgaacagatacgggctcgtgctaagcaacaggtacaagaccagcgccggctgaagatgaacaagaaactgcagcggctgaaagcgccaaagaagaaaaacctccaggcttcaaagcttagtgttgaaggccgtgggatggtcaagtacttgtaagctagacacccccgacagccttgcgatgcatatgatggtgtgcgctcagcagtgggctgctgaagcagtatcaagcactcttccaccattgccatcggagggcaacaagatcggtggaaatggaattgcttggctgatata

SEQ ID NO: 6425 - DNA, 492 bp, Triticum aestivum
  Clone ID: uC-tsro9316113b08b1
attttttctcgtctcgtcgaggaatcaacaaccatgggcggtggcaacgcgcagaagtccaagatggcgagggagaggaacctcgagaagctgaagggcggcaaggggagccagctcgaggccaacaagaaggccatgaacatccagtgcaagatatgcatgcagactttcatctgcaccacctctgaagcaaagtgcaaggagcacgccgaggcgaagcatccgaagagcgacctcgtccagtgcttcccccacctcaagccgtgatatctgccaaatcggacggagagagagataaaagagagagagagaagctgccgtaatccacctagtattatcatgttccgcaatgactggttgttgacctaagcatgggtctgaactctggtgtgctgctgtcccagctgctttggttgtgtgcccatctactatgtaatcgtcctctatcagcctgttgtgctacaatatctaaatctgtgtggatttgctcct

SEQ ID NO: 6426 - DNA, 433 bp, Triticum aestivum
  Clone ID: uC-tsro9316113c03b1
acgactatcacccacagcccggatccagatcttgttctagtagcaaccttcttctgcgtcggccgctcacagggaagggaaggactccaccgtcgagccgattttcggagcggatcgttcgtcggtcatcaggcgatggctcgcgcggcgaacgttgacgcgcccgctgccggcgcggcgcagggcggggcgaggaaggcggaggggttggcggcccgggccggcgacggcaggagggtcgaccaggccgtggcgtacctgcttatggccgtcgcgctcggcgtcacctacctcgtgcactgatcggtcgatcggtcgacggacgacagtcggcagctaggagaattcatgttcgtgtggcctcatctttgtgtagatctttagcgaggaaaagaaaagggattctattacttttggatctctgaagctagtt

SEQ ID NO: 6427 - DNA, 534 bp, Triticum aestivum
  unsure (1)..(534): unsure at all n locations
  Clone ID: uC-tsro9316113c04b1
agcatatccaatagagaagagagaggcgcaccggccctttccaggccacctggccctcttgccctcgagttcagctcggatgaacgatgatgtgaggaagcagcaagagaagcaaaagggaagaggaggcggaggtggaagcggaggaggaaggctggcgaggatgctgcgggagcacagggccaggctctacatcatccggcgctgcgtcgtcatgctgctctgccaccatgactgatgctcgctccaccgatcgatgtttacctgcgaccctggcccctgctacatcgtctctgcctgctactctgtccggccaccatgtatctaggttaggtattgtggtttcgatcttggttttgcttgtgcaggctcgacagattaactccttggtgtacatataggcaggggatgtaggtagttgttttctgaattctgacggntactctgggtttcgaggtttggtgggagtgtggcgtggtgctcccaagtcctgcaatggcgaggatgcacatgtatcgatctgttctgggtact

SEQ ID NO: 6428 - DNA, 453 bp, Triticum aestivum
  Clone ID: uC-tsro9316113c05b1
cccactcgtccgcggacgcgtgggcacacacacacacacacacacacgcactcagagagagagagagagagagagagagagagagagagagagagagagagagagagagagagagagagagagagagaggagaagaagaagaagaagaagaagatgggtcagagccccttgatccggctgccggaggaggagcaagttcagctacttgtaacgacccatggcagcaataggaaggaacagcttggcgagtctacataagctacaaatagatactacaaaaactcaagcaaggacgatctagttttgagggcgacactagactgaatcactagaatgggatgaaatcttgatcaagtgacaaaaggaacatacaattaccggtgattgcgcgaatgtcaccttctgtgcactttatagttggaagatgatgcacttgcctagcttgaatatata

SEQ ID NO: 6429 - DNA, 458 bp, Triticum aestivum
  Clone ID: uC-tsro9316113c06b1
ggtccttcgttttccgcggcgcaacgatgggggagagggtcaagggaaccgtgaagtggttcaacgtcaccaaggggttcggcttcatctccccggacgacggcggcgaggaccttttcgtccaccagtccgccatcaagtccgacggctaccgcagcctcaacgagaacgacgccgtcgagttcgagataatcaccggcgacgacggacgcaccaaggcctccgacgtcaccgcaccaggaggaggggcgctctccggcggctcccgccctggcgaaggcggtggtgaccgcgggggccgcggcggctatggaggcggcggcggtggctacggcggtggcggtggtggctacggaggcggtggtggcggctacggcggcggtggtggcggctacggtggcagtggctatggaggcggcagtggcggtagccgtgggtgctacaagtgcggcgaagat

SEQ ID NO: 6430 - DNA, 504 bp, Triticum aestivum
  Clone ID: uC-tsro9316113c07b1
ctatcgcaacacgtttgcaaacctggcaatccccctcttctccattgccgagccggtcccacccaagaccatcaagcacaaggacttgtcctggacggtctgggaccggtggaccgtaacaggcaacatcacgttacgggagctcctggagtggctcaaggagaaggggttgaacgcatacagcatatcgtgcggcacgtcgctcctgtacaactccatgttccccaggcacaaggagcggttggacaggaaggtggtcgacgttgccagggaggtggccaagatggaggtgccatcgtatcggcgccatctggatgttgtggtggcctgcgaggatgatgatgacaatgacgttgacatcccactcgtatctgtctacttccgttgaaaggattccctctgaattgacatcatctcgtgtcccatctttccagtgaagtactttatatagttatactgtaaactgagctggggtttaaagcaatattactgattttcgtatgc

SEQ ID NO: 6431 - DNA, 557 bp, Triticum aestivum
  Clone ID: uC-tsro9316113c11b1
gttgtagggcttcggtacacagataccgagcggggaagacgaggtatgcccattaccggcaaactgacgaccttctggcagactcagggtggcactgcagcttttgctttcggtacataaatgattatgtcttcaaaatgaaagcctacagccatgtggaccggatcaggttcagctacttcttgaacccgaaaagaattcagcatgtgatatgccaaggggctgatctctttgatatgcttccggaggagtacacgttccaagagatcatcgccaagcttgggccgatcccaagtacgtattcggcggttcatcttcccgcctatctgctcgagaaggctgatcagtacagatatcttcttcctggcaactgcatgagagaaagtgggtagcctccgctgtttgcatcaagatgtgatgcccccttggggaagagcgtggcttagcggttgtatttgataccagtggctggctgacttagttggaatggcggttgtgtgggttcatgattttgaccatgtattcaaaacaatggaagagggcctgcagcatacgca

SEQ ID NO: 6432 - DNA, 278 bp, Triticum aestivum
  Clone ID: uC-tsro9316113c12b1
gtctatgcgagcacacgccttggccaaagcccattcttttcttttcttccttctttggttcgtgtgtcaaagcattgatttgaagagttgaattttttggaggggttggtgttagatcatcagggggtagtggccacgcgttagtagcagctatagtggattgtagcagcattaaatcgttctgtaatttgaaaatttggagggagaaagaaaaagccaaggtccagtggttggccctaacaaaaaaaaaacataaaaaatcaaaaagataacacaaa

SEQ ID NO: 6433 - DNA, 488 bp, Triticum aestivum
  Clone ID: uC-tsro9316113d02b1
ggttttatcacattctactcgacgacaaagcctcttgacaaatcttggcatgtccttgggctcgggtataatccaagcatcagcatggaggagattagaaacgctgctgttgtgcatttcaatgggaacatgaagccttggctggacattggtatgaaccagttcaggcagctctggacaaaatacgtggattacgacgactcgttcattcgtcaatgcaattttgcaccgccatagaagaaggaagccttgacatttattctgcagaaatggaaaaggtttggagattggaactggggaacatttcagctggaacagcgccgaacatcttttactgtcagatgactgccgtcctgaaaccggttttcatttctaattcgaaaacaatcacttgcgattctacttgcctgagattagtcttgtgaatgtgtaaaattgtgatacgaattctatgtctcatgctatacttagtactgagtgctggatag

SEQ ID NO: 6434 - DNA, 453 bp, Triticum aestivum
  Clone ID: uC-tsro9316113d05b1
aacctgtcctatgcttaccttgatagtatctgtttgcaccgtcaaattttgctaccttcgttctgtggctgaacctccaggcatgtctgttgaactatttgctatgtgcctgtgttacctggaattcgaatgattgaagtagtcctcgatgtgtgctaaaaaaaaaaaaaaaaaaaaaaaaaaaaaaaaaaaaaaaaaaaaaaaaaaaaaaaaaaaaaaaaaaaaaaaaaaaaaaaaaaaaaaaaaaaaaaaaaaaaaaaaaaaaggaggggggggggcctttttaaagaaacaaattttcctccccgggtattccaattttttttttttttttgggggaaccaaaaataaattcccttgccccctttttaaaaagggggaaaagggaaaacctctggcattcccaaattaaatgggctttggaaaaaaatccctttttggcagatgggaaaa

SEQ ID NO: 6435 - DNA, 551 bp, Triticum aestivum
  Clone ID: uC-tsro9316113d06b1
cctttgcaaccacacagattatgccacttcactaacagatgcgatagcgaagatattagacccagtgagtgctctttcagccattgatgaagtgagcaagttcagggagtgccaagggaggtttgggaccaggttggcagaagaagctgcggcgagaatggggccaacccaatggtggtttcagtttggaggggatgttcctgcattgcagaaatgtgcaatgagaatttgctcacaatgtgtctcctctagtgggtgtgagagaaattggagcgcttttgctttggtgcacacaaagcaaagaagtcgtcttctatatgacaagctccacaagctagtttctgtacgctacaacttaaagatacgtgctgaagaagatcaagagaaagagagagatatagataaagaaattgatccaagtgcattgctaatggataccacaatgtttgatgaaacaaacccaataatggagtggctgaatgaggatgtagaggatccgattgtggatggagctgatgcagctagtgctgtttttgagcaaataaggcgcc

SEQ ID NO: 6436 - DNA, 534 bp, Triticum aestivum
  Clone ID: uC-tsro9316113e01b1
ctcgtgttagcagctatggagttcattcacaagggtggggtttggtggttcctcctgctcgcaatggtgttgctggctccggcgacggtaggcgccgagcaggaggatggggccacaaccattaccaccttgcacgtggaggaggaggtcggctcgcgtgccgatgaccatggcaacgacgattgcgacatcaagtgcgcctattaccaagatctggccaggagacagttctgtgtggaccagtgccacagccagcagcatcatcatcctagcagagaagactgcgagttgaaatgtcaacactggcaagacccaacaagaaaggaactatgcgtgcaacagtgcatgagcttcggcctcaacctccatgtgggtggcagcagcagcgtccatgagcgccctcatgccttggaggaggaggtcggttcgcgtgccgatgaccatggcaacgacgattgcgacgacaagtgcgcctattaccaagatctggccaggagacagttctgtgtggaccagtgccacagccagcagcat

SEQ ID NO: 6437 - DNA, 488 bp, Triticum aestivum
  Clone ID: uC-tsro9316113e06b1
cccatttgtccgccaagagcgaactgagatcatcctaggaccaggcgcgaccacacaggacaagatgctgctgcttaatccggcgtccgaggcggcggcggcggcgctggacagcatccggcagcagctcctggaggagccaatggcgccggcgcggccggcgtactgccggagcgcgagcttcggcagcctggtggcggaccagtggagcgagtctctcccgttccggcccaacgacgccgacgacatggtcgtctacggtgccctccgcgacgccttctcctgcggctggctccccgacggctccttcgcggccgtcaagcccgagcccctgccctcccccgactcctacgacggctgctgcctcggcagcttcctcgcgtcgccgcccgggctggacgcgccgtgggcggaggaggccgaggtcgcagcgacggcgtcaagggggaagcactttaaaggcgtgaggcagccggccgtgggcaagt

SEQ ID NO: 6438 - DNA, 484 bp, Triticum aestivum
  Clone ID: uC-tsro9316113e07b1
gttatgtctgtcggagggaaccgtcatgttctttatgcaagttatctttcacagaaccaacagaactacagatctttttcggcttcgtccgaccaagagaggatagaagctgcaaacaggataatacatggtctgccaaggtgtgtgaaaattgtagaagttgggcctcgagatggactgcagaacgaaaaaaatacagtgccaacacctgtaaagattgagctcataaagagattggcaacctctggattatcagttgttgaggcaacaagttttgtctccccaaaatgggtgccacagctagctgatgcgagggatgttatggaagtggttcggaatattacgggtgtaagctttcttgtattgaccccaaaccttaagggatttgaagcagcagctgcagcaggtgccaaagaagatgcaatatttgcgtcagcttctgaagcattttcaaagtcaaacataaactgttcaattaaagaga

SEQ ID NO: 6439 - DNA, 546 bp, Triticum aestivum
  Clone ID: uC-tsro9316113e08b1
tctctcaagtgaatcgctgctatggtgaacgctgacggaagtacggccgtgcatgcgtctggaagtacttcacagatttgtgtgattatttgcctctcacagctcttatagaaaaccacgtggtttgcctccatggaggtctctgtccatcattagatacattggacaatattcgttctcttgatcgcatacaagaggtcccgcatgaaggacctatgtgtgatcttttgtggtctgatccggatgaccgatgcgggtggggaatttcaccaagaggagcaggctacacatttggacaagatatagcacaacaatttaaccatacaaatggtcttagccttatttcaagggcccatcaacttgtgatggaagggttcaactgggcacaggagaagaatgttgtcacagttttcagcgcgccaaactactgttaccggtgtggtaacatggctgcgattctcgaaattggggagaacatggatcagaacttcctccaattcgatccagcgccgcggcaaatcgagccagacacaacgcgcaagaccc

SEQ ID NO: 6440 - DNA, 138 bp, Triticum aestivum
  Clone ID: uC-tsro9316113e11b1
ggcgaacgcattgacgcctatgtctgtaacctgaaaaactgggtgttctccgcccacacggcgcgcgagtctcaccatgatacagtttgcaccgttgttgctgctggctgcccctgatgagcttgtcatcgaacaatt

SEQ ID NO: 6441 - DNA, 110 bp, Triticum aestivum
  Clone ID: uC-tsro9316113f01b1
cccatttttccggcgacgctgtggccttgtcgaggtggcttaatgttcagagcttcagagcatgtagcgagtgccgagtgcgcaattaatatgctaatttggttgcatat

SEQ ID NO: 6442 - DNA, 514 bp, Triticum aestivum
  Clone ID: uC-tsro9316113f02b1
cccattcgtccgcccacgcgtccgcgaactcttagcctgaagacctcgttgagaaaacagtcgagtgcaagatggtgaagcttgcatttggaagcttgggcgactcgttcagcgccacgtccgtcagatcctatgtcgcggagttcatcgccaccctcctcttcgtgttcgccggcgtcgggtccgccatttcctacgggcaactgacgcagggtggcgcgctggaccccgctggccttgtggcgatcgccatcgcccatgccttcgccctcttcgtcggtgtggccatggcggccaacatctccggcggccacctgaaccccgccgtcacgttcggcttcgccgtcggcggccacgtcaccatcctcactgggctcttctactgggtcgcccagctgctcggcgccaccgtggcatgcctccttctgcagtttgtcacccacggccagcctatgccgacgcacgccgtgtccgggatcagcgaggtcgagggcgtggtgatggagatcgtgat

SEQ ID NO: 6443 - DNA, 551 bp, Triticum aestivum
  Clone ID: uC-tsro9316113f03b1
gtcatggtcgtggtggccggcgtctcggcgcagaacaccccgcaggacttcgtcaacctgcacaaccgcgcccgcgcggcggacggcgtcggccctgtgacgtgggacaacagcgtggccaggttcgcgcaggactacgcgaacaagcgcgccgccgactgccggctgcagcactccggcgggccgttcggcgagaacatcttctgggggtccgggcagtcgtggacggccgcgaacgccgtgaagtcgtgggtggacgagaagcggaactaccacctcaacagcaacacctgcgatgccggcaaggtgtgcgggcactacacgctaggtggtgtggcgcaagtcgacccgcatcggctgcgtgcgcgtggtctgcgccgggaaccggggcgtcttcatcacctgcaactacaaccctccgggcaactttaacggcgagcgcccgttcctcacccttgacgccgaagccaagtagtacatacgtgcgtgtgtgttttttttgcgggggacgtgcgtgtgtttatctgtgtgattttgaatattacgtctat

SEQ ID NO: 6444 - DNA, 169 bp, Triticum aestivum
  Clone ID: uC-tsro9316113f04b1
aaattttataaaaaaaaaaaaaaaaaaaaaaaaaaaaaaaaaaaaaaaaaaaaaaaaaaaaaaaaaaaaaaaaaaaaaaaaaaaaaaaaaaaaaaaaggggggggcccttttaggggacccaatttttcctccccgtgcttgcgggctcatgtctttttttttgtggcc

SEQ ID NO: 6445 - DNA, 89 bp, Triticum aestivum
  Clone ID: uC-tsro9316113f07b1
cttttatatctgtaaatctgatatacaatgctgggttacagcattttgaggacagaagatgtgtgtagactttgacattgctcagtttg

SEQ ID NO: 6446 - DNA, 484 bp, Triticum aestivum
  unsure (1)..(484): unsure at all n locations
  Clone ID: uC-tsro9316113f08b1
ctgtacgcgtgggcggacgcgtgggtttgttgcggttgcagagaggtgcccgagcggcgagctggagagggctctgtcggaggccgaagcctacgcctccaaggtacaagtacgtcataacaaattcgtgtcccctcgtgctctaagggaacatatcaagaatattgaaaaggcagctgctaatgctctaccagacacttcggaggccttgtgtccgcaacatccaaaatcagatgaaaagcgtgacagcatacaactttggtgggctggaaaagagctagctatgcataagaagctatctgactatattggtgttaatgacaaaacaaagattgtcatcaggctaagcctcccaacgagcctttagtgtggtcctgtccgtcattgatatttcctagtactccctgtgtatcaaaatacataacgttttggatactccctttgtatcaaaacagagtatcaaanaacgtcttatattatgata

SEQ ID NO: 6447 - DNA, 551 bp, Triticum aestivum
  unsure (1)..(551): unsure at all n locations
  Clone ID: uC-tsro9316113g03b1
ccggtttttgatcgtctgcttgtttgtattggtttgcagagagagggatctacatcctgtacgacgacgtcaagtcgtgccagtgcgaggacttgcacgtgctctggtccatcctcgtcgagtcccacggtctcccgccgcccacaccgccggtgctccggctcacgcggtgaccggaacgcgccggacggcggatcgctggcatcggcgcggcgccccccggaataaggaacggccggcgcggtgccgccgtggctggctccatgggaggtgaaccagtaatagtatagtagtagtagcatatgatttctgatgtaaagagcacataggagcagttgtttacagttcatctggccttcgtccggcgcctcttttggagctgctgctgggacgggagagcgaggctgctgcgtttgcggcttctggacgcgtgtggtgatgggctttcttcgagcgcacccctcttttgagtttttgattgattcacgcgtcgntttctgtcgagactgcacttggatgcagccctttaattcatccccattaccagggac

SEQ ID NO: 6448 - DNA, 528 bp, Triticum aestivum
  Clone ID: uC-tsro9316113g04b1
ccgcttctcccctgcctcccccagagctcgttagggttttctcttttttcgggggagaaatctcaagaggcggcaccatgctcgtgtaccaggacaagctttccggcgacgagcttctgtcggattcgttcccttacagggagctggagaacggcgtgctctgggaagtcgatggccattgggtcgttcaaggagcagttgatgtggacattggagccaatccctctgctgagggtggtggtgatgataggggttgtggatgaccaggccgtgaaggtggttgacattgttgacaccttccgtcttcaggagcaacctgcttttgacaagaagcagtttatctctcacatgaagcgctacatcaagaacctttctgccaagcttgaaggggatgacctagatgctttcaagaagaatgttgagtccggcacaaagtatctttttagcaagcttaaggacctttagttctttggtggcgagagcatgcatgaagatggcggcgtggtgttcgcctactacaaggaggga

SEQ ID NO: 6449 - DNA, 303 bp, Triticum aestivum
  Clone ID: uC-tsro9316113g05b1
atcctgtttatcaaagatcattttctaattcatgatgtcattgtgcctgcatcagacgcggcggatccattgcagcagctgatccggttgactgtgctgttaagagtgctagttgcgggaagatgatacgccttagatgtcgtgatctcaggatctttgctgaccaagaaagtgtcgtgaacgtcctatggatgccaactgcgtacagggcggactacttaacatgtggcctgatgcagcaccaacaggtctaagggctgagcgctacaccttactaggacactgactgtgactggtgctggt

SEQ ID NO: 6450 - DNA, 71 bp, Triticum aestivum
  Clone ID: uC-tsro9316113g07b1
tcatgcgtccgcccacgcgtccgcccacgcgtgcgcccacgcgtgcggccacgcgtccggttctagatcgc

SEQ ID NO: 6451 - DNA, 549 bp, Triticum aestivum
  Clone ID: uC-tsro9316113g08b1
gttattgcggaccagctcaccgacgaccagatcgccgagttcaaggaggccttcagcctcttcgacaaggatggagacggctgcatcaccaccaaggaacttggaactgtgatgcgctcgctggggcagaaccccactgaggcagagcttcaggatatgatcaatgaagtggatgctgatggcaatggaacgattgactttcctgagttccttaacctgatggcacgtaagatgaaagacaccgactccgaggaggagcttaaggaggctttccgtgtgtttgacaaggaccagaatggtttcatctcggcagctgaactccgccatgtcatgaccaaccttggtgagaagctgacagacgaggaggtggatgagatgatccgtgaggctgatgtcgatggtgatggccagatcaattacgaagagtttgtgaaggtgatgatggccaagtgagctgccatactaagctagttctatctcgatgttagcagctagtagccttgaaaactgacagcacttggtactactgttaagtccagtgaatgaaca

SEQ ID NO: 6452 - DNA, 557 bp, Triticum aestivum
  Clone ID: uC-tsro9316113g09b1
ctttttctctacatctcggtgctcaccgtgatgggcgtggtgggcaacccgtcggggtccaagtgcggcacggtgggcatccagggcatcgcctggagcttcggcggcatgatcttcgtgctcgtctactgcaccgccggcatctccggcggccacatcaaccccgcggtcaccttcgggctgttcctggcccggaagctgtcgctcaccagggcggtgttctacatggcgatgcagtgcctgggcgcgatatgcggggctggggttgtcaaggggttccagaccacgctgtaccagggcaacggcggcggcgccaactccgtcgcgcccgggtacaccaagggtgacgggctgggcgccgagatcgtcggcacgttcgtgctggtttacaccgtcttctccgccaccgacgccaagcgcagcgccagagactcccacgtccccattttggcgccgcttccgattgggttcgcggtgttcctggtgcacctggcgacgatccccatcaccggcacgggcatcaaccccgcgaggtcgctcggcgccccatcatctac

SEQ ID NO: 6453 - DNA, 539 bp, Triticum aestivum
  Clone ID: uC-tsro9316113g11b1
tctttctcttgtccccctcctcctccgccggaactagggttttagcggtcctcgcgccgtcgccctcgggagccatcagccatggacgactcggcccagctgcagcggttcatcgagcaagagaaggagaggatgatggtgagcgagatgatcggcaaggtgacgagcgagtgctgggacaagtgcatcacaggcgctcccgggagcaagctgagctccggcgagaccagctgcctgagcaactgcgcgaagaggttcatcgacatgagcgagatcatcgcgaaacgtttcggtgtgcactagaacaaggccgccacatgcacgtgtgcagttgcttcctggccttttgagctatgtgtccttcggtgtgagcggattttggtgtggcgttaaagatgcataggtatgttcagtgggggtttaactgagcaccgaagtatgcctgtcattgtcgtcatccttgtagtaattctcgcactctgggttgaacttttgaccgcgcttccaggagcaagcaagaagcttggcctgttttaaca

SEQ ID NO: 6454 - DNA, 441 bp, Triticum aestivum
  Clone ID: uC-tsro9316113g12b1
gtttttgatcgggagctggcgcgcgagcggacgctagcgaagatacacgcgtatgcgcgggtgtatgtcacgtattgggtcatctatagtgaaatcactggtcgatgcactgcaccgcggtgaacggcaaaacgattgggaaacccatgtcaatacccaagtaaaacatcttgctgtacatagctgttttaatagctggcaggatcgcgccgagggccgtaccgaacagacttgcaaacagaagggcaaacgggacgcgcactgggacgcgccatgaagcgccgcattaggcgcggctactgtcatggttacccgtacactggccagtacactagccagcgctctattgcctgtttcttctgctttcctcgctacgtttgtcggcacgttcggcgaagctctcagtcaagggctaaattgagggctccgtattagggctcg

SEQ ID NO: 6455 - DNA, 468 bp, Triticum aestivum
  Clone ID: uC-tsro9316113h10b1
ggcggagtctcgtggacgcgcgcctggggcttgccatgcagctcataccacttgtgaactcccctgcgactccgtgggcacggccggcgcgcatggcgggggggccggcggacgccctgaaatcttgtcgaggatatgagcggtacgacgcctcaggcgcggatagcaaagctggaagccctgttgctgaacaaacaatggcgcatgcgaggcaagtttatctgccatgagagatcttcagtcacagcttggcgcagccaccaaagaatgtcttgccgagaaggaacagaacccgaagctgaccgtggagaactgagaaggcttccagtatgcgagtactcccagtctcataccgaacaatcaaagaggcggagtccagatagataagccccctggaagctggatcccgaaaactagtcctattttggcttccagagagaccgccatctggcagatctgtgtatgcgc

SEQ ID NO: 6456 - DNA, 431 bp, Triticum aestivum
  Clone ID: uC-tsro9316114a03b1
cccacttttccggccgccgccgcctcgccaaaatccggcgtcaactgatcggcggcagccatgagtaagctccaaagtgacgctgttaaggatgccatcacccagattgttggggaggcgagagaaaagaagcgcaagttcactgagactgtggagcttcagatcggtctcaaaaactacgacccacaaaaggacaaacgtttcagcggctcagtgaagctgccccatatcccccgcccaaagatgagggtgtgcatgcttggtgatgcccagcatgtcgaccaggctgagaaaatgggacttgactacatggatgttgaaagtctcaagaagatgaacaagaacaagaagcttgttaagaagctagccaagaagtaccatgctttcttggcatcagaggccataatcaagcagatccctcgtctccttgg

SEQ ID NO: 6457 - DNA, 388 bp, Triticum aestivum
  Clone ID: uC-tsro9316114a08b1
ctttttcgtcatcttccatgtcatctgcgcccatgtcgggccgcggggaggtcggcaagggcctcgccaagggccgccccaaggtcctccggaacgtcatccaggacatcatccagggcatgaccaagacgccgacccggaggctcgctatgaagcgcatcttgaagctcatctacgaggtgacctacgaggagacccagagcttcctcaagaacttcatccagaacgtcatccgctacaccgagaactacaccgagcagacccgccccaagatcgacaccgtcttggacctcaagtacccgcttcagcgcctgtaccgatccctctactgatcccccggatcatcgccgttagctctgctgctgaccctgctgcttcctgggtttgt

SEQ ID NO: 6458 - DNA, 311 bp, Triticum aestivum
  Clone ID: uC-tsro9316114a12b1
ccttttcgtccgcccacgcgtccggttgaaaaaagatgagccacatgaatgcccagtctgctcacaatactttgtgcttaaggtcattggtgatggtggaaatccagatgggcatgatgatgatatgatggtcatcaccactaaggatgcctcgtggttctgaaaataagaattttatgagggatatgatttcgcttacgcgttctaagcaccagactgcttcacgggatccttgtttatgaatatacatttggccatcaagcaagcggtaggtatcgccttagtttttttttgtggaaacaaaactcttt

SEQ ID NO: 6459 - DNA, 247 bp, Triticum aestivum
  unsure (1)..(247): unsure at all n locations
  Clone ID: uC-tsro9316114b01b1
cggacactcatggcgctctgctgtaggagagctgtacgtactatggtcgccgctcgccactcggcacttgtaaaatcgagctgaatgccacagttccatcgcttcttcccttctcattattttctttcgagggatgacacaggacagtgcttacagtcgtgtacgtaattgggtataattctttatgcataataaatgaattattagtttgctctgcnnaaaacaaaaaaaaaaaaaaaactaaaaa

SEQ ID NO: 6460 - DNA, 440 bp, Triticum aestivum
  Clone ID: uC-tsro9316114b04b1
cccacgtgtccgcccacgcgtccgcccacgcgtccgcccacgcgttcgcggacgcgtgggcggacgcgtggggccgaacagctcccctgtcgcctgcccctgctccgccccttctcgtgcccgggctccgctccgctctcggtaattggatggcctcgcctacgacgccgacgaagttcaccggcgcccaggaggaagccgcggcccgccagtcgctcatcgggatctcccagtccatcccggcggcgggagaggccctgagcgtcaagtcgccgaacggtcgtacggaacacgggcaggacgacagcggggcggccgacaagtccaggtcgatgctcatgtccatcttcaaccagtcgccggaggcccgccaatccactccgtgcccgcacaagaatgccgcttaggcttaagcttgatcttagtcctgtaatagtact

SEQ ID NO: 6461 - DNA, 445 bp, Triticum aestivum
  Clone ID: uC-tsro9316114b10b1
ccctctcgtccgccgaacccaaccctcgaccgcagcgactcacagcggcgcaaccatggtgctcgagtcgacgatgatctgcatagacaactcggagtggatgcggaacggcgactactcgccgtcccgcttccaggcgcaggccgacgccgtcaacctcatctgcggcgccaagacccagtcgaacccggagaatacggtgggcgtcatgacgatggccggcaagggcgtgcgcgtgcttgtcactcccaccagcgacctcggcaagatcctcgcctgtatgcacgggctggaagttggagctgaagcaaacttggccgcagctattcaggttgctcagctggcgctaaagcatcgccagaataagaggcaacagcagagaattattgttttcattggaagccctgtgacatacgacaagaaggtcttggagacaatagggaag

SEQ ID NO: 6462 - DNA, 444 bp, Triticum aestivum
  Clone ID: uC-tsro9316114b11b1
gcttttcttcctgctcccgcagcgcctcctcgaatccaagagatcaagtcgctgttgttgtgccactccccctccagccgccgtcatgcagaacgaggtgcgtgacatggtggacctctacgtccccaggaagtgctcggccaccaacaggatcatcacggacaaggaccacgcctctgtccagatcaacattggtcacgttgatgagaatggcctctatgatggccgcttcaccacctttgctctctctgggttcgtccgtgctcagggtgatgctgatggctccctggacaggctgtggcacaagaggaaggctgagatcaagcagctctagatgccgctagtagttttacctggaacttgtgtccttcccatgtctacctagctcttggatgtctgtagatgggtgcagttgctgctatggaagctaagacttgatgtcac

SEQ ID NO: 6463 - DNA, 436 bp, Triticum aestivum
  Clone ID: uC-tsro9316114c01b1
cccactcgtccgaaggcaaagaacctcgagctgcttctcacagctgggattggctcggaccatattgatttgccagctgctgctgctgcaggcttgacagtggctgaggttactggaagtaacactgtctctgtggcagaagatgagctcatgcgcatcttgattctgctcaggaacttcttgcctggctatcaacaggttgttaaaggtgaatggaatgttgcaggcattgcccatagggcttatgatcttgaggggaagaccgtcggaactgtcggggcaggtcgtattggcaggctcttacttcagcgccttaagcccttcaactgcaacctgctctaccatgacagacttcagatcaacccagagcttgagaaagaaattggggcgaaatttgaagaggacctggatgctatgctttcaaagtgtgatgtca

SEQ ID NO: 6464 - DNA, 434 bp, Triticum aestivum
  Clone ID: uC-tsro9316114c02b1
aaaattttggtgcaccacgtactgtccagttctagtgccaggttcgagctagcagagcagagagactcacgccatggcgctggccaccccgacagccgtggtgctggagctgatgacgatggggcagcagtccgcggcgcacctcagggagcttctccgggcggcgtccccgccggtgcaggcggagcaccaggcgctcgccgcggagatcctccgctgctgcgaccgggtgatcgccgcggtgagcgcgggcgccaccgataaaaagaggaaggcgacggaccctggcgccacatcctgccatcttcccctcgccatgatgccgtccaaaaaaagggtgcgtggggcggaagcccacagagaggtccatgccgacacgacggcggacgggttcgtgtggaggaagtacgggcaaaaggacatcaacggaagca

SEQ ID NO: 6465 - DNA, 435 bp, Triticum aestivum
  Clone ID: uC-tsro9316114c03b1
gtttctttaagctcatgataaagtacgacttgatagaattgctcaacaattgtttgaacgcattgggaagtcagtcgcagatgataattttaagcaatgggaagggttgctcgagttactaggttcagacattggtagtgcaggtggtcttgagttccttcacaggtaccgggatttcaagagatcccttcaacaggcactagaaggaaggactggcgaggctgctcggcagaccgtggagtttcttatacagctaatgagaaatccttctacaccacaacgtttctggctgccccttctacatgactcggtgaaactactcaactgcaaaccctgccctttactgaatgttgctgagacgaccttgttgctcaataaactacaagagttgtccatggccaagctgcgtcctgacttctgcagtaatcacctacc

SEQ ID NO: 6466 - DNA, 433 bp, Triticum aestivum
  Clone ID: uC-tsro9316114c09b1
catgtttgttgggacacggatgagttccttacagacatttcagaagctaccttgattatgtcaagtgtagttaagaacgatggacttgcacctggtggcttcaacttcgacgccaaattgcggagggagagtactgatgttgaggacctgtttattgcccatatctctgggatggacaccatggcccgtggcctccgcaatgttgccaagctgattgaggatggttccctggacgagcttgtccgcaagcgctaccagagctttgacactgagattggcgccatgatcgaggctgggaagggagactttgaaacgctagaaaagaaggtcttggagtggggtgagccaaccgttccatccggcaaacaggaactggctgagatgctgttccaatccgctctgtagatgacagcccacggttctaggaataaaa

SEQ ID NO: 6467 - DNA, 287 bp, Triticum aestivum
  Clone ID: uC-tsro9316114c10b1
ccctctcgtccgtgcaagaagccaaagatagcagaaggctcaaggtgccaaggagaagaacctgaggctggagggataaagaattcctcctgggtctgatgacaggggaatgcagtaaacaccagaagcatcaaaactatgatctggaacagtatcctgaataaactattttctggattatgaatgaattctgaagcatggggctataagtgaattatgtaacatggatttgtaactatggtggatgttaagttaacgttctatcagtgcatcgtgaatgcgtgctg

SEQ ID NO: 6468 - DNA, 55 bp, Triticum aestivum
  Clone ID: uC-tsro9316114d02b1
aaacgacagagctctgctatacagcgacctaaatggaaaaactcgggcgtcgccc

SEQ ID NO: 6469 - DNA, 437 bp, Triticum aestivum
  Clone ID: uC-tsro9316114d04b1
ctctttgtctcatctcctccaggaagaccgccgaggccattgacatactcaagctcatgtcctccacattcatggtcgccttgtgccaagccatcgacctccgccatcttgaggagaatgtcaaggatgccgtcaagagctgcgtgaagatgacggccaggaagacattgagcaccaccaacaatgggcacctccacaatgcgcgattctgcgagaaagacctgctgctcacgattgaccgtgaggcggtgtttgcgtatgcagatgacccttgcagcgccaactacccattgatgcagaagatgcgtgcggttctcgtggagcacgccttggccaatggtgaggccgaacgcgacgtggagacatccgtctttgccaagcttgccgcgttcgagcaggagctccgtgcagtgctaccaaaggaggttgaggctgcc

SEQ ID NO: 6470 - DNA, 439 bp, Triticum aestivum
  Clone ID: uC-tsro9316114e01b1
cggactcttgggcccaggttaaacaacccatccggagccggagaacgccagaagaatccagaggcacccccgagtttgttggcgatgttgcgcgcgggaggaagccggctcgtcgcccccggactccggcggctcctcggcccgggggccggggagagggctgcgccggggctggcggcggcgggggcgggggcgagggcgtaccacgagcgggtggtggaccactacaacaacccgcggaacgtcgggtctttcgacaaggacgaccccaacgtcggcaccgggctggtcggcgcgccggcctgcggcgacgtcatgaagcttcagatccgtgtcgacgaaggcaccgggaagatcgtcgacgcctgcttcaagaccttcggctgcggctctgcaatcgccttgtccttcgtcgctactgaatgggtgaagggaaagc

SEQ ID NO: 6471 - DNA, 434 bp, Triticum aestivum
  Clone ID: uC-tsro9316114e05b1
agctctctatctcgcactcacacagcgagaagcagcagccaggctagctaatcgacaaaggctagcacatcgtgcccgcctgcccggctccggcgggaggaggatcgatggcgttcatgcggtaccgtgcgctgccgcagggggaggtgaccgcggaggagttctgggcgtggctggggcagttcgacgcggaccacgacggccggatcagccgggaggagctgcagcgcgcgctgcggagcctcagcctgtggttcgcgtcctggaaggcgcgggaaggggtgcaggccgcggacgccaaccgcgacggtgccgtcggcagggaggaggccggccggctcttcgcctacgcgcagaggcagctcggcggcaagatcacccagctcggttcctatggatcaaactgggcatgagttgatctgctgctgtaactc

SEQ ID NO: 6472 - DNA, 282 bp, Triticum aestivum
  Clone ID: uC-tsro9316114e07b1
aaaaaaaaaaaaaaaaaaaaaaaaaaaaaaaaaaaaaaaaaaaaaaaaaaaaaaaaaaaaaaaaaaaaaaaaaaaaaaaaaaaaaaaaaaaaaaaaaaaaaaaaaaaaaaaaaaaaggggggggccgttttgagggacccatgtttacttccgggtgtttgcgaccatatattttttttttggggacccctaaattaaattccctgcccggcgtttaacaacagagggactggaaaaaccttggggttacccaatttaagcgctttgagacaaaaccccttt

SEQ ID NO: 6473 - DNA, 317 bp, Triticum aestivum
  Clone ID: uC-tsro9316114e08b1
gcttttgggcggcatgggtggcctgcaggctctgatgaagcagatgggtggcaaggacatgagcaaaatgctcgggggcatgggactgggtggtgattaaatctggcaaatataggtagtttcttgtggcataggtggtgtgcttgctgcgctgtggagtttgctatatttatatagatctctaaagatttccatcctgacaaagatacttcccaactcctcaaaaagttatgtgaaatttctctgcaactaacatctgctaggtcatcaaatttacaggtactatggcttttgtgaatttttcgtgtcattgcgtt

SEQ ID NO: 6474 - DNA, 300 bp, Triticum aestivum
  Clone ID: uC-tsro9316114e12b1
cccatgcgtccgcccacgcgtccgcccacgcgtgcgcccacgcgtccgcccacgcgtccgcggacgcgtgggcttggatcctgtcaagcgatcgacctacagcatcttgaggagaatgtcaaggatgccgtcaagagcatgcttaaaatgacggacctgaagacattgagcacgcaccaacaatgggcaccttcacaatgcgcgattctgtgagaaagaactccttgttaccattgaccccgaggcggtgtttgcgaatgcagatgaaccttgcagggccaactacccattgatgcagaa

SEQ ID NO: 6475 - DNA, 156 bp, Triticum aestivum
  Clone ID: uC-tsro9316114f07b1
ctcggcaacggatatctcggctctcgcatcgatgaagaacgtagcgaaatgcgatacctggtgtgaattgcagaatcccgcgaaccatcgagtctttgaacgcaagttgcgcccgaggccactcggccgagggcacgcctgcctgggcgtcacgcc

SEQ ID NO: 6476 - DNA, 426 bp, Triticum aestivum
  Clone ID: uC-tsro9316114f12b1
ccctctcgtccgcccacgcgtccgctgaagcattgcgtctccagttagaacttcaaaagcggctccatgaacagcttgaggtgcaaagaagtctgcagctgagaatcgaggagcaagggaagtgccttcagattatgatcgagcagcaatgcaatcctgctgcagacaaggcgctggatgcttcaacctcggcagaaggaccaaagttatcttctgaccccccagaatcttctaccgtgaaggatgttccaaacaacagtcaaaatggaacaaccgagcaagcaggtgataaggaatgaagatctaaccatgctcgcctgaagttgtgaaccccactagccatgaatttgactggttgctgccaaactagaatcaagtcggtcttttatctttctgggagaaaggggtgagcatttctatgaacta

SEQ ID NO: 6477 - DNA, 446 bp, Triticum aestivum
  Clone ID: uC-tsro9316114g07b1
gagcgtctgacgctggttcacgccttccatgcgttactactgagggagggagagcgcatgcatcgcgtgagtaacccggagatgaggatgccccggagatccgcctccctcttcgccctcgccttcttcgccctgctgctctccacttccctggcagggagacagcggccgagcttcattgtagatcgggaggagtctcttggtcagcaaggagaggcccaggacgaagcagctatggcacagcctgtgcactcccggatgctcaaggacgtcaccaccagtgactacggcacctacgacccaaccccgtccatgcagaagccccacttcaagctcatacccaactgatcgaacaccctggctatacgtgatatgatccatctatatatctacgtccatgtgaatgtatatgtatatatattgatcgaggtattttaaactagtct

SEQ ID NO: 6478 - DNA, 181 bp, Triticum aestivum
  Clone ID: uC-tsro9316114g09b1
ggggcggccgcaccgcccgcaggacccggaccggaacccccgggacgacccacgcgggcgaccactcgaccgcgccaagggcggggaagaaggacgagccagggaaggacagcggaacaagagcagaaccgaagaggcgcgggacccccagcgggggcacaagaaaggccacccggggggc

SEQ ID NO: 6479 - DNA, 437 bp, Triticum aestivum
  Clone ID: uC-tsro9316114g11b1
ctcttctgctaagcattcgctcgccaccgtctcctctctgaatcttctcaacaaccagatggctcgcttcgccgtggtcgccgcaatcatggccctcctcgccgttgccgccgccgcgcagggccccatgccggcgcccaggatggccccgctccccgcaccgccggccagatccccgggcaccgtccctgcgccggtagccaccccgcccaccgccgcgtcgccgtctccgatggcatctccccctgccccgaccaccgacgcgccgaccgacgctccctccgcgatgacgccgtccgcggtctctgccacaccctccggcgcccccatcggcgcccccaccggcacccccgcgagctccgccgtgtactcatcggccgccagcttcgtcgcggtcgccggagcggtggccgccgccatcgtgttctagatgcagc

SEQ ID NO: 6480 - DNA, 451 bp, Triticum aestivum
  unsure (1)..(451): unsure at all n locations
  Clone ID: uC-tsro9316114h02b1
actattactaattctaatacaaactatgttcatcgtgagatagtcgatctacgtgatggctctgagtttgtgattaaagtgccttattgctacaactctatgtacatggatactgaccaagctcaaaatgatttattcatgatgatgcaggtcaatgtattaaatgaattggtagctccagacacttgcgcacaaagcgtagaaattttgtatgaggttaggggtggagtagacatggaatttcaagttccagttcctttcaatgttgtaccagttcaacagatagttcctcagagtggtggagaaggccaagctgagttagttcttgattcttgtattggtagttccactgtgcatgacccgtctaagatgtctgctgagctttgcattggtgaatcttgcacttctatgttacagttgatgaagaggtatctncgattggcaacaacta

SEQ ID NO: 6481 - DNA, 398 bp, Triticum aestivum
  Clone ID: uC-tsro9316114h03b1
ctcgctatttcgtgtatgcgtccaccttctacggcttcggcgccggcaaaccaatcgcgtatcgagcgattcctccaatcacgagaggcgagccggctggaagagcacctacccagcaggagacaagatgacgttcacgttaaccaacctgatcaggctcatgttcaccaagatggagatgcggatcctgatcgagaatgataaccccatcctgaagaccaccatcctctacaagctcaagatcagggagatctacaccaccatgctcaccatgaggttcaatgctgtaactgcggtgtacaagaacatcagctctactgtgtgcaatgtcatgggttacgacaagatcaatgcactgtggaggcattacttccagaacacacaggggctcatctttg

SEQ ID NO: 6482 - DNA, 432 bp, Triticum aestivum
  Clone ID: uC-tsro9316114h04b1
ggaagtgtatgatgcagcgggagctgaggttgttctcgatgatgatgaggatggcgaaggctggctcgcaacacatgggctgcaaggttgatttctcagtttcagtgctgctttgttttacactgccgactgtatgggctgaactcttttttgtttcttctgttggtaatgtttagcatcagagtcaaaagaggaggaggacataccatctatggatacattggacatagggaaagtcgaagagatcaaatctattccctcgtactttggtgctggtgaaaagccagatgacgaggaggatatacctgatatggacacctatgaagacacaggagatcattccacagctacccctcagccttcatattttgtcgcggaagagccggatgatgacaacattcttctgaccagaacatatgatgtcagcatcac

SEQ ID NO: 6483 - DNA, 207 bp, Triticum aestivum
  Clone ID: uC-tsro9316114h06b1
ggcggttctgtgatcccaagtggtcacgtccccggtgatggccggactggatctacgctggagttgagtattggacccgattgtaatcttaatcatcaggatggggtcctcctttttagtttcagggactatgatgtaatttccttttcttttgagtccaggtatgagctctgtactgcatccgctgatagttaatggatgctctgg

SEQ ID NO: 6484 - DNA, 406 bp, Triticum aestivum
  Clone ID: uC-tsro9316114h09b1
gcagttacagaaacttgtgtatcaagttggagcgctctctacaaaggttgtatgcctgacccatgtagttactgctgatgaattaaaagatgatgaagaatatgaggacattatggaggacatgatgttggaagctgggaaatatggtaacttggtgaaagacgtcatcccgcgcccttattcgagaggagagtcagtttctggagttggaaaggtgctcttagagtatgcagatgttgatggttccaccaaaacaaacacggttatgcacggaaggaaatttggtggatacccattagatgcggtcttctaccccgagaacaagtttgctgatgaggactatgactcggaaccataaatttatttctattccaatgacaatgtgttttgtgtagattgttccatt

SEQ ID NO: 6485 - DNA, 430 bp, Triticum aestivum
  Clone ID: uC-tsro9316114h10b1
cccttttgtccgcccacgcgtccgcccacgcgtccgcccacgcgtccgcccacgcgtccgggaatttctgataatgatgctgggagcgcggagtctgtcgaaaagttagatctgctgaaagatacaaaagtttctctctctgccaaccatctgcagaagttacgtctatcttttcaactatctacaccacttggacgcacatttaaaccccaccaggttttcttgaagttaaagcatgaaagcaaggttgaacacttatttgtggtgccaggttctgcgaggcaattcaaaattgttctagattttcttggattggtagagaaattttactacctttctggaacatatgacctcgagctttcagttggtgatgcttcaatggaaaattcgttcctacgagttcttggccaactggagttggacttgccgg

SEQ ID NO: 6486 - DNA, 95 bp, Triticum aestivum
  Clone ID: uC-tsro9316115a01b1
aaaatttttaaaaaaaaaaaaaaaaaaaaaaaaaaaaaaaaaaaaaaaaaaaaaaaaaaaaaaaaaaaaaaaaaaaaaaaaaaaaaaaaaaaaaa

SEQ ID NO: 6487 - DNA, 358 bp, Triticum aestivum
  Clone ID: uC-tsro9316115a03b1
cccacttttccgctcctcgctgaactcttcctcgtctcatcccaatgcttccaagatgtcggtggattcctctacatcgtcgactccatcaagcaagactcatctgatgttgccaacgacatcatcggtgccatcattgccggtatcatggccaagaaagccatctcagactgcggaccaatcccagccatcatcaacgaaatgatccacggttagatttgattagtatgttcttcatattgtatcaaatacccctcgaaccctatatctaaaatataagtattgaggaaggccttttataatgacatcaaaaatcaattactggaaaacgtttacaaaaccaaaaaataggaaaacg

SEQ ID NO: 6488 - DNA, 456 bp, Triticum aestivum
  unsure (1)..(456): unsure at all n locations
  Clone ID: uC-tsro9316115a06b1
gccgttattccttccttatagagacagcgtgtaggcgccgggcgagcaggccaccaccgcaaccctagccagcccaactaccggcgtcggctggagaggactagctgctgctcgagagagagagagagagagagatgtcatcgggacggtacatggcctactcgccctccccgtccaccacgccgcactccccgcgcatctccggcctccgcgcctnctncgccggcgtcgacgaccaggagaagtaccttgcggagctgctcgcggagcgccacaagctcaacccgttcgtcccagtgctcccccatagcatacggctgctgaatcaagaaattttacgtgtttccacactattggagaacgccctccttttaaaccaaaagggctttgaacatggtagtccactaacatcgggaggattatattcaaatggagcagcaactgatatgaatgggt

SEQ ID NO: 6489 - DNA, 386 bp, Triticum aestivum
  Clone ID: uC-tsro9316115a07b1
ggctttcagtgcacctgaaccactagctacctagctagctacatcggcaagtcggcagagctcgtgatcaatgggggtcaagctcacgctcccgccggcggcactgatctcccaggtggccaagctgagctccctcctcgccctcctcctcctcgcgctgctgctgcccgtcttcctcagggtcgcctacggctacctcctcttcaacggcatcgtcctcgcgctcggcatccaggccttcgtcggcggcggcggcgcttccatcgccgacgacgaagaccggcacgggtctccgagtgccggtcaggccgtcgaggcctcgccgttccagagggctggagctgaatcagtccgtcccgacgaacgggcggcggttctgggtgatc

SEQ ID NO: 6490 - DNA, 136 bp, Triticum aestivum
  Clone ID: uC-tsro9316115a10b1
gcgtttattcgtgcgatttatacagcggttatgttcattaaaaaagcaaccgatgatgctgatggatgaccctgatgagatcgtgtacgaacaacatggagaaaaaatggcccttctgggccatgggcggtctgtt

SEQ ID NO: 6491 - DNA, 452 bp, Triticum aestivum
  Clone ID: uC-tsro9316115a11b1
ttcatatgccaattctgcacctgccggggttccatactttacaaccattgccccgtcacttgttgggtcaacgggtgcattacctccccaacatgtgaggcaatatgcaataaaccgtcctgaaggtagcagtagtgatggtctggacggtaattggaaatggaaaagaccaagagggtttgatcttaattctggtcccgcgagtatagatttagaagggaaggatgaaagaatactttcatcggttagacaaaatttgatgacgccacagcaggcctttgtggaggagcaaacgagaatgtaccaattgcctggtgtaggaataaagaggaaggaacccgagggcagttgggatcccgacagatcatcatacaagcaattgtcatggcagtaagaactttggcgagacctcgcatcgacttcttttgtctgaggcaactgcatgtggaagt

SEQ ID NO: 6492 - DNA, 467 bp, Triticum aestivum
  Clone ID: uC-tsro9316115b04b1
cccatttttccgattccctcgctccaccgccgctccttctcggcccttccccgccccctcgcattgcagggaggagaggactcaatcaagatgccgaccatcatcatcaaggtggacctggattgcgcccgctgccaccgcaagatcgagagggtgctcgacaggatcagagagaagggcgagttcgtgatcgacgacatcgagtacgatgagaagaacaacaaggtgatcgtgaagggccccttcgacgcggacaagctctccgacaagctctgctgcaaggcctgcaagatcatcaaggagatcgagatcgtggagccgccgccgccgccgccgccggaggagcccaagaaggaggtgcccgcgcccccgccgccggagccggaggtcgtggtgccgccgccgccagcggtcgtggaggagcccaagtgccccgagccggcaccggagccgtccaaggaggagcc

SEQ ID NO: 6493 - DNA, 444 bp, Triticum aestivum
  Clone ID: uC-tsro9316115b08b1
ctatgtgtgggctctgtggttgatgctaattcgtgggagtttgttttcaacaacgcatctgaggcaccaaaatggctaaaagataactcatagttatccttaaaagaaaaatatcgatctgatagaagcacgtgggtggcattatatcctgtccctttcttgttctctggaagtttgaagtttcctgcacagactgaagagattagaaagcaccaccagcattttccccagctagttgttcagaagacatcaagtaacaattggaaccgacggatgcatctacagctctcacttggttcattatcagaggtttggaccacttcgctcaatattactggtccattatcgaattggtcttttgctgacaacacacttccagctccttaaactgttagcggcggaccaccatcatatatctgccgacttactggacaaagtaatgag

SEQ ID NO: 6494 - DNA, 378 bp, Triticum aestivum
  Clone ID: uC-tsro9316115c01b1
ctctcttgtcagcgtctcctccagttcggaaccccaagctgcacccccggctccggcgaaatggccccgaagcgaggcggcaaggcaccggtgccggcgaagaagaaggcggcggacaaggtggtgaacccggtgttcgagaagaggccgaagcagatcggcatcggcggggcgctgccgcccaagatggacctccaccgggtcgtcaagtggcccaaggtcttgcggatccagcgccagcgccagatccttaagcagcgcctcaaggttcccctggcgcttcaccagtttatccgcaccctcgacaagaacctcgacaccaacctgtttaagatgcttcttaagatcctgcccgaggacaaggtggcttacaaggag

SEQ ID NO: 6495 - DNA, 454 bp, Triticum aestivum
  Clone ID: uC-tsro9316115c04b1
agatatttcaccggccggcagcacacggcaagaaaaggacggcgagcgccaaggagatcaccgagactcgacgcaccatgccgtgcatcccggcgtccagccccagcatccagcaccacaaccacaaccaccaccaccgagtcctagcgggcgttggcgtcggcatggggtgcggcgcggaggcggtcgtggccgcggccgggacggcagggatgaggtgcagggagcacgactgcgaggtcccggcggaggtggcgcggcaccacgagcacgcggagccggggtccggccagtgctgctccgcggtggtgcagcacgtggcggcgcccgcggcggcggtgtggtccgtggtgcgccggttcgaccagccgcaggcgtacaagcggttcgtgcgcagctgcgccctggtggccggcgacggcggcgtgggcacgctccgcgaggtgcacgtcgt

SEQ ID NO: 6496 - DNA, 365 bp, Triticum aestivum
  Clone ID: uC-tsro9316115c05b1
ctcttttgtaggcgcttcccggtgacaacgtcggcttcaacgccaagaatgttgccgtgaaggatctgaagcgtgggtttgtggcatccaactccaaggatgaccctgccaaggaggcagccaacttcacctcccaggtcatcatcgtgaaccaccctggtcagatcggcatcggctatgccccagtgctagactgtcacacctcgcacattgctgtcaagtttgctgagctggtgaccaatatcgacaggcgatctggtaaggagctggaggccctgcccaagatcctcaagaatggagatgctggtatagtgaatatgattaccaccaagccgatggttgcggagacccttgctacttaccct

SEQ ID NO: 6497 - DNA, 167 bp, Triticum aestivum
  Clone ID: uC-tsro9316115c06b1
gtgtctcgtggggatccggctcgtgtgttgaccaggttgcagaacgtaccatagatgctgtggtgtaacccaggtgagactctgtacagacagctgtggaatggacggcccgttatatgaatggttggtctgtttatgtgtccatgacgaaagaagaacttgattgc

SEQ ID NO: 6498 - DNA, 376 bp, Triticum aestivum
  Clone ID: uC-tsro9316115c07b1
tagatgaaccacgatccggaacgtgggaacaccagggttcagtattgaccattcgggctgacccatgaccatgatgagaaggagctcgtcagaacgggcaaggatggaccgtcgtgccatggacattttgttacagagtgctacacgaaagattaacggataaggccctgaacgcttgctggataaacaacagcaccgtgaatccatccagactgatgataaagaagaacagggagtgcatgtacaagaaggaaaataacatcttcatgcctctaggcctaaacttggcaccggcctatgatttacaacttcacgactgggaaaacactgaggttgacgaacataatcgccttgaatacaaatccttttcgccaac

SEQ ID NO: 6499 - DNA, 429 bp, Triticum aestivum
  Clone ID: uC-tsro9316115c09b1
tggatgcgtgggcggacgcgtggggttcgactcaacccctctgcgcctctctccgtcgcccctctgtgcggcagcggtggccgagcggagaccgcgatgcctctgccgcactacggcggcatcctctacgtcggcacccaagacggccgacgcccaggcctcgcgcgggaggcgctgctgcgaaggcacggcggccccggcggccggttccgaaggcccgcgagacggggaaaactctctggatcgaaaatgctttttctggttctggaatcatctgtcatcatttaatcgatctaggaacttgtggtcacgatttcttttctttagactactcgaaaaatctagagcctagatcgctctgacaccattgttaagaacatgggatcgactaggctaggatttcggagtagaatgaactatctatgaact

SEQ ID NO: 6500 - DNA, 429 bp, Triticum aestivum
  Clone ID: uC-tsro9316115c12b1
ccttttcgtccgatcagatcttggcggactcaaatccaatccaatccaatccaaggcggaggtcgagatcaaagccaccggagatgaagttcttctcggcgttcgacccgtggccggtgttcttccgccgggagtggggccgcaactggcccttcatcgccggcttcgccgtcacgggggccctcatcaccaagatgaccgccggcttcaccgaggaggacctcaagaactccaagttcgtccaggcgcacaagaagaagtagtcaccgccgccaggtcacaggggcagcagctgagttaccggcatgtgtccttgatgcggcgagccagtcctcaccctcactattgtgattgaactttatgttttttgttcaaatccaactgcgtgcatttttgctgctctgttttgtaatgaataagcgacatttg

SEQ ID NO: 6501 - DNA, 202 bp, Triticum aestivum
  Clone ID: uC-tsro9316115d01b1
cccacttttccgcccacgcgtccggctagctagtaaccttttgagtgattgagttgtcgttagagcttaagtctgtcaagcttaatctggatcatggaatcgtatgtttattggatacaaagttgcactatcaattttgccttgtctgttgggctgacctgcatcaaaaaataaaaaaaaataaaaaaataaataaaccaaa

SEQ ID NO: 6502 - DNA, 269 bp, Triticum aestivum
  Clone ID: uC-tsro9316115d06b1
acacggattattctagtgagctgacagctgagatgaccaaggtttacgtcccagtgcgtgctctgtcatccatcgcttataggagcacgtacaggcaatgcaatgggcggtgtgctaccacgtcgagagtggaagctccgtggagaatccgaccaaaatagtgttggtttccatccgcctgtggtgtgctggcctagtagacaagaggaccgagcctatcgtcattacgagcagactcgcagccttgatggagaaaggggagcgctctg

SEQ ID NO: 6503 - DNA, 138 bp, Triticum aestivum
  Clone ID: uC-tsro9316115d09b1
tcatgtttgcggatccggagcgtgagtgcacgggggttaagttaaaagcgaaggtgctggtgcatgaaacagatgagatcgtgtaagttcaacctcaaaaaacaattcgactgccatggcatagatcctctgtgaaag

SEQ ID NO: 6504 - DNA, 193 bp, Triticum aestivum
  Clone ID: uC-tsro9316115e03b1
ctcgttttcatcaaacacgcaagccgtctgcccccgcacggaaagtgatccgtcggaggcgacgcaatcgtcggcgagctaaaacgacatcattcacatctcagtctggggttgcgaattcctttgggttccgtagtagacgccttagcactaagcgttaccggaatatgctttggaactcgatatatatatg

SEQ ID NO: 6505 - DNA, 402 bp, Triticum aestivum
  Clone ID: uC-tsro9316115f02b1
cacatttttagtgagagctttgcgctgaaagttcatcagcaactatgaagggcaccaagctcgcggcgatcctgatcctccaggccgtcctggtcatgggagtcctctcgcacgtcaacgccgacttcttccccaagtgctgcaacaactgcaggtccttctcgggggtcgacgtctgcgacgacgcccaccccaagtgtcccaagggctgctcggcgtgccgcgtggtgtctacgagccccgaaatgtggcgctgcgcggatatgaaatccaccgtcgacggcacctgcggtggaccctgcaagaagtactgatcggttcatgccggcatatgatatgttccgcctaaaattaaataaaaagctcggacgagatgagcagcgtaatcgtgcctatgcgtgt

SEQ ID NO: 6506 - DNA, 329 bp, Triticum aestivum
  Clone ID: uC-tsro9316115f04b1
ggaagctatgtcgtcctcctaagaagtgggtaattctataggtcttctcttaattttcatataggttttgcagtagttgcaaataggctggaacttggaactggttatatacatgtatgtccatccagctggtgaacctcttatggaaaacttaattttattcctagttgaacttgttagttaaatgctgttcatatgactggctggttgtcaaattgtttgtgtatttcttgattccgttccttgtgattggtgaatgtatgaactggtgctctctaaaaaaaaaaaaaacatagaaaaaatttaaaaaaattaaaaatataaaaaca

SEQ ID NO: 6507 - DNA, 56 bp, Triticum aestivum
  Clone ID: uC-tsro9316115f06b1
gccacgtgctcggatacgcatcgggagatgcctatggtgcaggaacgagcgcagat

SEQ ID NO: 6508 - DNA, 199 bp, Triticum aestivum
  Clone ID: uC-tsro9316115f07b1
tttattcatgtggaaatgtgatgtacagtgctcgggagcagcatatcgcggacagacgagctgtctacaccttgacattgctcaagtggaaactaaaaaaaattaactgatcaacagaatcacaacgtcttggctgaggaaaccatggcgaaacccaacttaattgccatgcacaacatcgctctttaacaaggtggcg

SEQ ID NO: 6509 - DNA, 244 bp, Triticum aestivum
  Clone ID: uC-tsro9316115f08b1
gcagctgcatgcgactttataggtcgtctatagcgacacctaaaatgaacacactggccgtagcataacaactgtcccgactggcaataccgtgacataacccaactaaagcaacttgaagtacatacgctttaccacagacttcgtaggactggagagggccgcaccgatcgtcatatgaaacgcgtgagcagactcaatggtgaatgggacgcgacctgttgccgttgattaagaaggtatg

SEQ ID NO: 6510 - DNA, 424 bp, Triticum aestivum
  unsure (1)..(424): unsure at all n locations
  Clone ID: uC-tsro9316115f10b1
cattttataaacttcgtgcaacagctcataaatggatcgccagagcttgcgagtcggtggcgccggcgacgcgcaggagttctgctacgtcgggagccggcagctcgaggtcgccggcggggcgttcctgatggaactgctggaggacacgccggcgcccgccgaccaggcaccggaggccgccgacgaccggctgaggcgcgtcatgcggtccctcgaggccgagctcggcgtcgcggcggtgccggcaccctctgcggcggaggacggcgggagcacggcggacgggccgatgagcgactacgacgacggggagctggaggagatgctgtcggagttgggcggtagcctgggggccgaggcgccgtcgttggccgccgtgctgccgttcgagtactgggaggaggtgccgnccgtgatgggc

SEQ ID NO: 6511 - DNA, 92 bp, Triticum aestivum
  Clone ID: uC-tsro9316115f11b1
tggatatgcgaacaactgcagctggaggaatagctaacaggcccgaacgaagaagctgttgctaacagtggcacagcctgaatgggaaatgg

SEQ ID NO: 6512 - DNA, 56 bp, Triticum aestivum
  Clone ID: uC-tsro9316115f12b1
cctactcgtccgcccacgcgtccgcccacgcgtccgcccacgcgtccggatcgcga

SEQ ID NO: 6513 - DNA, 429 bp, Triticum aestivum
  Clone ID: uC-tsro9316115g04b1
gttctttttctcaacccccgagagtccgccgcgcccacccgccagccccgatggcccgcacgaagcagacggcgaggaagtccaccggcggcaaggcgccgcggaagcagctggcgaccaaggcggcgcgcaagtcggccccggccaccggcggcgtgaagaagccgcaccgcttccgccccggcaccgtcgcgctccgggagatccgcaagtaccagaagagcaccgagctgctcatccgcaagctgcccttccagcgcctggtgcgggagatcgcgcaggacttcaagaccgacctccgcttccagagctccgccgtgtccgcgctccaggaggccgccgaggcctacctcgtggggctgttcgaggacaccaacctatgcgccatccacgccaagcgcgttaccatcatgcccaaggacattcagc

SEQ ID NO: 6514 - DNA, 144 bp, Triticum aestivum
  Clone ID: uC-tsro9316115g05b1
gctgtatagaatgttagtctgctgctgatctagcggatcatgatttggaggagctttgtggtacaacccttgcagactcttacgttgctggagatttcgccaaattctgtaaaaaaaaaaaaaaaaccacaaacataacttaat

SEQ ID NO: 6515 - DNA, 374 bp, Triticum aestivum
  Clone ID: uC-tsro9316115g08b1
tttatggccacgtctctaggggtttcgtccagcgaatcgaagaatgaagaggagtcgccatggcgtcgcggccgacgctgaagccgaagccgaagggcacgggtgggaagaggggctcgtccgcggccgaggacgagcagtccacggcggcggtggctgagcaactcgccaaggagtggagcacgtggacgatgaaaactgccaaagtggcggcgcactggggcttcatccaggtcattatcgtccgtcgcatgaataaaggagaccagcccaaacctagcttggttcagcttctgttccccgtatgatcccattcccggggagccctagaatggatccatccagcttcttttaggtactacctagagatggtt

SEQ ID NO: 6516 - DNA, 193 bp, Triticum aestivum
  Clone ID: uC-tsro9316115g09b1
tttcttctcttctgttgtgtcgtttgtttcagagggttgcgctgtgctgttgtatgattacatctgttttctgtaaccgttgttggtagtgacgctgtggataaaatataagtataactacacttccatataaaaaaaaaaaaaaaatgatataaaacaacaaaaatagaataaatataaaaaataatataag

SEQ ID NO: 6517 - DNA, 402 bp, Triticum aestivum
  Clone ID: uC-tsro9316115g12b1
attctcttcgttgaagcagtggcccttaagcccccggaagtgaccttcgacctggccatgcagcaacagcacgaggctgagcttgcggctgcagcggcacagccactgcccgacgacgatgacgatctgatcgagtagagagaggatgatgagtctgtctgtcttatcaatcaatactttgagagccagagactgtgcgagtcggttttaggttgaaggcttgatttggagtagtcaagccggatgtttttcctgtctgccttgccttgtctggtgggctgcaaactgtttgtgtgacattgatctacatgatgttgcttgccatggatttgttgttggccaccttgatggttcatcagtattattatgcctgttggctcaaaaaaaaaaaaaaaaaaatat

SEQ ID NO: 6518 - DNA, 359 bp, Triticum aestivum
  Clone ID: uC-tsro9316115h02b1
ccatgcgcggacttgtgggttcgggtcagggcgagggccggtcgctcccgaagatcagagatggcggtgccgcttctgacgaagaagatcgtgaagaagagggtcaagcacttcaagagggcccatagcgaccgctacattggccttaagcaaagctggcgcaggccaaagggtattgattcccgtgtcaggagaaagctcaagggatgcaccttgatgcccaacattggctacggatctgacaagaagaccaggcactaccttgccaacaagttgaagaagcttgttgaccacaatgtgtctgagcttgagctgcttatgatgcacaacaggacctactgtgcggagatcggccacaa

SEQ ID NO: 6519 - DNA, 167 bp, Triticum aestivum
  Clone ID: uC-tsro9316115h06b1
gagactattgcccctgatttctgtgcattgtttaaggagttttaccatggttcaatcaatatttagagcattgactcttctttaaaaaaaaaaaaaaaaaaaaaaaaaaaaaaaaaaaaaaataaataaaaaaaggcgaaaaaaaaaaaaaaaaaaaaaatgaaaaa

SEQ ID NO: 6520 - DNA, 69 bp, Triticum aestivum
  Clone ID: uC-tsro9316115h07b1
tcgttcattcgtgcgcccacgcgtccggccacgcgttcgaccacgcgtccgactaggtctagatcgcga

SEQ ID NO: 6521 - DNA, 267 bp, Triticum aestivum
  Clone ID: uC-tsro9316115h09b1
gtcgttcgaagggaatatttctcacttggttaatttgtgttcgtcaacgtcgctccaatggcgtctgaccgcctccgggacatcaaggccttcgaggacaccaaggccggcgtgaaaggactcgtcgatgcaggattgaccaccatcccggcaatcttccgccacctgccagacacgataccggtcgacgcgtcgcgcttggccatcccagtcatcgacctcgcccgcatcacgtcccatcgagccgagctggtggccgagctgaaa

SEQ ID NO: 6522 - DNA, 393 bp, Triticum aestivum
  Clone ID: uC-tsro9316115h11b1
ctttttcacttctcgtcagcttaactcttcgatctaaggaagacatatccatattaactctagaagcccagcaaaaccgaagtcaaatgcctcttgaaaaacttacgagtttgactctggaagggcccaacagcttgatcagaagctccggattgtcaagctcacaacttatggtttggaaatgctttccgttcgtgagaactttgacgattagcaaatgcagcaatcttgtccgctggccaacaaaggagctcgggtgcttggatggcctccgctatctatgtatccaaaattgtgaaaacctgggggggaacacttcatcgcctgaggaggaaacccttccactgtacctagaggtattaaagatttcagagtgccgcagcgtggtggcac

SEQ ID NO: 6523 - DNA, 426 bp, Triticum aestivum
  Clone ID: uC-tsro9316115h12b1
ccctcgcgtccgcccacgcgtccgcccacgcgtccgcccacgcgtccgaaaaaaaaaaaaaaaaaaaaaaaaaaaaaaaaaaaaaaaaaaaaaaaaaaaaaaaaaaaaaaaaaaaaaaaaaaaaagaaaaaaaaaaaaaaaaaaaaaaaaaaaaaaaaaaaaaaaaaaaaaaaaataaaaaaggggggggcactattgaagggacaaatttattctcccggggcaggaaaaaaaaatggtttttaaaggggcaaaaaaaaaaaaataaatgggccgacattaaaaataagctagacgggaaaaaccgtggtacaacaaaattaatgggtataggaagaaaaatccctttttcaaaggggggaaaaaaaaaaaaaggttagaacgatggcgtattaaaaaaagaggcccaacctaaagggaaaaggg

SEQ ID NO: 6524 - DNA, 380 bp, Triticum aestivum
  Clone ID: uC-tsro9316116a04b1
gcttgttctggcctgctgatggagatgaggtgattcctggagcggaggaggttgctgctgctgagtagaaaatagaagtcgctattttgctgcttcatatctagaagatgatatatgtgccacctgggtgtcgtgaactttgtagtcagttttgatggctgatttcttgagtacttctgtcgacattcctagccagcgttcagttatcttattttgttcgtgttactttctggatggaggttatgagtttaaaactaaatatttagtttattcctgccgtgtgtgttttatgtttgaatggaacttatgctctgttgttttgctagctgtatctcagtaccaactttttgttcgcgtgccccacaaattttcaatctttt

SEQ ID NO: 6525 - DNA, 60 bp, Triticum aestivum
  Clone ID: uC-tsro9316116a06b1
cgggaacaggaagaagaccgatcgcctttgcgaacagatgctcaagctgaactggatagg

SEQ ID NO: 6526 - DNA, 303 bp, Triticum aestivum
  Clone ID: uC-tsro9316116a11b1
ttttttcgtccgcgtcactactggggcgtgcgtgtccgtggtcagcacacaaagactaccggcaggagaggaaagactgttggtgtctccaagaagcgataagctgcttcacaaagatcccgcatagctttgctactactgtgttggtccatttccacaatcttaaggagtgttcttgtttagacgattaccttggatgatgttttgccctagataatgttttggttctggaacctttaatatattgtatcttgaattccttgttgaactcttgagagtttgttttgccatgggcttagagtc

SEQ ID NO: 6527 - DNA, 448 bp, Triticum aestivum
  Clone ID: uC-tsro9316116b05b1
gcggttttcatggaccacaggtcggacgtgcaccggccgcggcgggccggccatgaagagcgcgcccagggcgaggcggctgcaatgacgaggtcgctatcggcgtcgacgaagacggcggcgaggaaggacaggacggtggaagagcgggggagcaggctgaggaacaagtgaagcgtagtaacttgcaaggagcttagaattgatggccatggatgagctcccgaggagcgcgcatggccaacttcttgcttctgatcccttcccaatttgttggcatgcatacctgtgattcttgatcatttttcttactcgtattggtttcagtgcatcccatttttttggtgggagatgtggggggcgtcatggttgagagaggggtacatttttgtaattaaattaatggatggcggtaaaaaacagtagcccaactctgaccggataatag

SEQ ID NO: 6528 - DNA, 528 bp, Triticum aestivum
  Clone ID: uC-tsro9316116b11b1
ctttttactgcggctcttcttcggctctcctgctcctcctactcctccgcgcagttcgccggccaccaccaccacccaccgagagaatggcaggcaacggagccatcgtcgagaaggacccgctcaactggggcgcggcggcggccgagctcaccggcagccacctcgacgaggtgaagcggatggtggcacatatccgcgagcccgtggtgaagatcgagggcgccagcctccgcgtcggccaggtggcggccgtggcccaggccaaggacgcgtcgggcatctccgtggagctcgacgaggaggcgcggccccgcgtcaaggccagcagcgagtggatcctcagctgcctcgccggcggcagcgacatctacggcgtcaccaccggcttcggcggcacctcccaccgtcgcaccaaggacgggcccgccctccaggtggagctactcaggcatctgaacgctggaatccttggccccggcgccgatggccactcgctgtcggcggaggtgtcccgtgcggtcatgc

SEQ ID NO: 6529 - DNA, 439 bp, Triticum aestivum
  Clone ID: uC-tsro9316116b12b1
cctatttgtctgctctcgtgtccggggcacctccagcggccgttcagcggggcgaagcgaccatgacgcttaagtgcaggaacgtaggtcgcatcaagcatggcctaggtcaaattaagtacatgcgttgttacaactgcgccactggctgaaccaaggacaaggctatcaagcgtttcttggagaagatcatcgtggagcaagctgctgtgatagatgagaaggacgctcgtgtccatgatggatatgtccttacaaagctgaacggccaagggcacccactgtgttcttgtgccatacatgctcacattgtgcgggttcggtccagtgagaacagtacgcaccgcaagcccctagagcgatataggtgcattgacgaccgtctctatgctctggacagggtggccctatccgtgctagtggccatagaggcccttgt

SEQ ID NO: 6530 - DNA, 219 bp, Triticum aestivum
  Clone ID: uC-tsro9316116c06b1
cccacgtgtccgcccacgcgtccgcccacgcgtccgagaccgtttgctgaggaccggcgcatcttggctccttgtgtgtgtgtgtgtgtgtgtagtccctcttgactgtcctgtatgctccagtcaagtgtgcgtgcccactcccctctctctgtcgcgccacatgccgttacagttgatacattctattctacagtaataatgatcgtgaatgatacg

SEQ ID NO: 6531 - DNA, 208 bp, Triticum aestivum
  Clone ID: uC-tsro9316116c11b1
cccattcgtccgtagcgtttagctgtgctccttccagatcgaagtcgttgtctgtctgtgtaatgtttacctggtactgattcagtcatttggacatggtgtttatgttcgtcgttgactctgtgattggactctgaatgcaaaaaccttttaaacaaaaaaaaaaaaaaaaaaaaaaaaaaaaaaaaaaagaaaaaaaatataaagg

SEQ ID NO: 6532 - DNA, 562 bp, Triticum aestivum
  Clone ID: uC-tsro9316116d05b1
gccatggttcagcactcaccctcccatccctcctctccggccgcaaccccaccgccgccgccatggtgaagtactcgagggatccgtccaacccgaccaagtcggccaaggcctgtggcaaggatctcagggtccacttcaagaacacacgcgagacagcgtttgctcttcgcaggatgcctttgggcaaggctaagaggtaccttgaggatgttctcgcccacaagcaagcgattcccttccggagatactgcagaggtgtgggtcgtactgcgcaagtaaagaaccgccagccaaatgggcagggtcgctggcctgcaaagtcggcccagttcgtgttggatttgctgaagaatgctgagagtaacgctgaggttaaaggcttggacgtcgacaacctctacatttcacacatccaggtgaaccaagcccaaaagcagaggcgccgtacataccgtgctcacggacgcatcaatccttacatgtccaacccctgccacattgagctgatcttgtcagagaaggaagagcctgtgaagaaggaggctgataacgtcgtcgc

SEQ ID NO: 6533 - DNA, 206 bp, Triticum aestivum
  Clone ID: uC-tsro9316116d09b1
tatcgtgcgacctaatagcaattcaatggccgcacctaaacaaaatccagagtgcgaaaacccacacgtaccgaccggaaaaaccttgcagcacaccaacttaatggcagtggacgacataccgatgaggccagctcccatcagtacctaacaggaccggaccaatcggaatggccaacggtacgccacccggaacggcgaatgaa

SEQ ID NO: 6534 - DNA, 361 bp, Triticum aestivum
  Clone ID: uC-tsro9316116d12b1
cttgttcgtgtctaaattcgacaagactgggggcatgagcaaagcagttgaatatgataactttattgagtgttgccttacagtcaagggtctgactgagaagttcaaggagaaggacacagcttattccgggtctgcaactttcagttacgaggcattcatgttgactgtgctccctttcatcatcgcatgatgactccgcagttcaatacaaagactgagctttgagtgtgttgttccatgtgtcgaaacgtttttccatcggaggtgtagtttgtctgaattcgagtgatgttgctgcgttcctgataaggtgataccctggagattggaaactgcctatggatggtttggaactctg

SEQ ID NO: 6535 - DNA, 92 bp, Triticum aestivum
  Clone ID: uC-tsro9316116e02b1
aaatttttaaaaaaaaaaaaaaaaaaaaaaaaaaaaaaaaaaaaaaaaaaaaaaaaaaaaaaaaaaaaaaaaaaaaaaaaaaaaaaaaaaaa

SEQ ID NO: 6536 - DNA, 243 bp, Triticum aestivum
  Clone ID: uC-tsro9316116e04b1
cccattcttccgggggtgctttgcgcggggtccgcgtgacgtgggctaaataaaagtgttgtcgggtcgacgcccagtcccaagtgtcggtcagcagagagcgagagacgcagtgccagtgtgccactctagataatgtatgcttcttttctcgacaagacatgcttcattatttctaaaaaaaaaaaaaaaataaaaaaaaataaaaaaaaaaaaaaaaaaaaaaaaaaaaaaaaaaataaa

SEQ ID NO: 6537 - DNA, 554 bp, Triticum aestivum
  Clone ID: uC-tsro9316116e06b1
ccctttatctgtacccctatggaagccgcgggcccgtgggcgcccactacctggcggcgaagtacaacgtgagatggggcgacctgggtggctcggaacactaggaagagagcgtggtttcacacgggaggtgatgatttctgtttttggcggcgattgattctgctgccgtcgcaatttgtgcaaaaggccttgcattgcatgcccagctagtgggagtggtgcaaggaacagatctgaataagtgtgagcggttggcgatgcttgtgttcatcgatcgaccgtgaatatatttgttggtaccactggcttacatattctgtgattcttaagaggcgaagccgagagcagaaagctcattcatcttggctgttcatcggctcatttggttgtctggctgggctgctgtattggaactgctgattgtgtaactgcagaagctgttgcttctttaccgatgccggtgttctgttggacatactcggtggtacagtaagacttattattgaaatcatcttttttttactgaaatctggataagtactaccttctgt

SEQ ID NO: 6538 - DNA, 368 bp, Triticum aestivum
  Clone ID: uC-tsro9316116e08b1
gtatttacctccttcccgcgctcttcgaccctgacacgtccacctgttcgaccttggtgtaatttactatggtgcaatttgtaaggatacgttgtagcagtactgtgtataggatgatcgatgagatatgatgctctgttttgttttgaaatgctctgcttcttgcgtgtgatcttcgcagaggcgttgctgcaacttttgccgcaccgcgtacaggcctatcggttcagaaattgcaacaccgcctgttcagagacaagaaaagaggaaattgctgcactggctttctgcgcaataatgtaaaggatacctgaaaatgtttgtattcgagcaataatgcaggcatatgccaatttatcatcatggac

SEQ ID NO: 6539 - DNA, 574 bp, Triticum aestivum
  Clone ID: uC-tsro9316116e10b1
cttgttgccgccgccactccgccgctgccgccgccgagatgggtcgcgtgatccgcgctcagcgtaagggtgcgggctccgtcttcaagtcccacacccaccaccgcaagggccccgcccgcttcaggtcgctcgacttcggcgagcgcaacgggtacctcaagggcgtcgtcaccgatgtcatccacgacccggggcgtggtgcgccgctggccaaggtgaccttccgccacccgttcaggtacaagcaccagaaggagctcttcgtcgccgccgagggtatgtacaccggccagttcgtctactgcggacgccgcgccaccctctccgttggtaacgtcctcccgctccgctccgtgcctgagggaggcgtcatctgcaacgtcgagcaccacgtcggcgaccgtggtgtcttcgccagggcctccggtgactacgccatcgtcatcagccacaaccctgacaacggcacctcaaggatcaagctcccctctggtgccaagaagattgtcccaagcagctgccgtgccatgattgtcaggttgctggtggggcaggactgagaagccatgct

SEQ ID NO: 6540 - DNA, 405 bp, Triticum aestivum
  Clone ID: uC-tsro9316116e11b1
actcggagtaggcccgtgagccggcccgcgaggctagcaaggatcatttggcgaagcggatccccctggctcacctggaggaggcgatgcgcggacaagaggagcaggacaggctcatcaagggcaccagcgctgggggggggagcccacgacagatgcagaactgatcgacaacatgacctccaaggagggacagctgagcagtgacgggtgcctgtcgggtactaaagaagaactggcccttggagtgtgagaccttaaagaggtttttgattcattaggcctaaatatggtactgtttgtccctttactacgtagcaaccggaaaatctatgtagtatttaattgttttaatagtattatattttgtttttgaaattatttatatacgtcaaatgttctcat

SEQ ID NO: 6541 - DNA, 522 bp, Triticum aestivum
  Clone ID: uC-tsro9316116e12b1
cttacgcgtccgcccacgcgtccgcccacgcgtccgagctgtcctactgtcacatacacacacacacaagtgctagctagctaatcgatcagccagccatgtcggaggagaagcaccaccacctgttccaccacaaggagggcgaggacttccagcccgccgctgacggcggcgtcgacacgtacgggtactcgaccgagacggtggtgaccgccaccggcaacgacggcgagtacgagcggatcaccaaggaggagaagcaccacaagcacaaggagcacctcggcgagatgggcgcagccgcggccggagccttcgccctctacgagaagcacgaggcgaagaaggacccggagcacgcgcacaagcacaagatcgaggaggaggtggctgccgccgcagccgtcggcgccggcggcttcgtcttccacgagcaccacgagaagaagcaggaccacaaggaggccaaggaggccagcggcgagaagaagcaccaccacttcggctaggtcgccgtcgacg

SEQ ID NO: 6542 - DNA, 550 bp, Triticum aestivum
  unsure (1)..(550): unsure at all n locations
  Clone ID: uC-tsro9316116f04b1
cggactcgtgggcgggaggaggagagcggcggcgaagatggtgtcgctgaagctgcagaagcgcctggcctcgagcgtcctcaagtgcggcaagggcaaggtctggctcgaccccaatgaggtcaacgagatctccatggccaactcccggcagaacatccggaagctggtgaaggatggtttcatcatcaggaagcctcagaagatccactccaggtctcgtgcaaggagggcacatgaggctaagcagaagggccgtcactctggatatggtaagcgtaggggtaccagggaggctaggctccccaccaagatcctgtggatgcggaggatgcgcgtcctcaggcgccttctgcgcaagtaccgtgaggccaagaagatcgacaagcacatgtaccatgacatgtacctgaaggtcaagggtaacatgttcaagaacaagagggtcctcatggagagtatccacangtccaaggctgagaaggcaagagagaagaccctctctgaccagttcgaggccaagcgcgccaagagcaaggcatgcagggag

SEQ ID NO: 6543 - DNA, 504 bp, Triticum aestivum
  Clone ID: uC-tsro9316116f06b1
cgtttttcctggtttctagtacctcgtagctaagcttccatatgggatcgagagtctttctcgccgcggccgtggtggccgtggccgtggcggcggcgggggcggacgtggcggcggacgtggcggcggaccgggcggagtgctcggacaagctggtggcgctggcgacgtgcctgacgttcgtacaggggcaggggcaggcgccgacgccggactgctgcggggggctgaagacggtgctgcagaccagccccaagtgcctgtgcgtgctcgtcaaggaccgcgacgaccccggtctggacttgaagctcaacgtcaccagggcgctcggcctccccgccgcctgcggcgcgcccgccaacatctccgactgcccaaggctactgaacctgccgcccaattccaaggacgcggaggtcttcgagcagtttgccaagcagcaggcagcccagagcagcccaagtggcgcgtcgagtgcgccgagcacgggcgcacagaaaaacg

SEQ ID NO: 6544 - DNA, 474 bp, Triticum aestivum
  unsure (1)..(474): unsure at all n locations
  Clone ID: uC-tsro9316116f10b1
cgttttggtgatgggggtggctatcgcggtggtggtggtggcggttaccgtggtggcgggaggggtggaggtggtggcaggcatgacaggtacgatgatggaccgaggcgcaggtacggtggcagcccaccgcggcgcggaaggagccctccagcaagggagaacagcgaggagcgcagggccaagattgagcagtggaaccgtgagcgggatgagaagaagtgatgaaccgcgggtagttttactgcaagcattatttaccttttcattcatgtgtcgttagtttgctcctatgttggtttgctgtcagacattagtgtgtgggtcgatatagtactattgcttggttgagtggcctgtcaagtgcaggattctattagaggcgtacaagctgctatttgtgctcaatattattgccggacctgttcttgtattatctgaaaagtttaccgtgttctgctaaaaaaaaanaaa

(The sequence listing continues in the following parts.)

1. A substantially purified nucleic acid molecule comprising a nucleotide sequence having between 90% and 100% sequence identity with a sequence selected from the group consisting of SEQ ID NOs: 7, 9, 11, 12, 13, 14, 15, 16, 17, 18 and the complements thereof.

2. The substantially purified nucleic acid molecule of claim 1, wherein said nucleic acid molecule encodes a wheat protein or fragment of a wheat protein.

3. The substantially purified nucleic acid molecule of claim 1, wherein said nucleotide sequence is selected from the group consisting of SEQ ID NOs: 7, 9, 11, 12, 13, 14, 15, 16, 17 and 18.

4. The substantially purified nucleic acid molecule of claim 1, wherein said nucleotide sequence has between 95% and 100% sequence identity with a sequence selected from the group consisting of SEQ ID NOs: 7, 9, 11, 12, 13, 14, 15, 16, 17, 18 and the complements thereof.

5. A substantially purified nucleic acid molecule consisting of a nucleotide sequence selected from the group consisting of SEQ ID NOs: 7, 9, 11, 12, 13, 14, 15, 16, 17, 18 and the complements thereof.

6. A substantially purified nucleic acid molecule comprising a fragment from about 50 to about 100 nucleotide residues, wherein said fragment exhibits complete complementarity to a sequence selected from the group consisting of SEQ ID NOs: 7, 9, 11, 12, 13, 14, 15, 16, 17, 18 and the complements thereof.

7. The substantially purified nucleic acid molecule of claim 6, where said nucleic acid molecule consists of said fragment.

8. The substantially purified nucleic acid molecule of claim 6, wherein said substantially purified nucleic acid molecule further comprises a region having a single nucleotide polymorphism.
